United States Patent Application Publication US 2014/0057251 A1 - sequence listing, part 138

SEQ ID NO: 258328 - DNA, 752 bp, Cannabis indica
caacactacatgaatcacgtgtttattaagtctgaatcttctgaaagcctcgccacccaaatcaaatcttaacaattgttaagataagatttgatttacaattgtggatacctcaaattttcacttgacccctccacctcaaatctattaacaattaattgtagggtaaatattattttggactttgtgtttctgatttgttaaatacaaaatagattctgtattttttgaaatagtaaaaataggatcctgagttcaatttttgataatttattttttaataaaaacaacttgaagacaatttataacacaaacagatacagaaaatgtaatcagttttaccaaaatatctctagatcggattattattaaattttattttgataaaaaatcagttcagagtcctatttgtaccattttgaaaaatacaaggccaattttgtcatttaataaaatagagagtccaattgataatttttgcaaaacacaagatccaaaataatatttactcttaattgtaaatataagatttgattttacaactgtggatacccttggcttgtgcttccaattgtttaatttttagaaaaatcaaatcttatctacaattatttaattagtagtacctgccacctcaattgttaaattgtgaatataaaattatcctatataaggctgttgatcagattcaattcgcacttttttgataaaacaacattcaattctcagtaagtgtggattttatattttgg

SEQ ID NO: 258329 - DNA, 540 bp, Cannabis indica
cccaagattgtttcattttattcctgctataagggtcatgcatacttttctcgagctttgcccgagtctccaacaagatgtggacccccagtaatgacatgtaaatgcccatatactggtggatggatcaactggttctgattatagtgtgcttgggcagctcttttgttctagtcagccttgacatacttctgtaaatgcgggttattctttctgatcaaaaactcaagttctcgctacaaactataacatttgtttgtgtcgtggtcgtagtttgcatgaaaacagtagaacttggatgtaagtcttttaattacatcatttttcatgggatatggtttctcgtacgacaccgtagactgagttgtcgtgcagattgtctctaggtcgtctatcgacactaataagatagtaaattttgaggaaggtggttgaaataaagtgaaaaaatttaactggagatttgtccacttaagtgtacggccaagtgtgattttttgccgaatattttattcatttttaaaccatataattcaaccc

SEQ ID NO: 258330 - DNA, 961 bp, Cannabis indica
tactagtaaattattattcacgttgtttagttttttattgatatagtttaaattaatttaaaataaaaatataaattatgacttggaacaaaacaagaatacgtgctctattgtacttgtatttttaagtggacgaacttatttataagtaaattttaaaaatataacttaagtattataaccgtacaaaaattaaatttaagtatttgtctagaaataaaaattaaatttaaatatttatgtttataaattactggagataaaaaagttatttaactatttaacaaaagatatatatatttcaaaagaaaaaaaaaagattatactaaatggtacgtacgaacttcatctttgtaaattattaaaattatgtggtatattaaatgagaatgattttggaagtggggaactttgggtcacgcaagcgaaatttgtgtgataagtgagttggaaggcaagcaagttaattattgattggatcatcccatacgctacactatactcaacatctcatccttccctttatttatgcacgctatacctattattattattattattattattattattattattattattatttttgaataagcgattcttatatttttaagactagattttgatttttctttacttttctaaaaagtagaagaaaatgtaaaggatgactagtgtaataatattatacgggatcatactatttattgactgagattttcggcaaccaattaaatgatatatgaggagagctatggaataattaatgcaggcggttttcacgtagttcgggcattaatgaaccgtagtctacgagtctttgttatttatgagaattctaatacagataatgttcttggtgaatctctctctctctctctctctctctctctctcttctttactctcttcgattcattcatcaatcccctttttcgttccgtttcgggggtatttat

SEQ ID NO: 258331 - DNA, 486 bp, Cannabis indica
taattagttacaatttttttactaattagtcacaagttttgttgttgaaagtataattttttgtagtgtatttttcttagacgaaatctaatgttactttttcaagctaaagattctaaaatagtttggaattttttaataaattttaaataatcgattatgacaaattaaaatttacatgttattctatgcacataattctcctatatatctatatttaggggcttatatatattaggggtattatcaaactactcacaccacacaaattgcatcacaccgcataaaaaatgcaatttgaaatcctttgtggtgcagttgtagtttgtatttttgtcaaactgcgcggtgcgctgcgtatagttttgaatttaataattacggttcgaaccgcaccgcactatatattataaagttacgaatttttacaatatgatatttttcttcatataagaataaatatatgtgtatattacattatttttt

SEQ ID NO: 258332 - DNA, 826 bp, Cannabis indica
aattcttcttgtctcccttactctgattactgaaggatggtgacttggaaataacttagcgatatccaaatatctattctagagttcccgaagtcaacttaggcatagggcttgggaccctttcccaagtcgattgctatggattgagtaacttaacttcgtgaatgttttccttcgtgccacgtatcaaatattgatgtccacgtctccggatcagtttccaggttaaccattttcttactttttgctaagcaaagtgtattttttataattttaaaactttataagcgtattatagtaaataaaaattttagaccgtaaaattgtaaataaaacataaaaaaaagtatttttgaaaattttttttgtaaaaattattaaaaataattttggatgattttcgaaatctataaatttgtaaatcacagaaaaataatggggttttgaaatctccaccaattttttttaaattattttattatttattattttaaaattgtaaaatttgattatttaaaataatatgttatggtggacaaattattttattatccatatattatattaagtgtaattaattaatttttttttaaattaattgaaattttgtaatgattatattatcaccaaatttcatatgttaaaaaactcaaagagagattcctaatcatcactcgtgggtgtactgatgcactataaactttccactttgaaggataccaagatggattactcagctagattaggagcaagttcttattgaacttgtcttgaaccacgataaaacactgtgttttgttctttcatctttatattctgctttata

SEQ ID NO: 258333 - DNA, 1010 bp, Cannabis indica
gatccacttgcatcacctactaaccctttctcaacaactaaagtagaacctttttttgtgtaatccaaattacaaaaatagcactgaaggacatgactatttttaataaattgactaatcttctcaaccaaaactttatcactatcaacacactccaatgtttcattatcccacttaaaataaaagctcatttcaacaagatttgtgtgaccaatatccctagctaccccatgtagctcaaacatacacatggtataaatatgacaatgatgaacataatcaatcttcccaccaaagtaagtaggtatattaccatgtctttgtaaatgtcctttgtgatgaatcttgagagtaaacgatcctgatgttggctctacacaaaacaataaagagacttcactttctaattaaataagatatcacaaatcatacatagaagtgtgttaataaaacagaatatatgtcacatttgtgtgtgaaattcattgactatatttatgagaagaaagactttgtccatacatctgaatttaattattttatcaattaaattgtaataaataaaattaaattgtattatctattagggaaactcacacttatacaaatgtggcaccacatgtagtttttaacattatggaaactttgtccatatatttcactacaaaaatgttaacttaaccaacaaaatcatgccataatagtacttcaacaccctaccttctttttttttacttttgccataaatacaaacaaagatcataaaaaataaacatatccccttattgtgctaaaatgtttttgtgaaagtattattcaaaatgttagtgaacctaaaaggaggttataagtgactcagaccaacgaattatttctactttttatggttaaaaattaaagcctattattttcaggcaatatgtcaattatggagtatatgatctttgcattgcatcaactttggcttatagagtttgttttattcaaataataatataaaataaaaaagt

SEQ ID NO: 258334 - DNA, 623 bp, Cannabis indica
tattttattttttataattttatttaattttaaaatgaattttaaaataaaaatattaggtgaaccaatataaacgtgacacgtgtacaatgcagttcatgatggtaattcactagataacaccttaaatttactaagagttcaatagtttaaaagattttaccgccaaaatttaagtttaaaaaattaagtgcaagtgaaacaataagtaggagagtttagccctcaaaactctattttaaaagaacaaaaagatagtacatgaaattgtggcaacaaaagggcctttctaaaggccaggcccaccagagatccaaaacttctggttgaaagtgttgttagagaacagaagcaggagacttgtggtcagtcgagtcgagtccgagaatatcataaaacctttctttcattcattcactcacatttttcattacacaaatttctgaacctcaatcaaaaaccatcactgtgattccttcttttgcgggacccaatttcaaccaactacattttccatggtttcctcttgcttatattgactcactcattctcaaactcaatcattcttcacttcttccaccttaataattttagtgtttcctcaattgggttttcttgtctct

SEQ ID NO: 258335 - DNA, 590 bp, Cannabis indica
aacaaaatctgccaagatttacaaaatgcttcaagttatttttatttttaccatgggcacgatataattggtacactagaggtgcgttcttttcggccctcttatattagagaaagattctctcaatgctctaacgcccatatcgaatatgaaccgaactgtttcacgacattctaaatccagctcatgtaacgttttaatgggtgaacagtccaacccttagaatactacaactccaagtagcaaagagccgacattgaggtgccaaacctttccgtcgatgtgagctcttgggaaagatcagcctgttattcttagaataacttttattcattgaacgacgacccttttactaatttaaaattttattatcttcggttaaatatatattttaatttagaatttttctaaaacaaaatatgaaccaaccgactaatttattttcattttgagtttccaatgataataaaatctacctattttttaataaatttagggttcttagcactattaccccttgagttaattatgaatttctaatttggtccattttgtttttctggcaattacatccttatgcttgtgaaata

SEQ ID NO: 258336 - DNA, 770 bp, Cannabis indica
aaatataaggtcataaattaatttttttataaaaatatttttagtaaattgaccttatttagattaaaattactataatcatggtattttaaaagggaaaataggatatttttgttaacttttaaattttgttatttttacttaaattgtaaaatcagaaaagggtatgtatttaccattttctattttattgaatatttaattattaaataacatggaatttaaaaggaaagttagcaaactgacattttatatcttaaaatgccactattactaatatttagtgacattttatattttagtgacatttgtataaaatgtaagctataccaatgtgactaaaaatacaagtgtcactaattaattttttagtggcatcttaaaatgtcacctaaatataaattgtggcaatttaaaatgtcactataatatttactatatatttgtttaatgtttaaaaaaataatttagtgacactttgaaaatgccaaaacttatactagtgacattttcctaaaaggccactaaaatttatttctataatttattatttaattttaattaaaaataaatttaatttaattttctttatatgaaaatcaattatttaataattttttaattattatatatatttatatggcttatttaatttaattaaatatatatttttttatatatagcaattgtgactcgtgttgaatagaaatataaaaataaattaatagaaccattaatcaaattttgttgattttttttaattggaagga

SEQ ID NO: 258337 - DNA, 526 bp, Cannabis indica
aagtgggatttttccaatgcaaaatggattggaaaatgtggtttgcaaagtgggaatgacgtgaattggatcctattatctaaaagttaatatattaaattatatagaatttgatatttgtgtcgatgacgatatgacaatttaaaaggtattgagataagtaagaatttaaaatttaccccatatttgatataatttttcaaggaataatgtggtaagtcttccaaaattttagtgagtatatttttttctaaatttattagagttaatcacatattgctaatgtgtaaaaataaattgtcatagaatagactacttctctcattaccaattaattttgagatgaacttcaattactttatcctaaattctaaaaaaatttatattatttacactttttccatcaatgatttaatcaattatgacttataggattaatagagggattattttattaatatttatgtaatttttaataatttctttatgtaattttttttttcagaatgaggtaacataatttaaa

SEQ ID NO: 258338 - DNA, 926 bp, Cannabis indica
acactagtttttgagttggttttgagttagggttttgcttttctgctgctgtaggaatcaaactgagtttggggtgtgtttagggtaggtttttgagtatgttaggagtggttttaagtggtctctatggctgtttgaattgagtttggtttgctgaagccaaagttgaattttttcacttgaacatgtgattttgagttagggattgaatttttgtgttttgaagcttgagatatgttatatttatgttattacactattctgtaaagcttgggaacaatttgttaggtttggagcaagttttggggctttgaagagctgaaatttttgagtttgtgctgttgtgaaccgaaattccggatggaacagggctgcaccaaccggaattccggatggtcaattttcaagaattcctgattttcgtattttagccataacttttcactcgggtttccgttttagacattctttataccgttttgaagcttatgaagagctctacagtatcagacatagattagagcaaaaatatgtattttcttttacagtgttttcaccataagattcagtagaaaaccctatgttattttatacaggttttagatagtgttttggaataaacccttactgatttacttttgtcgtgacataggacccgacattatcgagcatcgttccactgaggtcggcccgcacacttgagttctgaattgaggtaagaaaagtggtaagcaccatgtgtggctaaatatcaatggttgaatagttatggccttgattattatcaagactttgattagatatttgttgagcctaggttattgttggaaattattttaccaggatctagatttactaacaagtatgtttgtttaacatcctaatatgaattctaaaacaatgaaaataatatgactccttccatt

SEQ ID NO: 258339 - DNA, 964 bp, Cannabis indica
tttttaaaaaaaaaaactattagcggcggggtccgccgctaatacattcaaacctaacgggcgggaattttcccgcccactcattagcggcggggtattagcggcggaccccgccgctaatactattagcggcgggcaatagcggcggagaccccgccgctattaatttttttttttaaaaattaaatcagcccaacaatagcggccacagagggcctccgccgctaatacccccattattagcggcggaggagctccgccgctaatacccccgccgctaatgaggggatttcttgtagtgtaaattgatgttcaataattagtttgttgtgtatttaactttgtgttttgcactgttattgtatatagtcttttgtaaactttttataacatggatctctggaaacacatttttattgctgttaagatgtctatttttaatgttttattttagtcaaatttttagtattatcacgatttttaataattagctaatctattaatattaaactagttttataaattacacgtgtcgttcctataaaataggacattacaattattgactgttatttgttagttagtagttaacttcggttcttacttgtcttggttttggttagagttagttaattgttactttcaattaaaacttcatttttgtataaatataaattataacaaatacttaatcaataatagattatttctctcttttttctcttttcttctcttctttcttttttctcgttctttcttctttctcttacaatgtcaagaagatcaaaccaatccaacacaattagccaaaatcagatcccgacattcctcttcttctgtccaagcttcctcaaaatgaaacctctgcttaattaaccaataaacaatattttcgaaaggctacacatatttcaccaaaagaaaaatgagcaaaatcaacctaataaccaaagttatagcccta

SEQ ID NO: 258340 - DNA, 500 bp, Cannabis indica
gtaggatttattatttagttattggactgttaatttctatttggcactaccgttatttcagctggtagttggtagctataacaactttctgttgttatctgctactggtttttacgcctatataaggctttcttgtatctctgttcattaatcaataaatctttcctttgctttcttcatttccgcaacagtccatttggtattcaaacaatgatacttgaaatcaacaatgtaagctcatatatcaaccccaaagctaaaataaacacatataccatcaaatcaaaacaaagagacatacaaaattctcgattcttcgcaaaacacatatagtttacaaacctaacagatgtgtagccttaaatttccctaattcacaagaaatgaaacctaaactgcaaaattcataaattgaaaagcacgagcatgtatacataattcaaataaatagactcaagaagaaattgagagattacccacgaatcgcttttcgaagaaaa

SEQ ID NO: 258341 - DNA, 609 bp, Cannabis indica
aaaaaggaaaaaaaataacaaaaaacaagagaacccagatcagaatatgaaagagcaaagctcaatgcttcaagagaaaaatcgaatcagatcacggataccctttactcattggactataaagagcaaaaccaatctcagatttcatggaattatgaagcacaaaaaaaaacgatctgatgcagagagaaaatgaaaaagaaaaaagagtagttatagtaaaatatgtcacttaacttcttttctcattcaccactactgctacaagtactagtattactactactactacaagtagtacctctttgtttatctcttagctcaaatttggtgcagaaaacaatatgtaaagaagaaaaaaacttactgttgtacctttgtttagtaattatgaagtggagatgaacgaagcaaaaaaaaaaaagaagagagaattaaaagtgagtgagcaagcgtttgtttctctcttctttttttttctttttctctctctttcactactttctctctttcaggacttgactatatttggaggagaaatccatgcatggaagcaaaagataaaaagagagagagagagagagagagagagagagagagagagagaga

SEQ ID NO: 258342 - DNA, 637 bp, Cannabis indica
ctcaaatttcagtttcaatgcttaatggatttttatttttttaaataaaatcattatctttattaattgcaatccatagagattacataattagttactaaataagatgcctaaaaagtgagcaatactatttgcaaaatatctaataaaattgacataaacatttctcaaatcatttatcatcttacaatcacaaataacacttccaaagtatgaaaccataagaagagaactacgtaacgcttgcaccactgtaagactatcagtttcaatgacaacctccttccaatcatttgccttaatccaactcaacgcctccttaacacacaaggcttccaccatttcaggctgcagcactcctgaacgacagcagctaaacgcctctaccaacgcaccataggaagagaactacataatgcttgatggctattgaaatttaaagagactctgattttagttttaatttttagaattgtgtttgtaaattgggaataaaaaagatataattacataaagcactatttttttgtaaaaaaaaactaaataatatttttacgttttaaagaattttttttttaacatttttactagtttttattaaaaacaacatgaaaataacatctatacatcaaaacaa

SEQ ID NO: 258343 - DNA, 783 bp, Cannabis indica
ctatgaccaggggatcatggtgagggaacctcaccagccttgcgtcttctttcgtgaaagtaattggctgatccatgagtcgtggcctttgagctggaacctgagtgacttcccatacctcgtcatgtttaatggccccagaatagcgctttaattcttttcgagtggtccccccaatatggggcccaccagagatcatagcaactcttctgttgtttcttggtggcaggtcaggggtctgctgagggattggtcctcccgagggtacagttggggccaacgcttcgggcgcacttccaagtgtcccttggggcaatggaccccctgccggaaccgggttgagatggggcagccggttcttaatccactcatagaggtgacccaattcgatcaagttttcgatctcacatttcagatttttgcactcattggtgtgtccaatgtcgttgtggtattcgcatcttttgttgggatcccttcgctaactatctctgtacaaaggaggcggcctcttgtagtgcgtattttgcctcgtggcgaaatacacacgctcttatgtgtcggtcagctctgtgtactgggtatattggggagtataccctctttttttgcgcttttcctccgtccggtggcttcctttcgaggacctcttgctccggaagccttgagaaggtctggccaggctcgtagcaggagcggagtgagacgaaacttgtaagcttatccctgaggggttcccgtaatgcgaagatgcgggagccaaggcttggctctgattgtatc

SEQ ID NO: 258344 - DNA, 656 bp, Cannabis indica
tctaattttcacaatatcgctaagtgtcgctaaatcacaacatcactaaaacacattgctaaatatcgctaaatcgtaacatcagtaaaacacattgctaaatattgctaaatcacattcaaatttttgcaatgattagctatgtttagcgacgtgctttgcattttttagtttcatatcgcaaatacatcactaaaatcattgctaaatattgttaaatacgcaaaatatcattaaacatcgctatttatcgttaaactccatccctaatctcagatttagtctattattataaatagactgccctatatcgcaaaaaattagaaaattaaaaaataaaaaatagcagaaaattcaaaatttaatttttggtacaaaaaatacaacgaaatacaaaaattaatgtgtaaatctattagagcaagaaaacaaaaaatagtgtgatggcgagtggtggtgagcagagcgcgatgataagtttaggtggtctttcatgggaaagagaatataaagaatgaaacgaagatgagaaagaatgtgaaaattgaaatgagaagagtatttatgagattaagtaaaataataatatattttgttataagtttaataagtgaattaatttgagttcatccttagcatgataacttatatttccc

SEQ ID NO: 258345 - DNA, 642 bp, Cannabis indica
tatcttgaatcaaagaaaggtccagatccagacttcttttacagccatgatgttgatgaaaaaaataggttaactaacttattttgggctgatggatcaatgaaagtggattatgaattatttggggattgtctatgttttgatgcaacctacaaaacaaacaggtattgtacatatataattttaacaacattacataagtatttttaaattattttagttttaattattaataactcgttccaaaagtgaaaattttgtttttatgtggtaacagatatggaaaaccattagtaattctacttgggtacaataaccacaacagaacatgtgtatttggattctgtcttcttcaaaatgagaaatgggaaaattataaatggcttcttaagacattcttagagtgtatggagggtaagatgccaaaaacagtgttgaccgatggttgtctctctatgaaaaaagcactgaataaggtgatgcctgaaacagttcatcgaatatgctcatggcatttactaaaaaatgcaatttttcatatacataaaactggattcaccaaagaatttaagaaattgatcttcaggtataatatattttaaattttttttattaattatttagctatgttatatttaaagt

SEQ ID NO: 258346 - DNA, 1227 bp, Cannabis indica
acaagtaattagataatataattctattattattatattttagaattgattttttcaattagtagtttcatatttaattatttaatagtatctttttattaattaatatggtaatttaaaaataaaattagtcgcacaaagaacgactatgttgtatctagtttaaaaagtttggaaattttcgtaatgtaaaatgttatttgtaaacaaaaaaaatgcagatatttagttaaataagttaaaaaataaatactaaataaagtgaaaaattgaaggagaaatgataataataataataataataataataataataataataataataataataataataataataataatatcaattgtgtttgataatttcacattggtaatgtgtagaaagtaggcctgcacaggggttgggttggacggtttttgggcggtttggcggtttttttatttggcggtttttaaaaatcacaacccatacctgcccaataaaagtttgggttgggcggttttttagagggcggttttatgcggtttttttgggcggtttgggttgcttaaaaatcaaaacttccaaagtatattgccacaagtatagaccccactttttgcttaaacaacatatgtaaatttactcagcaaaaaaatatctccctcccttcccccataccaatacaacctgtggtatactatattatcaccaaaattgaagctttggtttggtttacagtcacaagttaaagccaccatctaaataactataaggcagttatttactttcacacatagtgcgacaattagttttaggtttttttttttttggtttttgttttaggcagccttaggaataaatttttaaaatatatatatataataataaataacgggtacgggttggacccgctccttttaggcgaacccatacccgcccgccaatcaacgggttaaaactcaacccaacccaatttttgcggttttttaatgggcggtttccatgcgggcggattctaatgggttaggcggttcccacggtttagcggtttttatgttccggcctagtagaaagataatataatatataaggtgaatggactactcctactattgccaattggttttgagatgaaatctcatgcacctaccatacactcacctattctacaaccttaacattacacttctgttttctaacatggtatgagagcaaaaataaaaaaaaataaaaaa

SEQ ID NO: 258347 - DNA, 751 bp, Cannabis indica
tattttccatgttaaaattcatagaaaatatgaacatcatagtattctttgaactttttcacaaaaccctctttttacatatttgatttttcctaatgttgtgaaatttggcttgaaatttttggaatctatgaatgaaactttgcaatgtaggctatgggttatcttaatccactctttattttagaaatgagtgagatttatgcatttggtatgatttgagtgaactttttggaaaaaatgaagaacatgatgatgataatgatgaacatttgaaatttctagttttgatccaaaagacatttaaaatggagggaaaaatgtgtttgtggttatttaggctttagaggataaagacaaaaaagtagaataggttggaatatgtaggaattgatgagtgtggatgtgtagagaccatctccacgcctattgatgcatatatatacattttttttttaaaaaaaataaataataataccaattgggtctcctcttgtgccaattggctccactttcccttgttggagctcatggagccattcaatggctccactttccttttttcagcctccactttcctttgttggagctcatggagccattcaattggctccactttctcttttttttttttcagctccattttaggagcctatggagctcatggagccattcaatcggttccacccctttttttttccagctccactttcctttgctggagctcatggagccattcaatcggctccac

SEQ ID NO: 258348 - DNA, 1051 bp, Cannabis indica
taaaataatttccaacagatttctctcctattttctctcttgaattccttgaatcaaattcatcgaccctttttcagtctgtttgtggggtatttatagtgtttttctgggagaaatccctagaaatagatcgtttgtctttctgtgttagcttcttaggggcacatattcctagcagatacaaaataggaaatacatgacctataccgtaggtatcttaggagttaggtggatataatcttttatccccttttgactgatgtgattcctcataaagtagtcgtcactagacttatcgattattgtgcaatcgccgtaaaaaggggcttacgccatctgtcatatcgtttatggaggttttaatacgtcttcccccatgcggcattaaatgcgaagtgattgtacgagtaatctctttacctcctggaattgccttagcatggctctagcctcccggagcataaagatgggccttatgctctcttctgggaggcaccttccctgaggtgttctttttgtcgaagacttagttgattttcgtgagtgatagttctttcagatccacatgtcacccttatccaagtccacgtattttgggaataaacaaaggcaacatttacccccaagcctcatttagtgaagggtaagtgaggtttgcttaatgcctccggttagcttgttggtataacggcacgtgccttaagctcgtgggctgcatttatgatggccatcattaatatatttctttttgcaagcaacgattcgcttcccatctattgagaaaccgatgcatttaatccgagtgtcagaaaatactcaaacgttttcaactgccctagcacccatttatcttagccgttggacgtacttagtttataacttttacacatataggtgattaagatattttttcaaatttaaaatcttaattattttgttaatgtttaaatgaaatttataagcgtgaatttaaaaatataaattgaaaacaattcaaatatttattaaaaatatcatttcaaatttaaagatatatataaattaaaaataa

SEQ ID NO: 258349 - DNA, 858 bp, Cannabis indica
gcagatcacaatctgactgaaccactataattctctgtcttactgatattttccagttttgttgattgttctcccattcccagtcgagtactcgccgttctaggttgaatactcgcacttgtcgtttctcttaaaattctctttcgtattagtaaaataatataatttggtgttgcgaaattcactcgacaacatctttgttgcacatgtgccatgtaactaagcccattattaattgttcgaaatatgagtgtaacaattgtatgctaaatggtacttttaaatttttaagggaatttttaattattatctagataattgaatcgtcctttgtatggagttggcggcgcggctaccaataacctcactgtggcagtagtagaaagttgaatttgaggctttctgtagccctctcgcctttgccataagttttgctccccacagtcacgaatattagtcgcgaccaaagtattcttgcttcccttttttagtaaaacatgcataactttcacatgaaagctctaaacgagttgattcacgatgcgttggaaagatgaaaaagagatctaaaacttctatgttttgactttttccaaatctgatcaaaacaaaatcgaattcaggcttaaaatttaaactttattttcttgcaaaattttatttatttgatagatcaccgtttttcgaaatttaacaaatttatacattttaactgtcgatacctgaaattaaaaaattaagcgtaattctattcttaaaataataataaagaaaaaaataactatgaaagtaacttaaaacttagactaaaatagcctaacaaattcctcaaaattaaattcttactcgccctcgagt

SEQ ID NO: 258350 - DNA, 973 bp, Cannabis indica
agtaaaaaaattcgtgtgacagtatttttgtaaaagttaacccaaatttcagtatttttgtaagtttctcgttttttattttgaaaaaagaaaggacaaatttaaacacttctcctaactagtgtaactcttctatgctttattttttaaaatacaccattaaaattctattttttctatgtcactacacacttttataatacaccatacatcaaatttttttttaaaatatatcacaaaaatcttacttttttacaattttattataatttatttattttaaagatataatattaatatatacacatatcttatataaaaataattattaatactcaaaataattaataaaatataaggaaattacctcatatactattttttttaaaatatttttttttaaaaaaaatttatggtttgagtttctaaagtggttgtagcgctagttgcaataaggtttctatacgattttttgttgcaatttaggttgcagcgctagttacaataggagtttctaatgtagaaatttacgtaaaaataccaaaaaaaaaaaaactagttttaaaagtagtaaaaataaaaaaactacttaaaatatatttaaagtaataaatagtattttataaatatagaatataaatagtagtattttaaaaaaaattttaaaatgaaagaagagtttagaataagtatagtatttttagtgcagtttttgaaatttttcttttttattatttttaaagactgttatgagtgctctaatacatatttttgtacgattgtacctatgtaccgaaccctcccctctcttctaattcaatgccctctctcttaaaaatttatatcaaaacttttcatccaaaagaaaatatatatattattgaaaacaaaagaacaactatatataaacattcatagggtttaaaaaaataagacattatacataaatatatagactttgggccggggcaag

SEQ ID NO: 258351 - DNA, 624 bp, Cannabis indica
aaatgtcaacttgggcgttgggctagccccaagtgtcaacttgggactgagcccttattcaggcacccaagttgggttattttttccccaaaagtacctatttcctcgtttttaatgaagacgaagaagatgcacgagtcagatttttgatctgatgcttggaagtggcctaggttgatagattgtcaacttgggcactagggtgcccacggcaccggggtgtcctggccactgggtgtcttggcactgggtgtccgagcaccgggtgtccaggtccttaaaaatgaacgttctctgaatctgattctgatgcctcaaatatgttcttagtatgtctagttcatgtcccaatgcaaagtttgacctatttgcactaagaatgtgaactttaaaatttcaagaaaaatattcaaatgcttaaccttgggtcttagtaattcttgaaaaagcgtacaaatatttctacagggtaattgctcttttagaatgtgaaagaaggatccttaataagtgatatgaccttactaccctaaacagtgatatgatctcactatttataggagagatacaattacatctatgaaggcaatataggagataaattagagattttttttttttttt

SEQ ID NO: 258352 - DNA, 427 bp, Cannabis indica
aaggtacggttgtgatagatagatagttttgggaagcatatatatcgttttagtcgtgggagtatatataaatatgtaatgagcctgatcatgaaagtgcgaagcaatttttattttattttattttatttcttttttcagaagtgagaaagttttttttttttttttggaaaatcagaaaagtttattaagccctaaaccctcaccaacaacacttacaaaataatattacttacatagtttatgttaaagcttccacctactctctatctattttactcaagttctttgctttcaaagagttcactctagcataaaaactattagcaatacaattaaaagtgaccttaaccgtaaggaattttcactccaaacaaccttatttctagcattccaaatggaataacaccacaaaaaaaaaaaaaaa

SEQ ID NO: 258353 - DNA, 1060 bp, Cannabis indica
tttttttttaaaaaaatgatagtctctccaccattatataaataaatcagcatgttcagcccaaatacaaaaattaaagtaagttacgtgtagaagtgaccagtattgactccgtgcagtgtagtgttgggaatttcattatggcttctgatatttccttagaagaattaaagaacgaaaacattgatctcgtaagacatttatttgtgttatttctataatgtacaacttatggttcatcatgaatttcatgattttggtcgataatatgttataacatttatatggtttgtatattgttttgttgttacaatgatcaactttaatattttctagtatgaaaaaattaattgtttattgtaatctgtatttgtagaattagatggttcatcatgaatcatgaatttggtggataattttacttttttcctctctcttaactattaaaattattgtaaatatttcattcggttaaatttttttaacaatttggtgatgaatcactaatgtgactctagcgtaattcaatttgaaaagtatatatatatatatataaatatatatatatatatatagggtttagtgataaattttggctatatgggtttagtgaaaagtatatatatatatatatatatattataatttgattaagtttgtaaaacgcatatttaatgtattaattttgtgactataggaacgacttcctattgaggaagtgtttgaggtgctcaaatcaacaagagaaggtttgagcagtgatgatgcagagaggagggtctcaatatttgggccaaacaagttggaagagaagaaagaaagtaaattgcttaagttcttgggatttatgtggaatcctctctcatgggttatggaatctgctgctatcatggccattgttttggctaatggaggggtaatacttagaattttttatgtatctttctctttcactttctcaaatacataactaagattattctttaaccatgcacagggcaaaccaccagattggcaagactttcttggtatagttattttgcttatcatcaactcaaca

SEQ ID NO: 258354 - DNA, 512 bp, Cannabis indica
ctctctctctctctctttcgattctctagggcagcagctggggttagtgtattgaagttgaaatcaaggaattttagtggtaattgagggctttgatcaaggtaaccctttcttctttctttcttcttgagttttgtagcttaggttaggttttgatgtgaattttgtgattcttgatggctgtgtgtattggattgatatgttgtttaattctggagttggaagttattatctttgttattttgagctgagattaatgttagtgttgagttttattcaatttcaagttagagaacctaagttaggtctctaatggtgattttgttctatgattgttttgttgagttctgctggttgggttgagtttatttgggtatatacaggtgtattggagagtttcacaaggtttgggattgaattgaggtgtgggggtcggatttttggttcccagttcagaactggaattccggttcctaggagcctgtggcaaccggtcgaccggttggtcccag

SEQ ID NO: 258355 - DNA, 586 bp, Cannabis indica
caatagagtaaatgtggtactcatttgtctactctatggatgagtacatgtgaaatttgagggttaaaacaggttttttaatggagcttaagcttaagaaaactcacttaagcttaagaagtgtctaagagttgtgagacactaaaactccacttatatagactagagatggtaccgcctcttataagaattgagagttattttctagagagtccatcaattggaattttgcacatggtcattaacgggtgcaagagtgagacatgcggtctcaagtaaatattaataagggtgtgtgttatcattggtttatactaaagaaattacgaaacttaaaattttatcaaattttgtggtaactaaactaaggtaaaattcaagtcgaaagatattttatctaatgcatataagcaatacttcttaaaagtatgtatttattcaatcaaagtgggataatattatattttgatatgatgtttatttgattaaataaatgttataactgtggcacacattttaatttagtggtggattggtatattatttgataatataataagtatagattaaaatgtaataaatatat

SEQ ID NO: 258356 - DNA, 607 bp, Cannabis indica
ggtccaaaaatggtattaacccactaaaaaatgttaagtctagtcaaaatcaatgaatcataataattagtgacattgtagtaaataaaaaggaagcatctattctgggctaaatttggcacaaataatgctatattttgcgtcaaatttggcacaacttttagtatgtgtcaaatttagtacacgtttagaacaccattggagtagtagtttcaattgtgctaaaatatagtaatacaccacttttttgacactccattggagatgctcttaaagtagtagtttttctcgattgtgctaaagcctaaaatatagcaatacaccacctttttgacactccattagtaaaaaatatgctttaataatatgacaaaaagtgatgcaaatttaacacaatatttatagaaatttttacatgaaaaatccattttacacaatttattacaaatttactcacacacgcttatgactacatttttacttacaaagttgtttttattacacaaataccacttagtcatcattccatccatcaccaatcaaatcctactctcttccctctcttttttattttctatcaatcaatccatcatttcactctcttttt

SEQ ID NO: 258357 - DNA, 805 bp, Cannabis indica
tgaaatttaaatgggatttatttatgtttgaaatgtcaattttacccttatgagggtgatcatgtgtgttttggcctaagagcactttggtcatttgacctttattttctgtgattgataaagatgaattttttggaaaaaaaaaatggattaatttctggtctttctctctctcttgccgaccctctctccctctcttttattctcttaaactctaattttttctaagtcttgatttggttgaaagtttgatttttgctacctttggagtgtggaaactcaagaaggatcttgcaatactttaggtagtttctttaactagtttaattgaggttttggctgggatttctttgaaagaaaatcatgagattgatatatgttctcgtgatatgcatgtgtttggattttagtgtttttatgatattatatttttgatcatgcttgaaggttattgtgggtgattttgggttctgatattattggaaattatgagttagaatgattccttagttatctttgcagctgtgaaattggtgtaaagattattcttgaattctagctcttgtatatgtgttcatggaggaattttgctcaaagtgttgagcttgtgtttatgttgcttaatttgaatttttgatgtgtttaattggtgaatttaatgcttgagttgtgaatttttgctccctaatattttgctagcaaccctatttgatggtttggaggtttggttgtaatttgggatgatttggtgttgattggaggctaaaaatttgaattctgctgctggttttctgggttttgaacc

SEQ ID NO: 258358 - DNA, 1168 bp, Cannabis indica
tcttttgtagatgaaccctggtgagttttgggggaggcgaacaccgaattgaccaggacttgcttcaacttctgtacgaggatcagcctagtcttcacgccagcccgtcctcttcgagtgacgaactttctaactcgagctttgaagattgggaggtgagtagtgatcgttcttctaccccaaacccgtagtgcagcaccattattactctgagcagatcgctggagaggggtacaaccgcttcatttgggaagtgaaaaaaggttggaggcgctatcttccgtccaactgcacatacatcgttcgaccaggtgttgttgatactcttcctgttggtcgtctaagttagggtaactttggcatccaaattgatctccctactgttacggttgcacgccatacacataaatatccgtccaggaggaggatgatggcccccacaaagccgacaatgcggaaggtcaacgcatctgatcctcatgtggcctagctggccacattgccaagtcccgaacaagatctccctaccatggaggagggagatcatgagggggacattgaagtccaagagattgaggagcaggacgacgtccgtcctgccagcccttccgaggctgaggaggaaggagtggctgggcctccaaactttggagggtataatgaggtcaagaagtcggtgtctgcggagggtgaagtcttggtcgaaggggagggttatgtcacagaggagcttattgaaacagttcctcacaagaggcaaggtgccttaggtgccagatgggttagccctccgtccaaaataagtgagacacgcatgaaggccttggataaggctggatatttgggcagactagagtgttacattccttccccgaatcaccgggcaacgaacctgtagaaagggatgtgtgcttggtcgggtgctcacactatgcaaggggcaatggtgcctttgcacccgtacttcaagagggtgccagactatttctgcctttgtccgacccagttcactcccaagggcattaagtagctgtctgctctctttgtcccctacgacaatcaaggatggggtgtgtcgtctccacacgaggtcatggttctttgacttgaagtctacccccaagcaaagcaagtcagggtacttctacttctctcagccagacttcaa

SEQ ID NO: 258359 - DNA, 618 bp, Cannabis indica
gcgcacgtggtctaatactcccacacgactcattgtttccattgggctctttgaaatttaagttgttaattggagctggcccagaagtagagagagccggcccaatattgtctccttgaagcccatgtccatcacccacagcatcatctaaatccaacggatagtcaacgttttttaaattacatttaggagccttcagtaataccttttcctcttcatctcctccaaggccacacttattacccagaatggcaagacgattgacagctccatgtttgggaacccacgccacctgtttagccagcttacccttatcagacctccgatcagtcactatccaaggccgtttcgagactcgcaccgccctgctcaaccggttctggttctcccacgctcatccatggccggtatcgaagtgatcatgggcttttcaacacatccaggccgaggagagactggcagagaaggtgagaaagagttcgcacccgagaaaacatccaaatacgaagaagcggtggaaagccacggcccaaacatggggaaaggaatgccattatcattgaccaccgtgactagggttgagagtgaacagcccctagtactattatcatgtactat

SEQ ID NO: 258360 - DNA, 836 bp, Cannabis indica
ataaatcaaggatatgtattgcacaaacaaaatttacaatctaagagcaccccaaaaagaggcctcaatctatacagatttttttttttcactgctgtatgtttttttttctgctgtatgttttttcttttaaatgctttacaccagatttctacaccagaattttccctactgctgtatgaatttttcttttccaaaagctttacaacagaacactatgatgattatagagcacaaaaccattctctatctacacttgaaagtttctttggcaaaaaactttgaacccgagtcctaagactccatttcacctcttcaatcaaccgagtattgtcaatttgcaccccctgccacagcacagcgttcctcattttccaggcattatacaccattgctgcaatcgcagcactatagacagctttcttaaatcttgatacttttgccctaccaatccatttaactagatgctgaatgttgaaagtggcagcattccaattcagccaagacttgatctcaatcaagcattgattggtgatcctgcattcaaaaaacagatgttgtatagtttcattgcattcagtacacagattgcaagtctcttgaagcttgatacccattttcagtagtcggtccttggttttcagcttattcagcatcacaagccaaagtatcaaagaatgtttgggtgtattcaatcttgaccaaacttctttgctccaatgtaatttcgggtttggagagctgaacatcttgtaacctgccttgatagcatatttctccctgcaaaaatcagcaacaacattcaaggatgaaatctggtttttcagagctacaag

SEQ ID NO: 258361 - DNA, 652 bp, Cannabis indica
gatgttctccattgctgaagatggtaccattgctccatagtgggtcttttaagtttctcccttctatttacaagtgacaattgatttaaactttaagtctcttttatttaaagcatgaacatcgccattgtggcattgagtatgtatgcttaatgatccttttgatctgcggacatccttttagcgatttcccttttgaattttatgacgctttgatgcatgagcgttgcctttgcggtggtatgacttattattttaatttggtgttaatactcttcattttgtattttgttgatgttttatgttattcgcttgatataaatttaacattcatccatatactatatcccctagtctaagtcttagtgagtgtcactgaaacttagactttggagcggcttgactaagtacgtcgagtttggcttgagcgtaacattgttgaataaatgttatatttagttaggattgaatgtaattatgaggacttgatttatgatttaaaaagtcagaccaaacatagctcttactatttgatctatggttgaacatgacttttgtcctcgagtttataaatgaatagatgggttaagcgtagctcatatcacttatttcataagtgagtagttgggttaagcgtagctcatatgactta

SEQ ID NO: 258362 - DNA, 907 bp, Cannabis indica
ccaactacatcagtccttcaagcttaaagatcttggaaatgttcactattttttgggtgttgagattttcacggacacaactgggatgtacctttctcaaaccaaatatataactgatcttcttgtaaagctaaagatggaaggagcaaagccatgttcgaatcccacaagtgccagtaccaagttgtccttaattgaaggagaaccatttgttgacaaaactctatacagaagtacacttggtgcccttcaatatcttactctcacaagacctgatgttgcatacattatcaacaagctaagtcaattcattcatgctcccactacaattcactgggaagcatgtaaaagacttatgcgatatctcaagggaaccattactcacggcttacacatctcaccagcttcttctttaacaattcaggggtactctgatgcggattgggcatcatgtattgatgataggaaaagcactggtggttatgtaatgttctttggaggaaatctagtgtcatggtctgctaaaaagcaaaatgtggtggcccagttcaagctctgaaagtgagtttagagctctagcaaatgcagcagcagagattaagtggctggtttctctactatctgaacttcatgtctcacaaactcactgcccaatattatgggtagacaatcaaagtgctactgctattgcagcgaatgcagtatttcatgctaggtcaaagcacatagagatcgacctacactttgttcgtgatctcattcttgccaaagaattatctgttagatatgtgcctgccgtggaccaaatagctgatgctttgactaagtctctttcaacagacagattcaatagatgtctcctacaccttttcgtttgaggggggatgttaacaaactacttagtgat

SEQ ID NO: 258363 - DNA, 1002 bp, Cannabis indica
tatgatatatattatgtgtatatgatatacatattgtgtatatgcatattcatatatttgtatgttatatatatataggatatgtaacatatatatatttaattgtaaaattaataatattttgtgtatgttatttatgatagcatggtagcatatatgcaatattaattaacataaaattatttgagagttataattttatgagagttataattttatgggagttatatattaattttgtgtattaatatatgtatataaattatcagattaatatatgtactatatggtatgataatggagatgatgataagaaaaatgtgttcattctatcattatcattattattatgagactatattgtgattaaagataattatttggaaatgaagttccattatggtgataatcatctcattttatgagataagaaaagtgaactatgtgagttacacttttctgttttttttttcttgtcatagcaagagcaaagtgatcaaagttgatctaaattgtgaaatgaggtcataaaattggaaggacaattttagactcaaagaaagtagatcattgtggattcaaataatgagataaaagattacaaaattggagaagcaattatgaatcttaaaaagtaaagtggtgaaacaaaattgatgagaagtaattttattaactttgggctaatctcagtgaggagataaccataaaattgaagaagaaattttattattatgagaattttgtattatctattaacaaattttaattataattttgttaataaaggacaaataatggataaaataattatattaaattgtaagtggtattttgagaggttatcatgtgatctctaaaggttcatgataattttgagtgcacattattttgaaagataatgtgtagagagcaaaatgaaacaaagaggttttatttaaaagttgatatgatattttcactttatggtcaaatgtgggggtgagatttgagtttaatcaa

SEQ ID NO: 258364 - DNA, 643 bp, Cannabis indica
ttactagagcggtcattacagagcatctttgtattcctgtaaataagagaccatagaataatctattttcatataaaaattcttattttctgtgaaaagaaacttgttacgataattctaaatggcccaaataattccaaaaaatattgcaagatcctctttttgaaaactttcaaagccttttagcaaaaaatctttaatgtcactaaatttattattgttgaagaaaacactaaagcgagtatgtttccaatacttacctgctctggagaaatttactagggagtgagtgttgaaatcaattcggttgaggcacaaagagcagtaagagctatcaaggactttactaaagtggaggttgaggttggaggggaggagatggtggaaagccctccaaataaagtgtttgatccttgggggcacattggaagaccaaaatgccttccaccagggtttgaaaatttcaggagaagaggaagatggttgaggagaggtggaatttgccaagtgataagtagaattgagagtcaataagcctgaaggactattaccccaaatgagactgcccttgcttatgggatctataggcactttgaggatggagtccactatatggcggggaaagaaattgttgagtttgaga

SEQ ID NO: 258365 - DNA, 1117 bp, Cannabis indica
tagattttattcacataaaatacgtagttttttatatttttatgttgtactcttattatcttgttattgattatttgttatttgtatattgttttgatgttattttgttattgttttgatgttattttcttgttagttttcttgttgtttttttgtgtttttataaaataccgtaaaaaatatataaatagatgcaaaaaaaatatataacagtctattcataactcttctaagttaagttattattaagtttgtgaaccaaaggtggtccattaaaaaatgtcaccttaggcgaattactagtttgtgaatcttgcctaaaaagcaaaatgataaaacgttctttctttacaaaaggagagtgtgccaaagaaccactaggattagtgcattcagatctttgtggaccactaaatgtaaaagccagaggtacgttatagagtattttgtcactttcattgacgattactctagatgtggtcatatttactttatgcatacgaaataaaaaaaaatatttgagaataagggtgaaaatcagtcggttatggtctgtttttacaattatttttttatttcaaaaaccaagaccgactgccatgtcaaaaaaaactgaaatcgaaaccaaccgtcaaattcggtgaggacatggaaccgaaaattcggttatggtctggtcagtttgatggtcagtttcgggttatcagttttaatgaacacccctatttgagaagtttcaagaatttcaagcattggctcaaaaccaattaggtaaaacattaaagatcttgcgaactgataggggtggagaatatatggatatgcagttcaaagatcatttaattgaacttggaattgaatcccaatacactgccccaagcactccacaacaaaatggagttgcagaaagaagaaatcgcactcttttaaatatggttaggtccatgcttagctactcaactctgcctacatttttctggggatatacaattcagatggcaacttacattttaaatgttgttccatctaaatcagtccctaaaacacctttagaattatggaatggtcgtatacccagtttatgccattacagaatctgggagtaccctgcgtatgt

SEQ ID NO: 258366 - DNA, 987 bp, Cannabis indica
ttttggtaatttctagctaatctgccaaaccgacaacttaaaattctaaactagtctggtataattcccattcgatccatattttattatcgtgacatttccgaccactctgttgagttcccatagtcgtcaggctcgaaaatgttttattccataaatggtatctacgatactcccataatttaataaaatattcgtaattaataaattatgctttatttaatcatttattaaattcacattaattaacctaagtaagatcataatcttactttattaccaaaaaattacatatttaataaaatatgcccaattaaataccataatattttttgggatattacatctactttttcaagaatgccattcgggctgtgtaatgctccagcaacattgtaaaggtgtatgatggcaatcttttcatatctaattgagaagtgcatcgaggtgttcatggatgacttttcggtatttggctcatcttttgatcaatgtctaagcaacttagaactggtattaatgagatgtgaagattccaatttggtgctcaattgggaaaaatgtcacttcatggtaaaagaggggatagtattgggtcacaagatttcaaaaagtggtattaaggtcgacaaagccaaggtatcaacaattgagaacttaccccctcccagtatcagttaagggagttcgaagcttcttggggcatgccaggttttatagaagatttattaaagacttctccaagattaccaaacccttatctaatcttcttgctaatagagtgccttttgaatttgggaaggattgtcttgaagccttccaaattctcaagtagaaactaatttcagcgccgattgtgactacaccagattgggagctaccttttcaaatcatgtgtgatgccagtgattatgctattggtgcagtattggaatgaatggttgacaaggtatttcggactatctactatgcaaagtgaaccttgaa

SEQ ID NO: 258367 - DNA, 596 bp, Cannabis indica
tatagttgtcccttttgtttggtatcaagtgaaaccatatcccattgccttttaaattgcgatttcgctgctggttgttggtcgaggttggggctgggttttggtacacgggtgtgggactcttttaaagagtggctgcaagatctaatgggcagatttgatgagattaaggttgctcaagcagggacattgtgttgggcaatttggaaggcgaggaacgaactagtttgggaccaaaagaatcggtctgttgaagatgttgttcagtttgctttaagatcacttgatcaatggagaaaagctcaattaaatgaaaattatccttcgttgaatcctcaatttttcaacaagggtgatgagctttggactaaacctgtgacaaatgagatcaagcttaacgtggacgctgcaatttttgacagcagcagccggtttggaatcggcttcgttgtgcgaaacagcgtggctgaactgctgtcggtggtgggactgtaccggccagggaagcccgaatcctgctgttgccgaggccatgggcattcgagaggcgttgagttggttgaaggcaagtcgtttaaccaagcgagcgtggagag

SEQ ID NO: 258368 - DNA, 1766 bp, Cannabis indica
ttttattaaaattaatctcagcccatttaattaaacaaaaaatcagattgaactcaataataagttcactaaaggacaaaagtcatttaggcaaaatgaccattttgccattcacacacgaaaagtcataaaaggtcacttaggggtattttggtaaattctaaaatctcgactattcctgatatttccaaggtctaactatactgcctcgctatactaaaaatactaagttgtgattctaatagccaaacaccgcgttccaatgttgccgggcacaacacatgcaaaattatgaaattctatatatgacatataaaatgcattatgaattcaaataaatcatcgtaaataaataatttaagattaatatacaaattcataattaaaccctaattatgtgctaatttcaaattaaagctaagcggtctttacaaagataaactctaagtttgatctaatattaaacttataaaaatctgattatttagcgcaataataagtcactaggagacaaaaagacacaaatggcaaaaaaaccattttgcccccacttaagacaaaaattcactaaactatctaagggtaatttggtcaactctgaaatctcgactattcctgacattcctaatatctaactatattgccccactgtactaaaaatactaaaatgtgattctaatagtcaaacgtcgtgttctaatattgtcgggcacaaaacatgtaaaaatatgaatttccatatatgacatataaaatgcattttgaattcaaataaatctccgtaaactgataattcataactaatatgcaagtttcataattaaaccctatttatctgctaatttctaaattaaagctaagtggtctttacaacattagacttcttatttccaatttttttatgtatttgaaaattctttgcaagcattgtcatgtcatcaccaccatcttcttcatttgatgcttccttttcagtacttttgaaagctatggtcttctcccttttttttgtggaggtacttggtttctcctttaaacgaatcttttgattcaattcaaatgtacgaagagatcccgcaaattcttctactttcatagtactaaatcctttgtttcttccatagccgtgagttcaacattaaacctgaacctatcaggaagtactcgtactatctttctcaccaaaacagaatcataaagtttctcaccaagagcaaaatatttgttaaaaatatcagataatatttcatagaattcatatagtatttcaaaattagacatcctaagatcatcaaacctagtttttaacatgataaatttagatcttttaacatctgaagttccttcaaactagatttgaaggattgtcaaggcatctttagcagaaacacaagtagaaacaagtttgagaaaactttcgccaacactaataaaattagcatgaatagctttattattataattagataacttttcttcttctatattttacaaaagttcagattgtacctttgtgctacaatcctcatttttctctaaattatacatatatcctgaagattatgtatcctcgataaaatattgcatatatcctgatgattatgcattctcattaaaatcttgcatatatcctgaagattatgcaaaatgtaatattcatcatatagttgatggatatataaatgaaaagaagatgagtacatatttatgtatatgttcttgtatccttttgaggtacaaatgaaaaagtaatctaatatcgatat

SEQ ID NO: 258369 - DNA, 670 bp, Cannabis indica
ttgcatttaaattttagcaacccgaactttagattgggttagaaaatatataggataaaccgcccaaactgaccaatgtacagcactgcatacttgaatcaccaaatataaaattattcacaagtttgaaaccatttgctataaaaaattagtattgttattggacattagtggagtatagcatcttttataggtacaacaattggttagtgatattttttaaaagggattttggcgactaaaccaactaaactttaaatattttaatatttaaccacaaaaattaattttttggaggcaaaactacctaaacttccattctattttgctctgtacccctccgtccaaaaattacaattaagtatcacgatggactgcccacgtgtacacacttgtacatgtggtaaatttttagtggcccacgtaatattaatttaaaaataattataaatatttaaaaattaaaaattaaaaaaattaaaaatattttcttttgggatattggcggctaaaccacccgaattttaaattttttaacactattctttcttctttctttcttaaactttctgaaaccctaatctctcagccctccctcccaggccctctctctctctcgtctcactacccaaaacctcgttggagccgaagcacccaggccctcgccgga

SEQ ID NO: 258370 - DNA, 777 bp, Cannabis indica
attatcacaaatcttcaagcctttggaagacttgaacaaatactcagatacactaaaacacaattaatctaaggcattgacaaataattttttttttggtcacaagtattaacaaatctatatctatccatatctatataaatatataaaggagaatcgtaagaagacgatgtagcattatatccttctaataatttatgttttctaatttgtagatttttctaacttttttattttattttctacttttcaacaatttttacacttttaatagtagttgacctcttttaaaaagtctcacatggtttagaaattatagtgggtttatacttctagattatatattgttatccaattttttacactatgatgtggcagcatgtacgagtgacatgtgtccatcattccttgcatttgggcagaaagatattccgaacagactttaagcaacatatatgcacgcacaaaagtctacttatttgagcaaagaataaggttagttctccgagctgtgtaccaaagacttgactactttagaatggtatcgtgaagcccaagcacgaaggcaatccctacagtcataggattgtatcagagggatatggcaggctgtctcaatcccccatttcatgtattctaaattatgtaaataaatgttctttccaattatagatattgtaagcataagggaaacctttcctcatgcattaagcccttgtaaatagtgatctagcttcactataaaaagggaatcgaaaagtaatagctttaagagag

SEQ ID NO: 258371 - DNA, 1070 bp, Cannabis indica
aaaaaaaataatcaaaagacattgatattaacagccatagtaattgttatatgatatgagattttctttcaaggcaatgaagtgccgaccatacctcaatctttccacctccttcaagcaaaggtgggtcttcctcactgataggggcattttttgtcatctatcttataaccatgccactcttcttccgaatgttagcttcttttaagttcccttgtcacatgagttttgcatcagggaaaagaaatcaaattaaatttcaattaaaagaaataaaaaagtaaaagacaaggaatacacgtgaaataataacattacataattaaaagatacagcctccaaagatatggagaagttgaccctatggtcttgattacttaaaaaaagcaatgattggaaatagcaactaagtcaaaacaataacatgtctccggataaaatctgttcaagactattaacggtagctatatttaatactcctctaatgcctgttaatgcttcaaaatttctgctttttctaagagaaagttgttatcactaatatttgacttaaggatgaaattcatattgaaattttcatgccacaagatatgaggcaagctgcaattctgcaaggtgtaatcagctccccgccaccatttttcactccctatttgtatgcctcaagtgttaaggagaaaagaacaaaagcaattgagatgccattaatagttttcctaataaatacttgcttcacacgttgtgaaattccagtataccttcatgccctatactctccaaatctccaaagattataggattttattataatatcctccaatatgtttacgcaatgaatacttaggtaaatatcagacataggctttgggcataagatcgaaccttaattaaatattgtacttgtctcctttgtacagctaaaactgccaatatataaatcatatgtctaattaaagatgccatgtaccaaccaatgctaaatgaaagtaccaaccaatagaaaccaacaaattaccaaatggagctgacttttgttgcaaaacctcagaaatctcaaatggcagctgaaa

SEQ ID NO: 258372 - DNA, 1226 bp, Cannabis indica
taactgtatttactatttctttttatctcaaacgcattattaaataaaaatattatttcttaaaataaatataattttaaaaatatcatatatatatatatgctacacaaagcgaggtctgcgatcaagaagctggtgggaggtctttatgtttcgggattcttgagatttttaggctggtgaaccctgttctggggttggttttcatcatcgatgacgagagccttctacaacaattacctgatgaaatcagagggacctattgttggatcttgggtgaattctatcatcaaagtctgaagtcgtggtttgaacactaaaacattatcgtatgagattaatttttaaatgaattaacatatcaattagaaacattactaatataatttcaaaaactgatagcttcttaggtcacaaattttcatttaagggtatatattagactatcagcatcaatctaaacaattagaagtttatgccgcaaaatataattgatttagtattgcttaattaattgtacatttttagatgaatgcaagaaagattcttgaattttttaatattttgtcaaaattttaaaatttcaattaatctttaattatttttaaaaataaaaacaaagctttatttaaaaaagaattgtcaaataatagaagattataatttatattttgtcttgctatttatggtataagttttatactttaaacttatataaaattaattataaattaataaaattatatatttttttttgtcaattattgaaaggaccgcgcaacgcgcggttacgttacctagtatctatatatctatatatttatataattgagttgttagagtgagtgacatggcatcttagaacttctctaatgtgatttatctttttttcttattaatttccaattctaatattttatattatattatgagtagtaaaactaaaagtcattcaaacaatgagttaaacttaattttattatgtacagggagatgaatgattaaaacattcaatttacataatcatatctattctatataaaatgtggctatataaaaaaaactctctttatcgagttggtcgggttagttcgagttgattggacgggttcatattattttcaacctgcccagtataaagattgggcgggttatattttcgtcgggttatctcggtttagttcgagcgggttgttcggattgggcggtttacaaaaatttatgta

SEQ ID NO: 258373 - DNA, 656 bp, Cannabis indica
ccttagatagaagccttgttttccaactttttatccgctggagtactctatcgaccaagaattaaatgtcatttttttctcttgaaagatctgaaaagcaagagatctaggtagattgcatctcttttcatttttttcattccaagaagctccgatattttagccgcattcttgggggctacaccttttgagaactacaccgtagacttttgaaaattcactacttgtcccaatcaaaagcaatactttaagtaacgccctaatcactaaggacgccacacgtgtatttttaaaacatagttttataatagtagattaattaattaataaaattcatgataataataaaaagttcactataataaaactatagtaatgaataggataactcgctaaaaatttatttcgaggatctcctgttacaaaaaatttacaaaaagggctatatagaagtaagtcaaaatacatatcaagtatcgcccaaaactcgaaaactcgactgtacaagtcagataagtcgatatgtacattttccagagaaggctgtcatctcatggttgccctagttttccattgcccttacttgcaccacaaagtacctgtgagtcacaaagactcagtaataaaagtaacaacaacaatcatataattcatca

SEQ ID NO: 258374 - DNA, 1041 bp, Cannabis indica
ctttcaattataaaaattattataaagtaggcaatagagccgctcttcaacgcggcttaatttaattaatttaaaaaaaataattattattagtataataaataattaatttaaaaattattttaatatatagtgatattgaaattatatcatataattatatattaatattactaattaaatttatcaaaaataaaactccataaaataaggaaaagttatatctactcacaacagtattaattatttttatttagaggattattgaaaaatttattagggttttataatttatttatttattaagaattttgaaattatcctaatgtatatatagagaattttaaattgctttgttaaaaaaattgttattataaaaataagtaaatagggtggtgtagaaaaaaaaaaaatagagtaatgcattattgttatatccgatcattaacaccgtatctcatccgttgttccagtatatttcacctttaattttcaccatattttatctattgttataattgtatctcattgtattagttaagaatatgtcctctccggagacatagtaatcaatctgtgagacattcaaattggctttatataagtaatgattttaacaccaatctagaaattttataccctaaataataataataataataataataataaattataaaaaatttattagttattttgtttaaaatatttaatttaatttatttattttattgttcaataaatttaatactttagtatatatatgtacggtaatttatggatatttgttttttatgtatttaatttatatataagtatatagatatgaataattttttaaaaataaattaatcaatttaaaatttataaattgaataaaaaataaaaaaaaaaaattaaaggggaaatatttggagattctagagagatgtcaccgtcttacagtaacttctttttttgagaaaaaaaaaattgaaaatcacaattattttaaaagaaaaatgagatattaattattcaaaaaagaaatattaaatttat

SEQ ID NO: 258375 - DNA, 982 bp, Cannabis indica
ctgtagagatttctacacccttaacagaataaactcgaaagaattgtaactttgtttgggctgaaaagtgcaaaagtagcttccaagaattgaaacagatgttaattactgcactagtgttaaccttgccattcagtgatgagaaatttgtgatttagtgtgatgcttctaaacaaggattagtgtaataccctaaggtttatgaaactggattagcaactctaactagtttaattatgtattaatgaggaattatataactatataatttaatatatgaaactatattgataaattgcattttaagtccctattggtgtactagggacatttttgtagttttgacctaagaaggggtaaaattataatttacatgatatatcgtacttatgggctatattattatatagtatgtttattctgactatctgtaggtgttttctaacaagtcggcgcggtataatcacaaacgagtattttgggatgaatcgggttcggggcccaaaatatattttccgggatttatttgttgtgttattatgattaatgagatatttaaaattatgtattatgtgtgtgtgataaaatgactaatttaccctaaattatataaatgtgcttataaatgactataggggtattttggtcattttgaccatataatctattttcagcaaaaacaattgttggagagttgaaaacctattttctggtttattcccagccctagctgacccctctctctccctgtctcatcttcttcaaattttattaattttggaaaaattaagcttgaattaaaggtgactttggtgtgaattgtggcttgagacttgtataattgtggtaagctcctaatccttccttactttgaatttaatttctggtgtttaaagttttaaaaacttgttcatgacgttcttaagagttgttatgcatgatgttgtgattttggaggtttagtgataattttggtttattt

SEQ ID NO: 258376 - DNA, 1466 bp, Cannabis indica
taatttagtaaaaaattctaacatggatgaaagttcaaggggcatgatttagtacataaacaatcactagaaacaagtaaaattgaaataaaattagaacaaagttaccttaaatttaacaatctcaataggttcgggggaaatttctaaaggccaaaaagttcagggggcaagatttagtacatgtcaaaattcagagggaaaaattactaattaccctatactttttcaatgtgatcatttaaaaatgttgaaaccatatattcaaagtcaaagcaattttttagtttattttatatgttgttaatcaaaaaaaaattatatttaaaaattatgagatgtcatttcaaaaataggacactaaaatatcatttggtttgtgaaaaatattatctcatatatatttttgttacttattttaggtggttaacttttaaaactataatttcattttgatccagtatattgttgagtaagatacaattatgtttcattttagtttatttatttttataacaattttcacattatttattatttttaaagatatataaaatttaaaataaaataagtttatatagaatacatatcttatggtaacttttacatgtaaaattacaaacaatttatagtcacctttgagattagttaacaggtaaaacaatttgtttaatttatgaattcttttttttattaagaaaaaaaatataaaagaaactataaattactttgattccaaaaattttgtttggtcaaaaaatctatgattctaacatgtcaaaatgacataaataaaaagtaacattttagtttcttttacactttattaagagataagtaaccaaactttaaatttcacaaaaattcatatgaaaaagttaataattttaaaatttattaaaaaaaatacttttcagtaacccataaaattgattactaatttaagatatgaaatcacggtcgttggaaaaattgtcggaaaggtcgctagaaaagtcatcgtggccggaaagtcaacagaaaagtcaacgtcgccagaaaagtcactagaaaagtcaccaaaataaatgtctcatatataactaaaaatatagccggttatacgaataaaaactaataactcaaactggttatgattaaaatataatcggttctgtaacataataaataaatataaataacataaaataactcaaaccagttataattaaaatagaaccagttctataacagtgttataatgaataaaaacaaataacacgaaagaactcaaattggttataactaaaatagaaccggttatataacataatgaatacaaacaagtaacacgcaataactcaaaccgattacaattaaaaacaaagaagaaatcaattcctaaaacactgaaatataaattaaagacaaaactaagtttcacaataaaatatttcataacacataatacctcataaaaccggtta

SEQ ID NO: 258377 - DNA, 630 bp, Cannabis indica
gcaaatctgatccccatccaatttcttaaaaaacctagtatcactggcatggaggatattgaaatgattgatacatccccaaactggatgacgccaatggcagcctacctcattactgaggaactcccagattataggaatgaagctcgaaaaatgaggagaaaggctacacgatacatcattgtagagggagttatgtatagaagaggattctccgtgccactactatggtgtgttacacaagaagaagctggaagacttttgtcagaagtacatgatggattctgcggcaaccatgcagttgggaaaagtttatccaagaaaattctaaggcaagagtatttctggcagaccatgattgaagactccaaggcctacgttaacaaatgtgagaagtgccaaagatttttaaagatacctcgtgcaccgcccaacaaactaactcagatgcaaagtccttggcctttttgccatttggggaattgatctaatcagacagttacccaagggcaaaggcggagtacagtacacagtatttgcagttgattactttactaaatggacgaaagtcgagccactagcaaccatcacatctaaaaaagtgcaagaattcattgtgaaaaacataat

SEQ ID NO: 258378 - DNA, 515 bp, Cannabis indica
tcgcgttggcccactctgccaagatgccaagtagcaggcagttagggtaaggccttgaagcaattttttccacctttctttgttcattttatgttctgcttcctgctctgatactttggcctctttgccttagcctattttgacaggttgccttgctagcgaagagggctgccaaggaaactagcacgctagtagctgaactagagtaagtcaaggaagataactgtgacttgcataaagccaacgtgacccttctggctgagctcatggaggcttggctccaggtttagggtctgcgaaaagagaacctgtagctggaagacgaaaatgctcataggcccatatcatacggagtatgagagctgaccatgacctttacagggagaccatggaatggatgtatgaagcaaactcttctactcagtcaggcagcgcttagtcttaaactccagcaggcctccttgaattattgttgttgtttttttgtatatgtgtatccccttttgctacacatg

SEQ ID NO: 258379 - DNA, 1985 bp, Cannabis indica
cattgagagcagaatcaaggatccctcttcattctaaatttaatcacaagtacggcggtggatcctgcactgcagaatctaggaaacacaagggttccgcatgccgtaaatcccagacaactgtcaactgcgtatcacggtgtgacaactcttgtggatgagattgtgcctagtgtgcaagagactgggaataccagttcagtagctgaccagggcgttcatagcacagtcgttccacccgctaccaatgttcaaacaaccattggagatgacactgagatccagaacctccgtgctactcttggactcacgcaggatcataccaacacccgacatcatgatcaggaggaactccgcgctgcggtaaatctcatgtttgaagagcagaggcgcatgtttgccgaatggaaggacaaggagatggaaccattaagggctcatcatgcagtcattgataatcgtagtcggcaagccactatgctgatatgaaaagcctatcaatctgtcaagcaacaaccctcgaatgtcatccccttgggtgaaatagacgaagatccagcattaaatatctcttagactataaatggttagtcgccaaatctccagtcacaggtcctgcctgtggtccaagtagtaggtgggtagaccttgtctagtaattcatcgagagaagtcataccccacaattccaaccaagttaatggtgctagtcaccagcacattagccaaaccaaccagtcgctgagacaaccaggcgcttccgtattcgataggttagggatgactcatgatcttagaaacgatctgaataggagcagaggagtagatgatcagcttgacacgccgatcatgcagcccggaacctgcactcaaattcttgcttagaaagatactgacgtgactcagatcgaccaaaattccaaacaggttagtccagatgtgcaggcacagctggacgaactaaataatatgttccaaggcatggccggtcagagaaacaatggtctcaagttggaccgagcacgtagaacccttttctcccccgggatcagtcttctggcgtttccctacaagtttaaaatgccaacctggaagatgtacactagaaaggaagatcctctttcccacctcaaatattttgagatgcaaatggacttgtagggagtacgaggagacgtatgttgcagaatttttcctgccaccctctcgaaagccgcccagcaatggtacttcaagctggcacttagaaagttcaactcacagaaagctttctcctaggaattccatgcacaattttcatcctctcgccaacttccgttgcacctaggagacctggtcgaagtcaagacaagactaggcgagccactctgagcctacatcaacagattcatgacggaggtgattaaggtttcatgagtaactgaagacagaaagttgtccgcgatactgggcggcattgaagtccttggtgagcattggaaggacatgaggaagaacggttcggtagactcaatgagcgattttctcaaccgtgctgaaggctttatcaaacttgaagaggttattcagcgagtagagggtgagccaaaacctagcaagttaaaagctcctttcactgggacattcgtccagctcccccattacccaagtaattcaagttcaaatggtaaacgttccagcaacaataataggcaagggaatgggaaataggaaaagttcatcggcaaaaccgaacaagctccccgggagaataaagccaaatatactggatttaccatcttgactgaggatatagaaagtgtttacatggccactcagtcactaggcccgtagaagaagcccgcacccatgaaaaaagatgtcagcaagagagacatgaccaagttttgttgatttcatggagactacgaccaagacactaattaatgcaacaatcagaagcgggaaattgaattactgataaggaaaaataacccgcatgtaca

SEQ ID NO: 258380 - DNA, 760 bp, Cannabis indica
aatgagttttattttgggcataaaacccaacaaactgcatctagtggttcaggtcaaaagaagaggttccgagggaaccagggtcgaggcaatcgtcagggtagctctgaaacccgatacagttacccaaaatgcaccagttgtaagaagcatcatctggagagtgtagagggcaagggtgcttctagtgtggtatgccaggacattataaaagggattgtcctcaactcaagactaaagcatagaagactgtagtgaaacccactccagcaagggtgttcgcgataactcaggcttatgcagaagccagcccttcagtggtaacaggttagctctcggtcaacaactcttatttctctatgttgtttgactttgggccactcattcttatgtggtagctagaatttttagtaaattgggtagaaattgggtagatcgcacgatagttatgaatcagggtttggaaccctactgcttggcggagaatgagtcatctccgaaaggtggattaagtctatgtcgatcagaattgagcatagggagttgagtgctgacttaatagaaatggatttagcggattttgatattatattgggaatgaatttcttgtccaagtactcagccagtatttattgtattaggaagatggtaatcttccaactagaaggcgaagaaccgtttatttttgttgggtcagttcagggatcgcgtatcccagtaaatttcagtgttaacaaccagggaattgttacgagatgga

SEQ ID NO: 258381 - DNA, 978 bp, Cannabis indica
ggtttggttgctcgtggtgtgtgagaacttctgtcccttccatttcaaattgggaggagtggattgattggttcactatgtcggccaacagacctcctgcaatggacctcaactgcttcttaggaggtgctgcaattatattcgaaagcatatggaaggaaagaaactcattactccatggtaagcagcagacccccttgaaagtgcaagtacaatacattaatagtagattccatgaaatgaacacaattaaggagtctaccaatcctcccaacatggaatggaatccacctccggaaggttggattgcttgcaactcggatattgctattggccaatcccaagcaacgagggctgcggtgttcagggatacgactggatctatcctttgcgtcaccacatttagatctactcactgtgacccgctgccaggggaaatctctgcaatcattgaaggtgcggcagcagcagcaaaatttggcttcaagaatgtcatttttcagaatgactcactgaatgcagttagtgcgttgaaaagcaacactgcggatatacaaaaactgcatttcaacattcaagaaaaggttaaaaagttcatcgatctctcggcggaattcaacattcatgagattatatggactcctcgctcgtgtaatggtgtggcccactccgtggctcaatgggaaaaccgaaacaacatctttggtgttttggatatacccaattttgatgatttcctgcagatgattgctgcagatggtcatttatctgtttagttttcctactggttcagttttagatttagttctgttttttcttctggttttttctctgctttctgcagtttacttgtctttgttgtgttagtgtctttggatttcctgtagtttgttgtggtgtttctgtccctgctggctgggctcttttagccgttaggcctctgttgttgttctgctcatggtttcattaataaaaaac

SEQ ID NO: 258382 - DNA, 609 bp, Cannabis indica
tttttttttttttttgataagttagaaggtgtgattgaacaaaaccaaacaaagtctagaaagtagccacaaagggggctacctctctcaaaacactcctcgcacaaatgctcttaattctagcgagataggctaacttacttatccgcaatagaattttttgtttaaataagtagttagattttatattgttatacttaaaaaatatatatatatgtttatgattaattttttttttactggaatggattggattgaatctaaaaaaattggatggcagcgattcgatctaaaatatattaagtataaaatattggttaattttgaattaatgtaataaatatatatgaaatacatttaacggatagaactgatccaccattaaatatataaatgaatcgaatttggatagaactacaaaatattagatgtactcataaaactaggtacattgtcatgaatgtatgataggtgtagcatcttgtgtatgaaaattgcataatgcatatcaaccttaaaaagcccattacaaaacccagacagaccctatcagcaagaaacaattggactatgaacaggtttagtgagcccaaagactatagacactct

SEQ ID NO: 258383 - DNA, 612 bp, Cannabis indica
ttttttttcttaattatttatttcatcaatatttttagcgacaactttttaatcataacataatttctttgtgactaaatgtcaccaacaaaaaattacttgtgactaaaatataatatttagatacaagttagtattatgactaaaaatacatttagccacaataaattacaatttttgtaattaatacatttagtcacggactttttagtcccaacataagaatgatgatttataattaatcacaacttttttacttttagtcacaaattttattgtgactaaaaagaaaattttttataatgaacctcggagccaaaattggacctcgaacttaaaccttgacccagacctagaccccagactccaaagtccaaactctgaacccgtacccatactcactttctctcacctcaatttcttatttctctcacttaaataaaaacaaaaaatagaaataaaaatctacataacacatttttatttttaaaaaaaattaaaaaaaaaaacaaaacaaaacaaaatagttacaaaacacttttttttatcagaaataaaaattatactttgacttgtgtgatttaaaacctttaaaacaaaaagtgtaaaggg

SEQ ID NO: 258384 - DNA, 761 bp, Cannabis indica
ttaagtagttagttatctactaaactttttgattttcgagccgttatcaattctgcctcgctatggcagttataatctgccttaaacaaacttgaatatatacttttaatgattttatcactttgtatatttcagatttgctcgtatgagtagtttaggttatctatccattttttaggtccaagtacttttatcaagacgtcttgatatcttgtttagcactttcctagctcgcgcgaaccgttaatattcagttttatacgcgagttatgagttatatctcatttataatttttgattttcctctcccatcagataggtttttaatcaaaaaattatagttgtttgatccgttcttcgtcaaaaaggtttgatcaaagatgttacaacaattcgacccctctgtcgtcaaaaaagtttggtcaggaagttataacagttcgactcctctctcatcaaagaggtttagtcgagaacctttaaatttaaaaaaatatatatttttgaaatggtgggtttgcattataccatgtatttccagataaattctggttaataatacataaattccccttaagtaattttaaagagtaaaactttgtaattacttaaataatataaatgattctctttattcataaatgaagtttaaattttacatcagtaatgcgagttacatcatttatttattggtagtagggttgcaaatgttccacgttccagtagttatcttttagtgatccgttgagtcgagccaattt

SEQ ID NO: 258385 - DNA, 654 bp, Cannabis indica
taaataaaaataattgaagcttaattactatttcagttgaacatctattcaagaatacacttaggacataacaaattatattataattgagaagttattatagttaacactagaaaaaagcatcaaagtccaaaaaaatatcaatgtaataataataacaataaacaatcattaatactatatcataatagaattatttttaagtaaatataatgtttatatatgtattacaatttagaataaaattaataattttacgtaaataaatttacaatgtatatattttattaaaatataatgattcttatataaatgtatgttttgttaatacgagacttagaaaacataaaactaattacaatttaaaggttattcttatttataactgacccaaattagaacttattttttcataataaattagaagttattcttaaatagaatattcttaaatagaagttttagtgtaatacttatctatgaacaacataagcctatgaccatagaatgcctttagtttttcttagtgctatttgggttttaaaactgtttttggttttgttgtttttcttgttttgtttagcttcgggcaatttttgtgacttttgtgtctatttcaggaattattttgaagtttttataaaaatattaaat

SEQ ID NO: 258386 - DNA, 756 bp, Cannabis indica
ttggtaggtttatcctatcaattgagaccagagaagaaagcagatgaaaagaattaatgaaaaagaaactctgttgtaattgatccccaggaaaatggagagcctggtctctccttacaagcctcactcagagaaactctgtgccccctcactacaatattctattatttgtatataatccccacaactcccatgagccttaactacacccaaacaaaaccccccaaacagaattacacaaccatattattccctgtggcagaccccatgttagactaactactccttcgagcgtacacatacgtcacaggaggtctatcattaagctcttcatatgttttcttaaatgccataaagtaacttataagagacttatcttgtttcttcgcacgataaaaggctttgcaaacatcatatatgcgagatatgttgtctttgcctgaatacgaaaactctaagtaatccattagttctttaactaatttacaacgattagtcaaattagttatcttattatcaatagaatttcgaatttgaagattcaagcatccttaaccacatttttcttgaatcatctttttctttgagaggattatcaattaagtgatcatctttgtcaatactccttacacaaagtcgaatcgtcttactccattccaaataattcaaactaacccatttatggttcgtgattttagacatcatgggaaccacatcagaaacatccactaactttgggtccgattttgtctttgc

SEQ ID NO: 258387 - DNA, 565 bp, Cannabis indica
ttaagagctttaatttgcacatgcttttgcaggtataggtctgaacgttgacaatgagaaaccgacaacatgtttgaacacatttctgaaagaagtgtctagtttggattacaagtttagaagagaagatattcttgctgccttcttttgcaaatttgagaagttctatgatatatttataagtcaaggtaattcattgtcgtgttgatttcatcaatgagtgtattgtatatcattttctacaagtcaaggtaatccatggtcatgtagatttcatcatcagcaactctattgtttcatcttatcatgcaggtttcgaggctcttgagaagttatactacaaaacatggctgcacaggtgaaatcttgatctttttctccttcttggagattaacaagtgtaggcataggaaagattagaaattctgctaaagctggtagtaaatcttagttcgaaaataggactctggctcaagtttttgcatttgactatcttatctcatgtggtctgcataaactgaagattttaaagcgaaaccgaatagtttgttgtaaagatgtgtca

SEQ ID NO: 258388 - DNA, 874 bp, Cannabis indica
gaaatcacatgccgattttttttcttcaaatttgtttcatagcagtatttgttatagttacatggtatcatccctataaattttaaaaaaatctgaatagtttacagtaccgaaaacagagttcctgatattctagcttaccacacgcgttcaaaaaacctcaaacgtattttctgcactgtaaattattcaaaaatttacaggaatgatgttgtaagcataacaaacacctctgtgaaaaaaaaaacatatatttcgacatgtgttttcgggtgtagaagttgactaagaggttgtaacaggaggttgatgttaagtgttagttaggattagtctgttattttcctggtttttctatttttcggttatttcagttacaaagctacagttggcttctttgcctataaatacatgtaatttcacttctgtaatgacataagatacaattcaataaagctttttcttctctgaaatcctctgtttctaatatggtatcagatgaaataatctgaagcttcaagcagtccccttcgagcttcaagaaccaagatcttcccgacaaccctcctcgaacaactcttccatctctctctgttgttcatcgctccaatccagttgacagaccagcatacgaagatgttcaatctccatactacatcagtacagctgatcatcccggtttatcactcgttacttcagttctctctgacaagaatttccaaccttggaaaagagacttcaagctctccattggagcaagaaacaagaccccctttctcgaaggtacacttcctcaacctcctgaaaatgactctcttcttgattcttggatccgttgtaatcagcttgtgtgtcttggatactacactcggtt

SEQ ID NO: 258389 - DNA, 869 bp, Cannabis indica
attggactcttttatcttttggatgatcgacaatttttgacttcttgcatattcctgggtaataccgtgaacgtcttaaagagagcgacctagtctgcgactcaacctagaaatttcatacagtaatatcgatgctcttttattttcagtagcagtctgttcaaaaaattttagacgttcattctactatgaatactacaaattatttttctggttctactgttgacatttataagccttttcattttgaggttttgtattttaaacattggagatagaagatgttattttttctgactatcaaaaaagttgtgtttgtgctgactgttttgaaactagttgtgtctgagattccacctcttgctgagaagaaggatgaagtagagaagtacgaatcacaggttaaggaaaagggaaacctgggtagagaatgattttctgtgtaagaattttattttaaatggtttatctgatgatttgtatgattactacaattctgacaaatctgccaaggaaatgggaagcattacaaaaaaaatattataacgaggaggcaggaataaagaaatatgccgtgagccacttcttgaagtttcaaatgaccgatgataaattagttgaagcctagtctcacgagcctcacaaaatagctcacgaaattttgtctaaatgtatgactattgatgaacaattttaagttactgtaatgattgataaattacccctttcctggaaagattttaaaaatactctcaggcacaaaataaaagaattttcattggaaagtctaatcgagcgccttcaaattgaggaggaaacttgatacaagaccaaaaggaagaggttcttgttgttggaaacaacaacaa

SEQ ID NO: 258390 - DNA, 578 bp, Cannabis indica
tgtggagtttagggttcagggttcacggttaaaaggaatgctaattggaatgaaaataatataaaatttaaaatgcatacaaaattgataaaaatttggctgacactttagaggatgacgcgtgttaaccttagagaatacgaatcaacagatgtaatggaagatattaatttctaccctaagaattgaatatgaagattgctttcgcgtgaaattttgtgaaaatggccccttaattaaaaaatttaaaatatccttttctagagggtaaattttaacaagttctttctttactcttacactcgttagtgttctgttaaaatctcaccctacacatctcaaaaattgtgaaaatttatgaggatgaagccaagaatgttgtgcatcaattttctaatggacatgtcgcgagagaaagtagttttcatacactaataataattttaaattgaaatagtgaaaatcacacatttctgatagtggtacccctttgtgaaatgtggcccggacccatcgtagactattttttgccattagtcacagaattcagactactaagacatgaatatgatgattgg

SEQ ID NO: 258391 - DNA, 552 bp, Cannabis indica
aaaaaaaaaaaaaaccaaaattgcaagtaaattacataaaactatcactattattatcttaatttaattataagatttttctagtttatgacaaaaagaaatatagatgaccaattggccattgaaatataataatttgatattgttcttagcccaaatctttgtcaatttactgaaaagattcaatttactaactaatttgctaattaaagaagaagaatagaaaaagagatcatggtagtggtgatataattcctacaagaactatcattacactaattatattatgtatttctttctcaataagaagaataaaacaaatccaaaaatttccatttcaacaaagaatattctttttcatgaaaaagattaaaaaataaaagactaaaaatattataagctagctttagactcaaaagtcattaaataaacaattaaaactaatgatcagttcaactatattaactaactaactaataattccataaaagtactattggaaattaattaatgttttgatttggtggtagtgttgggctagtcttcttggcc

SEQ ID NO: 258392 - DNA, 568 bp, Cannabis indica
agcaatttcaggatgggtgacctccttggaagtttttccaggaagcgtgcgagtgaggacaaagcatgctgaaaacactcgtgttggtctgtagggtcagtcgtcagtccatgaagcagccagagtggcgtactcgtgtataagagtcattcattacgtgggtgtaaggacccaatgagggcttgaagcgaggacgttacaacgagatttagaagataagtttttgctacatcggtagttgcggtagtatattatgtttggaagggtcggaatgaagtattttggaatagttctttgccaacattggatattttgaaatctagagtgaagcgatcatttggtacttggtacctattataatattatattagattatatatcatattattatataattattatgttaaattttaatttatattaaaatattatatatttatttatctataaaatttaatataacatataattaatttatataaaatatttataaatataatttaataaaatgtaatatatatgacatatcaaataaaaccgaaatgggaagattatgtgataaatattt

SEQ ID NO: 258393 - DNA, 778 bp, Cannabis indica
agagacaaaggactctcggttcaaccattttgcccaacattgctgttattatccatgctttcaacctaagaaacaataagcttcctccattcttgctctaattgcaaactcagtcatcttgtggatacatgttatttctttttgaaaatttccacttggttatagtgataagaagagggcaactgaaaacaaagtctaccccattaactagacttcttttactcaagagccacactcaatggtgtcaaatccacaccaagcttaaatcacttaagatttttttttccaattttaaccaaaaagaaataaataataataattataaaatatttttaactggcctaataaataaatatacagtccaaataaaaaaaattacacaaatacatcttacacacacctttaactcacaattcatgtttcctgagattgaaatcttcgtttgatgcaacctttggacaaccacccagcaactcaacacaaccaaaacgaaatccaaccagaaagagaaccatcattaattctggcgacttcaccagagaagacgaccaaaatcaatcaaaacatgagtgtttcgaattcatgaaaaaaatgtacagaaaaactactacgaaactaaactttaaccaggaattcaatttaattcgcataaaactaatgtctcgacttcagtttttagatccataaaatgcaaatctcaaaaagttaaactagagttctcaaacaatccaactcaagtataatccaaaaaaatcatatcaatactatagtaaaatat

SEQ ID NO: 258394 - DNA, 866 bp, Cannabis indica
gtttattaaaaatcatccttgaactattcatagtgctttaaattagtctttctgacaaatttcgtcacacgcggcaaataaaatgataatataactaattagccagctgtcacatcagtatcatgtcaacaccatatgtttaattaatttaaaaaaaaataattcttttaatttaattttacctaatttttttaatcattaatttattattagattaatattttttaaaaaaaatgcatttttttttaatgttacgtggtgctgatgtggcaattaattggataagcagtcgtgtcattattttatttattacgtgtgataattatacttgacattaagactaatttacaatattgtgaatagtttagaattcatttataacgagctggaaagttcgaagtgacaatatatgacgatctataaattatagttattttgtctgttttgaaacaatattcaaaaaaattatgataccgcaagaatagaattcaaaacagtcaattgcgtaataaaaaaattatgcatgtgtgcaaattgataaatgattaaattttatttagcatttataaattatttaaaatttaaaaaaaataataataaatactataactataatatatataatatcgatcgttgtatataatttttcttgagatatacacacgtagtacttcttttctttgtagtaaagattgatataagatatatgatgattattattcatgatgtgtatgcgtgtgtatatatatatataagtacattatccacaaaattgtattatatatatacatatataggtgaccatgatttcaacattatgtttttagacgaactacatgatcaatatatataaacatgttcatacg

SEQ ID NO: 258395 - DNA, 900 bp, Cannabis indica
ctaggtgtgggtgtttgagttcgggtccgagtctgtgttcgggtttctgtcgaggtctcggccccgatcaaggtctaggttcgggtctaggtcctagttcgggtcccaagtgcgggtccaagtttaggtcagggtctggatctcggtccaaatctaggtccagcatttcgctcctagtctagatcttgtttcgggtccaggttcgtatccggatccctatctaggttcaagtctgtgtttgggatcgggtccttgatttcggtctaggtccgggtctcagtttcggtttgggtacacgatcatgtccgggaaagagttccagtcttagtttgggtctgaggctaggtctgttttcagttctaggtctgggttcgagtcctggtcacggtcctagtcttgttctagggccttggtacggcaattcttgttcaggttctaattttgggtcctaggtctagagaccgaccactagtctattccaggcctcgttactcgaatctcgagtcaagatctggatcactgtcacgagtctcgatatggttctggttcaggtcccaaggaccatttttgagttcgggttccaaatcgaaactgacgtgcgattctaggtcccgaccctagttctgtgtccctagtctaattccatgtttgggtctgagtcccggttcgggttcgggtcccgagtccaggtttgggtgcgggtgcaggtccggctcccaatttgggtctaggtctgatttggaatccgggtcctagtctcgttaaggttctggatctagtaccaatttcagttatgattccaaatccaagtcctagttccagtccgagtgtgggttccaatttttggtcacagggtacgggttagggtccactttttggtatgggactgggttcaagtcc

SEQ ID NO: 258396 - DNA, 703 bp, Cannabis indica
caccctgtccccgacattgttctttgacgatgccccttgggcgaaaggggccatcattctatttctttcttcaatcgttccaatcaagataagtgggttggtttgtttcgtccttctatctatgcaattctctgtcttcgttcgtgatcatgttgggcgaaaggtagttgtagaggagcggttgtgaaacggcgattctcccatttccattgaagtatggagggcccccttccccaccattccggcctattattgatagggattttaccgatgctgaaggtggcttggtaaaaagcaaacggaaatgtacgattaggggttctcctgttatatctttctaaacctagcctctacactccgctatctttcgagtggtggttaatggactttaaaggtttgttgaatccctacttaaaagggagaatagcggagtacctcagaattgttgtacagcctaaggagttacggtaacctcctatcgaggataacccctctgatggcataacactatgtgaggatgaaagcctgccagtaggaaaaggttctgtaagataagacctttaccgtcaccttacattcttgactccccaaccctccgtcctgttacctctgttcctctatcattatcctctacttaatttaatctatttatctaattttacttgagttggagtagcaaacccttcacttcaactggcacaac

SEQ ID NO: 258397 - DNA, 1110 bp, Cannabis indica
tttgaatcaaaaaatatgacaaaaaacaaaaattgggcatacgggtatgcaatgcatacccctatgcgcgcggatgaagggggatgggcgagggagaaggttgcgtgcagcctgtaaggaaccttggcatgagcagcccttcagatagggccttgttcgagaatcctcggtcagtccttgtctgaagacgagtgatgtccgagtgatgccacattcccgcgcgcgcacatgtgcaacccaatttcaaatattttcatccaaatacaaaaaatcataaatcattcattaaaaatccaaattgagttctgtaaaagcgtaaattcagtaatttttcgtctactctccagttaaaatattttcagaacaaaacaaaaaaatattttataacacacattgcaatttccatacaatcatcaaatttgcacataaaccatcatgaaatcatccaaatcaacaaaaacatcgttttaaatccatatttcatgaaagtaagtcattaccatggctctgaggccagttgttggattatggttttaccaggatctagatttacaaccatgtatgttgtttaacatcctaaatatgaatttctaaaacaatataatttaaacacatatatagtttaagaaaccttatattggttgcagcggaattaaatgactcattctgctcagatctctatcccttgtatcctttctgtagcagagtatcaccaagatctgagactaattctccttcacttgaattggattcttcacagtcttacacactatgattaagtaccaacttgttatgtgtgggcatgtactctaccactatagggttcgaaaatagaagcgagaaagagagatgaaggattcaaaatagagagagaacagaaggctcaaaatttgactgaaaggcttgaattattaagcctgcaattttgagtccatcactatctattaaactaggtttaggtttgaattatttggtattaaaaaattaataaataaatggtaaaatagagcataagtggtcggccatggatgcgggccccatcactttgcaattttgccatttttccactatttatcttatttgctataaaatgccatattttccaattca

SEQ ID NO: 258398 - DNA, 457 bp, Cannabis indica
gatggtttttgtagaagaatttagaatgtgtttggcaggataaagttgggatcattcaaaagggagtgttcattgtttgttttaccacaatggtaaaatcaggataaggtgctttaaaaggggttaaaagtcttagaatccagatgaaagggacactaagggagatgttaagacaattcggatttggattctgctcaataaccttgaattcaaatagtggggctctattcaatttttttgaattgttagggaagtttattacagtggatgcgacaactcaaaattgagatcagcttaaatttgctcatgtggtggtggaagttaacctataacaagagttttcaaatatgattgaatttgaaaatgagaaaggggagatggtccaggtcgaggtggactaggcctggaagccaaccatttgtactatctatgagacatgatgctgaagtgtgcaaaa

SEQ ID NO: 258399 - DNA, 702 bp, Cannabis indica
aaaaagtgctttttaatgattacagagggtctacttgtcataattccttttgaaaaaatgcacgtctctaattttggtagttttatggtttcgatacacataaataacattaatgggctgtctttttcacttcccttttattctcatccattaggtcttccatattatgtccttagtgatttcagcatccttcattattcttccatattcgaaacccatagtgaatgagtttcatgcccacacatagcaagtcaagtactcaatcatagtgagtaagacagtggtaaccaaacccgaaggagagaaagagatccatgttcagaccttgataatgctctgctatagaaaggaatcaagggctagagatcttgaacggaaggagtcattatattctgctacaatcaatgtaaggttttcttaaaccgttaagtgtttattttcattgtttaagagaaatcatatttaggatgttaattcaacatacttgttagtaaatctagatactggtaaaatattcccaacacaagtgagattgaaaaaattaagtgatcaaaagaatttgagtgataacgataaattgagtgataaaaagaactcaagtgacctaaaaaagagagccgaagacagaaaacaatcgaggcaagtgagtgagaaaagaaaaagaagagttctatcaatgagaaaaaatagagagaaaacaaa

SEQ ID NO: 258400 - DNA, 1180 bp, Cannabis indica
tggtttttggatgaattttaaattatagttaagctaagaagattgtaaaagaaaaaataaagttggttgtatgatacacaaaaggaattcttcttagggttgaagttacttactgttgcatagaagcttagatgattttatagagagaagaataataggtgagttcagagaggatttgatttattggtcacttatttaagggtggttgctgagtttgctgtacaaaacttcatatttgctctgcagatatataagatttatatcccacttacacacatgtaagctggtaagcatctgatttgtcatacttcatgttggtttaatctcaaaccatggctctgcaaatttgtggaagagtggggatggttgtaatttggctctttctcttttaccatttcacttttacattgtaaagaattctttagaatagtctcacatagaaatcccttatagtacttgtgatgattaattaaatgactgtgctatagccacacaaagtagtggtttaacatgattgttagagattatcaacaatattttcaccttcaatttcagttatgtaactttattgttaaaatcaatgggataggaaaagaaaatattaatctagctatcacaagtggtaagttatacatttgctcctatttatgatttgttgattctttaagctctgtatttttagaattggtcctataatttttttcactttgttttcagtgattaaaattaaacctcctaaataaacaaatgataagtaaagggaaatgaaataagaaagaagaaaagaaaagaaaagataataaactaatgaaatgttcggtactattgtgtttgtcacttacagattcataaacaatacctcattgattttgtaacatatggttaatacttatattgtataaaccagtgattaattgaggtaggcagatgatgatgaagaaatatgataaaatattaaccaagttctatgagaatgattgtatctaatggtttgttggatactatatatgatatatatatgtcattttctctgaaacattacaatactatatatgataatagctagaaattctttctaatcctgccccagtgtcttctgctaaaccagaaggattaagcatctgagtcctgctctttgactttggtactaaaagggcatttctagtttgttgtatgtgtg

SEQ ID NO: 258401 - DNA, 831 bp, Cannabis indica
  modified_base (717)..(717): a, c, t, g, unknown or other
atattatattattgttattatatataaacgaaacatatcaggttccttttaattatatatatgttaagctttacatatataacaataaataataaaagaatgaactctcattctctctcttttgataaaacattctctccctatattcattttttttcgattttcaatccaaaacttagcgatctaagcttcggtaatagcaggatagctaatccttgaagagggaaaacttaaggtatggtttaatttcgttttaagttaaaataacaattagtttcgtatagggaatctgtgaattaaaatagttatgaaggttctgaccttataggattgttctcaggtagtcatgggactagtttcgatgtttacttgttgaatttgaggtgattttgagttagaaatcgagtttagaactttttaaatcttagtccgaatattaatggtgtttttcatttaagggctcaattttaatttctattagataaggatggtaatatttatggcatatatgtaccctgtgaagtttggagtgatttggataagttttggcaatgtttcggtgagcgcgaaaattgagattttcgtatttcatagtttttagaaattttcaggagatcagaaatcgtatatttgtcataacttttgactcgggtgtttgttttggacgttctatatactgtttcgtaagcttgaagcgagctctagaatatgatgtangttttttgagccacaatataagtttattttagttgtatttataccgtgggatttggtagaatacctacgattatctatattaatattaagcagtgatttgggtataaacagtta

SEQ ID NO: 258402 - DNA, 425 bp, Cannabis indica
aataacaaaatttaaaagttagcaaagtgttcgtgcttcccgttaatctttggaggatcagaagagtagttcaagaagttagacccaggtttcgtgagttgctggagtaagttcaaactaacttccagaggcattttttggctgccaaaaaaataaaccttgaagttagtgctttgaccaacatcaagcagttgcccatggagactttgaaaacttttataaagagattcaaggaagaaacaattaaaactaagaaagtaaatgatgtataacagttggcattactgaaagccgacaacagagtggggcactttttagaacgaccttcaataagaaggtgcagcctgcttgtaacatttccaaaagctaacccagaaatacattaaccttgaagaagcatagatcatggcatttggtggatatta

SEQ ID NO: 258403 - DNA, 721 bp, Cannabis indica
aaaagtgatttagcatatcatttatcaattttacgtgtgttgtgacttacgagcctataaatcatctagcagcagttcccctcaggttgaacagcctacttgaattcggaatcaaggtaagagtagtataataaacgcatatgtgcttacatatttagcgtacatatttatgaatacctattagataatatatcagtaatgacggtattagtgtacatagagttgcactgaacactgacggatatatatttggcatagtacagattgacgctatcacatcggtatgactagagtaccgagtataggctgatattacggtcaatagtactatcgtacaaacattctagactcattacgcatgggatgcgagataggactgtaatttggtgtatggacgcctagttgtaatcaattgatgtttatgttatatatgattatacttttcttattgattctgtcgactcataggtattgtttatatgtgtaggtaaaggcaaagctaaagctaaatagcagtgagcacgagcggatgaagattatacatattgaggcagttagacctggagtgttcaatcttcggaacagtaagctttattttgatagttgctaggcaacaacttttgtaactaagtatttataaaatggttgtaactttaaaacgagatcctaaattacgtaaagtatctatgtattcaagtttaaagtttaattataaaaattt

SEQ ID NO: 258404 - DNA, 844 bp, Cannabis indica
aaaagacctttccttgtagtagttgccgcctatgaaaggtgttggacactactagtgtccaataacaatactcaaaaaacttatagtctatcgtaaatcatgaagggtaaaggggccttctattatagatgatcataaaaattaaggaatatttaaattcttcctaattcatagaccgcaacattaacgttgtaatatacataagaaaaaaaatactccaagaaagttagacaataaaattttaattttaaaaaaaaaattcctaaaatatattttctcccacaaacatatctacaagaaaaagtagatgagtatcgaataaggtaaatactataaatatgaaaatttctattttaatgtaatagttataacttatttgtaaagtctctattgttattaggaagattaaatcaaaaaacagagcaaagcaagaaaactttttattgaatgaattgaatggtacaggagctgtatttatatagcattgaatacaagtgtgggttagacagattaactgactaaattatgcagttgtggcagtcgacttcttcacaaaatggacagaggctgaaccactagtttctataacttgcaaaaaagttctcgattttgtgatcaagaacattatttgcaggtttggcattcccattgaaatagtatatgataatggaactcagttcgatggtaaattattcactgagttctgtgaaaggaataaaattattaaaagcttctcactagtatcaagacctcaagcaaacggacaagtagaagttgttaataaaaccttaagagatactattaagaagaagttggaagcagcaaaaggaagatgggttgacaa

SEQ ID NO: 258405 - DNA, 711 bp, Cannabis indica
tgtcttactatacggctcgatcaaatggattgaaggaatgaataaggggaccaagtttgagcttcttgcgcctgtttttgcagcagtcaattaccacatttagaataatcgaaatacttttgtttttaatagttacacgaattatattgtagatatgattaaaagataaatttatcatagagcttatagcattttgaaaaagaaaaaaaaaaagagtgataggagaattttgatgtgtggcccttgtaagagttgttttggccaattttagctctctttttggtattgtggttgtgattattaaagattttgtttctttataaaaaaaatactatgaattattaaaactcaataaattaaaatatcattttgcatgtagaaatataaagattacattattggagaaacaaaatactacattcatgataaaagaaaacattacattacattattaaaaagaaaattgtaatgtgggcttgacactactacaaaaatggtttttctcgacgtttttaaacagtcgtttaaagtattctcgtcggtttctataaccgtcgcctatacgaccgtcgtaaaacgggcaaaataggcggcggtttaaaccgtggctaatttggacttcccgacggtttaaaatcgtcgcctataacagggtataggagacggttttaaaccgtgctttatactgtaggcaacggtttaaaactgtcg

SEQ ID NO: 258406 - DNA, 585 bp, Cannabis indica
ggaatatcgagttctaagtggaagattttgtatttctttgagtatcgcctatgaaagggatacatagaaagggaagctaaaccctagattcgttaaaccattttggatactggagtaagtaggccaagtatcctatatcggctagctttaactcatgcgttatccggagtgtatgatgtttcatatccccatgctgagaatgcatgtatcagatccgacacctattcctagttgtgacgattttgagcttcagacagatttattatatgagggacagcctatctaagttttgggctggaaagacaaagtactttagaataagacaattccactagttaaagtgctatagagaaacaacaaaatagaataagcaacttggaagttaaagtcataaatgtgggagcaatatcttgagttgttcaggtaaatttcgagcacaaaatttctgtaaggagttgatggttgtaatatctcaaaaacctaattgtgaataataagcctttattatatattatgggattaatgagagagtaatgactaggattatgatcctactaacctaattcagcataaattatgaatttt

SEQ ID NO: 258407 - DNA, 665 bp, Cannabis indica
tctcttgtgtctactccacctgtacctactcaagttgtgccaactcaacctctgaactctgagtctgttccttcctctcatctgcctgttgtcaataaccattccatgaaaacaagggccaaatctgggatatacaagcctaaggtttatctgacttttcaagagccaaccagtgtgaaaactgcccttcaacaagagaaatggagacatgccatgaatgatgaaatgggggccttaagaaaaaatgtgacatggacttatgttcctttgcctgatggtaaaactcctattggatgcaagtgggtcttcaagataaagcttaatgcagatggtaccataaacaaattcaaagctaggttggttgctaaaggcttccaccaacaacctggttttgattttactgagacgtttagccctgttgtaaaaccagtgactattcggattgtgttatctcttgcattagcaagaggttggtgtattcagcaactcgatattaataatgcatttttgaatggggatttgcaagaggaggtctacatgatccaaccccctggtttcgagttgcctgatgctcctcacttggtttgcaaattaaataaggccctctatggcctcaagcaggctccacgggcttagtttgaaaaattgcatcaagctcttttgtc

SEQ ID NO: 258408 - DNA, 1927 bp, Cannabis indica
atttatacatttaatagaatttttatatacttttaataaaaatttaatatttatatatgttgacttgtctacatctttactataaaaaaaaaggttaattttaatccaaaatatattggagcactattataaaatttgagccaaatgtaatattgactcattgttttagctcaaattatatactatgcccggaagatgataaggaaaatgttaaggggtgttaaataccataaatagtatcatactggggaagggtaacattcatgggattaggctaagtaggggaggtccaattattacccacctgttttttgcagatgaccttatcctggtgggcagggctaatttaaatgaagctaaaagtgtttggaattgtttggagaggttttgctcttggtctggccagaaagtgaataaactcaaaacgtcaattctttagtaaaaatactcctgatggtatgaggagagggatcaaggaagcattgggcattaattcaccagaacgtgctataaattacttggggctgcctcttttcagatctcgtcagaaggatgctgattttaattttattctggacaatctcacgtctaaattgcagggctggaaggctaagaatttgtcaaaggcaggtcatgctacccttattaagtgggtgggcctgtcgatgcctatatatgccatgcaaaccacaaaactatctagtcgtatggtctcgagggttgatggtttagtccgagatttctggtggggctttgaaaaaggaaaccatggtcttcatttaaaggcttgggataagctgtgccttcctaagtctttgggtggattaggtttccaaaaaacaaaggaaatgaatctggctttccttgctaagtggggttggaatttgttaaatagttctcaatccttatgttgtaaaattttggaagccaagtaccttaaggggaaggaatttctcagctgtagctacaaggactcggatgcttggttctggaaaaatgttgtgaaagccaaatctattctaaagaaaggggcttgtaaagcaatgactaatggtaggacgactaatatttggagggatccttagatacctcatctgaaaggttttatcccgaaaccaaggaatgggatcttaatcaatgagaactgtgtggctgaccttttgcttgctaatggagattgggacatccgaaagctaaatggcctttttgataaggaaacggtgtctgcaatcgtcaaaggcggtaaaccttcgggtatagggaatgatagatgggtttggacattagagaaaaaaggacaatttactggtgaatcggcgtatctgtctcaagccttggacagagctcagcaatgtgcagttgctccgacactttggaacaagttgtggaatagcaaaatcatggagaggcataagatcctttggtagtgcattctctctaatgcacttcctattagatttgtgattggaagaagattccacgcaatgcggggattcgagtttgggactgggtcaaattcatatggaatcttaatactagggggattcgagtggatgaagtttttttatatgcttcgattgttgttgaaactatctggagacttcgtaatgagattattcataacaactctcttctggatgtcttgaaatgtattgatttgagggaatcgggaagcctcctcctcaggattggataaaattaaattgtgatgttagggtaggcttggatagtatttgcattgtggtggtagctagaaaccattagggttctgtggtttggattcacacggctcagttagactttgtggacgccttatgtggagaagcagcggcttgttgttcagctgtctctttggctcttgagcaaggtttcaagtatgttttggtggagagtgattccagaatagttatcaatgctctcaatggga

SEQ ID NO: 258409 - DNA, 534 bp, Cannabis indica
attttcatagataccccgtgcacgtccaaatgacctaactcagatgcaaagtccttggccttttgctatttggggaattgacctaatcggaaaattgcctaaaggtaaaggaggaatacaatatgcagtggtcgcagtggataatttcaaaaatataatatgtcggtttggactcttggaaaaaatagtcttggacaatggcacgcaatttgacagccaattgttcactgatttctacatgaaccatggaatagtaaaaagtttctctgctgtagcacattcttaagcaaatggtcaagttgaagcagtaaataagacacttaaagatactttgaaaaaatgagttgaagaagctaaggggaactggccggaggaacagccaaaagtactatgtgttggaattattttaccaggatctagatttactaacaagtatgttattaacatcctaaacatgaacttccaaaatgatatgaaataaacacatataaagtatcaaaaaccttaccgtggttgtagcggaatataatgtct

SEQ ID NO: 258410 - DNA, 1086 bp, Cannabis indica
gtggagtagtaaacagactatatccaaatgctattgtatatctcctttgctgaaatgagtcacaatcaatcaagttggtaagttggttcttgatggttacaagcttcttccaataccaactcgcatggatagaagcattgtaatcccaccaattttgatctttgatgtagacactatgaacccatctaagccaaagactctcttggtggctcgagatagcccacacatacttactcatggctgccttgttccattcttccaactttttgatgcccaatcctccttcgtttttggttggcatattttgtcccaagctacagctcctgcaccatgaaacatagcttgccctttccaaagaaaagctctacaaatagattcaattgccttcagaactttctttggcaaaatcactatttgactccaataggcttgtatggctataagaactgagttgatcaatgtgattcggcctgcaaaggagaggttcctagaactccaactcctgattctagctgtcattttctctgccagaatttcgcattccttccctgatatcctctttgcacaaatgggaatacccaaataagtaaaaggcagattctgcctcatatatcctgacagttgcaatatcttgtttacacttccttgatccatgttgctgcaataaattgcagttttacttggattaggatgaaggcctgatgtgttagagaaaagcttcaaagcctgtaacatatacaacacacttctaagatcaccatggcgaaatagaagaacatcatccgcaaaggccagatggttcaatttgagactagtacatctgtcatggaaataaaaatcctctttgtctccaatcttccccattaatcgagacaggtattccataccaaggacaaaaagcaacggggacatgggatccccttgcctaagccctctcttagactcaaagaaaccgtgtaaggctccattgaacataagggagaacttaggtgtagaaatgcagttcataactaatcggatgaagctctgggggaaattcaagcctgttaacatttcctcaataaattcccattcaatagtgtcata

SEQ ID NO: 258411 - DNA, 517 bp, Cannabis indica
tattttgacttattattatatgtagtcattttgtaaaacttttataacagagatctccgaagcaaagttttagtgttgttactttgtccgttacaagggttttattttagtgaagtttttaatattatcacatattttaaataattaactaatctaatagtacaaaattagctaattaactatagtttataaaatcacacacgtggcatccctatagattaggatgttacatcatattatgtaccactatatatgttaatatgatatatacacacatatatatatgccacgtatacatatatatttttctttttatatatattaacatataaaactttcttatctcagcacaagaaaatttgttaatacatatattactattattaattttaaataaccatgctcacacatatatgaatggctttcacacaatatttcttatctttatattctcacaatcttgattcatcccctcttccattgaaaagggataagcttttgattgttagagatttta

SEQ ID NO: 258412 - DNA, 603 bp, Cannabis indica
ttttttttaatgtttattgataggaaatcgacatttatttatggtttgtcaatggtttagtggcacttaattaattttttgaatgtcttgagtttgtcgatagggtatcgatattttatcaatgatttatcgataattttacttaagttttacatttttttttcaagttttgagtcgataggattggtcctagttacttttcggaacgaagtggaagaaggaaaaggctctcaaacgagaaaaaatatccaatgacttcaaaagaattgaatgagaaaaaagatatattgggctatatggtacaatgataatcagcaatacaaaattcttctgatgtgtacctaatttagtaccatgaaaaatcaacaagttcatggtggtctatctcgctctcggttcgtggtgtggtggcacaattcaatgaattcctggttaggcaagggttaagtagcgacggtagttgagagaagccaaggagaaagaagagagaaagatttgagtaggtgagatttgaggattgttgggttgagttttgggtagatgtggaggttcagtggtagcggtcggtgttctcaatgcttaggtggcctcgatggtgcgaag

SEQ ID NO: 258413 - DNA, 609 bp, Cannabis indica
ctttagttgaattataagcttttgccttagcacatgttttgaaaaaacacttagtatatatatggagcctctttcttcacaatttcctccttgactttgtggtgaacttcaaggcttcttcccatagattccatgttcgactccaaatatatctcttttttggtgtatcgagtgacgtttgaaatcactcatggctgagtggctttgaattacccaaagctgagtgaatcttagggttactcttaggtcgagtgacatttgcaaatgctcatggtcgagtgacatttgcagatgctcatggctgagtgacttttggtcacttaagggtgagtgaattttgaaattgatcttggtctagtgactcttagggttactctttggctgggtgacatttacaaacactcatggctgagtgacttttagtcactcaaggccaaaattttgatattgttcttggtcgagtgacttttagggttactctttggctagatgaaatttacaaacactcatggccaagtgacttttagtcactcaaggccgagtgaattttgaaattaatattggttgagtgaatctttgggttactcttttgtttgagggagttcattt

SEQ ID NO: 258414 - DNA, 655 bp, Cannabis indica
ttttaattcggttcatttggttttcaaatgtgattttttttttgagtaacaccaataacgaagctataaatagtatattgagatgggacacttctataatagtattttaggtgtgttggaaaattttaagtaagttaaagcacttatattctctaaaaatataatttcttaaaaatatttaaaaaattgaacaaaagattctaaatttattcttcattttttttttaaaaaaaaaaaggtgtcagcgaattttaatatatatttttaaaaaattactatcatgatctatatttataaaatattaaatatatttttttaattgttttagatttataatttatgtgttattaatattatatacttgaaatgaataaatatattaaaatttaaaaaaaaatgaagttttgatgacacattaattaaaaagaactattgtatggtgtgaaatgtaaaatagagaaaaagtgaggtagtaataaaaattttgtagtttaagtttggtaaaactacgtgtataatttgttacattattaatcatgtgtgattatgtttatcgcgtacaaaaaaaaaatataagaaatgcccaatagaattaaatataaagtgatacaattatctcaaaataatagcacatcctacctcttaacaagagaat

SEQ ID NO: 258415 - DNA, 1020 bp, Cannabis indica
gggaaaatatcctaattagcctttttttatgccatatttttgtaaaaaaaatggaaatcccatatttgtaaaataacaataagttctgccagaaaagtcaccgacaccgaaaaagccatcgtcgccggaaaagccaccgtcgccgaaaaagtcaccgtcgccagaaaagtcacagtcactagcaaagtcactggaaaagtcaccagaagtaaatgtctcagatataactaaaaatataaccggttctatgaataaaactaataactcaaactggttataattaaaatataaccggttctgtaatataataaataaatataaataatataaaataactcaaaacatttataattagaatagaactagttttataatagtgttataatgaataaaaacaaataacatgaaataattcaaaccggatttaactaaaatagaaccggttatataacataatgcatacaaacaaataacacgcaataactcaaaccgattacaattaaatacaaagaagaaattagttcctaaaacactgaaatataaattaaaaacaaaattagtttcacaataaaatacttcataacacataatacctcataaaatcggttataattttttcttaaaaaaaagtggggatcaaatgtctaggaattaataaaaatagaactggttctatagcataatgaataaaaataaataacacaaaataactcaaaccgattataattaaaatataatcggttctgtaacataatgaataaaaacaaataacataaaataatttaaaccagttataattaaaatagaaccagttttataacagtgttataatgaataaaaattaataacataaaataactcaaaaccggttataactaaaatagaaccggttatataacataatgaatacaaacaagtaacacacaataatttaaaccaattacaattaaaaaataaagggaaaatcagttcctaaaacactaaaacataaattaaaaacaaaactagttctacaataaa

SEQ ID NO: 258416 - DNA, 900 bp, Cannabis indica
aaataggagaaaaatcaaataagttatttttcacagttgatgatagagtgaaaattagcttctgatggtgatggtcaagtttttagtgcccgatgggtcccattgcgggttacccagagcttatttttgtaactcccttgggtgaattttgacgacgatatctttagaattgcaactgggatgtgagacatgacttagatagaaagtttaaatagcttcaaaatgcaagttgaatcacgtcaatcagataaaaattgagtgagttatggctgttttactgaaagtggttcaggtactagcgactaggttgtcatccagtgcacaggtggtacatcccaatgcccaggttgacatctgacgtcaacatggacgatgtataagtgtaaaaacgtccaatagatgtcctttgagatgcctaagtgatagttggacaccacttagtctatttataggttctagcaaagctggtcactagttcttggagatagttgctattttggggaaacagaagactcgaaacttctgatttccgagtgagtcaattttccaaaaaattgaagttgtgaattttattgttctgacttcatggatcatttcacttgtgaaaaactagactgacggtcgaaatgacatcaaatttagataagcagaacccaacgaactatgttattttttgacatgggcattgggccctttaaactgagctctcgggattctgttttcaatactttcaaggcttctaaacttaaggacgagatctcatcttctgtttttgaccatgccaaattcaatggtcgcattggatttgcatttgagcaattgaaggcagcgtcccagattgattgtcaacctggacgttgggcccagcaccaagtcaacttgtgttggaattattttacc

SEQ ID NO: 258417 - DNA, 590 bp, Cannabis indica
gattctccttcttgttggttgattttccacagtcttacacactatgattgagataccactaaaaagtgttacacactgtgatcgtatatggaaactcatgaatcaatggcatgctaagctcttttctattggtggcagggaagtgcttttaaaagcggttgttcagtcaattccaacttatgccatgagttgtttcagtcttccgaagaaattttgtaaccaattagagtctatgatggctaacttttggtgggtttctaatacaaataattccaaaatacattggaagaaatggaaagtcatgtgctcctcaaaagctgatggtggcatgggctttcgatcattcattcactttaatcaggcccttttagcgaagcaagcatggcaaatattggatatccctgactctcttctagcaagagtgcttaaagcccggtgttatcccgatttttgcactctaacgtggcatcacatgatggtgacacgtggaatcgacttcgagtatctgatcagaaaatacagtccgaacaggatgcctcatatgcatgcctgaagcaaagcgatcaccaattcgcgcagagcgaccaaca

SEQ ID NO: 258418 - DNA, 584 bp, Cannabis indica
ccttgaggacaaggtgaaacttgtagggggtattgataggccacctttgacttatgtgtatgctcgtaggggtaaaaaggggaatatgattaacaccacatcagattaggcttttgctgactgttatttgagttttgcttcggtgtgggtgacttaagatacactctgtttagtaataaggttgggggggggggggaggaatcagtgtgggggtgtgaagagttttatattgtattttcagttgtacttggagagaaccaggctctaaaattcttgggaattaatcaaaggcagatctgccattttctttaatttgctctactctttttttttttttctagttttgatctcaatttgacagggagttcctatcatccatttaaaccgacctttattttttatttatttttcattagtttttagtgttcaaataattaattttaaaaaataaatgtataatatatccctttcaagattaaaatagttatagtttaaactaatgttaaaaacaaatataaattgaataaacataaaagtattaaacaatatttttcaaaaaatagaataaaaatatatatgtaaat

SEQ ID NO: 258419 - DNA, 1171 bp, Cannabis indica
atccaactgtgcttgcatggatgtatgaacctgttcggcctcttggctaatcagtgccacatcaggatctctttgagctggatcttaaatgtgaactctaggctgagtggctagttgaacatattgttcgtctaaagctctccttctattcagatcatccttgagatcatgagttgttccagtctattaaatactgaaacaccaagctgtctcagtgactagttggtttggccgagcacttggccagaaccgttagtctgggtggcgttattgggtagaaccccacctgatgaattgccagataaggtctgcccgcctaccacttggcccataggtggaacctgtgaccagggattggacgactaatcgttctgagtttaggtagtatgcccagctagaatttcttctgaaccgcctagtgggatgctagacgcaggttgttggttagcaacttggtaggctcttcgtatcagtacattagcctatcttgtacggtcgtcgatggctgcctgttgagccttcaacgatcctatctctctatccctccatttcggcgaactggcgcctttgctcttcgaacgcaaggttcactgcaacacagagctcttcctaataatgatgcaaggtgatagtatgaccttgcatgagcccaagagcattacagaggttctagatcttagtgtcatctctaatagttgtctagacatttgttgttgaagggatcccagtgctgggagtaccaaattcggctactgaactagtgtttcaagtctcttgcacaccgagtgtgattcaagataaaggagatgtcacaccttcacccgtggtaggtagttgggtgtttggttgttcaagattggtggctagtgcgacccttgcattctctgaagtctacagtgcgggatctgacaccagtggatccacctgatcgactacgcctctatgagtttgtaccaccatagtgattctaatcaaactataagcaaagagcaaacttagattattgctctcaattagagcaccaaaatgttgacctcgcttttagccaacaacaatgagtcaaatagtaagcgatagaaaatgtaattaacatatagtataagcgaataaataataaagaacacaaggttttaaagagtttcagcccgtcagttcggtaatagcctactcc

SEQ ID NO: 258420 - DNA, 564 bp, Cannabis indica
tagcagaattactttctgctgctgcaaacgtctacagttttaatattttcttatatacaactcacatttgcaaaaaatacggtttttcatattcaaaaggatgagtggttatcgttgtcaatttatctactaccctataaaacaataacacatataaatatatttgggtacaatcaaaccagaggcaattactccattactactttttctccctaagatttgacgctttacaagaatcatgtataaccattgtaaattcattaaaaaaatccacaaacaatagtttaacagcataataaaagaaaacataataaaaattatagtcagaagaaataagacttacaagtagagtttagatttgtggaggaatatgtgtctttaggagtaaaactaagcccccagaaagatggatcaaatcacactgccgccttcttcaacagtcgtgtaggccaagtaagcgacgtctccgtttagttatttgactgtgaggcactaaagctagagcgagctatgaatgggaaaagaagaagagagcaatgaatctagactagcaaaagtaaataa

SEQ ID NO: 258421 - DNA, 1142 bp, Cannabis indica
cattaaaaacccgcaaaaattggattgggttgagttttaacccgcggtttggcgggcgggtacgggttagcctaaaaatgggcgggttcaacccgtacccgtaatatatatttttttttaaatttaatttatacctaaaaaagctgcctaaaaaactaaacaaaaaaaaaccctaaaactaatttacattcaaacttcacagccgccagccatcgtccccccccccccccctccttcttcttctccgctcatccgtccccccccttcgccgccgcccagcctcaggccatcaacgactcaacccagccacttcgccggaccacccagctcctcttccttctctccactccgcaccacacagctcctcttctctccgcagtcggcaccacgcagcttcgcagtcggcaccacgcagcttcggcctctctctcatgaatcttcacctggtatttttatttttaagcttgaatcaatgtttaagtaagtatagctaattgttttgtttgattttgtgtttatttctgtagtttttttgagcaagtattagtattgatctgcctgttcatttttcaagacttgggactgagttaattttgggtacttttgatttgcttgtagaatcattagcaaggattctatatttgcttccgtttcagcaattcgggtattcctccaagctccaataggtatttagcaaatttttattatgtttgtttgttgttcactagtttgtattattagatatgggaagcaataatatgaactcaattcaattttcagagaaatgttcttactttcttctacattactcacttttaatttctgcttagattattgtttataatcctctgtttcttatataatttgaattgtaaatcttgaaagattgatgataatgctagatttatctgttttcattacaatgtggttccatgaaatggtttttaagataaaatatagtttgatatattctagtaataatttaatcttttatcttatcttgtctgttagcaataacatgaactaattgctcactttaatttgacagacttgagaatatgagattgaaatgatatcactaattttgagttgtttaatgtttgtctatagactttactgttttctcaatgtaaactgcctac

SEQ ID NO: 258422 - DNA, 948 bp, Cannabis indica
atataatcatgaaaataatcatggttataaacatataatcatgaaaataatcatggttataaacatataatcatgaaaataatcatgtgaaccatgcaacataaaatgatttctaatttttattaattagtaaatctaatttatattgaaatgagttttatttaaggtatatcccaacaaaaatatcaattagacaccttaaagtacatcctttggatgtttttacacttacccaacgtcctggttgacgtcatatgtcaacctgggcgttggaggtcaacctgggtgttgggtcatatgaactaccttcagtaaaacagtcataactcactcaattttgatttgatttacgtgattcaacttgcattttgaagctaattaaatgttttatcaagtcatgtctcacactctagacgtggttctgaagctatcatagtcaaaattcacccccaagagttacgaaaataagctctgagttacccgaagcgggacccgttgggctccaaaaaatggccatcgccaccaagaactaatttttaccatttagaatcatcatcaatagtaaaaaatatcttatttttattttcccctatttgtgtggacctccttcacctataaaaggagtagctcccttagcttatttttcacattcaaaaaactacccacaaggtcagagcttctctcttcaaaaatttgatcttttgatacttagggccagtttggcacaacttttggaaaagctaaaagcttcttctcaaaaaaactgtgacaaaaagctgtttggtaagctgttaaaaaatcaacttattgaataatttatagaaaagctacagctaaaagctaaagctggtacaacccaacttttgaaaaaagctgttttgattaaaagactataataagttagtttttactaataaattatttaattatttattatatattaaaaaa

SEQ ID NO: 258423 - DNA, 840 bp, Cannabis indica
cactcctaatagtattattcattaggctcgattttctattaatatttcttttctctcaatattttataatatatttcttggtagattgttaattattgtcaatattctctggtactttttttcttacatatatttgtatgtatagactcttaatctttctctcacttcaaaatattttccgataatttagagacataggtttttctttatgacaacttcacggttgtcagtaattttgaattattcatgattttcattagtataataaattatttgatgtagataagttatttttttaatgataggccttgagattcgtgaaagatcataaaaagactattagaataaagttgaggatgaacgcggtgacataacatcataaacgctctacactatttttttttcaatttttttctcaattttaatctacattattttttaaaaaaaaatctacattaataaataattgaaataaaaataaagcataatcactgatataacaactaaaaaaatccctaactaatggtgtatatagtttttttctaaaaagattcatgtatataataaaatggcaaactaaccttcacggtaaaacttattaattatttgtatcaaatattttaatttaaaaaaataataataatagtaataataaaatatcaatgtttaaactaaaaataattaaaatattgacatagtgaattaatatatatatatacatatatatttacgtcaccagttaataatactaaatcaatatctataaatatatatatatattaattctctatgtatataaaggagagatatgaggcgctgacatgacgcttcaaaataatt

SEQ ID NO: 258424 - DNA, 1237 bp, Cannabis indica
taatagaatttatacattaaatacaatcatgaaataaatcatgtgaaccatgcaacataaaatgtgatttttggtctttattaattagtaaatttgattatattgaaatgggttttattcagggcacaaaacggcacaaaacccaataaaaacatgatacaaggcttgacctacccaaaactcagtgatatcgaactcgaccgagcacgaggatcacctttcacccctgaaattgaagttcatgagctacccccaaagttcaaaatgccaacctggaagatatatacagtaaaagacgatcctttatcgcacttgaagtattttgagatgaaaatggacttgcagggtgtatgaggtgatgtatagtgtagtatttttcttggcacgctcgcagaagccgccgaacaatggtatttcaaactgcctccaggaaggtttaactcatggaatgtcttctcatcagaattccatgcacaattttcctcctctcgtcaacttccctcgtaccttaaagacctggtcgaagtaaagcaaatgctaggggaacccctcagagcttatattagcaggtttatgactgaggctacaaaagttaaggggttgactaaggaaggaagactagctattatactggggggcattgaacctctcagagaattgtggaaggatataaaaaggctaactatgggatcaatggctaaattccttgatcgggcagatgggttcattaagcccaaagaggttgtttggcgtgtggatactgtcgggcaaaagaaaaaccaaccatgtgcctgtttggcaaggatgtccgtctagaatccacaacatcatagcagttcaaatccaaatgggaaaaggcctagtaacaacaacatgcagggcaatggaaagaaaggtaatttaactgacaataccgagcagcaccccaggaagaatgtctctaatttattgccttctcgatcctaatagatgacatagagaaaatctatgtgataactcagtctatggtgctgtacaaaaaaccgtctcccatgaaaaagaatttaagcaagagagacacatctacgttttgccgatttcatacggactacggccaccacataaacgaatgtaacaatctgaagcgagaaattaagtttttgatcacaaataataacccacacttacagaaatatgttaaagccaatcaaaatcaaagggctgcccaagcagaaaaaaatcagacccaattgatgcc

SEQ ID NO: 258425 - DNA, 605 bp, Cannabis indica
aggagggtgacaattgtcatctcagggtgacccccccgagaccccttgtatgttatcagtagttataatgttatatagatgttctcatctacctttgaaagtatcattatgtctatggttggggtagtgtcatctaccccttagactaacttggcatgtgggtgtgtggtgattgttcattctgcttacgaagttgttagtccattatttttccttcttggaaacgcccaccttacccaagctaggggtaaaggtgatcgcctgccttccattttaacagtcataatcacctttcatggttgacggtcatgaccacccttcatgattaacggtcatcccaacggtcatgactttacatatttttcattaatttagtcctagtatttttgtaccatgtgttgctactcttgacacgttatcgtcgttaaaatttaggtaaacatttgccccctaagtttttagcagtatgaccatacggtaagaactttcttgtgtaacctgggtctcgctttaattgttgacggcttggcacagcggcaccaaaaatactacgcctatactaaaattacattccaaaaaacccaaaaatattttccccaaccatt

SEQ ID NO: 258426 - DNA, 827 bp, Cannabis indica
gtaaaagtttaaaaatatagttatcaaaataatataatttatattaaattataaaagattttaatggaaaaaaataaaggttaaataaataatttaatttatattaaattattcacactttatataattttaatctatgttttgtagtctttttcatataaacaaatcatatgaaaaattataattatagattagtaaaagaaataaataaaaaaaaaagtgtatttgtatgcataatattgtaaataaaaaatagagctctaaattatgattttttttaatgattaaatgatatgagaatttgataataattaacaaaaaaaaaaggacaattttgaagcccaaagcccatcctcttttttatatagttatagataagtagattatcttctatgctaataaaatttttaacatataaaaatggtctatcgatcggctaatgcatccctttcgtattttcgaaatatcaaataattttaaactcttaattttttatatatataataattatattgtctttcaaaaaaaaaataataattatattgtaattattttaaaaaaaatcaaaataatttaaatcttaaaaaataaaaaaaaataaaattgtttgagcccaacttttattataaattatttttaaattttcaaaacgttacattaaataactatatcaatatacaccatcatataacaaagattaagaagaaatcacttagggctagctcaagtggccataggtgggtgtgtgagtgttgaaggtcttgagttcgagtcccacataaaacatgttgtaatatataaacgctcaaactcaaaaaaaaaaaaaa

SEQ ID NO: 258427 - DNA, 523 bp, Cannabis indica
cttacctggtattttcccttacggatcacgagactagtgactctcacaaaactttattccaaaatagactacataaatttgcaaatttatttgatgatccaatacacattttatatatacaattgtgactccaataaatttccaacaaaagatttaataccaaattgatggagattccacaccaaatttgtgtaactattagagatggtctaaagaaatttaaataaaaccctaaatttagttttggaatttttttttcaatattgtatcaatacaagtagttatattgttcaattattagttcaaaattagaatcggtctaaattactgttttacttttttagttatttatttttgcattagtactaattatttggtttacgtaccatttgcatttttaaattcccaaaataaaaattgtaaatcattattgtaaattatgtttaaccatttgcatttttcatattcctaaaacaaaaattgcaaatttctttattaaagaaactttaacgagtaaatcaaa

SEQ ID NO: 258428 - DNA, 631 bp, Cannabis indica
tttaaaaatacagggtccattttgtcatttaacaaaatgaaggctctaattgataacttttgcaaaacacagggtccaaaatagtatttaccctttatgtaataaacttttttttaggtaattcacatctttatattgcatcaacaaaacttcatgtacatgctatatgttgcacaccattaaaattgttttgcttttttacatcttgtttagtcctctttgttagcaccatatacatcatatactattgagacaacttagctcgagtaatccatctcaacagtctttggattgacaatattactcaaatgacattcaaataacaagtgttctcttgttactaatttattcattccataaaacaaacatttgtcattttgagctatattcaatttcaacaacctttttcttcacctgtaagatctgtcaagtaccgaaagccataagataaatatgtgattctattccacacctctctatgctaagggattttctgcttagatgagtaaattaaggagacttaggagagtataccccttactaattaattttatacttccttgtcaagaatgaatgcatcaaatttaattatattcttctttcgctttgacaacctgcctccaataccaat

SEQ ID NO: 258429 - DNA, 604 bp, Cannabis indica
attaacataaataactgctaatttccaaattaactaagcgggctttacaagtctcctcttgtggggctcgttatttcttgactattgtggatgattattcccgtgctgtatgggtttatttgttgattgataaattggaggtttttaaagtatttatgtcctttattgctatggtcgatcgacaatttggtcaaaagattaaaatcgttcgaagtgataatgggacggagtttcattgtttagaaaattatttcattgtcaatggaatattatttcaaacttcttgcgtagggactccacaacaaaatggcagagttgaacgtaagcatcgtcatattctatctgtggcaagggctttgctctttcaaggtcaccttcctcgttatttttggggtgaatgtgttttggcggcgagtcatttaatcaatagaacaccttctagtgttctaaagaataaaactccttatgaagtcttatttaattctttgccaacctttgacgaattgcgtgtgattggatccttatgttatgctcataatcaacgggctaagggtgataagtttgcaagtcgaagtcgaaaatgtgtctttgttgggtacccttt

SEQ ID NO: 258430 - DNA, 736 bp, Cannabis indica
agagatgccaaagagaaggagaattccttgaagaagttcccttgtaaggaaactgattctagactactacaatctccaattgtgtctggaattttgtcggacattttattttcagagatgtcgagttcaacaatagtcttaagcttgcccacttccactggtatgctaccattgattgagttttgtgataagttgagtaaaagaagtgaaggaaaatcaaaaacttctttgggtatagttccactaagactattttgtgaaagttcaaggaactttagattttggcaatctacaatgcttgaagtaatgcttccatctaagttgttttctgataaactaatttcggagatttgagtgaggtttcctaaggatgaagggatcttccctgataaagtgttcccttctaaagccaaaatttgcaagaaccttaacgagcctatagaagttggaatgacaccttccaaaagattatcctccattgttaagatgattaagttgaccagatttcttaatgttgggtgaattattccatgtatttgattacttccaagatcaagactagtgatttgagtagacaaattagctaaagattttggtaaagagcctgcaaagttgtttccagacaaggacaacacttccatttggctacaattatttaaagatccaataatatctaagctattggtaagtactttcctagatgatttttctcttaattgaggtgcctaagtcgtgg

SEQ ID NO: 258431 - DNA, 1037 bp, Cannabis indica
caacaagtattgtgaactaaaaatatatttagttacaagaaattgtaatttttgtgacaaatagtttcatctacggactttttaatcacaacataggaatgataatttataattagtcataatttttttactttcagttacaagttttattgtgactaaaagtaagaatttttgtagtgaggggaggagagggcaacttttgaaattgatcgattaccaaataaatacattcgacaaagtagatgataaaactgtaacgagaaataactacggtaaatactattttggaccctatgttttgtaaaagttaccaattagaccctctattttgttaaatgacaaaatagaccctatattttttaaaatggtataactaggagcctaagctcaatttttaacaattttattttttttaatataaccaactttaagacaatttctaatacgaatagataccgaaaatgtaaccaattttatcataatatctatagatcaaattaatattaagttttattttgacaaaaaatcaatttagggtcctatttgtacaattttagaaattacagaatttattttgttatttaacaaaatagagagtctaattggtaactttcgcaaaatacagggtctaaaataatatttacccaaatataactattaggtaggaaaaaactaagttaccttaaaaataagaagtttgatagcaaaagccctacttctcttcacttcatgctcgtacacgtacaaccttggctttgtctcatctactgtagccgacaagagttggaacaactccacaatccacaataacatttaaaatttcctctgcacgaatcacaaatttactagaaactcataaaccctaaactcgccaaaaaatcatatcaaaaatcacaaactaaactaacaacaaaagaaatattgtatacttggttagcataaaaactgtacagttcttggcgagtttgcagagcgcatgggtggcgcttttggatgcagcacgatcagaatcaattgaatcaacgattttgatgtga

SEQ ID NO: 258432 - DNA, 885 bp, Cannabis indica
attatctctttttaaaattacatattttttaattaatgttaaaaaatactataatttattttaaataagagtttaaaatatcttttttcatatatatcacttactaaattttaagggagaatggtgtgttagtattacatttaatataaaattgtactaatattaacatatcataagtgtctcttagacttttaccaattctcaagtactaatgtactgaccaactaattaagaacttattttttttttacatatataagacaataataggggtatctttttaccttttttttcatctgcaaaaaaattaaatagaaaatgggatatatgatttaatttaaatgttaaggaatattaattattggagagtccgaacatcaaagcaaggaataagtttttagtgccttgcttttcttttcttctttttctttttttttttactataaaaaaaatattagtgccttggctttactttgactgcccatcaatctataagctataaaaagaagcttattagtcaagtaactatagtcaatttatataatatattttccctttaatatttattgttcatcaatactctttggtcatattcaaaatttaggataattattttgttatcctttcaaaagaaataaagaattaatttgttataaaattatgaaagatattaaaaatattattaatcatgcaatctaataagaagaacatctctaattaaatggaataatttatacctctttttaaaactcttttatcattcatacaataaatgacctcttttttatttacatttgcaattacaagatatttttcatatcttatttactaattgatattaattagaagtttttgcaccagggaacctaattttgcacttattta

SEQ ID NO: 258433 - DNA, 1103 bp, Cannabis indica
ttgagagcttagaggttcataatcaccaaatagacacataagagaaatgtcattttgattcttagttacctcataaagttcttgctagcttctaaagcgtgacatcttttcatctgagctctcacttgaatcttcttatatatttcaagttggcgagattagtggagtagtaggttcttgaagttcttcttccatatcattgttgctccgctacatcttcctcttcaaagtaaggaaaaaaatcatactcgtcttcttctgtgttccaattccaagaatcttcttcatcaaactttacatcgcgactggttatagttttgtcagtaattgggttggacaacttgtagcctttggatcttgagtcatagccaatgaagatgtacttctcacttctgtcatcaagcttcgttatcttctgattgggaacttcaatataagaaatacttccaaagactctaaggtgagaaattctaggttttctttcactccatgcttctttaggtgtcttctcatgtacacttcttattggagagcgatttaccaagtagactatgcaagctatcacttcagaccaaaactcctttggcattcttttacttttgagcatgtcgcgagccatgttaagtatggttcaattcttcctctctgccactccattttcttgggggatcttggcactattaatggataatgaattccatgatcttcatagtatttgttgaacttatttgatgtaaactctcctcctcggtcagatctcatggccttaataggaagaccacttttctttttcaactagagctttggatttcttgaaattctcgaacacttgtggttcttgatagtgactcccttggaaaacttcttcaggaatgctttccaagcaaacatccatcacaaagttgatttggttggttgatgcatggaaggcctctccctctcaccatctccttcttagagattctctaagagtttaagctcgccaaaattgagatgtccaaagtgtagatgccaaaaccatgatgactcgttgatattatatataaatatatatattaataaaatcagtaattattctactaatttttacttttattcttata

SEQ ID NO: 258434 - DNA, 663 bp, Cannabis indica
aaatcagatgtatagaagcatgagaggcgatttggttaaacaaggtaatatataattatataattttcttagaaagacctagagagctatatgatacatgtatctatatagattggatatacctattatatatatgtactttccattaaggtgcttctacaaagtttaaaatttaacctaatccgcacaagtgtggattttagatttttcaatccaattcaatccgcgcagtgcggatatccacattttatggattggattagattggatcgtgcggattagattggatcgtgcggattagattggatcggatactcagtgttagtgaacacccctaacttttgattttattggtagagagatgatcttaaggatacaccctttttattttttgtttacttataatttttttttggagattaccacacaataaatattttattacttttgtaaatactgatatatttactatgctaatattgatcattgaagtaatttatttttactttgttttcaaaggaattatttttttgaatttttatgatttaaatttaattataaaatccctaattaatataaaattaagtatacgtgcctcgcacataactttcttctagtatttatatatatatatatatatatatctattctatataagtagtg

SEQ ID NO: 258435 - DNA, 666 bp, Cannabis indica
aaaaataattgtgactaattatagttacgaagatattagttgtgatacttcgcgatattttttccttttagtttcttagtttttttttttttgggctaaaagttattttttttttagagatttcttcttttgccaataattttcatctttcctttttaatacatcattaataatgaaatgataattacaattatcagaatatccatttccctagaatctataaacatataatccaacccaaacccaatctttttgaaatctaatgctatcttttatgtgaattttgagtcatctaaccccaaatatggtcattaattaagtggttcaagattgtaaggtttttctagtttctttaattctcatcaaaatatcttttgttaaacgttctgtaaataaagttattcattgtgttgtttataatttttgtttgtatctagatcatagtttcagtatggatgatatttcaaatgatcttttatatatattgtaatagttgaatccattttatgaataaagttccaattccttttcaaaaaagctccaaatatggtaaatttcattacaactactttaagagctacacatttttagagatcaaagctatcccatttcttataaaaaaattatcccatttctctatcatcatatattttttttttcttttgg

SEQ ID NO: 258436 - DNA, 757 bp, Cannabis indica
ttttttttttttttttggtgaggctgtgagtatctttcaaggctcttttcttgacctactaaagatgtagcatttgtcgcgacactgaacacttaagtttcagtctcaatacttttcttcctacttaaaaaagggagatccaccttaaagcattcatttgaacgtttaatcctgcttttacaagaaaaaggggtccaaatatctttgtggggacctttcacttgtttacaataaactgaaagataatcatgactattaaggtcacccaatgagtttccaccttgattcagaacaaactaaaatgtgagacctaaagtatatcttattcttcttcgcgacaatgtctcattccttctagttttgctttagtcttcttcctattgctcgtcctcagactttcggttttctttgcggtactcgcccaagtacccttgttatattaactcctcaaaaccgctatgaacactttttatttattttgatgagtaaaattaagagaatacatagaaagagaatgatatttctgtagaatgatagaagcaattggttacttcttcgaaaccattattaatatgctttcgaagtcaatgacttattgtccacttagcttgtaagttttgaaaaactattactgattttgttgtaggagggttactataattaataatcatggttgtcaaactaaggccatgcatggtcgaacaaccatgagaactccattgtaggcaccatacactcgtttatgtgctcttgtgat

SEQ ID NO: 258437 - DNA, 968 bp, Cannabis indica
gacaaacttaacccgatgaggtggttctctacttttgtaataatctaactaattttttttaaagaagttttaattgattatttaatattataaaaaaaattgattatttaattttaatttttatattataatattattttagttgtttgtttttgtgttaggttggatttgttttctactttgtatgatagtatgtttatgtgcccaatgtgtttttttttggttacctatggtggtttgttttgtgtttattttaaaaataacttgaggtagcagtgacacactatttgttccacaaataataaagatagtttttttggagaattaccctatatactattttttttaactttttttgtttttttttttttttgtaaatttacggtttgggtttctaaagtagttgcagcgctagttggaataaggatttctatgtagaattttgtaaaaatgtcaaaaaaaaatattttaaagtgtaaaaaataaaaaaaatctcattttttttataaagtaatatttaggttaatttttcagcattttaaagaaattttttttattttaatttaatattactattaagtagtgtgttaattaaatgttatatatataggtgtgtcttttattttactcattgagtcgttctaagctataaggacctcaaaaagataagattcattctcttttaaaattatttatttcaacctatttttatgaagatactaaatttatttgtttggtgttttggtctaggtattaactttttttagcactccttacttttttagttggattaagatgactcaagaaatttcacagttattcaagggaagctctagcgattggttgctagaattggacttcctctcaattttttgttgagcccgattgtttagttttgatctcagcccttttttaagagaattttaattttttttttttatttttttttttttattttttttgtacgt

SEQ ID NO: 258438 - DNA, 592 bp, Cannabis indica
aaatataattaaatactttaattgattcaataaaacttcttataaaattttaggaaaatatttttctcttaacttataaagtcacttataaaataaaatttgaagaagtaaatttgaaaaaaaaaaaaaaaaaaaaaaaaaaaaaaaaatcgggtacaaacccgacccaattgggtcgggtcgggtcagacccaattaattgtttaaggtaatcggggcgaggcggggcggggcaatagcttgtcggggctgggcgggtcagaagcagggcggggcagacccgccccatttgccattcctactaataaatagctgatgttatatgagcatatttgtccgaaaaaagaaaaaaaaaaaaactgagagagaacaaacattattatattttggatgcttctaaacgctttttaaaaagatgtatcaacgtgcctttatttattttgacatctacaataatttttagtctaattctttttataatcctatatgttataaatatttaaaattttgtgtaaattttttaaaaatttggaatataaaagtaatattcaaacatatttcaaataaaagagttttgtgtgcaattttcagc

SEQ ID NO: 258439 - DNA, 1241 bp, Cannabis indica
tttgggctaagtaggcagatgttgaatgatacggtctcaaaattataattgttttatgaaaaaggttataaatataaaagggaatttttaaaatatatacataaaatacaaaataattacaaaaataacttaacaaatctaaattacaataatatcttctgaggtcattaaaaataataaaactaatcctgattttttttttaattttcctgcattttaaaagtaaccttttggttacttatgatgttgataataaaccaataggtaactttttcatataaagtatcacttctctatattatatcatttgtgatacatttttgattacctctaaaatttatatgtatgtactttaataaattatttaggttatattaatcaatttaagtaacttttaagtttatttttaaaaataataaattatcatccaataaactaccattttagtaaactttattttaaaaaaaatatatatcataaatatttaagtcacccatattttttaaatgtaaattaatatatgcattttgattaattaaataaagaataaagttacaaataacttttaaatcattataaatacgacatttttttggattaattaattatgatttcgatatgataccaattagttacttttgataaaatcatcaatttaaataaaaagatgatgatgtgactaaaaatcctataatcagatatatatatatatggcacatatgtcaaataaacttattagtttattttggcatattgaaacaaattttcattctttgtttacatttttcctatagcctaccatcatatatcctaacaaatctattggtttattttggcatattgaaataaattttcattttttttttcgtatattggaacaataattcatttcatttcatatagcctaccattatatatctcaataaacctactaattttgtttgttgtaacaatattttatttgcttcaatacaaagtaaactataatcaaacataatgatatataccaataaacctattagtctatttttcgtatattggaacaacaattttttttttcaggtcagagacatcaaatctggttgtatataaagtatataactgtaacatgtcttacaaacttacatagtaaacatcgataacaatatatgtacctgtcaaagatttaaatatgatgagttgtcttgctcacataaataccttgctcataagtttatttggcatatatggttgtactatgc

SEQ ID NO: 258440 - DNA, 692 bp, Cannabis indica
aatattatatttagctaagctagattaattatatgatcagaaaatcttctctagtaataattaattttttttactaagaaaaaaaaagtatcgttttatcaaaagggattaaattttccttaagagcatctctaatggagaagaaaattagtgatgcaaagctaaaacatagctcatttaataaaaatctactccaatggtatgccaaaaggtgatgcaaatttgttatatgacaaatgttgtgctaaatttggcaaaacattcactatggtgtaaaatttacatcactataaatacactacttttcattgttagtttttagcgttcatatcagagtcccagcgaaagagtaaaaaataggacttaataataaaactttgttgcatctaatatgaaccataaaccttagatctcaattatacataacacaaatctaactattagtttagagattttacctcttgtttcctatcaggattttctcgctgtcttttcgtattaatgaactaaacatccaatctagtgagacttgttgaagagttcacaccaggatcttctaagtcagcctcaatactccaagaatagagtgggctattagattcaatttagatgaatatataactttctgatcacattgtttactcaactcatgagacactatgaataagattggaaaaaacacaatcaccctc

SEQ ID NO: 258441 - DNA, 626 bp, Cannabis indica
ctccttccattactctaaacccaaacttgggcatgaaaattcatacctatctccatatttcttttaaataaaaaaaattaaaaaaatatccatatttataatcaacagcacatccatttccctcacactccatatataattttcacaccctaaattcacttcacctctaaataagtatcttatttaacacagtcaatattaagaaaattacactttatactcactttttattttttattttaatttttttttattaccctttaatttatacccatgtcatgttctcatcgtgttaatgactctaattttaataagttatgggaggttatatttgatactttaattataaaaaaacatatttatcaattaaaattattttacagttatatttagttaatacagtagaacctctattcaagaatacacttgggaccaagaaaataatattctaattgagaggttataactaaatagagttacacttgaaaaaaaaaatcaaaaatatcaaaaaataatcaaatgtagtaacaaaaaataaccaataaacaaattcttaatactatattatattaaaaataattttcgagtacatataatatttatacatgtactataatttgaaataa

SEQ ID NO: 258442 - DNA, 1050 bp, Cannabis indica
ttcagttcattgagctagtaatgacctgtatcagaaccccaaaattctctctcctttttaatggctctatgtgtggtttctttaatgcaaagagagggttaaggcaaggtgatcccatgtctccccttctctttgtattaggaatggaatacttatcgcgaatctttcggaagattggagaaatgcctggttttaagtttcatgatagatgttcctcactaaaactgaatcatatgtgttttgctgatgatcttttgatatttagtcatggagacttcatttcagccatgttgatgctaagagggctgaaacttttctcttcaacttcgagattaatgcctaatgaacaaaagacagcaatctattgttcaggcatgccagatgctgaagttggaagaatcctagatgcctcacatttcaaccgaagttcccttccattcaggtacctcggcgtacctatctgttcaaagaaaatttctcattctgaatgtcaaattttgcttgagaagatggtaagtaaaatcagagggtggagttcccgcaacttgtcatatatgggaagagttaccttgataaatgctgtccttatagctatacatacatactgggctcagattatgatattaccaaagaaattgcttaaagatattgaggcaatatgtagatcatacttatggaaaggaactcaaatgatgatgggtcctggtttggtggcttgggagcatgtttgtacccccaaaaatactggtggacttggccttagagatattcagaagtggaacacagcagccatgacaaggtacgtaagggatatagctagtaagaaagattgcttgtttgtcagatggattcataatgtatacttaaaagatagttgctggtgggattatgaacccccaccgattgtagctggttctggaaaaaattagttggggtgaaaaatcaggtgaaagctaaggtggatcggcaaacttttagtatgcagaaattcagtatatcaaacacatatcacttactgtttattagcccggagaagaaggactggtgcaa

SEQ ID NO: 258443 - DNA, 847 bp, Cannabis indica
taaaataataaagtagtaattttaattaatttttaaaaataatttataattttttttcaaattattagttgtaattattatttccaattttataaaaaataaatataatttttttttaaaaaaaaataatttttagaaactttccataaaaagattattggattattaccttattaatttttttagttcccatcaagggtattacccattaagaagtgttccatatatatatagtacaagaatttaaaaaattaattaaaaaaacaaaataaaatgtcgtatgtgcagtcgacccaaaaattagaggggcgtaatttatttttgtaagacaaccaaaagtataatttagttagatttaaactaatgtcttatctaacctaaccattacacaaaaattaatactattatgtctataaatattatcttctattataaatatgagtattgctatctagcaccttctcgatatgtcgcgttgtgattgactagcaatatttcaaaaaactattatattaaattatatagaacccgataattagttggaccaatagcaatattgacacgtaagaaattgttggacactactggtaccctttcgcatttctctataaatatatatggtaaccatggatgcgactgcccgtttcccttctatgtgggtccgccgtgtgagaaaaaacattttctggatcccaccaattcccccaagagaccatttttgtcgatcgtcgtttatgtatggatggacgacttagagagaatacgttaattaaggtttgattcagagaatatttaactttccaaccagaacccacctcaccttgctgaaccgcaccatcttcattct

SEQ ID NO: 258444 - DNA, 562 bp, Cannabis indica
ttttgagcaggttatgaattgttgggggaaccttggtgcaaaccggttaaccgatttgccaggacctgtaaaaacggttaaccggttttggcagattccctgaacaactcatttcctcgattcgcatccaattcaatgcctcgtttgggtgatttccagttttttagggtattgtggttccttttagtaatagtagaaccttaagatgtaggttcgagttttttggattagagttttagcgtgtgatttacccggttatgttatgtgatgagggcatccatctagcacgagactttccgttcagtcagccaactcacttgaatttggaaaagagataaggacagcgtataatatgtgatatgactatgcgaatgtatgtatgtgttaatgtatatgcatgcttaaatggttagtacactaccaacacttatactgaaaaataatatagagtgcattggtatagtgtatgtggtttaaagagtacattacgatgttaccagcacaagtgcggaaaagtacagggtgtgcgtggtatatcacttagtggtactcagggtacaaa

SEQ ID NO: 258445 - DNA, 585 bp, Cannabis indica
ctctctctctctctctctctctctctctaggaaactcaacacaccacacacacactctaccagttggacctcctgtcgtccgagctattgttgtggccaccttccattacggtggagttggttggacaaccttgaaaccaaaatttttagaaagaaattccttcaaaatataatgagtaagtaatttctttagtaattcataaacaagatattgtctaattttgaattctaattagttaattaaaattaattaactgagtctacaagccaatattatctcaactagtgcaaagaccatgggcttatataatcaagctttcaataagtagttctagaatttaccgaataaattctctacttattaattcctcctgattccactatagattcagaattgcattcttcattatataaaacactccatatgtttcaaatatagatacactattaattatctattgttataatctaaataatcaaagattctctatagatgatttatgccgagtaaagacaaatttaccgttatacccctcaatgtattttatctttaaaacacttagcttcttataaatgatatttcaa

SEQ ID NO: 258446 - DNA, 1792 bp, Cannabis indica
gagactctgttgggataaatcatcaatggcaactggtgtctctggaaatactgactccttttgtgtcatgcaagccccgccaagttcttttttctataatatatttatttggacatgttattaatattgtaagtgattgcttgctcttttgagaaatatttctataatctttgttaaatgatcaactaatgtcgtagcttataattttgctagagcctcattattatgtcttgattttcgttttaatttggagtttaattcaattgatttgctatctagtttggtaacggaagttaatggataataaaaaaaaattatttaaaataattaaataaataagatctaatgttaaattgcaagacatcttagcattttctattcaaaaaatacagagattaatttagaaatacacaaaaataacaaaaatattgttgtatataaatttaaatatgtttacagtttttaaaatttatttacagaaaatactgttttaatatttttcatattaattttatgttgtattcttgttatttataattatttgttgtttgttttttgtatattatattttctttgttaggtaaatttatgcgaattttttgttatttttgtattgttttagtaagatacgttaaaagtataaaaaaaatatttgaatgtaaaagtgtgatttttttaaaaaaaataatattttatgtaaattttcagtagtaatgttatggtgggaaaatcaatccatttatagagatggtccaactgccttggacgttttcttttatcaaaatagataataaatgcagtgactcatttactttattacttctttatggctaatcatgttgacttatgatgtagaatcaaaccctggtttactctaaagattgtttttatctttcatttttaatatatatagaaaaaaaaatatttttttgtttttaatatatagagaaattatatattgatggtgtatattataatattatatacatatcttgtctattttaaaaaatatttaaataatttactgcattaaaaatatataatttaaatatttaataggatatgtacttattttattttacacatataatatattattttaaattttatttttacattgtaaatttttcagaatttatcaaaatatatagacagaataccgattacaacaatatataacatcataataataaaaaaatttatatataatttttaaagtatattgaaaaatagaaaacgtgatatctccacctaaaaagctctctatatgtgttttggataatttaatgcttgtattttttaggttaaacctcattgaattgaaattgcatgtatatcaatttatcaaatttaatatatcattctttttatatagtattattgattagatatacaattacttttaaatttttattagtgtccaataaatttaaagtaaaattttcttggagttgcagtttatacatagagcaaataaaataaacatccaattttttcttttttccagcttatatatgtggtaattattgtttattttattatttaacatacatttttaattttaattaattaactttgccacggaattataattacagattaaaacgatatatatgtatatataattaaggaatataataatgccaaacccacctatctattaaggatgaaattatataatacataacaaccatatttgtttttaaatatacataatataaccatatttatttttaaatatacatgttaattaagggggtactatatactgaatactgattattgaaatgga

SEQ ID NO: 258447 - DNA, 550 bp, Cannabis indica
tttttttttaagtaacaaaagtacatgagacaaaaaacaaagtgattgacttcttcatacccaacaaaacccaaaaaccagaatatgaatattccaacgaaccaccaccattattaaccttccaccacaccaccaccaagctactaccattaccaccaccaccaacatttctctaaaatcaaacaaacaaacaaaaaacatagatccagaagaagaagaagatggacaatttaaggtatttaagaagaagaaaagaaaaggaaaaacaaaaaaacaaaagaagaaataaagaaaataaataatttttatttatttttataaattttaaattatttttatattttaaaataatttaaaattatgtagaccactaaaaacgtgctggggcttctggatggaagtgtaaagatcaaaacaaaatgtgagtttggtaggttttgtcgtaaaaaaatcggtttatgtgattaactgttaaaaaatataaagttcgggtagttttgccgccaattttcctgtataaaataagtagtttcctatagaaaaaagaaaa

SEQ ID NO: 258448 - DNA, 605 bp, Cannabis indica
ttcttacttgaaattaaatttggaaatttttagcacttctttttggtatttttttccatggctggaaatggcattgaatccttgggatttttgagtttttgataaaatgtgagtgtttgacaattggattttgtaacataggctatgggttatggtttttggctctagtctaatgtaatttggtgagaaaatgaataactttgaaacttttggttgggtgtgttcttgaatattgaagaacattatgaacatgcaaaatttcaaattccttccattttcccaacttcgattttcatgaaattggttaaaaggtgtttgtgggggtgtgatgaacttggatgatttgttggcttgaacacactttgtgtttagaagaggacatggagctccccccctttttgttgaccatcaaccgcaacatcctatgaagggtcgggggtgtacgccgagcttggacccttgggggttggggtggtacccctagcttggactcttgggggtcagggtggtgccccttgcttggacccttaggggtcggggtggtacccctagcttggacccttgagggtcaggttagtacccctagcttggacccttgagggtca

SEQ ID NO: 258449 - DNA, 581 bp, Cannabis indica
atttatcttgagtttgaaattctaatgattgtaagagtttggattttcttggaattataagtggatgtataatttttgaaactaaaattattttcataaagaccgatttgtttaagtatcattcattttatcattggcttactcaaggacgagcaagagtcaagtgtgggggaatttgatgagtccagatttgtcttataaatatgatcaaattatctattaatattcttaaattgattctttaagtgattagtgtgattttaatttttttaggctactttaaagactattcatgcatttagagtcttttggagggatgttagcatattttggttgaaaatagtggaagttggcgagctcgattttacaagacggaacttaattataaatttagacaaccttagaggtagaactagacttggatctcaatatgaaagttttagatcttgttcttaactttccaaaatatcttgaattgtccaattctgagtaatatcgagagagttatgactaaaatactattaatcgtcgtagcaagaaatttctaaaaaaaagatgaaaagatagcaaaaaaaaaaaaa

SEQ ID NO: 258450 - DNA, 1101 bp, Cannabis indica
atttttaatttttatttttgttatatatattttttgttaacattcattttattataaagtatttaatttaagtgctatttatagaaaagataataatatttaaattattgttattatagtttagtttaattgtaatacttttactttataattgaaagattatttttttggtaacagcaataagtaacgatgtcacaattcaccgacaggttaactacaataggtaacgacgtacatccactattgctgacaattttaacctgtctgtgtagtaagtttaaattaaaaatttaaagtttttttttttttttaaataatactttctgttatatagccacatttaatataatataaatattatattatatttatggggtagtttcaaaagacacactctactatattatatatattgagttatatgctaaaggtaccagtagtaatatagtatttttttgggtgtcatattgatattgatacgattaagaatcggtcctttaaaataataatttttaaaaaatatcaattaagatgccatctctaagtacgagtgtctttatactatttataatattgatgccatctattatattatactatttatactagataaatatatgtgtgtctttggttggggaactgttatgatatttatgataaattattatgatcgaataatctaggtttgggcataatttgaattgtgtgagattatgcgactttttgagtttctaacgtgtggaagtacatgttgtccataaaaccatttaaattatagttttattttatcttaaaaaattaaattaaagtacagtaaaacctctatttaagaatactctattcaagaataacctctaatttgttataaaaaaatcaagtcccaatttgggccagttataaataagaataacctctaaattgtaattagttatatgttttttaagtcccgtattaacaaagtatacctctatataagaataaatacatcttaataaaatatatacatatgttttgtaaatttatttacataaaattaataattttattccaaattgtaatatatgtattaacattatatttactctaaaataattatattat

SEQ ID NO: 258451 - DNA, 1744 bp, Cannabis indica
ggaaggaggtcctaaataatacaaaaaaatataaaaaaatcactctgggctgatcttgaccatcgatcattgatctaatggctaaaattgattgttgatgaaagtcaatttttagagcttgaatcacatacgttagatcgctttcacctaattgggtagactcgaaacttccaatttgcagctaatttactgatatttcacattgccgaaaaggtaaaatactaaagtgtgaatttgacctgtcataaaacgtagctctcatttactatgaaaaaataattagatgctcgagatgaaactgaaatcagataagcagaacccagtgcactaggccatatctcaacctaggcattgggtgctctatggaggacttctcgaggttcattttgatacttctatggcattcgagattgtgaatgatgtctcctaccccgtttttgacaaaaataagaagaatttctggagaagaatttgtgtttgaagagcaaaaacatgcaaaccacgttgtacgtcaacccgggcgcagggcccagcacccatgtcaacttgggcactggggccttagggccatgttttggctcccaaagaatctcatttgtgttgattttatggtactaaatcagatacatagcggaagagtttcatattatcttattatcattgtatcatatcccaatggatctccagatgtgtgtacattaaatcaaaataataaatagtaagtttagaatatacctcttgaagcttatcacggtattctcaaaacttctcgtatgttatatcccttaatttggatgatgaggatgatgcaattagactcacaccagtatcttccaaatcatttcaccacacacaagaaatagtgtgagctattaggataaagtgtataactttgttcttgagttctcaacacatgagcaagaaaaaaattgagagaaaaatcaattttattttttctctacaattttgaaaattacagtgttctaggaagtgagaagtgtgttttgatttctaaatcgggcttctatttaaagtagttaaatctctttaaatcatatttaattgattaaataaatatctataaccaactttagatatagatagttatgagggaatctctcaactacttgagataatatctcaacaaccttgaaatatctataaccacttttcaaattagatatttatctaattgaattaattaaataattgattaatccaaaaagacaaactccatagggacaggatatgctaggcgtctacctttatcttttaagacaaggatggtgtcttttatcctgacaacttttgtcttgaaaaatcttatcttaacaatttttgtcttagcgtcaaccgacataaattatttatgtatcacttttttttttttgaaaaaattttatgtatcactttaaaaccaaagtaaaaactcttttttgtagtagtgtatttaaagaaatattagttacaataaaagttatcactaaataaactttagtgataataaaaattatgactaaaatatttaggttgtggtcaaagtactattttttttttggaatagaaggtgaaacttcattaacttataatagccaaatcggccattatagaagaatgtacagcattagggatattgctgacattaaagatgcaataaaccaataacaagaaccgcgagcaagacaatgagcggttttgttagcagatcgcgacacaaacgtaacagacacatcacacaaacaat

SEQ ID NO: 258452 - DNA, 595 bp, Cannabis indica
tatatatatatattatagttatttgaagtatttcataaaattttaataaatttaaaaaaatttaacacatgttgaaatagtcatatacatgttaaattgacagtttgaacaatattttatacattaaaaattatttagaatttgtcaaattttaaaagtggatcgaagaagagtgctgctattttttttttttatttttttgcgctggattattaatttgagtgagttattaatatattttgctaaaattagtgagatattgatagaattatttaatgttgccgcttgaattattattggtggaagaccttgtttgtgacttaaagaaacactattatcattattttactgcatttttattgaattgacttcagtacttattaatatcattatttttttgggttcaaaatgtgaattaatatataactagctattaaattattctaaaaagttatattatttatttaattaatttattcttttggagctatatgtatcataattaaattaaattagacaaatatattatcatttatgaaaaaaattaattgttcaatatatataactagctatgtctgtttaatctttttttttt

SEQ ID NO: 258453 - DNA, 691 bp, Cannabis indica
catgtctttctgtaatattcagtaaaggcacacattcccaacgagtacatcataggaaatgcatggtctaatccctaggcttttttaggggttagatggatgtaatccattatcctttcttgagtggtgtgatttctcataaagtagtcgtcagtaggctcattaatcatagggtaatagctgcagaagggcggttacgccgtcagattttaatacttatggcagtttcaatacgccttctcccatgcggcattaaatgcgaggtaactgttcagataggatttgatacctcccggaggtgctttgttatagccttgctctccgggagtatgtgagacactcatgccttctccgggaggcatgttaaatgctgatcctattaatcaaggggacttagtcgaattatcccaaagtcttgcttctttaatccacgtgtcacagtcaggttggtccacgtattttggacaaaataaagagcaacaacaataataatatgcaattatataatgtaatttcattattactatacattgaaaaatatttttcttaacttattagttattatttatatacaataaattttaattttctattattattttactaataaaattaaaataataaccgcgcgaagagcggttatattgcctagtttctcataaactaaaattatgttatatagccacatttt

SEQ ID NO: 258454 - DNA, 635 bp, Cannabis indica
ttttttttataaaaaatattaatcatagtttataagaagatgtatatatattatataattattaagtgaggctagcacatataatacatgtgtctaattctttttgcttcatttcatttatacctttatatgtttaatttctatttcataaataattgtcaaatatatatatatatattaatttttacattttaattgtagtgcaaattgcaaaatatatatttaattattatatcggagatacaaaaataagaacaaacttctaaaatcgatttaattttagttatatacataagtgattattaacggtgagaacttatcagcgaaatattaaaaaaccaaatataatatttaaagattttaatggaagaacaatcaacgaaaaattatacattttaattatagtataaattataaatacatatttaattattatatcggagatacaagaataagaacaaacttctaaaatggattttaattttagtcatatacataagtggttattgacgatgagaactcgtcaacaaaatattaaaatctaaatgtaatatttagagattttaatggaagaataatcaacaaaagatcttagactcttaaactctcaaaaaaaaaatactatctcattgatt

SEQ ID NO: 258455 - DNA, 610 bp, Cannabis indica
gggcataaaacccaacacaacaggcctgggcggggccgggagtctcttcttccttttcagaggagtcacctgctcttcctcagcctcatcttcaggattcaagggctcctgagcatactgcttggcccttgcatctcgtttatacttaggcttgcaattcagttgaatcaactcatcctccaaatgagctcgttcggtccggctagcacttgatttcctcttcttccccgtcacagaattaggagtaaagtccttgggatagagcccgtacctcacaaagttatcctcagaggtcaaccggataatattccggtattcccccgaaagctgggcaagtttttgagctctatccactactacaaaaaccccctttagaggcagtttggaagcactttcagcgtcagttttggcgaaattcgctaccgacgctgatcagggcgacgctaaaggggtttaaacaaccgacgccgtatgtaccctatggcgtcggttattagtctaggaactgacgccatagggtacgaacagcgtcggttcctagctaataactgacgccatgtgtggcgaggaaccgactccaaaacgagcatttttagttttttaattttat

SEQ ID NO: 258456 - DNA, 626 bp, Cannabis indica
tactctgcatttgatatttgtatcgtgatgactttttgttataagttgtttcctgctgtaatgttcccgtgggattattagttatttaggtaattatttgtaattctagttgtttatcacaacatgttatttgtaagcatttcattttttggtagtcaaagttgattgttttgatggcttgttccttgcttaaaatttattgctactgacaaaggaaaggtatctataaataaggcatgtaaatgtaaatttaataactcactcactcacaatgcacaagctcaccctatccagaggtcaagttatggtcacatattattcccttgtagacaaagagacttgtggtctgtataaaattaaggagggtgttaaatatgatatgccatgagggcatttctaagtaaatagaaaacgttgaggattttcatatattttacatggtattggatttataacttgttgtgtatcccaatgtgtaggctactgctagtaaaattaatttaaactattttagaaaatttgacctcaatcttgtcattttagtttagacttttctatattcccattaactgactgcagactgccctgcccttggtgtgtgtctgatacacttttcaaagaccatg

SEQ ID NO: 258457 - DNA, 983 bp, Cannabis indica
atacaagtgttggtagcgcaactaacatataagcatgcatatacacttaacatatatatacaatcaaatatccatatcacacattatatacagttcttaccttctttacagattcaagtgtgctggctaatatgaacggaaagtctcgtgctagataaatgccttaatcacataatgaaactgggtaaataacatgatcaaaaaccttaattcaggaaacccaaactcacaactctaggttctgttatactctctagtgatcacactaaatcaggaaatagggaaacacccaactaaggcactaaaatggacaagaattgagaaaatgacttgttgagggatcctgccaaaactggctaaccggttttacaggtacaggtaaaattggttacccggtttataccagttcaccccaaaaattccatattttgctcaaaactccaccaaatgcaaccaaaccttccagagtacctaattaggatatacacaatatattccaaccagtaattcccagaaagacacactgaaatcaaacatgccattaaagacctaaactttgagttcaaagctcaaacttgagcaaattcatcccaacacaaccaaaccagcatacagaacttcaaatcaactcaaattaaccttagaattcgaattgaataagaatcaaaccctaacagctcatagatcacaaaatcacatactcaaactaaactttaaagattcaaaacataagactatggttctagtgttaccttagcttgatactccttgaatcccttgctcaaatcaccaaagttcaacaacaataccccctggttttggctggttcaaagagagagagaggaagggaaagagaagttgttcataaagtttggcttttctttgatttttctttttaattttccttaaatgaaataaaggttagttacattaaccttggctgaagtattttactgctaggtgtcatcatcaaaatcagccac

SEQ ID NO: 258458 - DNA, 791 bp, Cannabis indica
ttattttggcattcaaaaaaatagtctaattttttttcatatccatgtacgttatagctatttaagatatcctacaaaattttgagaaattcagaataatttataatatagaaaacaatgttcaatcaatcacgcgtgcaacataatggttgaacgcaattttcagtatattaaacttttttaaatttcttaaaattttgcaggatgtcttaaataactataatttacatgaccatgagaaaaaaattgactaaaaaattatttcaaatactaaaacagataaacatgtatcattatatccctttttaatgggtgcattataaaatttccttattaatatattcattcaaaattaataatatgaaaataaattctgcccttcattttacattgaaaaaacaaatatttttttgttatatactgcagtttttgtttttctatattttattgacttatttacaaaatagttagtaattcataaaaaatttacttacattcaattctcctagagacctaagttaattaagagtgtaatttttttttttttttaaggtaaattaagagtgtaattagtaccctttagagtatcttcaatagagatacaaataaatagtgtaaaactaaaatttatctcatttaacaaaaagtatactttaatgatgtgccaaaaagtaatgtaaatttgatacatagcaaattttttaataaatttggcacaacatttgctatgatgtaaaattttcatcacaataaatgtactaattttttatttacatttatgtcgtttgtat

SEQ ID NO: 258459 - DNA, 585 bp, Cannabis indica
attaagattaattatattttaaaattaaattaagtataattattaaaaactaaaatgatgatgaatattttaaatttaaaaagaaaagaaattaaaattttcatatttaaaaactaaaggggaattaaaaaaataatagtaaattaatttttaaaaaatctaaattaaaatccatttatattattcttttcattatataaaagtgtttgtttaacactatctatttttcattaaccttaatagaatacttataggtcattttaaatagggtaaatacttgtttggtaccgtatgttttaccaaaaaataaatttagtaccttatgtttttaataatgattatttagtatattttatttacaaattctacacatttggtaccctttccttgaatttagggaacccaaatttctagtatgactatattatccttttaatatttatttatttttaaatattatatctgttcaaataaataaaaaactaaaataaatatctcattttgttgtgtagcaaaactatgatagtcaaaattaaattctagcatgccaccaaactaaagggacattggttccacattctcatg

SEQ ID NO: 258460 - DNA, 711 bp, Cannabis indica
agtgaaaattcataaataagacatagtgtaattttagaatcataattgattaattaaaaccaattagatgactctgcaaacagtattatctcaagtaatgtggggaccatgagcctacataatcaagcttttaataagtaggaactagaatttaccatgtaaattctctaacttattacttcctccttgcaccgttatatatttagaattccactcttaattatatagaacactctatatgtaccaagatatagatatgttatgaattattcattattacaatccaaatagtcaaaaatcctctgtagatgatctacatcgaatagggacaaatttactgttctacccttcaatgtattttatccttaaaacacttagctaaccataaatgatattttagtaaactaatataattactgaaatgaggcctcaatcatttatctctattaagccaagctcgaaggatattattgttacacatctatgtacttatagatggtataaattccatatctatgattagcgctcccactcaattacactatcacgttcccaagatgtatgtatttagccgtacgagctttaaggaacatatcttagaacgtaaataatgcaattgagatcaaacctaaccatctcaggattaagatctatagacctaagatcaacccgtgatattgaattagaaatatataacggtaagtttatgat

SEQ ID NO: 258461 - DNA, 1092 bp, Cannabis indica
tatttataagatctatagacaattggagtatgattaaaattaaatcattggatctctcaacaagtcaatcatagcaatttagatcaaataaataataagtttataaaagtaattttgaataaataaataaataaataatcaaacataataaacatgtaacataaatctagaaaataggttaagatatttctatttaaaaataaaatatttaaaatatatcttaacttgaatttaaaatttaggttgttagagaatatttaaaaatatttaaaatctaacaaatttcctaaatattcaaaattctaactaaaattcaaatatctaattaatttttcaaatttatagtttatttaaataatttaaatcaattaaatatctaataagataatataatacaatatcttaatttaaaatttagatatttctaatattatatttctaatcttataatttaataaattaaatataacaaaaataaataatttaaaaataagatatttgatggttaggatattatcaattttatttaataaataaataaaacaaaatattctaagtttaaaaattttatgattaccaaacactaaaatttctattcaaaccaaattaacaaattttcaaaatttcatgttatttgacataaataaattataattaaataaatatctaataagataaaatgtcaaaattaacatttttctaatcttataatttaatttaataaaacatatttcaaaataacaaattttgtcaaactaatatggttagcaaaccagctggtattggaggtgtttagtgaggctcaaggaccagttcaaagcaaataatcagtccattgtactacaacaatacaatatctcggtagggtacaagattttggtacaaaccccatctaaacttcaatggacaaggcaagtttggagccgttttaatgctccaaaacattgttttattctctggcttgcaatgcaccaaagactgaagaccagagaccgattatgcaaaatgaagatcatcaccgatccaagttgcttgctttgctgtggtgaggctgaaactccagagcaccttttctttgattgtttgagaact

SEQ ID NO: 258462 - DNA, 910 bp, Cannabis indica
taacttaaaatatatatttaacctaaatatcacaaacacagacgcacaaccccctctctctctatatagatatatatctcacccagtctcaccatggcagccgcaccaccatatttgcctagccgaattgtccatcatcagagaccaccgagatgcacatcaccagccgcttagacgagagccaccgcacaaccaccccattagtctcgatgtaaaactcatacaaagtttgggttttttaattttttttctttaaggtgtttttctttgtttggattagaattaaaagtatcatatttgttgttcttttatattatattacctttttttcaggttagcggtggtagggtggtggtggtgcggtggtggtggattcgtggtgtgtggtggtgtgcttttcgatctctgaaaaaatttgagattgttgtaagtttgagatgttggatttgtttatgcaatactaaaaatgtgtgtgaaacagaaaaaattcgtgtgacattaatctgattataattaccagatttttttttattttttttttttattttttttcaaaattttttttgcttcagtttatgatcgaagcataaaacaattagcttcaatgcactaattttttgcttcagttcataaccgaatcaaataattaattagcgtcgcttcataattgaagcaaaaaaaaatcactatttgcgtctacggttataacgtcaggtacactaaccgaagtaaattctttatattttacttaaataccgaagcgaaaagcttttttcgtagtagtgaaataagctagatttaatcttagccttacagtgtattgttgtttacaagtaacagaatggtagtgccctaaactatcattctttctttatattttttcttcgtatttcatatttaatctatcatt

SEQ ID NO: 258463 - DNA, 435 bp, Cannabis indica
ctgccaccaaggctgcacgtgcagcccaaataggctgcaaaatgccagatgcgcgcgcggattggaggacctgcaacatccttgaccaaggtttctcggtcagctgcagggtgatgcatcggcgcttgcagcatcccgtgggtgtgcgtggggcgagacacgggcttaagacagtgttttgtcccctgtcacgcgcacggatgcaacaccttgtctgagtgcctggtgcactcgatgtgccaactagacactattaacactcgattttcaaaccttcataactttctcgtttttaatcgtaatcgagttccgtaaaaacaaaaattgcttaatttttcacaagaaatccaaataaatattttcacaatgaaaataaaattattttcatggaaaaattttgtaaatcacataggaatcatcaagtaacacaaaaac

SEQ ID NO: 258464 - DNA, 628 bp, Cannabis indica
gtctgggtccaggtctcggtccttgtcttgggttacacaactgtgtctgggcctgagtttcattctgagtttggttatggggctaggttcgagttttgttctaggtttgagtccgggtcttggtcactatcctagtcttcttcgagggtcctagtctggcagttcttgtaggtccgagtttgggttcgggagcgagactggggagcagttctaggtccggccccatttctgtgtcccgagtctggttccatgttttgttctgacttcgggtccagggtcggcaccgagtccagatctgggttgtgatccaagtctggttctcggttcaggtctaggtctgggttggagtcttggtcttggtccgactatggttccgggtctaggtaaaagtctggtaatggttctaggtccaggtcgatgtcttggttccggtcccgttcttgggtcccggtctacttccgattttggttccaattttgagtcacagggtacaggttaaggtccaggtttggatttgggactgggtttgggtctgggtctgggttcgggtcttgatctaggttcgggtccggggctggttcccagatccagacactgactacagcttaggtccaagccctgggtccat

SEQ ID NO: 258465 - DNA, 728 bp, Cannabis indica
agagcattccaaataaactcacatctcgagccacgtgggttggatgggattgcttggggttgagtagtagctttgtagcaattccaaccaatcccatcgtaccacgtggctcgagatttgtgtgaaataagtaaagtttggttttggtagagtacaagtaaattatatagattagatattattattatgggatgcatgaagattttagaataggtaaggtaattgtccttggatggcactatttacttatgattgaaagaatatgagttttataggaaatacataatagacaagggaattgagtattattgacattgagtagtgatgttatattaattgtatgctgttgtgttgcttactatcaatacaataaaaagtttctttcttcctcaatttaaacaaccaaacttgtagtggttttaacataaataatatcaagattaatgtccacacaatattatttaatagtggctgtaaggggtgtttatttaattaaattcgcactattttactcatagtgcatttgatttgcatgagtgtaaattttatattttggatccatttcagtttatgcagtaactcaaattcaatctaatccgcaaaagtatggattggattaattattttgaattggttattttttaatattaattatttaatatttatggaagaatatattttttttttcacataactagcaacaaaataaaataaattattgttatttt

SEQ ID NO: 258466 - DNA, 1231 bp, Cannabis indica
gaaaaagatagctaagaagaaaaccaaaggaaaatgccttgatcatattaggcttgttcacatcaatgatgaattttaaaataagatagcctaaattgattggtgtagttttggctagtatgagatgcatgagtaattgatcaatgaaatttatctcatcttggtgtccactcctaggtgcaaggttagctacaatgaatttgtggagaattttggcctctaaagtgagttggtgtctttttggtttcataataataggaccatcaccacaaagatttctagaacactcatcaaagttaaaaatgccatcatttttaagagagagtttgggttcaagcaaaatgccactattgggtgctcctaacatttcattgagagattctacattaagttcaaaagctattcctctaagggttcctttaactcctaaaggggctaagcaaggtttaatgcaagcataaaaaccttgtactagtctaggatatattggagtattgatttgaatgaaagatgtccaacctagagtatcaaaatgatgactaaaatctacataatcaaggctagggagatcacaaattttacctttgagaatcttcctagaagagaagtcattgacaaatttgtgatgatcctcatcattgtagaataatgtgggctcttgccttgcttttgcccttatctccctttgttgaattgcactagccaatctcttgtttgctcttgaggagggattagatgaagaagccatgaagaacacacttttttgtttgattgatggaggatgagagttagggtttgagagtaagaattttgagagaaaaggaggagtggctgctgttttagggtagaaaatctgaatgggaagtgaaaaatttggtggtagggttttaaggggaaaaatcgcaggtgaaaagacgaaaaagggcttgatttctggttcctgcgtcatccggaattccggatggtttgtgcacagacaaccggaattccggttggtgcagcagaccagccaaaaatcccccaaagacgtcctaaaaatcccaattttaacctaaatgaccccaaaccaattctaatacctttaatatgataaaaaaaaattactcaaacaagaaaaactgaaaaatgatgaaaaatgacgatttacggtaggcttttcgaaaattgccaagaaaactagaaccttaccgaaaatgagttttatgcaacgaaattgaaaaattctttttcc

SEQ ID NO: 258467 - DNA, 1130 bp, Cannabis indica
aatatttatatacacttataaaagatataaaaaaaaggtttgtgtggaagattttcttttttagttctcagttgaggactccaaatttaaaaaatcacacctcccttatatgtttgagtgcctatgtttcaattttttgtcaagttttaaaatttaagacaagttttgaattttaagaaaaataactattcaatatgaattgtatggtatgttctctatagatgttttattttatgatcagttgtttacaaagttttaaatttttatttaattgtatcacttatttatctttcgtttttaaatttgatattgtatggtgatatttttctttaaaaatttagaattttatagtatgttttcaatagatatatattgacttcgttacaaagttttttttttaataattttttaatcgttccattcttataacatttgattagatacacatctcatatatttattgtttttctctagatctaaggttttttattgcattttttttagattttttaatatcactataaatttgtcaattcttaattttttttccttaccatatttcttccatttgaatttggtattatatggtgaggtatctaatatttctcagttttttgtttgttcctttgtttagatctcttaatcttaggtgtttattttttttatataaattttcaattttaatcttttcttccctataaaattttaacactatctcgtattaatcttgcttctatggatatgatattgcagtgtttaattttttgttttaacttttgatcttttcatctctactagcacttcattatattatttatttatattattatataacgagtaaacttattaggaataacaacggcaacgactacaggtgggatacggtgatggcaatgggtgagatattgacaacaactttgaataattgagatataaattattgattgcgagaaagagttttactaaataataataatactctaatttttctctatactattttatttattttgttttatattaataaattttaatcgagaaattgaaaattttatatatattatttatataaattttaaactttctaataaataaaataaaatttttcaagttttattttaaataaataa

SEQ ID NO: 258468 - DNA, 589 bp, Cannabis indica
atcaattgcacctatacaattctgattaaaaaaagtaaataaaagttaataaaaaaatatacattaataatgtgtgaaagtattatttatcttacactagatgtagttaaatatctgaaaccatggatagtatttcgaggaattaacaatacgagaaggtaatggagactgagttagacgaatgatatcttgtcctaatttacatattgccttcaatgttagacgaaaatgcctatcaatagtttcaagttgaaatcgatctgctataagtctcattctcatattttgaccaacaatcataagaaaaatagcaactgactcttcaactttaaccattcgagtgtccttaatgtattctttttgttttaaacaagtacaaagctcaacaaatacattcttatccattcgcaacaattcgtaacatgttctctcatgaccacctaataattgtttcacaaaatcctctccacttaaaacagagatgttcgttgagggattttctcaataaacttctcattataatcactcagaaggtatagcatcaaaaaatcagaaaagtcatcgaaatcgctatctgtagaagatgaac

SEQ ID NO: 258469 - DNA, 564 bp, Cannabis indica
ctctattgtgcaaagacatcgcaaccaataatgtgtggttctttaatttggccgacttgactgacagcctttctaagtcttgctaacttgagatcatctcccatgtttacaataggtttgccaattcctggccctatttctctaacataatactgggtacgagacctagtcatggtgccaagggttgctccacgttagccattcctttagtacgaggcaccagtggagggtcctccttgggcggtaaaggttgatcagtaagaccaatcgtgtttgtagtgtccacccaaccagtcgtggtggctaggtttatggtgcctgacgagatagcggggttcgccacatccatcgggtttatgaagattccaattatggctagaacacaaaaatcaagatcagttgccattaggtcttgaggaatacccaatgaggaagaagttgtagtcggagtgctccttgtgttaactgtggtgtttgatcatataaatcaacaactcggtcttaatgagaaccaaattgtgttggaagttattttaccaggaacttagatctactcacaagtat

SEQ ID NO: 258470 - DNA, 544 bp, Cannabis indica
cacaaccattctttctaggagtccaaatcttattctctctatcccaaacaaaatatttaggaaattctctatatagcattttttttggcttctttgattgtagaattcattctaaaaaaactctgtaagcattgatcttgtaaaaatatctttgtcaataattttggagggattgtctttttttctagtaagtaatcatttgggtgtctttaagatgcagttgcaatgatatcacagatggataaatctcaatcaaaataaatccatatattctccatattgcttcaagaggagaaatccatctagcagactggtagattgtaatctcatcaataatttccaacttattattacaagcaacagcaaaattaactcgatcatgacctttgtaaacatatttgtataaatatttcacagctttgattgttgagcaaatttccacatttatatgacaattaaatttagctagtaaataaggattgtatggaacaacccatctattgtctaaccaatgacctcgcactttagcctttttaccatcatc

SEQ ID NO: 258471 - DNA, 831 bp, Cannabis indica
atgattcttccaaagaaagttgtgaatgagatataatctatatgtagaagttttttgtggaatggaagccatgctctctcaggttcagcggcagttgcatggagctctgtttgtctacctaaatcggctggaggactaagtttcaggagtacctcagattggaatctagcagccatgttcaaatatggttgggccattgcaaaaaaagaagacaacttataggtgaaatgggtgcataatgtgtacatcaaggaggaaaattggtggtcgtatagggccactccaacagccagctgatattggcgcaagctggtagccataaaagtatacagcaataagcagttttgatgtatcccaggtatagaatgacaggtacaaagtgacagagggatataaggctattcggcctattgctaataaagttgattgggattcaattgtttggagtaggttaaacattcccaagcatagtttcatcctatggctatctatgcttaatagaatcaaaacaaaagacaggttgcagtacatggagcttgagaactcaaaatgcttaatttgcaacactgaagatgagactgtgcctcacttattttttgagtgttccttctctttagaatgcttggaaaaggtgaaatcatggctgaattggggaatggcagctactacctcggaaagaattataaggtggttaaggagggcaaaagtaagcaaggtaaagaagtcaatcttagttgctgtcatagtagctcttgtttacgaaatatggcgcacaagaaataatattttttggcaacattccaatacaaaatgtagagattgtaattataa

SEQ ID NO: 258472 - DNA, 875 bp, Cannabis indica
caaaaaatgccatttttttcttcatttcttttcaactttgctcattcctctttctttacaacaaaaatacactttaattcctacaagaaatacataaattgaatcaaaatcatatattttcatttataaaatatattacaataatttcatgaaaatatcaattaaaactcaatttattttatcttttaaaataaataaaagtgtatttttaaccactaatcaaatatccgaaaagaatggaaaggaattgggtcctattgtgcctaaacgaggattaagacaaggtgatcctctaacgccttatctttttcttttgtgtgcggaggtgttgtcggcacttatttcagactttgagaggcgaggaaagcttagaggttgtaaagtagctcgtggagctcatgttattacccacatgttttttgctgatgatagttatttgtattgtcgggctactgaggaggaagcaaataacgtgatggagcttctacattgttttcagttggcctctggacaacaggtaaatttgaataagtcctatgttttctttagtgctaatactgggatggatgttcgtgcaagaatatgttctgtattgaaggttcaagaggcaggagaaacaagtacttatttgggtcttccaaatatcttgggtagaaataaaaatgctttactggatttcttaaaggagaagatgaggaagaagattcaaagttgaggaggaaactttttatctaaggcaggcaaagagctaatattgaaaactgttgctcaatccttgcctagttatgccataatgtctttttgattcctttgaagactgttaatgaaatggagcagttaatgtgcaaatattggtggaagtcctcttcaaagaa

SEQ ID NO: 258473 - DNA, 719 bp, Cannabis indica
gtgcggattggattggatcgaatactttgtgaacacccctagctgagacagtcgagtgagatgtgttggcttgtaaaagttccagtgggcgtaagtcacagaaaagcatcgatagagatacatagttgtagaatgaatgcgtaaaaaaaaccagcagggctaagaagaatgagttcaagtgttaagatggcgctagagtttgagtggaggccaaaaggctgtgctagtgaggcttaatagtcatgtgagcttgtgaaggttaagaggggtgctagagtttgcatgaagtctagaggcttacatcattggaacttagtacatcgagggagtccgaaagggcgtgatgctagtgcaaattagttagatggttgagtggacaattcatgcatatagaaatcgataagggtgctatatgagataggtcactcgagagtcacatcctgtgggatgcacttttagatggcatggtgtgcatgaagaactgggcagtcaggcattcacgtgtgggcatgttgttgaggatgccaatagatgaagtgggggagagaccctcacggttcactcaatagacttggtattcattgcaagtattgagataagtatcatggagatggattgttgttcaggatgtaaagtcaagaagactcgagacacatgaagtgccaattatctagggtgaaagtcagtaggacttaggtactaagataacaccatggcaa

SEQ ID NO: 258474 - DNA, 725 bp, Cannabis indica
attcatataaagaaggtataatcttgtaagaatgtacaagagaattaagattatacgatatgaataaaataaatcggtagtgtattaaagtattgagaatctttaatatagaactactaagtacgatttactataccctatgcttcttgcgtgtgtgattttaattcggatcacatatatagatagacatgtagtaaaggtactgtgtattattagattatgcatgactagtagattagcctaaatgcccagtatacatgaactcttgtttgtgttcattgagtcctttgattcactcgttaacatttctcagagaagatgatcattagtagattagcctaaatgctcagtatacatgaactcttgtttgtgttcattgagtcctttgattcactagttaacatttctcagagaagatgattcttacaacttctattttgggagcttaataatatgagtgggaaaatgttatacaatagtggaatccaaattttcctaacgcatcgaatattagttcccttatagtgttaattttggaagtgctaacagttagatccaaatctataacaagttatagattaactgttcacattgaattaatggtacataaggattcaagagataattagaatggtaaaaaaaaatattttgaccaactctaattatgaactaataattgaagagcaaactacttatattgactatatcaatggactacaagtaag

SEQ ID NO: 258475 - DNA, 657 bp, Cannabis indica
ataagtaagctaataaattgttagtgcatttacaaattatttattcagttactaaaaagataatttgtaaattgactttaaactaataattaattaaaaaggtctactttggtcgtaatgagttattatttttttatcaattagaatttatctattttttagttaaacattttttaagagagaaatatatatatttatatatacaatgctaaatagtttttactttaattataattttttttattaattttactattctatgttaaattttaaattttttaccagaagaaaaaagcacatgaaaaaaaaattataataaaactatttattaatagaccaatgttaatttctttttatttttagtaactatcactattattattaaattgcatatacatattgtaaactacgtttaaaaatacccataaaatcatttattatcaagagtttttcaatattatatatactatttaactaattattttttttctcaaagaaatgagataaaagttttggatagtgtataatttgtggattatcataaacactatttatatgtagcattattattagtgatgatgaactattttttgaaaaaaaatccaccaaaatataaatcgatatcaatatctttttaaatttgatgagtaaaattta

SEQ ID NO: 258476 - DNA, 548 bp, Cannabis indica
gtgtactgagcaaacttaagaactgctctttgaccagaaggcctcgaagactggacaatcgtgtcttgtatattttcaagttgaaacacttagttattgtaaccaggaaaatacgctaagtgtttaacaaatgattcgcctcgttaatgtttcttatgaataacgaggtgtccttcgaagttgctttgggtaatttcacttatcccttcaaaataaatgaatcttctctttggatctgtatactccgaggcaaactggtgtctcgtcaatacaggtattaatagttttggatccttgtctcgcttaaaactatacagtcagcgagttatgaatatagtctattaattctatatttaatgagttattcctctttgtattaaatgatataatagttttataccaagtggttcatattccactaaatgacacgtgtcatcctctgaagtgtagttgaatttcgggtatataagatatatgtatttgtatctttgagttttgagttataacactttttcattatttgtattttgtactttgggattgtaact

SEQ ID NO: 258477 - DNA, 1184 bp, Cannabis indica
aaaataattccaacagatagatgctgccaaaggtagatgggttgacgagctacctcaggtgctttggacaaaactaccgagaaaatagctacgtgacacactcctttctcgctagcatttgactcgaaagcaatgctgcctgttgaagtgaatatatcgactcacagaagagagttttttaatcaagaagaaaaccatgaacttttaaaattgtccttggatctacttgaggaaaaatgaattgagtcacaaatcaccaacgttgcataccaacaccgagtcacaagatacttctaaaaaagagtcaagaaaagactgttcattgttggagagtttgtgttaagacgagtctttgcaaatacaagagatgcatcagcaggagggttcaacccgaactgggagggtccatatgtcatcgaaggagtagttagagtcggagtctataaattggctcgacctggaggctcgctaataaaaaaactactggaacctagaacatttgcgaccctactatcaataaataaatgatgtaactcgcattactgatgtaagccttaaacttcaattatgaataaagagaatcatttatattaagtaattacaaagtctcattctttaaaattacttcaggggcatttatgtttgactaaccaaaattcatctggaaatacattgtataatgcaaacctgccatttcaatttttttttttgaaattcaaaggttctcgactaaatatctttgacgaaagtggagtcgaaccgttataacaacctgaccaaacctttttgacgacaaaagggatcgaatcgttataacaccgtgatcaaactttttgataaaaaagggatcaaacaactataatttttgatttataacctatccgacaagagtggaaaatcaaaagttataactcgcgtacaaaactgaatactaacggttctcgcgagctcagaaagtactaaacgaggcatcacgacacattgataaagtacttacacctagaaaacggatagataatataactattcatgcgagcaaattaaaaatattaaaatccttaatgtatatttaagtttgcttaaggcagattataactacaatcgcgaggaagaattgacaactgctcaaaaatcataaagtttggtaaatcactaactacttaaacaagaagattacgagcaat

SEQ ID NO: 258478 - DNA, 649 bp, Cannabis indica
tataaggaaagattgtagttgtattaataattaaaagacttccagactcttcttcttctccctctcgacatgcacaatatgaacaggctttcttcctcctctgcactgcgttcacactcttctccttcacgttcccactctgtggaacctttgccaagccccagatccctcgatctaggtggctccgatccttcctccaacgatacccaaggcagctcgacgcgttcaagccgttttagccgctccaaaacgtcccgcctcaaccaccccggtcgtgtcaaccattactccggccagattcccaaacgttcgattcgtacttgcattaactctcttacaggtattaacttctttgatcctttttctctattcactgtcaaatcccatcagagaaatgagtttttcttagggtactttagatataaatttggaattactattaaattagctgatggaactcgatgccagaaaagggttttagatgggaaaatcgttttatattaatctccagaagggttttatcttttgtcaaagttttcaaatttagcattaaatttgcctggcaatcgtgatctgcctggtactatgcgtatatctctttgtgcagcaactctgttcgttagtaaatgcttcagatgggatagttacc

SEQ ID NO: 258479 - DNA, 605 bp, Cannabis indica
cccttggctggccagccatggtgctatccctggactggccggccagctcctgagagggagctggtctgtcacttggtttccgtttgagtgtcggggtcttcgtttgttcgagtgctgacttaacttttcttttagtgagctgtactgccatgtggcactggttctgtctacgtatgcatgccacgtcacgaggaaaaaaattaggataacagttttattttgatgttgatgtagcactaaatttgagtttgctccttaaagttgctctaagcccctaggaaccaagagaaaaaccaggatcatcaacgcagcttttgatgagttggagtgagttatgatattgggtttaggctgatttacatagaatgaacgtgtatagttacattgaaaatagaaaaaagaaaaagtgttagaacaatccaaattcttttttcataatttaaatgacaaacgcaaaagttgaaagtgaattgagaaaatgattcgatgcatatttccttcacaactttatttgagagttggcacatcctatttcaacttttggaaaacctataattaataatccaattcttcttgtattgcttcgcattcacacattacttaca

SEQ ID NO: 258480 - DNA, 462 bp, Cannabis indica
aacgacctattgattccccaattttctctgacaaactactaccagagttaacttctttgtcacctcattcaagaaacacaattaatatccctaaatagtttggatcatttttgaatggaatcctccccttcagtagatgttcttatcttctaacatcactctaaatccaatgacagcttcactttgtccgtcttcttcatctttaagaggcatagtccaagagttatcagcaaagtgagcatccaaataaacttgctgacatgtcattatcaatccaaatttgtaaagattttcagtggtaaataaattactcccatctctctcccatgttttaatgtcattgagcgtgtcatctactctcttttcatgttaatcagcggagcatgtctcttgaatggatgagccttctggaaggtaatatgcctcaaatgaagaaccgaggtatagaagtatcctaatggt

SEQ ID NO: 258481 - DNA, 960 bp, Cannabis indica
ttatacccgaaatttggctaccatttcagtggaggacacgtgtcaaattaagggtgttaacgcagattttcattaaccaaatttgagcctcacgataataatttcaacaaagaaaaaataaaagctataaaaaaataatatatgaacacagggttttttacgtggttttgtagttaaaattctgcatagtccacgagttaatcttattcagatttctgagtatttttctgagggcctctttcatatgagtttttttggccctttttttgagcttgtttgccactatttataattacatagtaggcagttaattacaaaattgaccagaatatgtttacggcaattatccctaaaatcatgggatttgattacatatcacgaaatgtaaatgcagtttatgatttgaaaatcatatatttgtgattttcccgcttttattgggtcaaaattaatatgtattaaacacttctttaattgttgaatttggagatgtcttgacagaaacttgattatagtgatcccaatagggagctgggccattcttcctttcgaggtcaacgatgtatgttttgtgtcgatcgcggttatttataaagaaatctcctgactcgccagggtcgtgagcctcgctcctgttagttggatgaagctataggaagtcctcccatagcgagatggtcatctcgcatacttattctttgagtcgatctgacttttactctttattgcaagctaagcacttttaaagttggtatgtgtcactttctccggtgcctcgctatttgcatttagcaatgtatggtttctctctaatacacttagtgtcaatttgtacatttattctctgcctaagactttacagtcagcgggttataaatatactctaactcttacgtaattaaggagttattccataaaaagctattgtactatttcgcattccatttatcttgacacgtg

SEQ ID NO: 258482 - DNA, 1117 bp, Cannabis indica
gggtctataactataaatataatgaaaaaggggaggttgttaggtgtaaagcccgattggttgtcaaaggctatacccaaaaatacgggataaactaccttgatacttttgcccccgttgcaaaatttaatactctcaaaatattacttgctatttcagcaatcaaaaattggtccttatatcaattggacatcaataacgccttcttgcatggtaatttgcatgaaactatctacatgcaactccgcaaaggctatacacctccaggcattgtccccaaaaatgtcgtttgcaagctaaaaacaagtctatatggtttgaaacaagcctctagacaatggtatactaaacttagttaataccttttagctaatggttttaaacaatctcctaatgatcatactttgtttatcaagaatactaacaatactttcttagctattcttctgtatgttgatgatattgtcattgcttctaacaatgatgttgctgtctagaattttaagaagcaattacactcaacttttcagctaaaagaccttggtcctctctgattttttttggggttggaaataggtctttcctcgactggaattttcgtttcatggtggccttttacacttcaacttcttcatgatataggttttttgggagccaaagttgcctccactcccatggaacctaatattaaattgagcaaagatgttggcactcctctttcggacccaacattaaaaaaacacacagtaagaagatttatttgtccattactcgtcccgacatctcctatgctgtcaacactctaagtcaatttttacattgagccacgcacacctcatttacatgctgcacacaggattcttcaatatctcaaaggcacactaggacaaggactgatttttaatgctaattctaaacctcattttatgtacttttgctgaatctaactttaaagatgcagaaccacaacttaaaaaatttttagaagcagattggggctcttgtgttgacacccgaaggtccatcacagggtattgtgtctttcttggtcattctttggtttcatggaagtccaaaaagcaaccaactgtttcaaagtcttccgctgaagctgagt

SEQ ID NO: 258483 - DNA, 855 bp, Cannabis indica
caggcaacgattcgtttcctatccattaatgatccgacacatttaatgggtgtcaatcaagtactcaagcgtttccaaccgccttgatgaacgcttgtcccaaccattagatctgtagaatgcgaatcgattgctattcttaccgtacgatgatgcttgatcacagctgcttcacacccgttctggcctataaaagccagccttctcatttcatttggttactttcactagtttgccaaattttctcggagctttcacagagagaaaaaattccagacaccatagatcatttgatactcttccttcgttgttgccaatcctcactgtaccgacgatcaacaccaacccccagctctcaaacttcatgtaagttttcaggacactttatactcgtctactgtttatttgtatagcatgtttagaatatatgggttgagtgttgaatttctgggaaataatcttgactgaatttgctatgtaacgcgtagaatctctcttatttgtacccttgctgtttccccttatatctttcttcttttggagttgtctcctccgtcgaaataacgcttttagggcatagggtgattcttgtttccttggcgttttctcctttctctctctctctctttttatttcccttttctccactgtcgctacctttgggatttttgcacccggtgcttgttaaggaaagtcctcgaggtttccttatttggcaagcatccggagggggcctatttccagcggttaggggacccccattccctttttaaacattagggtttggtttggggcctaactgctggatttcttatttttacagaaaaatgtctgctcctgttggaaattatttta

SEQ ID NO: 258484 - DNA, 869 bp, Cannabis indica
tacaacaccagctaatgatgttccagatggaactgaggtaacagaaggagaagacaatgaagatcaacaagaactaagcatatatccattagctagagatagagagagaagacagagaatagcccttgaccgttttggttacgctcaatttattgcatatgcacttataatttcagaagaggttgacagttcagaactcactagctttcaagaagctatgagaagtaaagatgctgcagcatggctataggccatccaagaagagatgccgtctcttatgaagaataaaacatggattgttataaagaaactagagttttacaagctgataggatgtaaatggcttttcaagcataaagaaggttcaacgaatgaacttaccaaattcaaggtaaggttagttgccaaggggttcactcagaaggaaggcattaattacaatgagattttctctccagtggtcaagcaagcttcaatcagagccatgatggcaaaggtagctagcatggacctgtagattgaatagatggatgtaaggataagtttcttacacggggaattgaaagagaaaatctacatgaaacaacttgagggctttgacaatgggaactcatatgaggtatgcctacttaagtctctttatggcctcaagcagaaggcacctaggcaatgaagtttgaggtttgacacctatatagagaatattggatatactaaaagtaagtatgactcatgtgtgtatttcaataatcaaacttatttgctactctatgttgatgatatatagatatttagtaaagtaggtaagagattgaaaaagcttaaaaggaaactcaatgatgagtttgagatgaaagatctgggcaaag

SEQ ID NO: 258485 - DNA, 674 bp, Cannabis indica
tcattaaaacaaaataataatagaaacaataacaatgaaatgtatcatgtatcgcatctataatttggtacaaatttatgaaaaagagtaggtatgaaacgagtgtttacttgttgtaaataaatgtcttttttatgaaagggtgaaactctttaaaatatatttagtaatataaaatatgttaaatttaattttgtaagagtatattctgttaaaaatataataaacccttaaatacataacaaattataattagatagatatttatataacatgtcagattatatgaaattcataatttaattgtattgaaaacaatatcgttcacattgttttgtagtgaaaattacatgttgtttgttaataaaaaaaaaatacatgttgtttatgatatagtcatatgttaaattatgtcctccaagtaatatgttttcttgttaaacaaatatacattttcttaatataaaaataggtaaaaataatatttttaaggagaattattttattttttatttttattttcatggcttaggtttctctgatgttgcatagtaggttgcaatttaagtatgtaaaaaaattgctttgaaatgtaaaaataaaagaaagctcatatttttaaatatacaaattaatggttctttagtaagttatttttgtaaaaaaaataaaaa

SEQ ID NO: 258486 - DNA, 565 bp, Cannabis indica
ttaaattagaattgaaaattaattctcaattaattttggatctacttaaattaatgaattttcattaataattatttcaaataaagagattaaaatatattgtaattagaaaaccaacacttagtttatgaagtaaattctagataattaatttctaagtaaactattttgtattttttctatatttaattaaataaaaattaatgtttaagtatttaattcaagatacttaaatattacataattttgtatcatataattaaataagaaaattatatttatgttgaaaattaatttcttaatgaattttagatcagcataaaatagaatggttttttagaatttatttatttttattttaattaatgaatttttcaaaattatatatttaattttttcaaaattaatgaaatatatttctagaaaattaaatttaagttgaaaattaattataattaactttggatcaacttaaattaagtattttttataatatttattgaaaattaatactgacaatgaaaaataaattttatttattttctacattacctaagttataatt

SEQ ID NO: 258487 - DNA, 579 bp, Cannabis indica
aaaaaaaaaatagtaattaattatgtggtagttagaggatcatacctaatgtttgttataaaattaaaagaagagatatttccatagaggggaatctggtaaagccaaaatagtagacataataattgttaggaaaatctacactccacccatttacaagttggataagtttaggaatattttttttatatatttattaatcaaaaatactttaattatgttatattttattaagatatatttactttcgcgaatgtgttatccaatatacctttactagggatatcatctataaaagttgatatattttaaagaatataaaatgaaagtaaaaattcaaataaataacgtaaagtggacatacaatgtaatttcttctttaaaagtaatgcaagtaataattttttgggcttttttcagtttttttttttaaaaaagtaactaatattacaaaaatactttcagctggacaaataaataagtatacaaccctaataaaaaaattacacaataccacttacacacaccttcaactaaagatttatgtttcttaagcaaccatcgcgcaactcgcagcaa

SEQ ID NO: 258488 - DNA, 594 bp, Cannabis indica
ctatcgtacgcctttgacatatctagctttactgccattttctttccctttccaaattgcccttttcgcatacaatggagactttcaaatccaataatggcattatcttgaatagtccggcctccaatgaatgcactttggttggctgaaattactaagctcatgctttgcttcatcctattcgctaaacacttcgaaataactttgtatatgacattacatagatgaataggacggaattcagacatcacggtgggcttttgtacctttggaatgaggcaaatcagggtttcattaagcactctacaatcggcattattgtttaacacatcaaggcaggccgaggtgacttcttcacccactacatcccagtttttttggaaaaaaagccccggaaggccatctttgcccggtgctttaagaggattgatttggaatatagctctgacttcacttcatcactagtaaaaggctccagcaaataatccatgtgaggcccatagacaccatggtcgcccacatgcttgcatgtttctcaattattattttcatttttaattgccatgtaattgctaatcaaagcctagcaaaaat

SEQ ID NO: 258489 - DNA, 893 bp, Cannabis indica
aaatattatttgaaaaatgaataatgtctctttacatatagaaaaacactatttataatgtaaaattttaagtaaaatgaataatgttttttacatgtagagaaatactattcataaataataatactaagtcctattttagcatatattatttatactttactttttgagttattttgaatgcattgttgtaagtgttcttattaatatccgatcatagggccattattcttgacactgccttatcaaactcgaaaggtttcaaaccttttcgatttttagaggcatggaccagagacaactcttgcaaggaggttattgcccatgcttggatctcttcgggggtgaactctgcgaagaccctccttagaaacctggataacaccaaaagagcactacaaaagtggagtcgagatgtgtttggggattgtgacactcaaatcaaaatcctggaggggaagatcatgcagattcagagtcaagagacttttaatgatcttatcgccctcgaatctcaactcaatggggaactcatggagtgctggaaacataaggaaagtatttggaagcaacgctctagggaactatggctgaagaaaggggacaggaactcaaagtttttttcatgcagccactatgatcagaagacgaaggaaccaagtcggggctattcgcgatgctgaaagggagaaagacaggaaaaacttcaaagtcatgggaaatatctttaatcagtattttcaatacctgtttagaagttcttacccttccattaccccctgaaatggtaaaacctctatgtctcgaagtggggactgaagacaattcattgattagactataccttctgatgatgaaataactaaaaactgtaatggcaaaatgcaaccctc

SEQ ID NO: 258490 - DNA, 614 bp, Cannabis indica
tcattttcctaccaacctttcaagtttttttttttctacataacatctcacaatcatgcaatagtttctctataaatataattcattctctacttgatctcctcacactcctctctctctccctttcaatctttttaaaacttttttttttgtgttttctattttcattttcaaaaacaatgggaggaaaaaattaaaatgtcatggctatggagaagaaatcatcatcaacattatcatctcaatcacaaagacaatgtctatgaagaagaagtttaacaatagtaataataatcacacccaagaaaaatatgtgtgtgtatcgagtgtatttatagaagtttagtattgatcatcatgtttttagtttattagtcatgtcattctcttaagaaatcaacctcttacttgtatgtatatatatttaaacaaagtttcattcacaaataagggaatcttcgacaaaaaaattagagaaattttcaagctaaattgttaggctatcatgtatgtgtgactttattctatgtgtcatttttatattgtataattaggttttcttctttttcttttaaagaaaaaagtataatggtatgttaagttggatgtttaat

SEQ ID NO: 258491 - DNA, 852 bp, Cannabis indica
gggcattgaagtcctcggtgaactttggaaggacataaggaagaacgacccagtagactaaatgagtgattttcttgaccgtgttgaaggcttcatcaagctcgaagaagctattcaacgagcagaaggtgagaaaaatcctggcaagtcaaaagctccttcaactgtaacgtccgcccaactcccccactacccaaataattcaagctcgaatggtaaacactccaataacaacaacaaacaagggaatgggaagaaggaaagttcaccggcaaaactgagcaagctccccgggagaatcaagcaaagtacattgcatttaccatcttaactaagtatatagaaagtgtttacatggccactcagtcgctagccccgtattagaagcccgcgcccatgaagaaagatgtcagcaagagagacatgacaaagttttgtcgattcaacggagactacgaccatgacactaacgaatgcaataacctgaagcagtaaattaaattcctaataaggaaaaataacccacccttacagaagtatgtcaagaccgatcagagtcagaggaacgaaaaataactaagacttactacctccaccggtagacggacatctgcaagtcattgttggaggcccgcacatagctggatattcgggaaaagctcgggagaggtatgtccaaacagcgcagcacgagcaagaggaagtgatactggccgtagaagaaaggaggcctaaaatcccatgggcaggatgacctaccataaccttgaacgacgaagatgctatcaaaatcaggtttccagacaacgacccgtttgtcgtggaggttcagatagctaacaaaatggtggc

SEQ ID NO: 258492 - DNA, 648 bp, Cannabis indica
taaattaattattaattttaaaaattaaaaaaataagtgaatgagatgagtcattttaattatcaatataataaaaactaattgagggcataattataactattttaaacataatttagaatgttacacatgtcacttaattaataagaaagtgtaaaagagagtacaaaagagagttttcctagtactcatcttaacaataattaggaataataacaggtcccttttaaaaaaagaaataataacggtaggattgcatattggatagatgaccttatatgaaaacaataatgattcgtttggtccgccgtattatatcgtattgtattgtataatattatattaaattgtatttcatgcaatatttttatgtaaaactatatgtgatattgaattttatgagctcctaactacataatattttagtatacattaaaatttaacataatattatataaaaatatgatatataatctaattcaatatagtacaatacaatataatacgacctaatacaacttaccaaacgagtcctaaaacaaatatctatgaaaaatgatcaattaaatttttttagaaaaatattaaattttgtaaaaattactacttaagagagaggaaatgatatatttatttgtaaaattagta

SEQ ID NO: 258493 - DNA, 1026 bp, Cannabis indica
actaaagttacaaaaaacagtttaaaaaatttggactaaaaatgaatgttgatgcagcagctaatttcaaaagattaaaagttttaggaattgaagctgttgtgcgcaatcacaaaggagaagtaattattgtgttttccagatcagtccaaggatgcttcagaagtgatgaaatggaagcgaaggtgcttttttcacaatttaaactgggttgctcaacaccacctatcaattgctattgtggaaacagatgccctaagagtatcctctgttttgaacacttttcatagggacttatcttgttttaatgatctaattgacgatgtacattgtcttttatcttctttctctggagttactgttactcatgctcgtaggcaagttaataaagctgcccatggtttggcaaagtacgctctagaggcggatgaagatgtttcttggatagaagaaaatttcttatcctattttctctattattgtaaatgactgttaatttatatgagatatattataggagtgtttatcaaactgctcgcactataaaaaaaaaaaaaacagtttgaaatttttatggtgcgatcgcagtttgaattttttataaactgcacggtgcggtgcggtacggtttgcaattttgaattgttaatatgcagtttaaactgcaccgcatattataaaaatattaatttttatatttatttaagtctaatatgtgaatgtccaacctaaagccctctaattattgtattgttaaaacttaatatttttcatatttattttcaaatcttatagtattttagataagtgtgttcaagttttattgtatttgtgatactttaattatttagtgatagtttatatcgtaaaaattacaaaatcctcaccgcactacactattttttacattgtcaagttttgtatattttttagttttacggttgttggtgcagttttggaaaattagattaaacctcacctattatttgtagaaaagaacacgtggtcactcatgcatgaggtact

SEQ ID NO: 258494 - DNA, 684 bp, Cannabis indica
gtctgacggtccttacaagtggtgtcagatccaaatctcaaaattagccatgtgaatgtatccccagattgccaaacaaaagaaggtgaagcttgctgttagagtcgtcaaaggtttaaatctggttcgaagggatttcaaatcttactggtgaagggattcatctagcttactcaaggggatctttagtggttgaatcgagggattctcgaggggatttcgaatttagctggtgaagggatccatctagcttacttaaggggattttgagtgctgaaattgagggattcaagtttagatctgtaatcgtctaaggggaggcaaggtggtccttagtttgaggggaggcaaggtggtccttagtttgaggggaggattgttgggtgcacatccaaagtcccacattggctagaaatggtaaggatcttgggtatataaggatgaacactatctccattggaatgaggctttttaggaaggtgcccacaaacaaatcgtgagggcttaggcccaaagcagaaaatatcataccaatggagaaatagatggtgtctaacggtccttacaactcaaattctgatattgtattatgtactcaataaatatcctaataataaagacttgtggagtatgtagattttaactacaaaactacgtaaagatatctggtcttatcttatcatt

SEQ ID NO: 258495 - DNA, 695 bp, Cannabis indica
ttatttattttcttttctttttcttttctctttcctttttctttttttttcttcttcactaaaaaacctaccaaactcgacccccttgtgcccctttgtgcgacgtcgaccaacctcggcgaccaccctcgaccccttgtgcaacatcgaccaaaagtaatgccactgcaacaacaatacaattataccaaatttagcaagcataagactttattatattacttttatgacacatttgttaaactgtaattagaatcagaataatcaatggaaaaaaaaatgaatcgggttaaaatataaaataatcggaaacaatattttattttgttgtttactaaactaattggaaaggaaattagaatcattttattttatttacataattaagaaagataatcgccatgacttaatttaactaaattaccattgttagaacatgtaattattttttatttatatattttggaagggcatatttgtttttttttatttttaattaataaaaatataattaatataaagtaatttaaggaaaaaaaaatgtattccttataaaaatatggagagaacctttccctttattttttccttaatttatgtggaccccactagtttctcccattccaaaatttagtaaacaaatgaacgagaatcaatcacatacaattgattcctattcccctttagtaaacatg

SEQ ID NO: 258496 - DNA, 881 bp, Cannabis indica
tcctctacgcttcccaaggattggatgctccttcccccacgagttcgcctggttctttgacttgaagtctacccccaagcaaggcaggtcggggtacttctacttctctcagtcaggcttcaagtggttgaccggcaccgatgaccaggccatcaccaaaataggtcattttgctgatgagtacttcatggtgaaggatccaagcatcactcgaactcagtttcagctgattccgacatatcagcgtcctcccctcactcttgctcttagggatagagctcaaaaacttgcccggttgtcgggggaagacaggaatatcatccagttcacctccgatgataatctggtaaagtatgggctttaccatgaggacttttctcctaagtccgtggcggggaataagaggaagtctggtgttggccggcctaaacgagctcataaggatgatgagctcattatacttaagcgtgaagctaagttgaagggaggtgtgagggccaagcattatggccaggagcttttggatcctgaagatgaggctgaggctgagcaggtgaccccattgaagaggaagaagaaactcccggtgatgccctagcccgttgaacatgcaattcgcataagggagcccacttcaccgattcggccatctcacccctttgctggaaaagggaaggctgtcatgtctgagataagattgatgacaagtgatgatggacttctggaaatctctgtgcgggcggtcaccttgcatttcacttctcttttgagcttcttgatattcatgccttgtgttttctgatggctattttctaaccatactgtttttgttctgtccagcatgtctctgcgatgatcaatgctctgagaaaagaatgggc

SEQ ID NO: 258497 - DNA, 548 bp, Cannabis indica
atgcctctcaagtattggtgggaagcatttagtacctctgtgtacttaatcaataggctccccactgctgtccttgagaataaagctccttttgaagtgctttattccaaacaaccagattataccttcttaaaaacctttggagttgcatgtttcccttgccttagaccatatcaaactcacaaatttcaatttcactccattaaatgtgttaatcttggctatagtgaatcccacaaaggatataagtgcttgagtcccacgggtaggatttacatctccaaaaatgttgtttttaatgaacttgaatttccatttcagcttggttttctaaacaattatcaacatgagaaacctgtcattgttcaaagctcttcatggtcatatttaccttctcctattatgcctctgtcttcacagaattcttcacaaaaatctgcagcatcgtcctcacagcagccatcttcaagtgcccttgatgtcgactcctccttgcaacaatcaccaaacaatcaggtattctcttcttctcctacctcagttcattc

SEQ ID NO: 258498 - DNA, 733 bp, Cannabis indica
ccagttgtccattgcccaggagcaggaagctgctctgtactctttggatccattttttttttcttgacttctattgtattgtatatggtttaagctgatctagaaatgtcatttttatataagcattaaaaagtcaaaattcctttaggaaatggtatgattcaacagaggtgaagtagtacttatctagaaaattatatatatttttttatagttttcaatataataacaatgaaagaaatacctggcaatgtatcagaaaatccgatgaaagttcggaatatatattatatcaaattatgacttgaacatgatcaaaggttcagtgatatacgtaatttgggaaattagttaattaatgcaacaccctaacactcacgaacaccacatatgtagttttacaattaagggtaaataaaccgtgattaaattcaaacaaattaaaccatacatctttacattaaaactttaattacataacttaatattaggatgtacacatcattttgttaatattctgttaatgttagttaggattactgttatagttagttctagttagttagaactaactaattatctgcttgtatcagtcctctataaatactttgttcccattattattcaacataataaagatttgattacactaatacggtatcagatgaattcaacactctgatcctctctatgtaatttcttctttcaccatcttcaatggcgagaactcgag

SEQ ID NO: 258499 - DNA, 529 bp, Cannabis indica
tctcttcctctctctgaaatcgcaaggaaaaaaaaaactttcccccaggtccatggtccgaattttacaaaatagaccaaaaattaaaaacaaaaaaatacaaaaaaaaaatactttaaccgaattttttcctttcatttttaccatttggattttttattacataaatacaacttcagtaaaaatagtaaatcattttttggttattttatagttgtattatagttgtcattagattgttttatagtttatttacggttgatttatacttgttatgaggttgatttcttgttgttttttacttttggttaagagaaatatattttttaattttaaaactttaaaagagtatttttataaataaaaactttacgtccaaaaattacaaataaaacataacaaagaaagatattttttagaattccctatattgattttacttttttattttattaaataattattttatttaattatggtaaaaataaaatgacaaagccaattagacatttatttaaaattagaaaat

SEQ ID NO: 258500 - DNA, 708 bp, Cannabis indica
tatttttgtaaaaattaaaataaattccagtatttttataattttcccttaaaattttttgtgcagattcataaaatatgaatatctatatattcattttattaagtatcattcatagataaaataataaatatttcattaaaaaataaaaaaaaaattatcataaatttatttgtagggactgctttctttattgagtatatgcatgctgaaattaatagacaaaatctttgaagagatactactaattctttctttatttattgtaatcttaactaattaagaagaaatcatgataatttcttttcagggccgattttaaggtaaaatagagtatacccacgctttggacactgctgcaaattttttataaattatgattaaattagtcgtaataagtaaaagtcgactcccttgaattttttataaattataattaagttagtcgttataaattatataatttgtataaatctttgaataatgagtggcgtagtggttgaccaccctgcttagggccttcaaactccccatgttgggtttaaccaggaccggccttgaaggtaggcgggttaggcgttcgcctcgagcccccgaacgctaagggccccgaaattgtaaaaaaaaaaaattaatacatagataaagtgttaaataagaaaaaaatataacaaaaattgtttgatgtagtggtaaaaggtcttactt

SEQ ID NO: 258501 - DNA, 887 bp, Cannabis indica
atgtaatcatacgctttacttacgtctaacttgagtgccaaaacataattagagatttggtctaatatggtgatggggattggaaattagtactttagatctctcaagacacaaaatcacaacagctccctttacttttacatcagtcactaaatttaatttagtatataaaaatatcataggaaactatatagagatcgataaattacattgaatcagttctaaaaatttattgtttataattaattccccaccctaccaacacaactcccactatcgtaataattattatgaggaatgtaaaagatagcaatgtatgtagatttggtaatttatactatatatttttttaacctaatataaaggtcggattataaaattttaaatacaacccccaaataatgaaatatatatacttgtaacaaaaataatgaaagattaagttttatagtttattatacctatacatttatatatgtcaaaacaaattatataaatctataaataaatacaattagtactacaagctacaatcctaaatatatgcaaaaataaaataaaaaaccactagtcaggttgagcggtttatttaggtttaatttgttaagttagtacttatttttaaccggcccaacttaacagattgagttttttggtagtagaaagcattgggaagatgccaatgctccaaaaaaaatataagcatcacaaaatactaaagaagactagtagtgtgtcaatatatatttttattggtctaaataaatatcggatctcatatataatttaacataataatttttaaagagtatcgttaaccactacccaatagcaatactcaaataagcatatataagttttcataacgaccgatggatggaggcgaa

SEQ ID NO: 258502 - DNA, 529 bp, Cannabis indica
atacacttgtggtcctcaagggagaggttggctatatgtggctacgagttgtaggtgttggtggtggtcttgcaccttgtaccattgtcgggtgtcaagtggtccagagttgcaggagtggtgtggttgcagagtacctgttgtcggggtgtcaggggttatagacgaagtacctccactactcgtacgctattgccatcaggtcacgctaaaggcatgaccgtacgctatttcatacctttccgcgtgcatgtcttgtcgtttgattcctttcttaatgatcttctctccaacacttaagcaaattttgcctttattcttattctctctctctctctctctctctctctctctctctctctctctctcacttgcacaccatgcctcccactcacaccctcactcactcgcacgacatcacccttacatggcaaatatggaaaaaaataagcaatcgaaataatcctttgcaaaaaagttcggaagtttgaaaagcaaaaatggaaaaatgggttgttattctcaaatt

SEQ ID NO: 258503 - DNA, 666 bp, Cannabis indica
aaccatgcaacattaaatgttatttctgatctatattaataagcaaatctgattatattgaaatgagttttatttagggcataaaacccaacttgattcccagttactacagtggatactagccaacctatgtcacctggtcctaaaaatatgagactagtgtgcgaatttctaaatgtatttctagaggacttacctggattaccagcttctcaagaaattaagtttgttatcgagttagttcaaggagcagaaccactatcaaaggcactgtatcgaatggctccagtagaattgaaagagttgtagattcaactccagtaattgctcaacctgggatttaccagattcagttattccccttggggtgctccattgttttttgtgaaaaagaaatatgggtcgctttggatgtgtatcgattatcagtaactgaataagctcactattaagaataaatatactctgcccaaaattgatggcatgtttgatcagttgaagggtaggatgttcttttcaaagatcgatatttgctcaagttatcatcaattgagaatttgggtagaggatatcaagaagactgcatttcgtacacggtatggacattattagtttctggttatatctttcagactccctaattccctggctacatttatggaactt

SEQ ID NO: 258504 - DNA, 733 bp, Cannabis indica
ttacatataattagaatgacttaaaattggattaaccatcaatcagaatcaaaaaaattatttacttaacttgcaggtataatcaatattttcattaatgtgtttacattattttaaaatcgaataaattattttaaattataaaaatacgcttgattaaagttttatgtgtatgtaaaatatttataagaaaataattaaataaggataaaaataacaaatcatatttaagaaggaatgagagtaacaatttcatgaattttattcctcaattataaattgggattatttcataaatatacaaaaataataaaaaaatattacaaatggtttgagaaggaaaacctctctgttcgaaaatggagaaagaagtctgaatgactttgtattgattaggtttagtttgtacagagaaaagatatatatatatatatatgtacaatatgtgggtcagcccaataagtatatgggcttaagtaattgggcctattctaatacccccccttcaagatgaactatacaaatttcttaagttcatcttggttacaagagtatgaaaataagaaggaaaaaggggttttgtaaaaatatctgctatgttgtttttggtagtgacatgaattagcttcaatgtgccttcgtggaccttctctcggacaacatggcagtcaatttcgatgtgcttcgttctttcgtgaaagacgggattttcagagatgtgaatggcggctgt

SEQ ID NO: 258505 - DNA, 1218 bp, Cannabis indica
ctccttggagcattaaccactccatttttcaagttttgctgcctccttagaggtgctcttaagccaattcatttagtgacactggcgggtggtctcacagtacataacaacagtattacttttctaacaaatcttagaaacattcataaattattcataataatataattatgaagactcagaagtataaatgctatcaaatgatgcctagaggcagaaacacacctagtatcgggtcattttctttagtattatgtaaatatttaataataattatcactggataatgacgaatctgcatctcataagtggacagtttacacaatgaacatcagatgaattaaattaaaagttattgtgatatcatttaaagtgtattattctttttttttcttttcgaaaggagaatatttcattgaaagaaaacaacaattacatgtgatgttatttgttatttaacatataatattaaattaaaatgtgatatattttatattaatatagattaataatatatatattatatattagagggggtgactacttaatggttacatttttattgtaaccacggtggttacattttttttttgacctgtaataacaggtaactaataggtaaaaattccttttttaaaattaatttgattataattacaaaatcatttttaattagacattttttagcaattactatatataaataattttctttttatatttaagtcctcattatagtttttaaaacttttaaaacatttaattataatatttgcattaaaactctattttttttttacaaaaaataaacttctaccccttctaaaataattttattgaataattaattatttttaacgaagatatttaagtaattggttcacatcattaatcttatttttagataaattttcatttaaatttatttattttttaaatattatataaaaaattaaaaaaaaaattaaagatcatttattaaaaccacatagttgtgaaaaacaatttatttatttttttttttaaaaaaaaaggttaacaaaatattgtagtaaaaggcatgtttttctctacacctaatcgtttacttttgaggtcttgtctcgcagtcacgcagaattaagtcgttgactttttggtcgtgtttatatacttgaagttcaaggccaacttgggaagcaggttgagttcaagctcaaatgataagattacatgtga

SEQ ID NO: 258506 - DNA, 1319 bp, Cannabis indica
gcttggtgaaggagtactattcccaacttcgagctgatttggaagattgagacattgacttgatttatgggttattttcccctggtgaagttgttgccattctctctattccttggtcctctttttcgattcaggatagattaatttgcgggtataattactctagttttattcagtaaagagtggttattggatggctatccgtaattggggttgggtcgtgcttcttctacaactggattctcaagatggtggaaaaaggtgtggtctcttaatataccgctaaaagtgaagatgtttacctgacaaattttctctaactaaagtcctaccaaatgcaaccttaccaagcatggcttattgatagacgatgtatgtcctatttgtaattctcacttagaaacaactcaccatgctttatgggattgtccttctttagcttattatcataaactttgcggtgtttctctcagcgaccctcttattacttgcattgatttttatgatttcatcatcaagtttcttgatcctttgcttgtgactttgttagagttaattttggttgatacggggagaatttggtttaggagaaacaaaatggttcgtaatgacaagttgctctctttagatattgttgttatttttttgtttcgtgattatcttgctgattattagagtttggatatgacttccagtggctttatctcatctggaagcctattctctattctaattggttctttgagtccagtttgggttcctcctgctttggaaactgtgaaagttagtgttgttgccacccttgattgtcttaatagtagatgtggtttggaaatagttgcccgtaattccaacagtgaggttttagtttctactgtttgacatatgttgggtaatttctctcttgaatagcaaaagctttagcccctaaaaatgcagccattcaatgccatttgttgggttttcaaaaagtgcaatttggttttgattgtttgaatatggttctaaactatattaataactagatttctttattagcttcttctttgagtttaatttcatgaacgtaatttttctattttatactttgttagtctttttttttattctagatctattaatattgttgtctattaatttatatgtgtacattttttgattaattgattgttttggtaataattttttaataaattatttagggcaattctacaatgcacatccttaaaaggaatatatattgatgcaccttttacgtgtttcggcatcctgaagaattttttagtctatttttttttttctatattcatgtacgttat

SEQ ID NO: 258507 - DNA, 788 bp, Cannabis indica
ggagattggattatgacaaggatcgttgacttgttatgttggattttaaaaatttgagaaatatttggatttggcgggtggttttctaaaaaagaaaatatattaaagtacattattttgtggatctctaattttgacatattatattttatagaataatattaattttaagctaattaggatttttgccctctgaactttgacataattatgcctctgaacttcttttttctaattttagtaaaaagtctaacatggatgaaagttcagggggcataatttagtacatatcaaagttcgaagggcatgatttggtagatatcaaagtctggggaacatggtttagtacttaaacaatcattgaaatagtaaaattgaataaaattagacaaaagtccttaaatccaacaatctcaatagttcagggggcattttcaatggccttaaaagttcagggagcataatttggtacatgtcaaagttcagggggcaaaaatcctaattagccttaattttaaaagtaatttgcaatgtaattaattaagtttagtttcttgttacagataaataacataagtaaaaattttgattctgttcttgttgaagctattggagttaaagaggtgttgagttggttgaaagaattggagcaacataatgtggtggtagagtcagacagtttggtcacgatcttctagtttgaataatgtttttttgagttttacatttcagagtgcatacggatcttctagtttgataatgtttttttaatttttgttaaacgatct

SEQ ID NO: 258508 - DNA, 708 bp, Cannabis indica
gaattttcttggataagctttgtcaggctgcgtggttgcacagaatccatcatgtacttcagacaaaagtcgtgctgcttcttcttgtgtaacacacctgagtaatggcatggagaatcctcttctatacatgactccatctacgatgatgtactgtgcagcctttcttctcattttccgagctttgtttctgttacttgggagttccccagtattgaggtaggctgctattggcgtcatctagtttggagatgtgtcaatcatttcaatttcttccgagtaggtgatactaggtttttcaaggaattggatggggattagattagccttctcatttatattgctgctcacaagtcgagctagtgcatcagcagtcgtgttttcttctcttagaatttgcttgagggcatagctcttgaattgtgcaagcaagtcatgtattttgcttaaataggctatcatcttttctccccactgataggtctgcggtgctgacctagagtccacgtgtccaataccaaaaacgcgaataacagttacaatttggttctcacattatcaaggccaaaagttgggataacaattatattgtgcaattattatattttattgtatacgaaaattataaaattttaaaaaataaaagtgtataaaagtttaccctataataataagtttaattaatctactatcataaaatttaaaata

SEQ ID NO: 258509 - DNA, 548 bp, Cannabis indica
aatcacgtaatacgcctatgctagttagggtgttacaataatatacttttaataggatatactaattaaaaaatatttttagtaaacaatattatgttaaaaaaaataattaaatatatataatatataaattttatactgagagttgcacatgcaataaataaaatattttatgcttctatatccactaatatttatatcaaagaaaccacaaaagaattaatatgaggtggcattctaaagtatttttcatctattttatttgaattttagtgaatttagttcatttgactcatagtaaggttttttttttcctttatgaaaatttcacattatgagaaattgttaacttaatcttgcctaattagttataattctttagttatttattttaagccataaaatcaaaatttataatttaaaagttgactaatattgtttttaatagtacatctataaatttataatttatttattagcaatatctataacttttaatagtagactaataatgtttttcaatattatacatatatattattattatt

SEQ ID NO: 258510 - DNA, 812 bp, Cannabis indica
ggcttaatttagttatttttgctcctaactttacatgtaataaatcgtgattgtaaatttttttaccgtttttttcgaactattgagattgttatatgtaaggacttttgtctaatttcattcaattttactgtttcagtgattgtttatgtactaaatcataccaaatcatgcccctcaaactttgatatgtactaaataatctcccttgaactttcattcatgttagaaattttttactgtaattagacaaaagtctttgagtttaacaatctcaatagttcggggaaatttttaacggccaaaaaagttcagagagcacgatttagtacatgtcaaaatttgggggaaaattactaattagcctttttttaatatttacaataaacactcatttttctccaaactttttatttatactctaattagagaatagattcccgctttgcccaattttaataatttttttttaaattttacattaaaaaaagttaattttcaattacaaataaaatcttaagtctaatacttttttataccattttataaataatataaaattggacgactattcaatggttacatttttattgtaaccatcatggttacatttttctttgatctataatagcaagttactagcaggtaaacattcattttttagaattaattaattataattagctattttcttaaaataagtaattaaatatttaacaagatctcttttagcaattaatatttataaataatttttttatttatatttaaatccctactctaattattttaacaattaagccatttaatta

SEQ ID NO: 258511 - DNA, 657 bp, Cannabis indica
tatagcttatcatcatagatcacatatcgagcaactcgataacgtaatcttttggcttcgagcttatcaccagggagtttgccagtttttaagtaagtaacgatttgggtcatccaagtggtttgctccataacatcaatttgcataacttctttgcgatcaattattggaggggctaataggtctataggaattacatcgagtaattttgcttctctggttgaggccagttggaccaaggcatttgcatgagagttataagcacgaattattctactaacaataacttttttaaatttagacaacaactcatcggtgtaagagaaatatttggccaatcgtcctcctcgagccaaatattcgttattgacttgataaaccacgatttgagaatcgctaaaagcttcaaggtactcaactttcatctctagagcgagttttaatccaacgattagggcttcgtattcagctttattattggaggcgctgaattcaaaccttaaagctgcatggacttatcaatataatcccgccacctgagccttcactatttgatgccccgactacgtataaggtccaatctgcgtctggtggcacattcagatcaactcagtcttcagtgatgaaagccacttgttcatttggaaatttgagaat

SEQ ID NO: 258512 - DNA, 568 bp, Cannabis indica
agcttattaacccttaaagagggttaaggaactagctactcagcaatgaaggctgttcatcaatacttaaaccagtacagaaatctcgggcacatcacaacagcagataacctttccaaaaaagaaaatggcatatcaccaaaaaatttcttattcaatttttccacattaaacttagcatgctaatgtagggttcatcagatttctctaggaagaatattgatagtaattgcttctgtctagattaaacaaagtcaaactatgtgaaggattattgaaattaattatagtctattcgctttctaattcttggtcactcatcagcctaatcgttcctctaaattgtttacttcttgaatttctccttccatcgttctgttcccaaagtattgtaatctctttctgctattgtaataattatttacaatgattcatctctgtgatgtattccattattgacgttccaaagtggtaaaatgtactataatacacacacacacatatatatatatatttatacacaaatataaatgcaataaattagatataccatttcagtggcaatcct

SEQ ID NO: 258513 - DNA, 1007 bp, Cannabis indica
  modified_base (985)..(985): a, c, t, g, unknown or other
aaaaaacaacaaatttataatcaacaacaaacaaacaaacttcatcttttttcttgggaaaaagtttgtctcctcaaaagttatgatgggattaggttctatgaagggagaaaaaggaacacttcattgatggcaaagtttatttgggctgcctcaagtaaacaagacattttatgggttaactggatcagttcgatctatttaaagtgaaaagatctatggcaggctcccttaaaattggacgtcagctggtacttcttaaaattcatgaaacttacagataaaattgataaagaggatgtttatgctgctgtttagaagggtaagtttaaagccagaattttctatacttctctaattgctgctaataaaatagattatgcaaataatatttggcacagaatgtgtgttcccaaacaccatttcattgattggcaagcgctgaacaaccaactcttgactcgaaacacatacccgaaaaaaatcattgtgctcccctcgagcaactgtcccgtgtgtgatgctgaacccgaaacacaccaacaccttttctttgactgtgatttcaccaaaaaaaaagttgttgctgagatcagaaagtggttcaacaaatttgtgtggcctgccactttggaggaatggagttgccggtgcaacaagaatcaaggacagttgatttactatgtacgatgtgccttgatttactatgtgtgatgtaaccgtaatcaatgcatctttgaattagcttgctattctgtcaagttggttaatttatctattaaactagtcattaaaactataaccagaatagctaaatccttgtaacttaaataaaataaaaataaaggacaaaagcagtttgtaaatatgtaacttgtagttctggttgtttaggggttgtcttattttgttccgctgctttttattgtattttggattgttaattttaatgaattcttccatctttcgaaaaaaaaaaaaaacngaaaaataataaaatgtaatca

SEQ ID NO: 258514 - DNA, 754 bp, Cannabis indica
ccctctaaaaaaaaccagttatgttaaaaaaaaaaactaaaccaaaaaaaatctaaacacctaaaattactaaaataacctaaataaactacaatacacacactatgggcttttgacaaataaattccagccatatgggctttaaaatcccataaactatggccaaactttaaaaaagccatataaagtgtccatagttaattatgccatagttatcataaaaggtttaaaaaacccatactccacgtaaattctactattaattaagataatctaaccaaaaatattaatgactaaaccaccaaaaatattgacaacaacatcttttgtctctttctattgacttcataacactctatttgtgttttcttttcttggacaatcgaatgatactcggaatatttatgccaaactactatttgcttgtggaaaatggaaattggaaaatggataaaggaaattttattattattattattgaatggtaattataaaatcggtataaatactttaagttttgtagtaggggtggcaaaacgtgtcatcgtgtcgtgtttgtgtcatattttatgtgacccgcttttatatttcgtgttaaaacgacccgtcgtgtttgtgtcgaccctgttgaaaatcatggggttccatctcaaaaccaattggcaatgagtggagtagcccatgtttcttatatatggctcaatacttatttttctcaccaatcttgaatcaccttatcataagtagtgtcatt

SEQ ID NO: 258515 - DNA, 594 bp, Cannabis indica
tagtcatatgtttgtgacgaaatccttaaatgacatttttggttaggtgaaggccaaacccacatgtataattcaattattaaatttaaatatcacaagatatattttttaaaaaaaataaaacaaaattttatttttaattaatttaaataaaatgtattaaatgagatatttaagatatgttttttttaaacttgatattctttgaattaaataggtacaaaatatttacctaaaaaaataaactttttggccgcacacagctagcattagaagaaactcttcaaacttaaaatgatcatctctgaggccatggtacgtgctactagagttaataataaaatgttttaaggatagtaaatttggagtaggctctcgattctcaagcatagattcatactctagcattggagatgatgtgtaaatttttagcatatactatcattggagatgctctaagaagacaataatctaataaaacacagctttagaaaagctaaggtggcgtttggtaacacttttttaatcagtttttctgtttttaaaaagtaaaaaagtgaaaaatatttaaaaaaaatatgttctataaaactg

SEQ ID NO: 258516 - DNA, 1785 bp, Cannabis indica
ggaggcatgtctaaggtaatcctatgctttaaggagacttagctgtttcattcaaatgctaacacctttccatccacgtgtcatcatccggttagtccatgtattttgggcaaaatcaggggcaacatttacccccccaagccttgtttaattatgatgtgaacaaggcttgcctagatacctccgattgccttatcagcttcctggcacgtgcttcggatgcgtggtggtgtattaatgaccatcattactgcagttattcatttcttgcaggcgtcgattcgtttcttgtccatttattgatacggcacattaatgggtgtcagaagggaactcaaacgtttccacagccttgatgacgacttaatccaactgttggatgtatggattttgaatcgattgctatcccagtcgttcaatggcggctgatcacagctgtctcacacatgctctggcctataaaagccaaccttcttacttcgtttggttactttcagcatttcaccaaatttcctcgagttttccagagagaaaagaaaacccaaaaaacaaaaaatttcctgcttttgttccttcgccgttgccagtcgaccttttaccagcgatcaataccaacacccagtttccacacttcatgtaagttcctcgtatcttgtacactagactgtttgttcatatagcatgttttactgttcattgattttttctgggttggatgttgaatttctgggaatttttgtttgagtttctgcacaacgcgttagattcctcctcttttgcgtttagaatacttcttttcaccatatttcgaggacccatcttcgtcccacgtaatgacacttaagggtttagagtagacttcgtcttctcgattttacccttttcttccttttctctccttacttttttgtaatgtcactatctgtgggattcttgcacccgactcttgtcaaggaaaaccttgtgaggctttcttttttggcaagtgtccggaggggccctctttccagcggttaggggacccccattccctttttgaattagggtttggtttggggcctgactgctggattttttcgatctttttcagaaccaaaatgtctacatccagttctaagtcttcaaagaagggagagaagcgcttggccaccctggaggaggtcatgaagggtcccgtggcccaagaggggtataagtcccgtgccaacgggtgggaagcggctgagcttcattctaccctgacctgcgcccatcagctggagcagattgtggtggtggcaggcatcaagccttcgacctccgggacttaccactggctcccccgggacgaggagacacccaaccacaactacgggggcttcggagcctagagccagacgcatattatggccggggccatgctccctctctgagattatttcattaactttcttgtatttgtcggccttgcgccatatcaacttattcctcaagcttaccgcctgctttcaggcttgttcattttttacgctgcccggagctgggcctcgcctagtccgccagaaattttgtatttttacgaacttgtttccatccctaaaaagggagataaacttaaggatggtttttacggtctcagggcccatcctttgaatgagggcccggtcccttataattatcagaagcacgtgaaggaatatcgtcaccgcttcttcttctcctccgatttccaggccatggatcatccagagctactcacggagttggttaggatccccccttaccatgcggaccgaacctactcaa

SEQ ID NO: 258517 - DNA, 1506 bp, Cannabis indica
tatcatggtgagttcagaaacaagctcaggtccaccatgttgtattcgcccccatggacacaatatgaacctgtcagtgtcagaacaatcaaacccaattctttttcgaacattaaagaaaacccattaaagcaattaatggaatactacttgaaatcccattaaagcatttgatcaaacacctgatatagtaatacttgagaaccaaaaaaagtgataaagttgacttctttactcacattgctagtagaaaaagcaagaccaagaacaatcaaagactgacacatacaaagagaaaagaagccatgaatccatggaggggttgccatgtgagaatgatgaaactacaaaatcaagaaaaaagacccttttgtgtaaaaaaaagaagcacttagtgatgaacaatgtgttgtagtgggctttctctgtgtatgatggtggttgatttgtggacacgtggaccacttctgattctgagtgttgcttccatttatatgcaatcaagtttaagttcacaatcatcttcaatgaagccatggatataatcatgaactcaggaaccatgttcccccattattagttatcgttgactcacggggatgaaaaaatatgttaaaatttcgggattttttttctcagaattttgacatgtatattctcttaattttttttagctgttaaaaattaatttgaactattgagattattagatttaaggtcttttatctaattttattcaattttactatttcagtgattatttatgtactaaatcatgctctccagactttgatatctaccaaatcatgccccttgaactttgatatgtactaactttcatccatattagaatttttttactaaaaattggacaaaagttcttaaattcaacaatcttaatagttcatgagtatttttaagggaatataccttgtgttttcatgaaaaacatatttggtactctgtgttttcaataatacttaattgatacctcatatttttaaattatatatatttggtaccctaaagtaaaatttaatcaatacagttttatcaatttaaccaaacagttctcagttatatataatcaaataattaaatttgaattcaaagtttataaaattttagagtgttgattgtattgataaaattttattaaaaaaatttgaatttaaggtaccaaataggtatgattttgaaatacagggtaccaaattagtattattaaaaatatagggtaccaaacttgtatttagataaaacacagggtaccaattgtgtagatacctatttttaacgaccttaaaagttgaggggcatgatttgatatatgtcaaagttaggggaaaaaatcttaattagcctaaaatttatattaaaattgtattaataaaggtaaatactattttacaccgtgtgttttgcaaaaattattaattgggcctttggtttgttaaatacaaaatggactctgtatttttttaaattgtataaataggaccctaa

SEQ ID NO: 258518 - DNA, 568 bp, Cannabis indica
gtcttgttctagttcgggtcccgggtcccggacagagtcctaagttttagtttgggtccgagtttggggttgcgtcctggtagtgaggtcgtcaggggtcttggtccccgattcaagtcaaagtggtagttcccggtcttggttagggtcccagtctgcgtgtagaactcggtctgtgttcagtaatggtccttgtctcgggtcttggcctggtctgggtctaagtcacggttcggttctctggtcccaggtctgagtatcgggtcctaggtcccagtcctggtcccagtctgagttctagtcctagtccaggttcgggtctcggtcctagtgcaggtttgggtcccagtcctaatctcagtccgggtcccagtccaaggttcgagtacaagttatagtagtagtccaggtttgggtcatggtctaggtctgggtttgggtctgagtccgggtttcagtctatgtcttggtccgggtcttggtctaggtctgggtctgggtctgagttcttgtacgggtctaggttctggtccaggtcttgagtcacgggtcctaagtcacaagtctt

SEQ ID NO: 258519 - DNA, 518 bp, Cannabis indica
agagccattttgagagagtgctttagtttgagagagttcctctaagagagctttgcatagctcatttgtgtgttcatgtaaagaaaaataaaacagagagatttgctagtttaaaagaaaaaaaagagagaaatcaaagttgtaaaatgaaaaagatcaaacttttgtaacctgttgttgatgaatggattcaagctctaaggtagcttgacggagaagtagccgataatattgggtgaactctgagatcaaagtttcggtgttttcttttcactttcatcactctttgtattctctcatctcactctatatttctgatatttgtatgtgtgtgtattttgtgttcttgttattttcagtttggtgtggagagtttcttggccgagattaaaaggaaagttttttgggttcagttctaaggttttaaatgtgattatttttgggcttattatttcgggtagaagaagataagagcaagaaaattttattttgggctgttcttgtttcgggtagaacaa

SEQ ID NO: 258520 - DNA, 842 bp, Cannabis indica
ttatttatttttctgcaaatattttatattctgcctgttatgttttgtcactgcaaaactggtttctgcagtaacagaattactttctgcttctgcagacgcataccgttttatattttcatatatataattgacatttgtaaaaacacggtttttcagattggatgcataaagaagatacggtgatgacagatgatgacagatgctttgaatataataatgactacaagtgaaatacgatgatgataaatgcttagaatataaaagtgactacaagtgaaatacggtaataatagtgaatttaaatgtagtggtgactataagtgagatacaaatctaatgacaataatgacattgaatataatgatgactataagtaatgagatatgataatgacaatagtttcaaatataggtaacgactgcaagatgacgattacatcaattttaaaatatatgattatttttttaatagatttatatatcaattgtctttttttttaagatctctatttttatttaagaattcttcaatttgtattctctttttctctataacaattgaagatatatcttttttgctttctttattagataaaaaattgtatgctttgattttattacaatatttatttatttattccgaattaaaaaaaagtgaaagtttatattattaaaaattatgtatttaaaatataaaaatttaaaattcaatatttattattaaataaaatatacaaccgcacacgaagcacgatttgttttcttagtttaatttactatgttgatgttacgtgcaatgcacatataaattagtttttttttaattaagtgatgttaagt

SEQ ID NO: 258521 - DNA, 566 bp, Cannabis indica
gtgcttgaactcaagaacttagagcttttaggtttaacctagtgctctttatataggagagagcttacagaagattgtaggttgatattccttaaaatgaggagatatcacctatttattacatactaaataaataagaaaataacttattaattattctaaagaataggtaaataactgaaattaaacccttattttcgtgggttgttgaagtcaattcgtagctgaggatgtctgtccaagttgaaagctacagagacaccaaaagtgtctgcaagaagagaagttggtggcctatgctgcaccatggccggccagggatggtccggccagacccctatagttggccattttgttgtctctttgtcctggttgggtattttgactcttcgtgaactggtacgttgtgcatggtaacttagtcttcttgcgaacaggttgtactccacgtaacatcaatcttgcttatgtggacataccatgtgggcaaaaatcaaagtagagtaactatcttacttaatctctcaatctcaaaatgatacttttattgtgtttcaatttataat

SEQ ID NO: 258522 - DNA, 1108 bp, Cannabis indica
atatatactccatacatttgatactagcacactttgccaatgtcctggaaagaacataacacttatccaaggtgtaagtaaatttcattgctgattatcacattattgtaaatcgagtgtactaatgaatcatgggacgttaacttttcaagcatataatcatgattaccttccactgcgttgacatcactataattgtgaataactatatgttcaggatttaactgaaattttatatattaaagcataaacatgaaaactacatgtaaacataaatgaattctaatcatctattgataacaaataagattacattgaaatgagttttatttagggcacaaaattccaacaaactcccacttgcactaacataaaacaagaagtgtatttcaatcaatccattgtcttgatatccatatcaagtgcagtgtatttgactaaaaaccaaattacaggaactgtaaggttgtggtaagcaattgctttatccaccattacttccttagtattcataaaacattatgcaacatctctttcctatataaaaaaaagatccttttaattttctgtagcaacttttccaacaattttaatacaaaatatgctatttttcaaaacattgtatatgaagtaataaattttagaattctaagagcctttgtaaatgtaaaaaaataaaaatttaacatttaaaattgaagcgccttattgtgtgggaattaccttcccatattaatagtggcaaagtaccattttaatgttgtgtcatcgacatattacatatatattataataaaatatagcactctaaagatatatgtatatatatatatataaatattacaaagttatagataaataatttttgaagtagaaagtaaaataaaaaatccctagatgaaaacaaattgacaggaagttttattattataattattattattattattttgatgaatcagttagaatttcatataatcattttaaaatttaatagcaccttcaaatgaagatctatggaaatagccactatacaagtatttaaaaaattacgatcttttacaatttagaaaatattactaacttttttaggccaaaaccaactaat

SEQ ID NO: 258523 - DNA, 739 bp, Cannabis indica
aaagaataacaattaaaaaaaaacatcatatgtttttgatatttttatgccatgtgagtacatgtcaatgttgttatgaacccttccaatttatggaataaagtcgagtttttgtttttggttctaactctcgagacatgttcttatttcaattggtttaaacaataacaaaaatactctttggtgtggatgtaatatctttttagtaataataatcttccacattcccatggtattaaatttgcaacttttatgtccaaaaaaattattactgtagaaaataataagatttcttcataagaagataattttaacacaattaatttaatatactaacaattttataagacttccacaacaaatcatgtgaaaactttaattaacagtaatcaaattaaaaattctcacgtataacaaacaagatcataaattttactgacaagtataatattctaattaatcagatttttttgaaagcccccttaaagaattgatgtttaaaatcattgtgagagcaacgggatgatcaaacaagatgaaaagtttcggtaggaaaacgaatccaatggattagtgcaagccaaagacaactcaaacacataactctacctctggtcccgatcaaacaaaacggctaaaattattaaatgagacgacagagactgctcagaggacccgatttcttttttttttttgataaaatctgttcagaggatcggttactggtacaataatcact

SEQ ID NO: 258524 - DNA, 991 bp, Cannabis indica
aagtctcttaaataacaaataaatcttaaaatctcttttcttcacaattaagctcttgcttagtgaaaatacataaataagacatagtctaattttataattataattgattaattaaaactaattaattgaatcttacaagcattattgcctcaactagtgtggggaccatggacctatataactgagctttcaataagtagatctagaatttatcgagtaaattccctaacttattaattcctccttgcaccactatagatttggaattgcactctcaattatatagaacgctctatatgttccacgatatagatacggtatacaattatccatcgttctaattccaataatcaaaagtcctttgtagatgatttacatcaaataaaaataaatttaccgttctacccctcaatgtattttatccttaaaacacttagtttcttataaatgatattttagtaaactaatataactattgaaataagagctcttccacaataacattgccttcagatcaaataattttttcttaaaaccatcataggtctgaataccagtctcatacaattctatcacatcgtcaattaatagttccaaatatacatcgatgttatatctaggttattgtgggtctgatatcataaagaaagtatattaaatttctttttcatcacttagaggaagattgtacataataaggaagacaggacacgaactataacaactacttagagatctatgtggatttactccatctgtagatagaccgagacaaagatgtcttagtttagatttgaattctgaatttatgtaatttacttttttccaagcttatgaatatgtaggatgtctgagtttttcatctttcactctcttagtctcgtaccgaatcaaatttttagaatgctatatgttgaccgaggttttcggcaactaataaaatatgaatataataatgagctgtaagaaagcgagatgaagacttttt

SEQ ID NO: 258525 - DNA, 591 bp, Cannabis indica
agttcttttggcaagcattcgaggttaggacactgatcaatgatcaactcctcaagggaggtgaggtgctgaaaggcctcctcgtctaagtgcctcaagttgggacaaaagttaaattcaatcctctttaaagtgatcaaaggggcctgcatgagttgagctcttgggagtaataatggtattagttggtcacagtcatatactagaagctctgtcaatgacgggaaataatctcctaacaatgtcactttgagtctctcacacctgattaattgaagattcttaagacgaggaaaacctccaccttcgataaatgaccactcttccagctcagacaatgcgataaatgtcaaggtctccaaagatgtaaagaataagggttttgtttgtattgcaacagaagaagaacaagaatcaagagtagaactacaataaaactctgactctattctcaccacaccacaacccctaatcgaaagatctttgagagaaggcagctgtcccaacgacggcaagaagctgcaattacaacaatctgctatatccaggcttactaaattagacaagcagcgatgatctaccatccaatct

SEQ ID NO: 258526 - DNA, 783 bp, Cannabis indica
agaggcacgaaaatgtagtgccattgcttaccccttttaaaaacccaaaattgtttttcatcttcccatttcttcttcttcttatttctcctaccctctccgcctccatcagaccaaaacaacctcttgccttctagaaacccacccataatctagaaaaataaccgcatctcaactccaaaataaacccccgtccttaaaatcggtaccctgaattttaaaaagattatatttgttccttaaattcgaaacacatcgaaataccacaacaaaaatttgtttggtgggtggtatatatctccattctaggttttcggacatttaaagctacgttctcctccatcagcttcaatctcaggatggaactttctctaatttgttgttcttcatcattttacggtaagagcagatcttggttaagccatctctcttgcatttacactctttttcttttcgatttaagtattgtatattacaagtcatactccttttcttatatttgatttaaatatctcttactgcccttatggaaataagtatatataatgattaattttattattctgttttggatttataggtttgatcatattggtacacagtataaaaatagggtttggcttgaaaagtggctgaaaatggagttggggttcactgttcacagaggtaaatctttataatgggtatatgattttttttaaaactttattttggtatttttcggtttaaaatttgtgtgcaataatgagtacttaaatatttgccttgcactttgaatgtcta

SEQ ID NO: 258527 - DNA, 685 bp, Cannabis indica
cattgaatttaatttgataaacccattttcatccaataaaatgttgatggggaggcaaactcactatgatccaagtatgattatcttccaaggctgtgatttcagtggacataacattgtcccactcaatgatatacatgttgcctggctatatggagcaggttcataatgactgaaatggaccaaatgagagctcgataagtggaaaaaagtcttgagtaatcaagaacatgagaatgacaatatggagtagaagaagatgacatatgtagatgaatgcagtaaaaaacaatgataatcttggagataagatggcttttaagcatgtctaactagtctggaagaatttgattcatctgtggttaaagcagatgaaacaggggttttacctaaataggtagtgtagtgtgatcgtgtataccactatcagaaaaaaaaaatgtatatatatgatattaagggagcaaaagtttaggagtaagaaaaggaaaatatactcttaaaattgaacatctctagaacaaaaaattctattaattttaaggtctaacagtttgtaagttttcatcccaattggataccaagaaatatgcaagagattgtcttggagaaacttagacctaattggtttaaagtgaaagcataggctaaggactgaaaagatctcaagtgatcataagcaggt

SEQ ID NO: 258528 - DNA, 675 bp, Cannabis indica
atttaccataagagcttcattatttgacaagattaacttagtgttaggtacacaagttatatgctgaaacattttggagttattgtagatgtgcctagtggcacccgagtctattatccaagatgtatcaacgaattcagatgaagcacaagtgaggattatacctgaattacctgtcgaggtactaggatcagaaggactcacgtttggttgctgaccagcaaggaggttaaggagttgttgatactgatttgcattgagctgaggcaaaagtgtgtgtgcatcctcggttttccctttgttttcttcactgttttggaactggtttgccatgctttcgttttgcttgttagacttgaaaccaggtgggtatccgtgaattttgtaacatctttcaatggtatgcccatggatgttacaatgagtacaaaagggtcttcctttcttgggagcttgagacttttggttctgattatcagacctgttacctttgtctccttgaaatgcaaaagcatgactagtattaggatcacttccagcagtgatattggctttcttgattttcttcttgtgtcacaagatggaaaacccgatttacatcaggtaaagtgtccatcaaagtatgcttccacggacttgagagaaattgtccgaaagtcccataaggaatgacat

SEQ ID NO: 258529 - DNA, 576 bp, Cannabis indica
tctgcttttactcttaggcaactgttcgatcaggtctattccccatacggcaaaggaccatggactttgcatctgaattagctctttaggggtgcgcaggggatttttgaaaatcgctggcacttatcacacttctatgcgggggcctttaaatcttccatgatagttggctagaaaaatccttgtcttagtattttctttgataaactttgccctgaagcatgattaccacaaaatcctttgtgtacttcaaacaaaagccgtgcaacttcttcttttgtcacacatcttagcagtggtatggagaagcctcttctatacattacaccttctactataatgtaccgtgcaacttttctcatcaacttcgaagcctcatttttatagtttggaagttctccactgttgaggtaagctgctataggtgtcatccagttctacactgtgtctatcatttcaacttcttctgcacagttgatgttaggttcctccaataattggattgggactaggttggccttatctgtcagtatgctgcttgaaagtcgtgctcaggcatcagtagttgtgttttct

SEQ ID NO: 258530 - DNA, 655 bp, Cannabis indica
cttaatcttagataattacaacagcattaaactatttctaacatattctactaaaggacaaaataacaaattggaaaaagaccattttaccccttgactataatagaaggccacttaccacctaggggtatattggtcatttccaaaatctcgaatattccagacattcccaatgtctatctatattgcctcgctaaaactaaaatagtaaaatgtgattctattggccaaacaccgcgttcaaatattgtcgggcacaaaacacggaaaacgtaaaatttcatatatggcataaataatacattctaaatttaaataaatctctgtataatcataaatcataattaataatctaattttatattaagccctaattatctgctaattccaaacaaaaaaaattaagtagtctttacacgtttccatgcacccatgggaagtattaatactgttggtcgtcaagacttcaggtgaagtacctacaccaatcacctcattcatcatggaagtattttcgagtgtggagtattttattgatctgcaccctccgaatctcatactcttcactttcgtggaagagctttcgggtttttcccttatgtctgactattggccctttccctttgcaaggccatggggtggtctagagtcatta

SEQ ID NO: 258531 - DNA, 504 bp, Cannabis indica
ccacagtacttctcataagtcttcacctgcacaaccaaatccaataatacgattcaaaattattataatcaaataataatgtgatgatgaggattaaagtatttttatgatatatatgttgaaagtgattggacaaattacaagagttttgagacagtcccaatcatcaacaagaggttgccctgaagatcgaaggttcttaaagccattttgatgatcatgatgtcccaacaagagctttccaatttgatttatactatagtcaacatgctctctatgagccagttcttcactcaacttcttcttagctaggagatactcctcagaattgacatctgattttcggatctacaacacatgcatgtacaactaaaattcattgataaataaatgaaagtatatataatatatgtatatatatatatttatagaaagagagaaaagagagaggatctgattgaattggattttttgagataggtaaaaccttgtggtgaagatgaa

SEQ ID NO: 258532 - DNA, 928 bp, Cannabis indica
tggaataggctttataaacatccatgaatagaatcgagttgttgtaataaaaaatatatagtcacttgcaacaaaaaaagacaacatgtgagtcaagtgggtgcataatgtgtacattaaaaatgaaaattggtaggagtacaaagccccaacataaagcagttggtattggaggaagttagttgagctcaaagatgaagtgaaaaaagtattggattcgattcaattcaattaatatcagaaacatgtcaaacttcctatgtttataagctgctaaccaagtcccacgagcactatcactggtgcgaagaagtctggttcaagttaaacactccaaagcacagttttctgctatggattgatgttcaaaataggtttaaaaccacggaaaagttgtatagattcaacattgtagaagagccgagttgtgttttctgcaatggacttgtagaaacagtctctcatgtgttctttgaatgcctcttatctcaaatctgtcttagccagattaaaagctggcttggatggagagctacaatagtgactttacatgggattcttgggtggataaatcggtccaaaatgagcaagttcaagaaggaagtgctaaatgttgttattgtagctttggtgtaccaaatctagaaagctagaaacaataagatttggaaagcaaagattgtgagtcagaatgtgattgttcaagaaacaaaatggcaaagtcaaaataaggataacatgtgttatgcctaagcaagttgctcaaatagacaaatattggtttgatttattataattagattctattagcctttagattcttgtatagagcatacaaatgaccttattaaaaaggtactataagatgtattaagtgattgtgaagtaatgaaatctcttattcaatgaaaaaattatatatatcatt

SEQ ID NO: 258533 - DNA, 677 bp, Cannabis indica
atcatgattatattccactgtgctgacaacactataatcatgaacaaatatatatttatatatggtctggacttaatagaatttatacattaaatataatcacgaaataaatcatgtgaaccatgtaacataaatttctgatcttttttttttgaaaggaaaagaattgctagaaggatggttcgaacctctgaccttgtggttaacagccacacgcttgatttctgatcttttattaattagtaaatttaattatattgaaatgagttttatttagggcacaaaacccaacaaattgttactatgactttgaggccagttatcgagacttgttttaccatgatcttcatttattaacatgtatttttgattatcacataataatttaacatcctaaaatatgaaattcacaaaatgataaaataaaatataaatagtttagaattcttatattgattgaaacggaaattagtgactccttctgttcaatcactctaacctttgattccctttctgtagcaggacattgccaagtgatgcatctgaatagctttcttaaacctgataagcgacaaaagctgcatgatcttccataaaaatctgagtatcactttgaatagtatgggttgacactcaactcactattggagtgattttgagaagagaaataaactagg

SEQ ID NO: 258534 - DNA, 520 bp, Cannabis indica
tttttttttttggattcgatgaggttttgtagtgacgtcacttctggttttgtttactatgtttgtatatattaatattcttaggccgtacggtattacttttgacctttgatatagaatcttttttatatacgatgttatatgtttttatggattattgtgtatttttattaatttaatataattatcgggctctaaatacgcaattttagacaaattttaattttttttatattattattaaaaaataaaaaaattaaataaatatttatcaaaaataataatatgaaacaattacttttttttatatgatgatatatatttttagtaattctttttaaataatttatgaaaaataaatttaaattgcatgaacataaaaagaaaaatacatacttctgactatttgtagtttttttttttaacattgtaaattaattaaaaaaaaaaaacaaaataaagtatcttctacaattacaatgttttctgtcatgtacataaaataaaattataattattt

SEQ ID NO: 258535 - DNA, 916 bp, Cannabis indica
gatcaaaaaataataatatatattgttatatattttattttgttgacttgagatatttgttttgtgaatattaataattaatgaaaagactataagttataaatcttgcttgatgatgctacgacatctaccctcctacgtatatatgctattgtatatatgcattatatatatatatttgggacaatcttcaatcctaatttatatttatcctttctttatgtatatatatatacatatgaacacattgaaatgcaacataaatatttatctaaatataaatatttcataaagagaggattttcattgatagtaacataatagtactattcgttaaattttaatcactctcaataactctataaaaataactatttttaagtgtggtattcattgatttcccttcctattattatgaaaaaatttctaacttcaaaaagacaatgaatagagacaaaaaagaatgacaaaaataactaaaagaccaaataaaaataggagataaaaatgaaattaggacaaacaatctacttgtaatgctataagaattgcattattcaatttgacatacgaaaggacaatagaatttcaaaataatcaaaaaaatatttattataaaatatacttacagttagagatggtagagtaattctcttaattggagtacccaacaatcagaccaagaagctttagagaaaaaaaaaaggtaaaacacacttaataacctataaatcataagagaagaaaaggagatattcacactaacaaattagaggctatctattcttaacaagaaaacatcctctcttatttatatatagatatatgagaatcaaaaaataaaaaatttatgagaaagaaacaaaaataacacacaaattccacaaaatgagatgtattatcaaattcttttatg

SEQ ID NO: 258536 - DNA, 904 bp, Cannabis indica
tggagtaccaaatttggggagactcaataccccaaaacacagtttttgtgagctggctagccatccaacaaaggctaaagacagagaccgattggctaaaatggggattactacatatcaggtatgtatgctttgtaattcactacctaaaacacattctcatctttctttgagtgtccaccactcatctttggctacaaaacattaaaagctggctgcaatggagaactcaaggaaagacccttactgtgttaattcgtcggctagaaaaggcaaaaaccagcaagtttcgtaagctggttcatgctgctacaatttccagtctcgtgtaccatatatggaagtcgagaaacacttgctattgggaggaaaaggcacctgacagcaaaaaaaaattgtagagaattgaaggctggagtgaagcaaaggataaacttattttggccaaaaaaaaagtttcttgagaaaattgtgcatgatattcaacattgtaattgcagattatattcttgattattggatgtatatacaaaatgtatagaaacgtatcaaaggcttgaaaattcaggtgcttttaggttgtaaaagttttgtgtgctaatacaattttcctgattcatcaaaaaaaaaatgcgtttagattttctccacaaaatatttgaatttctatattataacttcaactttttttaaattagaggagaactaaactataaagaaatgataaatgttatatttatcttatttatttaatacaaaataatatatatatataaatatatttatatatgatttcttttaaaatatgaataatataataaaaaataattaattagttaaaatgaagagtagttttggtatgataaaaaaatattgaccaaaattatatgcaaagtattttttt

SEQ ID NO: 258537 - DNA, 831 bp, Cannabis indica
ttgtcttttcaggtgtgttctgacaagttggcacggtatagtcacaaccgggtatttcgggccgaactaggttcggggccgaaatacaatttcgggattaattattgacattttaattatatgtgaataattgcaatttttatttgagaagatttatgttggaaaggaaatttttacccttgtttgatgagtatgctttattttggccctaggggcatttttgtcatttggcattatagttgattattagcaaaaggggaattttagcaaataaagattgaatttttgggttttcctctcatgaaaaccgatccctctctcactctctctctccctaaacctagctttgatttgttgttttttttttttttttgcttggaatagcttggattcaagtttgaattgtgttattctttggagctagtgttatttgagatcttgaggtagttttcatctctttttgcttttaatctgttgctgaaattgtagtaattcaagcaggttttatatgattatgatcttgagatgcatgttggtgtttgttgggatgttcttgttgttttgagcatgctttgtgcttggatcttttgagtttattttgggataggtttggacagaattcaaaggattttacttgtgtttttattatgttattgagctctaaaattagttgtttgaggcatgagttcttggcttgattatgtaagatttaaggtaggattatgtggaatttagctttgtgttggagcttaatctttgtgttatttaatctgagttttgagagttttattgatggatttgatgcataaaatttgtatttttaactctcta

SEQ ID NO: 258538 - DNA, 610 bp, Cannabis indica
gtaacctttatgtgcttttggattcaagctcttgattttgttttggtttaaagcttttaaaccaatttgttttgttcaggtttgttttcgagggaatcgacgaaacatctctagacggggcactcgatcgtgcattttcctactttaaagacagtaagatggttttattgaacaaccttggtgatgtcatgctattaccgtcaatatatggagtattaccatcaatctcttattataatttccatgcttaaaaatacatgttgaaatattttttttcaaattttttttatgacaatgttcgttataatcacaatgtcatccttgtaaaattttaaaaatttcgaatagtttacagtattgaaaataagtttaaagatttttaaacacacgtgataaattaaaatatcaagaactctatttttagtactgtaaattattcaaaaaatttcaaaaatttacaaagatgatattataactataaataatactgttacgaaaaaaaaaagaaaaataaaataaattctaacatataatttcgagcgtgaaagataactaaaagattgtaattagcactatcttatagcactaaattagtactcttgtgaatgtt

SEQ ID NO: 258539 - DNA, 635 bp, Cannabis indica
aagtccttggatctaggttttcatgaattcaaacttatagattaatttagagcatagaaagacagctagaagcaaaagacaccattggaggactccaattcatgatctttttcatttatctttcacccgaaattcctaaacccaaaactcagtcaatccacccgaagttcagccctaaccatgaccatgccacctagctcacacacttcttctatgtcatactcatatccatgagaatgaaacataaatttttgagaaatactaaaagatacccatagtgcctaatatctttgtgaaatgcaatatcgttagtacaatttaatatcaggtctcactatcacttataaggcaccacttcataattataattttctaaattttaaaataaaaaaaaaactatttttttatgtaaattatgattaattatttaattaataaaattgatatttttgaatatttattttttatctttcaatctcagccattggatttatttttatttatttattaaaatctaatatggaaaaatgaatatttaattaataaaaggactaaacaaacaaaagaattgggtgagtgaatgactgtgtctaaacacagtagagatgctcagtgagtcattcaggagagaagcc

SEQ ID NO: 258540 - DNA, 635 bp, Cannabis indica
atatttaattttttttattaagacaacattaaatttgtacgagtattcaaaacagataataaatatatgagtactcatttagattagcgagtactataataatgtagtataaattatatgtattataaataaaagtaaatattattttgaatcatgtgtttcgtaaaaattactaattgaatcttctgttttgttaaataataaaatggattatgtattttctaaaattgtacaaataggattctgaactgattttttgtcaaaataaaacttaataataatctgatctagagatgttatgacaaaattaattacattttttgtatttgttcgtgttagaaattgttttaaagatggttacattaaaaaataaaacttttaaaaattaagctcaggatcctatttttactattttagaaaatatatggtctattttgtcatttaacaaaacagatggtccaattaataatttttacaaaataaaaggttcaaaatagtatttactctataaataatatagaaaagacataaaaatatagtagttcagcaagaggttcgagctaagcttgcctaatccacgagtgaaaagagatctctagtgcaaataagggtcataatgaaaccgttacaaaata

SEQ ID NO: 258541 - DNA, 759 bp, Cannabis indica
tgtgtttgattgcataggaatcgactcattccttacaagacatgttatttatcttattttaaggtagcgacttacctttctaaagataaattatgtgttattttgccttatttgagacatggtacttacaaaataaggcaagtcatttactttatttaaagctgaaagtttgtctcataaggtgtgtcatttaccttattttaagtaaggtatttaccttaataagatatgttgtttatcttattttaagacaagttatttttcttaataagaaatattgtttaccttattttaaggtagtggtttatcttttactgataattttttttatgtaccttatttaaggcactgtgtttacctaaataaagcccattatttaccttatttaaggtaaaaagcttgcctaataaaacgagttgttcactttattttaaggtagtgattttcatatttaatgattattttagtttaccttatttaagacatgtaagttacctgaataagacatgtcgtttacattattttacgctaatatttttacctttttaataataaatatattttaatttatcttatttgaggcacggtgtttatctaaataaaacatgtcgtttaccttattttaaaataatagtttatctttttaatgataaattatatttttgtttaccttatttgagacatggtatttatacaataaggtaagtcgtttaccttatttaagacagggagtttacctaaataagacatgttatttat

SEQ ID NO: 258542 - DNA, 721 bp, Cannabis indica
aaaaaggtatagagtgtaatttccccttataaaaatacatatggtttattaaaaaaaaaactaaactatatgcaatttttataatttttcaaaccgcaactgcaccgtaagattttaaactcgtaaaaatcacactgtgaaaatacatgcgtagtttaaataatgtttattccattcctttgtttagttgcatttaaaactattggaataccattccgatggaatgacctttctattattttggtggaatgactattccattttaaaatagaaagaaagaccatttcaatgcaaaatttgaaaaaatttaataattttttttatcaatttttttatgtattttaaattccaattccattgcattcctatttcaattccaattcccacttctattcctatattttcattcctcccaaccaaacgctatgatcattatcaaattataaaattttaaaatcaatctaacaaagttttaacaaaatttaaaaatattatattaaaattttaatatcataacatatatactaataataggtttttttttttttgatgcaatatactaataataagttagtaactaaaaaaataatataacatatacatatattacatatatttatctagtaatagaagttacgtgtgcaatgcacgtatatttttttatttaaattttgtaatttaacatttaaatatgtcacatatatatataacataaataata

SEQ ID NO: 258543 - DNA, 781 bp, Cannabis indica
atggaatgtctttcttacaagctattttattatggatgggctttacggaggcttgggttgacatgatcatggaatgtcttcgaacgatttcgtataatattattcattgtggagaaagtttgggtcctattatcccatctcaaggaatccgttagggaaattcgctgtcgtcgtatctttttatcatctatgcagaagatttgtctgctcttattcggttgtatgaagaaaggaagcggcttcatggttgtcaggtggctagggggggctccttgtgtttcccatatgttatttgctgatgacagttttctctattataaggcaaatagagaagaggctcaacgggtcctggagttgctcaatacttttgagagggcgtcgggccagaaggtgaaccttagtaagtcttctattttctttagttctaataccaatgtcaggactagagagtctattttgtctactcttcatataagggcggcggatgatcatagtttttatcttgggctgccaagtacggtgggaagaaataagaatgcgactttcggctttctaaaagagaaggtgaggaagagaatcaacaagtgggatagtaaactcttgcctagagcgggtaaggaagtgcttttgaaattggttattcaatctttaccaacttatgctatgagtgttttcttgattccagtggagatttgcaaagatgtggatcggtttatgggtagatattggtggcatacgaagtcttcacaaggccaaggtattcattgaaagagttgggata

SEQ ID NO: 258544 - DNA, 1606 bp, Cannabis indica
cctagccgccaccttctctccctcttcttcacttctgaaaaccgaaccctatagtgagtgagtgagtgcccacacacatcaagtggtacctcaatcatagtgtggaagattgtgaagaatccaaattcaagagaaggacattcggactcagatcttggtgatactctgcgacagaaaggatacaagggttagagatctgagtggaaggagacattatattccgctgcaaccactgtaaggtttcttatactttatatgtgtttatttcatattgttttagaagttcatatttaggatgttaaataacatacttgttagtaaatctaagatcctggtaaaatatttccaacacctttgcattatttcttccattttagaaattctgagaatctttcaagcttctttgttgaaaaaccagcaccaaatttgctcaagaacttgcatgccatctttgtccttaacattttttctacgagtttaatctgatttaagtttcgactttacgcactcgaagagatcctcactatgttcagtgattcactgatcgttgcgctggtcatcgtcccaaaccccatcttcaaacagtaagtggcttttcgtcttaacatctcacatgtttgttatgttgtatttatggatttaattgccgccttatttgttaatatcgttgtcatctcatttggtttcagtaacttttagggttgaactgtatttgggtaaatattatggtttagataatacttaagttttacagaaccttcaattcatcaccttctggtttgataaaattctttctaggaattgggattgctttcttcttgcagcaatgtcccaatctagttcaaaagtttatcgtccagaagatttagaaattgagttccttgccgtcccttacaaaccaacatttcaaaacccacatccaaattagagataaataatgaaagggttagggaacacttagtacaaatccatttggaagataatgctagttgccacagacgcttcttgcaagaaatttcagaaggcaaacgctgattcttgtgagatgcggcttggcctaaacctcccagtgtgtcctctattcctttggctaaacctctgtttttacccaaagtcacgattgctttttaaccaggtgacttggacattgaaataatgtctcccaagccacgtaaatcaaagactccctaggaccctaacgtcacctttgaagccgagttaatagaattgaatgtgaaaattatcgcgggctatgtaggcaattcacgagccagtgcatttagctgttacccacctgtgcatcttacagatgagggatctaagggggccagtggatagactagtacaagtggctcgactggtataggcgtttggagccttgagcatatcaaggtaggggcaataatccccctccgtgattatttcaaggattttgtaaaccacttcgggcttgccccatttcaactaaatcttgtctcctacagaatccttgcaagtttaagggttctgtacaaaatcctgaattgggagtgccccacacctgtggaaattgagtatctttactccgttaaagccgttcctgttggaatttattttaccaggatct

SEQ ID NO: 258545 - DNA, 586 bp, Cannabis indica
tttgatgtttctattaaacttccttccattttatattgtgacaacaatgctgtcattcacttgctaaaaatctagtatatcacgaaagaacaaaatatgttgaaatcgattctcatacagttcgagagaagatcacaaatggaacactttaaatgaactatgtcccttctcaaaataacttaactgaagtattaactaaaccactttttttcactcaattcaataacactatatccaagatgtgtgttaagaatttttacacaccaccttgaaggggcctattagagttagtttacttagttattatgatatattttagaatttgagataattaagatgaatctggttctatctcaaaattaattggctatgagaagaatagctcatttattttatattttctattatcttttcacacattaataatgtaagactctctaacattatatggtgaactattttttattgttatatattatccatgttatatttctttttaattataaggtacacatatatataattaatataaatttatagttttattgcttataaatgataataatataataaatataacaatatg

SEQ ID NO: 258546 - DNA, 1102 bp, Cannabis indica
tgtaacacacctaagcaatggcatggaaaatcctcgcctacacataactccctctactatgatgtaccgcgcaactttcctcctaatttttcgagcttcatttctattatctgggagttccccaatgttgaggtaggctgctattggcatcatccagttcgggatgtatcaatcatttcaatttcttctatgccagtgatgctaggttctttgagaaactgaataggaatcagatttgctctatcatttacattgctgctcgcaagtcaagctaatgcataagaagtcatgttttcttcccttggaatttgtctgagagcatagcttttaaactctgcaagcagatcgtgtattttactcaaacatgctatcatcttttcccctcgagtctcgtattctccgaatacatgatttaccaccagctgtgaatcactgcagatctcaatgtgctcgaccttcatttcttgggctagttttagaccagtgattagagcttcatattcggtctcattattggatgccttaaattcaaatttgactgcagcatgcaggtgttgccccccaagtgtgacaagggtgatcccagctccggacagttgatctgtagccgacccgtccatgtgtagcttccaagttggcttgtcttcactgttacctagctgaggtatgtgtactgactcggggttgtttttggaacgctctcttctttacccgtacattcaactacaaaatctactaaggcctgacccttaattgttttttagggttgaaagataatctcatactgacccaactctactacccacttgagtaaccgtccagagatgtccggtttctgcaatatttggcacaacggttggttggtgtatacctgaacatgatgagcttgaaagtagggccttagctttcttattgctagaattaggcagtaagtgagcttttctatcaatggatatcggccttcatcctcaatgagtcttttactgatgtaatagaccgggtgttggatgttattttcctctctaattagtacggcactgatagcatgcttcgtgatagccaggtatatcccaagttcttctccgtccaaaggttttgagag

SEQ ID NO: 258547 - DNA, 257 bp, Cannabis indica
aatttcaaacataatagatttatattctttgtagatagatgtataggtttgtaaaaaaatttagacaaaattttaattagagaaaaataaaaattatagtgaaataataagagtaaaattggtagaataaatgaaaaaaagaagaaaacataataaattttgaaagaaagagtaaaaattaaagacaacatgttaaaagagatatgtagtgtaatttcgtgatatcgcttaatatttggtcccattgagttttttgc

SEQ ID NO: 258548 - DNA, 922 bp, Cannabis indica
tagtttacagttacacaagcaaacatcacgagtatattttccttttcaaaattccaaaaattcattaggaacataaattataaataatgttccattttccaccctgaattttcaatttaaagagtccgttgcactgaacattgttattgttgttacaatgttggcctttcctttacatatttgatgaaaatcatcacaacttcgagggctatagttgcatttgatgatatcaatatttttttaagttgaatattttaatgttattttatatgtgagtatagtataatttcaatttgacaatttcttagaacaattttttttttctttttgctgaattatgaacaattttatttttttgtaaaatacactctcttacatttgttggtttactaacttacccaatacattaatgtgaatattaataaaacaaaaataataattactattacgttctacagaaaataagtaaagagctgaacattgtacactaagttacctttcacaattgtacataaattgaaaatctcgtgataattatattattctagataattgaaagtgaagtataatttaagtaattcccagcaaaaatatacatatatatattaatatataaatagacacatgaggtaaatttgtttgattcgtttacaaaaccaaaaatatccacaccaatacaaaaataataaatattaggaattatatgatttacaccataatttgagtataattaaaattaattttatcgaactaaataaaattaataaaaaaataatgctgctccaaaagaaaacttagaaaagcgtaaacccgatcaatcaaaagaaatgagagagagagagagatagagaacaaaatagcatgagagatacctactttcttgttagcttccaagctcttctatcttgagagagacaaattc

SEQ ID NO: 258549 - DNA, 358 bp, Cannabis indica
tttgaaaattagtaattttgtcctctaaactttgacaactatcaaattgtacccctcaaaatcaaagtgagaaagatttaatatttttttaataaatcttaaaaatttactttagatcttaaaaaaaaaaaaattaaaattttaaaactaattaagtgatttaagaaattatatatcttttattaaaaaactcatttagatattaaaaattctatttttgtaaaaactaaattttacgggaacaaactggagtctattttgtttttctccaaaaacatatatttgtttaagtaaacataacatttttagtttaatttttaatttttttttcaaaatattttatatttttattgaattt

SEQ ID NO: 258550 - DNA, 730 bp, Cannabis indica
ttcaatctatcccacaagactatccataagatgaacttgtgtttgggaatgacaagtctatcccacacatgtttgcaccaatctttcttctctggcttgctaaacaacaataaatgggtttttgatatgctgaatttctgcgtataaaggcagccctatcaatcttagccttcacctgattcttgactccagccaattttttccaaaactagctgcaatcggcaaggacttcatagtcccacaaccacctatctttcaagtatacattatgtatccatttgacaaacaaacaatctttcttgctagctatgtcccaatacatgctcccaagccactaaacaaggacccattgacatttgagttcccttccataagtaagatctacatattgcctcaatatccttgagcaacttcttaggtagtatcataatctgagcccagtatgtatgtatagctatgacactactacaaaaaacactatttacgtcggtcaatgctactattcattgcgttgaccgacgtaaatagtataagggatcattggggcgtcatttttaaaccgacataaaaaattattaattagtgtcggttacttgtatgtcgctaataatgtacccgacgctaatagcaaatttattatttttctttttttttcgcgtcattttgaaattgaggctaacgtctctagcttcactcaaaaactgacactaaaaagatacgcttttatgat

SEQ ID NO: 258551 - DNA, 589 bp, Cannabis indica
tcaaaagggagaaaggtctccgtcaaggaaatcttagatctcctctcctttttgttctgatcatagaatacttgacctgtttgttgatccaagcttctcattccaaaggctttggcttccatccgttatgcaaaaatctgaagcttatcaacttatgctttgcgaatgacctagtgattttttgcaaaggtaatactaattttaacaaattgtccaatcgacaatcaatagcttttgtaactctacaggccttgcaattgataaatcttaaatcccatatctattttggtggggttgtggctaaggttaaaaaccagattctgagcatagtgatatggtcgaagagggttcttttcctcttaagtatctaggcatgcatttaaggcctactaaatggagagcggctgattgtggggcgatcttagataaaattcagtgaaggcttcataattgggctagtaggaacctgccattcgcagggaaaggcgcaacttatccactcaggttttgttgggcattagaaatttccggataagtatctttatactccctcataaaattgttgctgcgattgacaaatgttgtagat

SEQ ID NO: 258552 - DNA, 890 bp, Cannabis indica
aaaatgaaaattatcaaaaaattgagacagccatagaaattatcgagaaactgtctcaaaacaattgaaaaatagtcgaaaagggtcatccctaaccttagtacactaaccatcaaaaccacatatagttaatgtcagaaaaccatcgatattgttcaaaaacccaatttttaccgaaaaatcagatccaactatccacatatatactactaaaaatgaactacataagtcttctaaatatttaagaaatggtttgaaaatacttacccattattgtagagaatgtgtctattcgagtgaatgtgcgtgattacataaccctagtggtctctatggcaccacatgaccgacgtccttgtgcaaagggagatagaaatagagagctcagagatttagagtgctaaagagggagtttttttttttttttttttggtttgttagcttcttttttagtaagagagagtaaaatgagaaaaatgggtaaaattaagtatcatttcgtataaattaatttagaatctaaattggataaatttttaagtatagtttaagaaatttcacctttaaattaaattacaaccatcaatcaaaatatttaatatactaaatattttataaaaggtttagtaaagagttccaattaaagaagtttatacaattgtataaaaattaattttaataaatacctaactgtatgaagaacacataaaagtgctgttcatttcaaatgtaaaataataattaccattaaaaaattatcatatatttaaaaaaaatattattataacaaatcatatgcatttctcacataatattatttgtcacattgatattttacaatttctctacattcataactccaagtcggttctaagaagaaagaaaatatt

SEQ ID NO: 258553 - DNA, 681 bp, Cannabis indica
tttagggtgttaatcaacatatttgtgagtagatctaagatcctggtaaaataatttccaacaagtgtaccttcgagaaagggggtcttgtttctgctccgatggagagcttgaagtctcttttctaaggttggaaattcttgtcagagagaactggagtaacgagtgataaaccgggatgatctgctgtactgatgtagtatggagattgaacatcttcgtatggtggtctgtcaactggattggagtgatgaacaacagagagagatggaagagttgttcgaggagggttgtcagcggaatgatttgatggtggaggagccatgggagcttcaactctggaaggatcatcagaagtagtagcagaacgtgtggcccgagtacgtaccatgattgtggagggaagatcttggttcttgaagctcgaaggggactgcttgaagcttcacattatttcatctgataccatattagaaacagaggatttcagagaagaaaaagctttattgagttgtatcttatgtcattacaaaagtgaaattacatgtatttataggcaaagaagccaactatagctttgtaactgaaataaccgaaaaaaatagaaaaaccaggaaaataacagactaatcctaactaacacttaacatcaacctcctgttacaacctcttagttaactt

SEQ ID NO: 258554 - DNA, 521 bp, Cannabis indica
caactaataaccgaataaaagaagtaagatttcgaaagtgaatgcatagcaatcttaccataaaaggaaaattattttgtcacctaacttgccaaaaaggactttacaagatacaaaaccaaaacccaaaaaacatcagacaaagaaaagaaacaccaaatagtgcacaaattcaaacattgaatctactgcagcacttgaaccttccacctgggttcttcgccattaactggataactgttaaatcccagcttgctctcttgattgatggccatggtcggagaagatggaacctcgaacgatactcgtggtcggcaaagatggaacttgtattgccgctcgttgtcgattgatgggttctcgtaatcggagagaaggttgcgttactttctctctctacaactctattgcctcatgtttaagatttgggagtttatttataaataatttaattttatcttttagttttaatttatttgttaagtcttattagaaaaaaaaatatttgttaactttttttt

SEQ ID NO: 258555 - DNA, 549 bp, Cannabis indica
aaatacattacctaattaaaaaaattaaacatacatgtattacacttaacatcacctaattgaacctaattaaaaataaaactaattatacgtgcattgcacgtaacatcaacctagtatataacatatgtgtatgttactttatttgttagacacaattcaatataatgatttgatgactattatacatgttatgatgttaaaactttaataaaatttttcgttttgtatagttaaagcttattagttttattttaaattttcattataatatttgataatgatgatagtgtaaaccgctcaaaccgcaccgcactgcattttcgcggtgtggtttctgcagttttaaaatctcgcagtgcgattgcggttttagaaattataaaaaccgcatatgcagtttggtttgaaaaaaatggctacaacccgcaccacccggggagtaggccactttttgcattaatggtaaggtagtcattccctttcatttatctacttattttatgaaaattaagaaagagaaaactttattaaatatgagataaaaga

SEQ ID NO: 258556 - DNA, 665 bp, Cannabis indica
tatagcttcccacagattgcaatcaaaaacctttgaatggagcattgctattaggcatcagtagtgcctagcatcttctcgacatgtcgcgttgcgattgactagcgatactccctaaaagctattaaattaaattatatgagacccgatatttacttggactaatagcgatactgacacataggagtgtgctaagcaccactggtgccttttagcatttctcttttgaatgttgtcctctaaaaaacaaaaacacatttcattaatgagatatatatgttgtaaattttgtctatgaaacaataagtatgatttaataaacttaacaagcttttcaataattaataaccgttcaatcaattataattaaagaatagctgagcttagttcagttgttcgggatcatgaaggtcgtcttgttgtggctgctaacagctttgtgcagaaggaactcacgccattgcagggggaattacaagcgattttgatgggtcttcaggccggtatacagcgcaatctgtcctccttctctattgaatttgattgcctccaagcagtaaacttagtgatgaaagaggaggaaggatgtcaggaggtcgatgggctcattgcgcagattaaatggctgctgcaaaatgaaagagtggcagggatttcttttgtat

SEQ ID NO: 258557 - DNA, 641 bp, Cannabis indica
tagttaaatctacataattcacgagtcttttttatttctaggtgttttagtgttatagagtatagaattcaagaataaaggatgagttttcctcagggtcttctcttgatcatcttgtcgtcccttagtggtattttcgcctatttatagaatttctcatatggcagttattttctttagatttatcttaataactgctcatgaatcgtagtcaattctcatgtttcaaataattacaacatgtgggaaaatgtgcataactgcccagtaaccgtcatttggcttaatctaatagacagatatcatatcgagaagccttccttcgttgtgttgctcgcaatttactttagcagcgtatgctctaatctataacgacaccacgtgtatacttttgaaacgtagttttatcatagtagattaactttttaataaattttgtgataataataaaaacttcactaaaataaatcatagcaatgaacatgatgacattgccaaaaatttatttcgggaatctcctgttataaaagttttacaaaaaaatagctatatacaacaataagtcaagatacacatcagtacgaatccaaacaactcctaacaactcaatcatacatgtctagataagtcaatatgtacat

SEQ ID NO: 258558 - DNA, 717 bp, Cannabis indica
gaaaattatgattatgttaaattggacatatttttattaatatgtaattatatgaatattagagtagggttataatcttacttaagccaattatgagttaattagtattttttgagtaaatgaataatttaccgtaatttattaattactgagattttatcagaatatgtgggtattttatataccatttttgaaataaaacattttcaggttcgacgacaatagaaactcgatgaatttgtcaaagatgccacgacaacaatagaatgaaatatattggaattgtactggactagtttagaatgttgagttgtcggtttaatcgggttagctagtaatgaccaaaatacccttaggttataaattaccttaagtgtttattggaggggtaaaatagtcatttaattaggttttagattatttgtcctatatggttgtgctaggctgaataaaggatttatgttggaatatattttaccaggacctagatttactaacaagtatgtttttaacatcctaaataatatgaatttctaaaacaatataacttaaacacatataaagtatgagaaaccttacattgattgcaccgaaattaaatgactccttctgctcagatctctaacccttgttcctttctatcgcagagtataattaagatctgagcccgacactccttatcagttgtttgaattcttcacagtcttacacactatg

SEQ ID NO: 258559 - DNA, 922 bp, Cannabis indica
actatgttgaacgaattcttgaaaggttcaacatgaaggatgcaaagtcagtttcttcgccacttggtgactagttcagactcactaagaattcatgtccttctttgaaagaagaaaagaggaagatgttggctattccttactctttagtggttggaagcttgaattatgtaatggtttgtacgagactgaatattgctcatgcagtgggagtcgtaagtcgtttccttgcgaattcgggcaagcagcattgggaagttttaaaatggatctttagatatctgagagggacatcaaaaatgttcctaagcttcgggaaaggagaaccaatcttagaagggtatgtagatgctgatatggctagtgatcttgacagtagaaagtctacatctaaatatatgtttacttttgcaagggggagctgtatcatggcagtccaagttgacaaaaatgtgttgctttatctaccacaatagcagagtatattgctcttacagaacctgggaaagaaatgttatggataaggaattttctccaagaattgggtttgaagcaagaaaggtacgtgattcattgcgacagtcaaagtgcgattgacctgagcaagaatgctacttaccactatagaataaaacacattgatgttagatatcattggacacgtgatgcacttgaaaaaagcattccaggtgcagaaaattcatagagacgagaatgcagcagatatgctaacaaaggtgattcctcgacataagcttgagttgtgttccaagcttgttgggatgagttctcaatgatgaagacacaaattcaattcttcctcatggattgaaaaaggggaataattgatgggtatggttgtttttcaaccatgtgaaaaagttacaatagtaatttttgacttgaggcatatgcacatttt

SEQ ID NO: 258560 - DNA, 602 bp, Cannabis indica
actctttttaggaaaccttcaaaaactgctaatgggggattagctcccagtatcatacaaatcacagccgaattccaagattcagattgttccctaacttcctcaacatcaacttgtgcaattttcacaccatcttgaaataaaggttcagtaaaagagagctttgagtcacgggagattaccttttctttggcaaaagattgccacaagctcttggcagaatcttgaaacagctcctgacctccatcgccaccctgttcgagttccacttctttagcccagctcgaactgacctggggagtatgaaaatccggtaatccgggagaaaatcgattctcggtctgacctaattcctcgcccaagtcgtcgacggcttccttaaacacctctgaacccttcccagtagaatcgcagtcatcctcagctggagaatcaggttgggcaccagctctttcaagcttactgataggctttcgaacttgcctcttcttcttcgccatgggagaagcagagcaaagctacgtgcgcccagtaacatcgttggattcttatttcaaacgaaattatcctaattcctcttagcttattcattgcgaattagc

SEQ ID NO: 258561 - DNA, 708 bp, Cannabis indica
aaattagataatgcccattctaatgtcactgatgatgtatcactccccgctactagtacgccctgaaaagcaaaacgaaattttaggctataattttggttaattagtaatcatctaataattaagatccccatattaaaactcttttaattcacagatatattactagtatgaacaaatatgcacatgtcacaattataatataaagataaatatatttaattatcacagacgtggcaatcataaagtgaattattaagtgagatcgctacttcaaatatttataataaagactaattacccatcataataaccatatacaaattgttttatattaattagcattccattataatagatactaaaaaatatatactttaaattaatttatttaaaaaaaatgtaataattagcgtgacatattctggtagaataaaatataattttaaaatcattaatcagatgttaacagccatctattaaaatgatatattttttttgtcacttccaaaatgaatgtaagtatatatatttatattttctcaagaataagatattgtatttgtaaacatatcttagagacgattactaaatggaagttggagtttattctaaccaacaaagctcattatttaactaaaaagtagtatgtttagccaattcataagtcccaatattaaaatcactactaaaatttgaatgtgatgc

SEQ ID NO: 258562 - DNA, 414 bp, Cannabis indica
gtatgtcttcagaaaatacatcaaggaatttgcacaccaatctcgtattctcaggtccagatgagacaggttcgctagtatccactgcagtgactaggaatcccaaaaaacctctgcacataagatctttagcacttaaaagtgttattctaggtatgcgcgtcccttgaactttataccccaaaacactgctgggttagcactgtcaggctcaaacaccaccatctttcgcttgtagtccattgttgccccatacatagagaagaaatccattcctaggattatgtcaaataggggtgagcatcggtcgatttggttagtttttttctatataaaaatccaaaattcggttttcgatgtggattggtacaatccaaaaaccgaccaaccaatccaaatcctatcttaaaaccg

SEQ ID NO: 258563 - DNA, 603 bp, Cannabis indica
agatcctggtaaaataaattccaacaatacagtgtgagggattcgaagaaccgtttcatcaacaacctctgggtcaagaaagttggcattcctcttgattgtagtgcacgtaccaagggaagatggagtcaatggaacatcagtgaagttactctcaggaacttgtttcgacccttcagtctttgacttcttagctgttgtcaatttggctctagccatggcatcactagctttgggaatcttgatcgtcctcttttgggacatcttgtttgcaaacaagcattgctcttcagtcatgtgagtcaaaatagtaaacttaattccaaccttctcaagttctcaagtttgaagaaggatgtgaatgtgttcaagggattgaagtttaaagataccttcttctataacgtcttgtgattgttgcaaccaatttttggggagaaatttcctaaaattacggtgctcctcctttatagattcaatatcctcgataattcgatcaacaaactcattcgttttaggttgaaccccgaagtcagtatctgcgccaaggaccaaaaagacattactaaaacatacatatccaacacaataataaaacataat

SEQ ID NO: 258564 - DNA, 508 bp, Cannabis indica
aaagcctcaaaacccctccatcactgtcggtcttagccaaataagtagccacggacctctccccctttggaaaaaaaaaatcactgaaaacaaagggccatgaacttctcccaaccaatttgacaacaacctattttcaattcacactcctccaaggaaggagcgatttgacgacaacggccgaaggcgagacatgagaagaagaaaccctaaacccacccagggaaaagagttttgtttttagcttaacttgtaggatcataaggagctagttactaattgcacccatgggacctaatattccaattgtggtgccaactattaatatgcctaaatgattcctattaattgtttaatgctccaaactaaggctactgttttcattattagagcaagtcataagagggaacatcaataacaatagtaagcttacattgcatgtgtatttgtagtatcataataagttgcttgtcatgtgaataagaaaagcaataactcttttgtctac

SEQ ID NO: 258565 - DNA, 1208 bp, Cannabis indica
ttcaggagtaattactcataacggtaatgaccgtatcttttactcgatcataatcaagtcacaacgataataatcggttcatatcattaccctcgattataatcgagtctcaacgattataatcgtttcctatcatttccttcgatcataatcgagtcacaacgataataatcgtttcttattatttccctcgatcataatcgagccacaaccaatacataacgttaacctcaattaagattaaatcacaacaacatataccgaaattccaatctcaatcgatactgtaaccatcataatattaaccttatacagtacttaatgcttttcttacctcagtccagaagtttagcgtgcatcccgcctaaatggaatcaaaggttgacaatcccggatcatatgtcacgacaacaacactcaataaatactttaatcaaaatctctggaataaacttaattcctaaaaccggacaatccttatcttcaatagttctaggttaggatttacaacttctaaacattctaaattaaacactgaaaaccaccccgagccctaaaaccagcctggagaaaaaaattgaaaactctcccctgatggcaatcggtcgactggtactgatacaccagaaccaacggtcgcccggttctggcagggcagcagcccagagttttctccccaaactcgagccaaatcagaaccacacctgcccaacacctccagatcaatccaatatcaccaacacaacataattcaaccatcaattcacaacaatttatccatataatcaaaatagcataatcacttaaagtttaaacttaaaaaccctaaaattccattaactcaacactaacagctttgattctaaccaaatcaagcataaacaaactccaatctaagcctagaaacttgttctaatcttagtttaataccttaatcccgaaatcaccaaaaccccaactaatatcaagcccaaaacctaagaaatcatcaagaacacatgaagaacacttaccacaacttgattagctcctagggttgaagattttgctagaaaattgatgaagtgagctaagcttttcccgaatttcccccggggtcctggagccgaaaagagaagagagagaaataggttttgatttcattcttttccattctaaacttatttaataaacttaatgtattagctaaagtaatacttcagcttagg

SEQ ID NO: 258566 - DNA, 893 bp, Cannabis indica
tgaatgccaattttgtattatgtgaaagtggattaagggattgaccctatctttgtaaatctttgaaattgtgactaggattatcggcacttggtcaggagcacttggagattcggaatctccacgtttgcgagacattaggtaaaacagtagttagcatgtagagttatgcatggttgtgcttatattgaaattgatctatgtgagtaattaggaatcgggattatggttattaccctaacatgagcggtttaatggcctagggttattacgctcgtgataattaatgtgtaaatgttatgcgatgttatatatgcattgagattaaggattatacgtttatggtataattgggttggactcggtaactagaaccaagatgaaccatagacataaataggtctatgtcacatagacataaataggcatgtgagcataacacgcgggtctgtgtagacaaatgttaaatggcattattgtatttgtcatatgttaattacatttattgatatttatattgtcttgctgggattggctcacggttgctctactgtgcaagaaagggtaaatctttcactgatcagccatgagtgcgagagcagggcgatgtatgtacatgttctggccacactagaccgagcgggttggggtctactagcgatgtacttttgtaactctgttttgccacttaggtcggctagtgaaaaggcttgtaatattttgtaaaaagtttttaggatcccaaaacttgtcacttttgattgtaaagtttaatgctattacaagttctattttcattctgttttagtttaaagtttaaatttcctgcgcttttcttcctagtaatcacacattaggggattagggttttcataattagttttcgtgacgtg

SEQ ID NO: 258567 - DNA, 585 bp, Cannabis indica
cctaagacctgatcaaacagatggaagaaaacatatgatcagatcttaaatgctgtcaatgtgtgaatactaagtgtgctggaataacacaaagaaccaaaaatttactttaaaccagtgaagaaaaagcaaaacaaaaagaagatggatcaacacacaaacaaataaatgtataaacattcatggggagagaaagaaaccaaggtaatgtttttgtatgcattaagatcaaactgatgacgatagttatgcccagatttcttagccatccatgctgcgcgtattccttcataatactggcaagaatccatttgttagatcatgaactccaaaaaaaactagtataagaaaggaaaaaccagaaaaaacggtgtgttcaatatgggaaacttattacgtacctctatggttgtcatattatggataatgaggtagatatgccaaccgaagagagtaccaagcgtcaagctcagggcagcatcataactccacaagtaaccctaaaaatctcaaggttttaagcatatataagataattgatgaaagtattcagtttacacatgcaatatgagaatatacaaggtc

SEQ ID NO: 258568 - DNA, 825 bp, Cannabis indica
agggaaacacccgtaaggggataaattttctcgaaggaaacacaaaccccaggatagtggggaatgccaaagtgtatcactacaccaaggatgggaggaacgacgtggctcaactaggaggactccccagtggacttaagggagaaaatcaatgcaaagtaaggggatgtcaggactcacgttaactctcgaaaagatgatcccgtaccccaaagatattttgagaaaagatatttagctgaacttgctatcccctaaaaagacatattaaaggtatctcaaagataaaagggtgacgaatatgaatccgaccatgaggtttgggagccatgtgcaaagaatgtcttagaagccgaacttctaaaaaaatttaagatgccaaaaatgatccagttcactggagatactgaccccagtgaccatgtatcatgatttaacaaggtcatgacagtattaagagttagcaatgacgctaaatgcttgtgcttcccactaaccttagggagattcactgaagcgtgggttaaaaagctagagccaaactctgtgagccgttagaacaagctacaaaccaactttcatagacagtttgtcatagtgagaatgataaatcttgaagttaacgccctatataacatcaaaaaaattacccataaaaacttaaaacgttacatcaaaaggtttagggaagaggcctccaaaatgataaggtagatgatggccagtagttggcgtatattacaagtaggacgtcagacgggtacccacttttggaatgagctttagtcagaagtgcataaattttgaaagacttctgaaagcaag

SEQ ID NO: 258569 - DNA, 535 bp, Cannabis indica
aatttttcaataatattgattgagaataattatttatatgataaaagctattttttaaaaaataataatatattctattcttcctttaaataatgttaggagttttataatatttcatttgtatggttaattttgatttatgtttacttttatgtttcaaatttctaataaaataatttttatttattatttgaatggaataaactttgatgtaatagttctttattttagtgttgctttgctcacataaaaaaatatatatactagcacatacaaggtacatgcaagctttttaagtctcctaaaaaaacgttttggtagaccccttatttattttggcatatatgaagctcaatattgttttataagtatatacattgtagttttttaggattacttataaattttctaaaaatttcgaatagttgacaatactaagaataaggttgaattattttattgcacgcgtgactgttttttcttatatgcattgtaagcaattgtttgaaccttattttcagtattgtgaactatt

SEQ ID NO: 258570 - DNA, 914 bp, Cannabis indica
atatttgtaagttttttttaaaaaatgtcatatttagggtaattatgtttttatcccatatatatcaaaacatatctttatttttccatatttttgtaaatagcccatttttatatgaacataaattcgtacttttttttttctttaactatatgcgttttatataattttaattatttttaaataatatcttaataattatttgaacagaatcataaaaaaaaaattataattaccatagttttttttaataaatgtttttttttttaataaagattaaacttcaataaaccaaatcattcaagactaaggatgcaattacagagggtagggagtccctactaaaaatacgatcagcctcagaaaaagaagattacgataaagcatgcataaccttattagcagaccgctgaacaaaattaaaagaaacaacatcaaaatcaacaatcaaagtcatacaatcataaagaatatggccataaggagagaccatatgtttaggcttttgcaaatcactaatgacttttaaacaatccgactcaagtacaacgcttgcccatccattcgctttactccacgataaagcctatttgataccaatagcttcgacaacatgaggttgcaaagcacttcccttggataagattctagcttccaacactgtaccagcaacagtccttgcaaccaaacccacaccatatcgaccctggctagtgaaaagtgctccatcaacattgactttaatagatggaaattttggtgcggtctaatgcttaagattcatcccattcgtgccattgatattagcagtagaagcattgcttttttgggcattaaaccagtcaacatagttcaatttagccactgttacaacttcactagcatagttctaaatcaggtcatttcgatgtttc

SEQ ID NO: 258571 - DNA, 1121 bp, Cannabis indica
aaagaaacaatggtaaactattccatattaaaaaataaggacttaaaagacttaaaatacttatttgttaaaactgaaaaagcccaaaataaatcacttctcttgtccattggtcatatcacaaaactactctaaacaaataggaataagccataataaatggcacaaatgtcatacaaggcacaaaagccgtaaaaggcatcaaaaccatcaaaaatggtacaaaaacaagtgtagtcttattagcatatatactttaaacatataataatactagttaaatacctagtaaaaagaaacaaaacaaacatttatatataaatatataaataaatacgtatataaataacaaatacaataataaaaagtattaaaaaaatactgtatcatatttgtataacaaaataaaaaatttaaattaataatgatgagtataactaaaaatcattattaaaataaattaaattaaattaaaaataaataataaaattaataatataaagtgtgaaagattaatgactaaaagtaaataaaatgataataaatgcacatgatagtaaagattttaacgaaaaaaaaaatggcaagcaattaaaaataaaaaaaaaattgaggataaaattaaaaactaaatcctaatcaaaagcgttgagatttagttttttcttgcaagaaaaaaataaataaatatagtaagaataaataatataattaataagatcattaatataaggaaaatacgtaagtacagaatgcaaatcacgggtatgaacattaccgtagttaatgtcaatctcaactaccaatagcatctctgccctccgcgtgatgtgagctaccttcctcggtcattgtcgtcgctgctaactctgatcctccataacaaaaatcaatttctgagtctctgacacctatcaatattccacttacgcttgctgccccgactccaggcaaccaccaagaggtatcatctccttccaaaggcaactaggaaactatctctttcagacgccccaaggaaatcgaaataacaaactaaggattttagagttagtcccacattggttttgagctactcctcccatagccaattggttttgagatggaaccccattcacctt

SEQ ID NO: 258572 - DNA, 451 bp, Cannabis indica
ataataaaataacatataaaatattaaataaaataattaaatatataaaattataaatattaaatatgactggatggacatttgatgatattggattggatcggttcggttattcattggatcgcatgtctcatccaacatccgacccgatccaattggatttttaaaatttgcatctgatccaatccaattatgattggatatccgattctattagatcggttgagattggatcggtcaattgggattgaatcggatgactttctgcacacccctaatcatatatatgttttttacacaataacgtgtaactaatcaaatcacacacaattaaaaataatgtggttcttatttatttttaattgattaatattttaatacaattgtgtaataagtgcatacaatttaagtatgtctagctttatatataaaaatgtttttttgtaaaaaa

SEQ ID NO: 258573 - DNA, 516 bp, Cannabis indica
gttattacaaaataatataatatagtgtatgttatagttttattgtataaaatttatagaagtagttttgtctcttgtgacttgttttcttcaataatttataatttaataatgtatgtttttcggttagataatatagttcgagaaaattatgtgctgattgcaaatatttatatcgtgaattttttaagtaattataatcattatgtcaaaaaaagatacaaataaaaaattattggtggttattattatttattctgaaaaaaaaaagataccctaaaatgtgaactgaatagattcattcattaaaggattttgtctctatcaaagatctaatacaaatagggcattcgaattactaaataaagtgtgtttgaaagtaactgtgtactcactacaataaaataattacactattttaaaatacaatattttaataacactaaatagaggatcgtaattactatttaattcttaatttttggtttggcaaaataattagtaattacacaaaaa

SEQ ID NO: 258574 - DNA, 490 bp, Cannabis indica
taagattattcttattacttttaaaatatcaccgtatattatctatgaccatatattaactataactcttctagaatatatgcgtgaacttctaaattatggatgagatcgaggttctaggaacttcattaattatctaacttattgaatcatatgtgtgtatatacaatattgttcatatcaaagtttcaaattttaagtaatatgaacataacacattaatgattatataaatttttattagcgccaataatggtactccaagaccatacatttgttacatttttattatatgatcttaatttccatatcaaatgatcatatatctataattattgatgcatataaaatactttaagacttctctactaatgaacaaactatatacatttaatatttctcactatataaaaagaaataaaattatgttcttcaatcatttataatataattaaaaactcttcaagagtctatcaaaacgtataattta

SEQ ID NO: 258575 - DNA, 706 bp, Cannabis indica
tatactaatttatttttataaaatctgtaattaaaatgttattgtaacaatttctattaataaaataaaaatttattactccagaatacagaacaggaacataaataaattgtgctgaatttacgctactagaaaatgaatatttttgaccttttaccacccttttataattggaagaaggggcgcgcgtttggctggagcttcaaaaaaatcttttatcacggttatttcgtcattagccaaacatgcctcgtacatttttttttaaatcacacctttaccaccgtgtcgtgagcaattaatcttgtcagccaaacatgccccttacaaatatttagactttaaaattagtgtaaaaaattgtacaacaatcctttcttcccccaccttctcattggcttccaccgctcgttgccgccacagccatcgtatcggctcaatcgtcgttgtctgtaccgattaccagaccattcctctgttcatcatcgaccactccggcgtctttatcgcagaggcttttccgaggaccagttctgggccactgcttctctccgtgttcgcttcttttatgatatcaaggtaaactcttttcgtatctgatagatgatagtcctcttcgaggcatgaaaaatctcctaaaatacactcttcgattcagtgccaaactccaattgaactaaaagttctattttctcaatccatatct

SEQ ID NO: 258576 - DNA, 640 bp, Cannabis indica
atgcatgtacacttgattatattcttagtttttattttagttatgtttatttttaattgtataattaatttttttatgttattcaataaacaacattattttttattaaaaaattgtttaatttaatgttataataatattcaaaatttgttgttaatataattttagtttaaccctaatatttctaattttataatacttttattctttaaaataatgataaaaatatattttttttagaacttacaataggcaatgacatcacaatagtgattctttaagaaacataaatattttttttattttattctttaaaaaagaaaacaataatagaaagatatttttttagatacatggattgggtaaaacaaataataatagaaatattttttttttgatatgtgcaatgagtttaaatttaaattacaatgttaaaaaacaaccacatttaatacatagatatatacggtgattttaaatttgaattattattttctaaaaaaaatatcattttcagtttatagtcatatttaatataatatatctttatatattaaaagtgcctatctaacagcaattcttggtttaacagaatatacttaaaaataaagaatattctgttaaatttaacgattagttt

SEQ ID NO: 258577 - DNA, 587 bp, Cannabis indica
ttttgcctatggcccatttcaactcagggtcggccctacatatactcctatcaattttgagcacatagagaattaatcttattggcgtttttcgataggtgacacatggcctctcacagaggcccaaaggacatcaggcccatcatctaactcaagaacactaacgtggcaattttccctacatgtgatggtaaattcggacaacatgtttggatcatgtctgacactctgattcctaggtacgagagttacacactttgaaagattaatgagacttataagagtcttgaactggacgggaatgtcatcaagaggtcatccagaaatgggagttagaaaggtttccaagacagtctatggtatcgtgagctgcttatgtgtcacacctctcacacaatcccaagaaatcttgggacttgtcccgtatactatattgggaagattttaccaagatctagatttactaacaagtatgtttaacatcctaaatatgaattctctaaaacaatgaaataaacacataagtgttaagaaaaccttacgttgattgcggcgaaatataatgactccttccgttcaagatctct

SEQ ID NO: 258578 - DNA, 580 bp, Cannabis indica
tatatgtcaaagttcaggggacaaaaattctaattagcctttaaaaaatgactaatggtaatattgtaaataaaatgtatttattaaagtatttcattaatgattgatggtaaaaatgtaattaaaaaaatagtacttattgtgtgccaaatttaacacaatgttatatcttgtgccaaatttagcccaatttttagcctgtgccaaatttgacacaacttatagcacattattggaaattttttttattgaaaagtgttaaaaaaataacaattatttagcactccattagagatgctcttagggtgtggttcaaaaccaacttatgcaatcccattaacggaatcgaccatggtacctttgatttcatttcaatttttacttgggtaaatggcggcaaaaccccccaatacttttgttttggtttcattaaacccccacaatccaaatttctgcgggtaaacccccaaaaccacgaaactgttagcaatttaccctttccgtccaaatttagctgttaagtgtcaggttggcttgtccacgtggacacaatatacacgtggcacaattttattggtcc

SEQ ID NO: 258579 - DNA, 668 bp, Cannabis indica
cttcttaaagtttggttctaatatcacagtactatttccattctaggtattctccccccccccccccctccttctctctctctaattattgtaatttttctttttttggaaatttattacaaattgcttaaaaatttaatgtgtaagaacaagctaagcatacttaattgctactactttcactttatttgttcacttaatccataaaaaatctacttacaaaattaaattgtccaaaaaaatagacaattgtcctattacaaaattgttcatctacatttttacatttttttagtattctctacagatatatcattaatatagatgtaattagtgaggtttgataaaaaaaatactaatgatataagtcaaaatttattacttgtaactctcactcccacttataattaatctcctttttttttattttcttgttttgggataagatgtgtttccagtaattaattatttcagcagaataaataattattatcttaattgttttggtcaaagaaaataatttaaatgggagaaatatatgtttagaagaagaattgtaataaaatccaaaaaaaaaaataaaataaaaaaaaaaatttaacatgaaataatacttttaaacacgtggaaaattattatttggtcaattttgattggttgttaatttt

SEQ ID NO: 258580 - DNA, 695 bp, Cannabis indica
cacaattcttacccttgtattatcacaagttgatatcttaccttccattgaagcaatgtaggaaaggataagtttttgacggttagaaattgtggtgctccaatagaagtatcaaaccaacaagattacagtgtctcaatgacaaataatacaaagaataaaattatgtattaaataatgttacaacactaaacaaaatatacacataaaatagagaataaagatgaagagagggattgcaactcaaagcaataagctacacaatatataaataacatatatataaaagagatgtgagagcaatctcaacaccacatacaccacaagtgaataataggggaattcgaatcacaaacttgaacaaggtcttacacctttgtccaaaagcttattacccctaccgcaatcacttagggaaaagaaaagaatggaaatagctttttggatttatcaagcctaaagtgtttctagcaaagtgctctcttgatggaaacttgttctctcccaaaatgaacccaagacctctagttatagtgttttgaggatcacatatgaaaatcaaagtctcttcaccacatggttgttaccagcacattaattggtaattaatagaataaaaatgttggacaagagcgctggaaacatgctctatcaattcaagtatgtttatggatgttttcaaaaaactggttcca

SEQ ID NO: 258581 - DNA, 897 bp, Cannabis indica
ctcttggaatgctttttcacattgctctatccactcaaattttttattgactctgagaatgttgaagaagggtacacacttgtctgtagacttggacacaaatctgctttgtgcagcaatgcatcttgtcaggctttttacttctttgatggttgtgagcgacttcatgtccaaaagggcttggatcttgtttgggtttgcttctattcccttggcattgactatgaagccaaggaatttacctgagccgaccctaaaagaatatttgagggggttgagcttcatgttgtagttgtggaggatcttgaagcatttgtctaggtcctctacatgcccccagcctttttggacttgataagtatgtcggccacatacacctccctattgcggctgatgagatctttgaacattttattcacaagcctttgatatgtggccctgcattttttagcccaaagggcatgactttgtagcaatacaggcctaagtttgtcatgaagcttgtacgctcttgatctgacgaatgcatctttatttgggtgtaacctgaatacacgtccatgaaactcaagatttcatgtacagttgtggcgtctacaagctggtcaattcttggaagcagaaagaagtccttcagacatgccttttttaggttgatgaagtcgatgcacactctccacttttttttgggtttgggtaccagcacaagattggatacccaaagtggaaagaatgcttttgtaatgaatttatgggctcatagcctcttgatttcatctttgagcgcttaggtgcattctttgtccaacaacctcctcttctattgtacaagtcaaatgtttggatcgatattgagagcatgtttcatcatagaggggtcgattccgaccatgtctc

SEQ ID NO: 258582 - DNA, 538 bp, Cannabis indica
tttctagtcatggctgatcatgatatagttgatttggaggcggtttgttgttacaaagttataacagaaggatgggatgatgatagggtctgttataagatacaggggagaaagaactattcaatttggatgatcgttggtgcctcgtgggtcgatttcttactaattgatcactaaactatgtagagcctactctttttcatggacaccccaggaccaaccagtctcagtcttcctcctatggtttcacaccccaattaggtcagcagactgagtatcaacactagttcaggccacaaggttcatggttcaacatggggtactcacatggttatcaaactcctgatcttagtgggagttaaagagagtacaatcaaggtggagggtttggtaaaagtataagacatcctagttaaggaaagggaatagaaaaagtaaagtcatccacttaagcctatgcttttggggttgatgatgtatagggcgatgcatactagggagttgttgatagtatggttcttatctcacacttttgggc

SEQ ID NO: 258583 - DNA, 602 bp, Cannabis indica
caggtcactcgagcaatccttcttactgggaaacaccagaatggcctttatacctttaatccatcccagttccaagttgaaattccaccttcagatgtctctccaagtgccaacacagcatctttgtcccagcaacatgagcatcatgtctctgtctgttcaaattgtaatcaatctccactttccaactatgagttgtggcataacaggctcggacacccttcagaaagggttgtcaaatctgtacttcagtcgtgtaatatccaaatcaataataaaatgcccttttcaatatgttctgcttgttgtttaggcaaaattcataaattgccatttcccaaagcttctcttactgtctataccgaacccctgcaacttgttgttgctgatctatgggggcctgctatacatacttcaactaatggatataaatattatatccaatttgttgatgcttactcaagatttacatgtatacatgctcaaacaaaagtctgatgccttgaaaacttttacacaattcaaggctgaatctgaacttcaattaggcaagcctcactactacaaaacacacttttagtgtcggttctaaaatcatttaa

SEQ ID NO: 258584 - DNA, 607 bp, Cannabis indica
atatatatttttaatttatacttctttttttttttaattttttccccttcttataatctaaaaaatgtacttataaaataaaaataaaatatatttaaatattaagacaaaaaatttaaaataaaaaattatattaaattttaaatttttttgaaaaattatacataattaaaaaaaatgtaaaaatatagtaaaattaaaaaatataaaaataaaataaaactaactattaatattaaatgaaagtaatgtggtttttttaaaaaaaataagtattaaaagtgatttataaaaattaatttaacttaattatttttaatattatggtgcacttatgattttatggggtacaaataaaatttcgttaaaatttaattttatacattttatttttaaaataattatatgattgctagttcctttctcgaaaaggaaaagtaaaagaaaatattaagagatatggttgttcattgaaattggaaaactacagtttaaattcagatcgcgacaatctgaaccactgtagactgtaatcgggaaaactgtttttagtagtctggttgatcgtttaccgcgtaatgattcgattgcggttcgtaataaatag

SEQ ID NO: 258585 - DNA, 368 bp, Cannabis indica
ttatttttaaattttttaatcataaaaataaaagtaaaatttttgtttttaaaatcttatttaaaaaaaacacaaatgtattctataaccacttttgtttttttaattttaaaaacaaaaacaaaagtgtgttttgtaaattttatttttatttttttttttgtttttaaaatttagattctttattaagaaaataaaaaaataaaaacagttttataaaacataattttgaaaaatattttcactaatctaattttaaaaattaaaaaaactcattaaaaaattgttataaaaaacacccttattttcagttttccaatttatatattttctaaatgagaaaaaaaaaaaattgtacattgttgtgt

SEQ ID NO: 258586 - DNA, 606 bp, Cannabis indica
ggatcttcaccaccacaatgctatcctcttcctgagttctctgttgccaacaaacccgtgatgactccgttggcaatattagccactcgggtacagcaagtcaacaatcttcccaagcagcaagtgctagttcaatggtccatgagcaccccagaagatgcgacttgggaagacttcgaatcttttgtgcagatgtacgggctgcataaccttgcggacaaggttattttcgagggagggagtagtgttagcacggcccaagtgctaggcccaattgaattggaccccaaaatgatacaaaaagggctatccaagtgggagagggaaatcactcagctggctgatacaagtcatggaaaggaaaggggtgtgagctgcatttcagctgaagaagaagcaggggagaaagccacatccgaggatggaatagctcgagccaagcgagagagagggaagccacgttggatgaaggactatgtcttgaagatggtttgttaggcataaaagttgtaaccgtttattgttttgcttttttctttcttgttgctgctcatataaaagagaacaatgtaaagaattgcttatgcttgatgaattagcaaattg

SEQ ID NO: 258587 - DNA, 720 bp, Cannabis indica
ctatatattatatttaataataatataacacttataaatttaggagacctcaaatatgcaacaaatttttttttagacaagggctactagtttaggtagaacgttaaaaaaaatcaaaggtaaaaaataaattcaagattcaattttataggttagccaaatggggattaagtttagggaacctttatcccagttatagttaaaaccgggatatataaaagggtttagtgtgaaaccctttatctgggataaaagtattacctaaaacactttcatcttgagaaatcacatatatttctgctatatataacctcgacaaaaaccctcccaaacccagaaacccttgcccaaacccaaaaaacctcgcccagcaaacccatgtctccatctcgcccataccagaatcgcccaaacccagctgatcaaacggtgaaaggtaaactttgtttctttattatttttccctattttgattttttttaaccattttttttttggttcaagaaaatataaaacctgatttttttttttttgttaataatgtcttctagtttagggattatttattatgtatcattttttacctttctagctcttaaagatttgatttttataatatttgaatgagttattgatagaattttttatgaaatggtaaaaaaatttgctatgacaaaaataaacatttatataaatatagtttggaacttttgagttata

SEQ ID NO: 258588 - DNA, 784 bp, Cannabis indica
gataaggtatcattttacttactttgttatatgtcccccaataaaggcagtttctctaacatttcaattctatagtaacaaagaagaaaaccttggtaacaagtttatttttctttcctaggccttgatggagttggatgagaaagaacgagtactatcccgagctttacctagcattcaccacgtgaatgatactaccatggtatgtatggaaactcactctcattttctgttttcaatagtaaattttctctattatatttaggtatttcaatatgactgcaattcaatcgctcctttattctatcccatttagttattagtgtgaaactttcgctctaccagtcccaaactcgatcgaggatgccttaaaaaagtcgacaacctgcataactataacaaacatcttaccagattcatcctactgttctttttttgacatgaacacgaataaatccgcattaaagtgataaagctatttgttttgtttgtcatacaggtaatagcatacatgagaggtccacttctgttcatattcaactttcatccatcggattcatacgaaggatacagagtaggtgtagaagaagctggagaatatcaagtaagtcttagcaaccaaaacttattatctttctttgtatcttcttccaatcatatttttatgatgttttttctggtcacagcttattctaaatacagatgaagtaaattatggaggtcaaggacttgtaaaggactaccaatatctcaggacaactatgaccaaaaagtaaccatgaac

SEQ ID NO: 258589 - DNA, 622 bp, Cannabis indica
atggatataaaatatgtaacccttagaccttatagcttatctgatgaaatgctcatttattgtatttgggcaaagattttttttttatatatatataattgtactctaactgtattcgggtatttctaaaatatttacatatcataaagtcggaccacaactcaaaatatgtttaagaaacaactttggttagaacacgatttgatatgtacactcccattgaagaatatcaactgacaaggatttaagaaaatttggagtttactatgcagactccaacccatattcaacaattcttagttacttaaacaagtcacgtaccataatttgggtgtaccaggcatatatattgggtgatgaacccacacttttaaagaaactttacaaatagactaggagttagtccatactcacgaattttaatgtagtattctccattttatatttgatatcactatcttaatatgcaaaatacattatttctctagttataatttaaatgtcattgaaatatataaatctttacttttgtagaaatataatttatgtgaataatcgttaataaataagatgaaaaatatgagtccatgtctataaaattaattgacttgtatgatttcta

SEQ ID NO: 258590 - DNA, 899 bp, Cannabis indica
aacaaccggtttatgcttagaacccgtgatgaagctaagaacttcacgaagagcttttcgataggcatactcaaatcctaagtcagttaggtttttcccggggcagtaatggcagcccgagatagtattgttctcatggtatattgcagttttaaggaaccatttaccccctccaatcaccacataatcgaggctctcatattgatccgtccaaactttgtccaacttgtcaagggtaagctggatttctttagaagatatcccattcatgtcttcaaaaatgtctgccttgatgagaaacggagtccaaatcactgatacggtgaagttatgagaagggaaacgccatcttttggacctgtactcttcgtcatggtaaacctcaacaggtttttccacctgtgggacacaatttaatggaattttaatcaaacaccacttgtatggacatatgttattatgagcttatatgatagaacaccaaataataattgaagacacccaaaatgtcatgtttttgtatggtcctacagggccttgctctgtaaaaaaggccaggtcccagttatgtacaattcttcatgtcaaagatacaactcaagtgcaaaagatagccttaccaaacaaaaacaatacatgaagaatattgcagaagcacaaagcaaaaagcatataatacagctgtattagcttttcattactcaagcttctaataaataccagctttggactatttcatctcatatctaaatgccaagtctagacctttttatgcaacttgttagggactttttaaactctgaattttagtgaatatatcctatttaaagttagatatcttgtgatgggttacactacacaaaacctttaaaatagatctaatgagagagagagagaga

SEQ ID NO: 258591 - DNA, 723 bp, Cannabis indica
gaccatggtggggtatgatacggggtaaggctgttgaatgtagagataccctaccctacatttttttaagtcgtgtatgagattgttatggtgggatatgatacgagataaggcgttgaatgtagagataccctaccctacatttgtctgatttcgtttatgacatcattatggtaaggtatgatacgacgacagtgctgttgaatgcagagataccttatttcataacaatggtagggctaaatgtgcccaggttattatagggccaggttaggcccaggttatgtatgtagtggctatgatacgccacatcatggtacaaacatgatatgattgaaatagttattatatgttattattatgattgtgctataagtatgatgatagggttatgatctctacatatatgtaatagtttcgttcagcacatatgtatatgatataaatttctatatctagagttatttaacttatggttatgagctaaggtatatgatattgctaaaactggaaacgttaatactgtaagaaatagtattgttgtgaattttaaagtgtgtatggtgtattgaatgctattgtatgtaaagtatttccttacttggctgttagctcacctctttacttttcccctacaaatattagatagggaggtacgtatactgagaagagtaagttttggtatgtatactgtgaacgactatggacgggcaaacgatctag

SEQ ID NO: 258592 - DNA, 1420 bp, Cannabis indica
ctacactaaagagttgttcatcaggaaattgctcatttatttgtacctcctttgtattctgactctcttgcagctctaatcttgacaagtggtctgctaccaggttctcggtgccctttttatcttttatctctaagtcgaactcttgaagtaaaagtacccaccgaatcagtcttggttttgcatccttcttggtcataaggtatttgattgctgaatgatctgtgtagacaattaccttatttccaatcaggtagggtcgaaatttgtcacaagcaaacactattgccagcatttctttctctgtagtggcgtaatttaattgagcatcattcagagttctactagcatagtagattgtgtggaatactctgtcaactctttgacccaaaaccgctccaatggcatagtcacttgcgtcacacatcaactcaaacggcaattcccaatttggtgaagttactatcggtgctgtaatcaatctctcctttaaaatcttgaaagcttttaaacaatcttctccaaactcaaatggaacaccatttacaagtaagctagataaaggttttgagattttggagaagtccttgataaatctgcggtagaagccagcatgtcctaggaaactcctcactccttttacagaaactggaggtggcaaattttctattgttgaaacctttgccttatccacctcaattcctgcctttgaaattttgtgcccaagaacaattccttctgttaccataaagtggcacttctcccagtttaacaccaagttagacttctcgcaccttgttagcactttttccagattttccaaacaatgatcaaaggaagaaccaaacactgagaaatcatccataaaaatttcaatacaagattcaatcaaatctgaaaagatagccatcatacacctttgaaaagtagcaggggcgttgcacaagccgaagggcattcttctgaaagcaaaggtaccgtagggacatgtgaaagtagtcttctcctgatcttcaggtgctatagctatctggtggtatccagaatatccatcaagaaaacagtaatattcttgccccgctaatctgtctagcatttgatcaatgaagggcaaagggaagtgatcttttcttgttgctttgttgagtttcctgtaatcgatgcagatcctccaaccagtgactgttcttgtaggaatcaactcattcttttcattcttgatcaccgtcattccacctttcttcgggaccacttgcaccgggctaacccacttactatctgaaataggataagcaactccagcatccaaccacttaactacttcttttctgactacttctttcatgggtggattgagtcttcgttgagcatcaatagttggtttggcattgtcttccatgagaattcgatgcatcactgt

SEQ ID NO: 258593 - DNA, 667 bp, Cannabis indica
tcagctttctgttgctggtacttattgattgtctaattgattctggtgcgacgcattcttatatttcaagtagaataattgagaagttgaatagacctagtgatgtgctttctagaggtttcggaactttgctgcttactggggagttggttatctccagtaggtgggtgagatcccttccagtatttgtaagaggaagggagttatcagttgatatgatagaactaaaattggaggattttgatgttattttgggtatggattggcttgcaatatacaacgccactattgattgcaagagaaaaatggtaactttttagcctgagggcgaggacccctttttatttgtggggaagatgcaaggatcccaaattcccttaatttcagcgcttaaggcaagagatttgttgtgtgaggggtgcattggtttcttagcaaatgtagtggatactacctggaaaccacaagcgcgaccggagcatgtcccagtggttcaagaatttctggatgtttttccagaagagttaccggggttaccaccagaacgtttgattttgagattgatctaataccaggagcagagcttgtatcaagagctccctacaggatggcgcctgcagacctgaaagaattaaaagtgcaattacaggggatgatggatttaaaa

SEQ ID NO: 258594 - DNA, 896 bp, Cannabis indica
atggccggtcggcctaaagactttttagtctcgaacagtggaatgttgttatttaaagctcgagtttgtgcttctaatgttgaagagatcaagaaggagatacttgatgaagctcataccacacttactcattgcatccaggaactaggaaaatgtatcaggatttaaaaccctatttttggtggtatgggatgaaaagagaagtggtggattatgtgtccaggtgtttaacctgctagcaaattaaagctgaacaccagaggctggcagggtcacgcaatctttattccttcctgagtggaagtgggaggacatttcaatggattttataactggaatacctagaactacgggaatgtatgattcagtaagggacatagtggacggattcacagaatcagctcactttctaccagtgaaagctacatattcagtggatcagtatgctgagttgtatgtaaaggggatcgttcgtctccatagagcccctaaatttattgtgtcagacaggaatccaaagttcacatcgaagttttgggtgagtcttcagaaggctatgggtatcaagttaaagtttagtacagcctttcaccctcagactgatggttagtcggaaagaacaattcagatattagaagacttactgtgagcctatgtcatggacttgagagttcatggagtaagcacttacctttaattgaattctcctgcaataatagctaccagaatactataggatggcttcctatgagatgttatatggtagaaactttcgttaccctattcattggaacgaaattggagaaagaaagtacttgggtccagaattaatgcagaggaccactgaggctattggtaaaataaaaaatttggatgcttgcttctcaaagcaggca

SEQ ID NO: 258595 - DNA, 642 bp, Cannabis indica
tgatattattgcttagagtagttgtaccaattttctaaagaaagttaaagttgtattaactacgaaagtaaaatattatgatattttcataagtaggtaatcgtttaattaaagcccgatatgaaagtccattaggtttttataatatatttattagatttaattaattgtataagtggtattaaataatattattatttgattaatgttagaaaaatcgtaagtttagagaaattcgcaggtttagaaactgttttactaaaatgaccatatctggagttttataactccgattgaggtgattccagtggcgttggaaagataattcaaagatctataaatttcatagaaatagctatatcataattcgtaatttttctagttcaaaactaacccctaaagttacgagattgagagattacaatttaagcttaaaagtaagatatttgtttatttaataatttatcatattattattgctattatgttaatattattattattcataaaactaaacctaataagagtcagaatagtataggtttcattaaccctaaaattatatcgttctattcttcccacctatctcaacacgactaaccctaaaaaattttcaaatcatctttccattacatccttagc

SEQ ID NO: 258596 - DNA, 810 bp, Cannabis indica
tttgtcattttgccttctaggcaagattcacaaactggtagttcacctaaggtgacatttttcaatggaccacctttggttaatctgtgaagtctatcatagcctacatgaccaagacgtaagtgccatatatatgtttcgtcttcattatcgatcttttgctttttatggtttttaggtttagctactttaaacagttcgttaagaagcgcaaatgattcgtctagtcttagaacatgaagcccttgttccatagatgcaacacaaatttgaatgtcatttcgagaaatggtagaactagaacttgaaaaatctaatttgtattgttgcaattgtaagcatgaaacagaaatcaagtttctactaaaatttagaatgaataagacattgtttaattccaaaattctgttctgaaatttgagtttggcttttcctctagctctaaccgataccattttgccattaccaactttaaatttaaactatccggatttcaaataattctagttttcaagcaattgcaatgaacaaatgacatggtttgtagatccagagtcaagaatccagatggatttatcattctctaaaacacatgattcaaaaactaaagcatcattgcttaaccgtttttggattgtttttattgttggttccatctgttgggaaggataatctgaggaagtggaatcagtttctctattcttctcaattgagcttgaagtagtaggattgtcggagctattaacttttttctcttcagattgaacaattcctaggttatctcctttctggaatttcatgttcatcatg

SEQ ID NO: 258597 - DNA, 2085 bp, Cannabis indica
agttttggggaggcgaacaccgaattgacaaggatttgcttcaacttctgtatgaggatcaacctcatcttcgtgccagttcgtcctcttcaagtgacgaactttctaactcgagctttaaagattggcaagtgagtagtgatcgttctcctactccaaaacctgaagtgcaacaccactcttactccaagcagatcgcatgagaagggtatgaccgcttcatttgggagctaaagaagggttggagacgttatcttccgtccaactggacgtatattgtctggcccggtgttgctgatacccttcctgttggccgttcaaattcgtaacggcatcccaatagctgtccctatcgttactgttgcaccacacacacatcagtatccgtccaagagaaggatgatggcccgcacaaagcagactatgcatataatcaatgcgtctgatcctcacgtggcccagcttgccacgttgccaagtaccgagcatgatctgcctgatatggaggaggatcacgggggggacattgaggtccaaaagataaaagggcaggatgatgtccatcctgatagtccttccgaagttgatgaggagggagtggtcgaacctccaaattttggagggtataatgagactggggaaccagtatccacggagggtgacgtcttggttgagggggaagactatgtcaccgaggagcttactgaggcagttccgcacaggaggcaaaagtgccttagtagccagatgggtgtgccctccgtgcaaaataagtgaggcacatatgagggttacgtcccctcttcgaatcaccgggcaactaacccacagaaagggttttatgcttggtcgagtgcttgttaggctatttttagcctacgttttgggtcactttttatagttgttttccttctttattattatatttggaatagaattatgcttgttttctttggtttcaggtttcacacttggaatgtataaattgatcaaatttcggaaaacaacaatctatagaatagagaaaattctgcaagaaaataaagctgaaacttcaagcttaaatttgactatgttctgatcagattttggaaaaagtcaaaacataaaagttttagatttctttttcttctttccaacgcatcttgaatcaactcatttggagtttgtatgtgaaagttatgcacattttactgaaagatgctgaagttgtcaaattttgcttcagtagtcgcgaccaccactttccatggtcgcgaccctttttcatggtcgcgactaggaggccagacagcaagtttttttttgtattttgcctatggtcgcgactaggctttatgtagtcgcaaccaggggcgaaatacgtgatttttggcaagtttttgactttttcacagatatcaaccctaatttctatataaggggctcgtgttttagaaagagggaagcaaaaataggcctgaaaagtgaatgaaaaaggggaggaagcaatcttgaagacctggagcgatatcaccatctagtttctttcttttacccttatttatcttttatgtctaattttgtttcagaattaatcatggatgtttatattattattatgatctaaatttcccatttaggaaggatgatgaatgttgtttaaagttttgcctagttaatgaataatttccattcctcaatcttgatttgtgaaattatctatatttgtgtttaattccatgtgtaagcttgatcaccttctacatgttctatgatctcaattcaaaatctgaaaaagtaagaattaagaatgctaaaaattggataatcaaggttctatgtgaaacgagagtatttgcatgacctacgtgacacttagattattacataatgctgattacatgttagtttaattaagagaattaattagagaacatgtggtttagaacctaaaagatctgaaaagagttaggttaatttataatctgtcattcacatcaagaaaatgatagcaattaggcattaacaattgggtaaacaaacaacaggattctcctccctatcttctcatcttgattaatattcacttgtttctttaagttt

SEQ ID NO: 258598 - DNA, 578 bp, Cannabis indica
ttgtcctggatcacttgtttcccttttctctcgcgaagtggccagtggtggaagagcagggaatggtttagggtggttaataataggggaaatagtatttgcgagccagtctagtgataaatggccagcgccctgctttagaaaatcttgtctatagcgatcatagttggacttcggaagaggagatccttcaagccatggaccataaggaaggtcaggttccttgccttcatccagtttttccaagaaagatgggcacttgtcaaaaacatggcctataataccacattcatagcaaaaatctgggagtcgttcataacgataatcaagccaaagttcatcagacatccaagaaaaagtgactgtttggccacggagaatgggttgagaaacatcaataccaactcggatacggagaaacggaccccatctttcattgagcgagtcttcatgaacatcgatgtaagtagggctgaatattttgagcaggtttgacccgaacccgagcaacccgcccgaacccgaaccagtgaacccgcaattttttttttttttaaatttcgggtgggttgggttga

SEQ ID NO: 258599 - DNA, 829 bp, Cannabis indica
tgaccaggacccggacccagaccgagaaccgaacagagacctgtcctcagacacaaactgagactagaacttgggcctggacacggtcgtgtacccagaccggaactgagacccgaacctggatctaaatcttggacacgatcccaaaaacagacttggagctagatagggatccggatacgaacctggactcggacgaagaccaagactgggatcgaaatgcttgacttagatttggaccgagatcctgacccacactcgaacttggacccgcaatcgggacccgaacttggacctggacccgaacctacacttagatcgaggtccagacctggacacaagcacggacacaaactcggtccctaactcaaacccacacctagacttagacccaaagctagaccctgacacgcacccaaactcgaaccaagaccagtatcaaaactaagtagtaagactcaaaactgaatccagactcaaatttggattggaaccctagactttgacccaacctagaccaagacccatgatgcgaacgcacacccaaagcctgatctggacctagactgaaattcggacccgaaccgaaactcagaccaggaatagaactctgacccgaactcaaacccaaactcaaactcagaatagcaaatggaactagaaccgaactacgactaggactaggaccaggacctaaaccaaaacccgaacccaaatcaaaacccaaacagagacctaatcccgaaccgagactaggactcaaacacgaaccttaatcgggacccaaacccacataataacgaggacctggacccagaatcaggatagg

SEQ ID NO: 258600 - DNA, 2237 bp, Cannabis indica
tatatcatattttttaaatgtcataatggcacacacacgtgcacaaataccataatgtataatctatatataatatagtcaaataataataataattataattacaatataattgtattacacacttaatataccaaataccaatatatgtgtataaactggatattacaggttcgcatcctagcccttattttgatgcattgcagtacaccataaacttgtccttgtacataatacaggagcttttattagtttgtccttaagtgttggggagttttcctcacacttatctaaccagacaaacttttgcatcttccgagttaagttggttagatgagttgctatctttgaaaatccttcaacaaaatgtctgtagtaaccagctagtccaaagaagcttcttacttcacttgtagtcttacgcgctggcctgcttttgaccacttcgatctttgaagcatccacttcgaatccatctttgaaaactatatggcctaggaatgtcaccttctctaaccagaactcatatttcttaaatttgaggtaaagttgggtcttcttaagtcggttcagcgtgaaccttaggtatcattaacatccatccactggttgaggtacagagaacgtcatcaacaaatttgacaacaaatttgtccaccttattttgaacactcacttcatctttgggtgtttgactaatttaagaaggtgtcacaaatattcttagtgcctcgcggtgttttgggtgccgctttaaatgctaaaatcattttgtacttcttcttcttggtgtctaggtttaaaatttagtcccgtcatcaaaatcaatattgcttattcattttgaaagcgaattcctaagtagagaaagaaaatatcttccttattcattttgttgggttcttaatgcataaagaaaattaactttggtcataagagaagtattcacttgtaagaaaaatctctatttatttaaaagcataataaatctctacttacataatcactagattattggaatatgaacaaaactcttgtccttggataaaattggacaagctaaacgaaactactaattatcctccccgcatgactcggcttcggattcttcagggtcttctactcggtcctcttcctcagaatcgattgtcatttctacatttgcttggattggtgttggtatatttttagattttgaggctaacttattgatttctacttcagaatgatagtctagtatgtcacctttagtttatcgatacttgttgtgctttaatctaagtcctcgctcttcgacacttgagggtaatctggttcgttgtacccttctgacatttccccatcttcgggttcttcacttgagggtaatctagttcgttgtacacttgagggtaatcaagcttgttgtacactttaagcgatagaatgcttttgattttcgattcctcaagatcttaagtattattcaccttaattctaagagatatctcctatatctgcaacaatttatctttaactatttagtaggaattaacataagatatatatatttttatatatatttaccagatagaataaaatttctttatttatttttggattccaaaggataataagctaaagaagttacactaaaaattctaactaaagtggagccatactaaaaccccttattacataaataaataaatacatgaaataaaatacagcttcactattttaatcttttatgtttaaccatttctttaacatatcttctataaaatttatatagtcgagttctaaatacaccaggtttgacaagattggtaacttttgaaggaattcagacttgacaacattattagattgataatatatttcttctttagtgccattacgatgatatatggtgtcagtaattttgtattgatcctctaggttaatcataagtaggttatatctttcggtgtcatctaacctgacatgccctagatttttctaattctcttagactacgttggacatgtggcatattgagtgcgtgcatcagggctacatacttctcatgtgactttaataaacagttctagtgatatattatcttatcaatccctcatgtatttttgttaattctattaaacactttgtcttcttcatgcatgggtggggtcttgggaagtcttgttaaggctttaatgtgcctaacaatgtgttctacttgctctggtctcatgatgttggagcttagttggttc

SEQ ID NO: 258601 - DNA, 2834 bp, Cannabis indica
aattcatagagacttagtaggggaaaacttactctctttctccttttgaggctcttgaagagcctcaaatgcattttgatttttgtcaatcatgacagtaccatttggatcattaggatgagctataaagcttaatcttctaggtcttcttagagcttgccacttttgttgatcgttgttctcattcatctcatggtgttcctcttctgtgctagatgttagaacagaatcacccccatgatcaattgttataacctgcttattcaacttagtatcaaccgagccaagtgatggttctatttccttatactcctctttcgatgtctcgacttttgctttaaaaatccccttcttgaaactaggattctccttcttgttaactgaaattttctttgtctttctacaatcagtaacaccatcgccaaagccattacaattattcttacattttactggaagccatttgtaatcaacactctgcttaatcaatcttgatcaattttcatccacaaagtgaatcacctttggtggctgatctgtgatttccatctcaaccaaaacacgagcaaactgaattcgagatctttccttggtaaacttgtccaccattattggtttgcctgtagtaataacaagagcacttaggcatttctttcccattggtgacccaagtcataaagcctaatccataaaggaacggatctaacaagcctaacaatgttcaaatcagttgaccatggtcggataataacaggttttctgtcaaaatgaagaacacctgcttctaagacttgatcacgtgctgcaacatttggggtaataccattcgacattctaacaatctgagtgatgcccaaaatgaccccaatttcttttgataaaatcctcaaacacagccaatggtggatagcaccaagcaccatacaaacgactgttgtgctcaagttttcagcctcaattttcacctcctcagtatcgatttgagcaattttctttccatcttgaatcagtggttcagtaaaggtaagcttttgtttatatgaattaagacaaaaccaaacccaactttaacttctagcaatacacaaaataatcaagaacttcatagaacaaggttttcataattatctcattcaatgaaagaaaaaaaaaaatcaacattattataacataaatatatagagtaatgtgataccttgtaattaatatacatgatagttggaaattaatcctaaacaataaaaggaataactaaaatacttagttacagagtgtatgaaaggtataaatgtaggtcaagccatgcaatgccattagaggaaaaaatgtccattacaaaatatataatacttatgtgtgtttaatttcaattttaagaacccatgcacactctgtttagcagtttcaatcatgtgtgatttaaaaaaataataattatcagtaagttaattttgttggtaatttaacttattctatgaagtttaataacttattaaataaaacaaaatttataatttactaaatttgttttgtatattaatatatatatatatatatttttggtaaagttgatatattaaagtttgataacttatttattaacaaattaactacaaaagaaactaaaattttatttttagtttccgatcatcttttctagtgatggtaaaaataaatattcttccaacatctcaagatcaccattttgtagagtaggtcacactggttccattcttgaggccaaccgatcaatgatgtgatgggatagattttaaagttaagaaagaatgagaaatttgtaggatgtgtggaatataaatgaaaacaagaatagtcaagaagaatattaaaaaagatacattgattactctttattaattgataacaacaagtagaaggttatacattctatgatcgacgaccttctacaacacaaaacgacgacgtacataaactgaaaacacccttaaacacaagtagctagcactagactagtctagcatattttttgtcacatagacaattattgaaagcaaagaaaacaacactccttagaggactctacccgggcttcatgttgagatgttatatctcagtgtcaagccatgtaatagaacccttagagcagaaaacagaacatgccttgatacaattttcaacagctttattcaccacttcacttgcgtctagtcacagaaacatgttgcataattagaatgggaatttcttgttaatctataataataaaacaaaaaaaggtaaaagatgcaaaataaaaatatcaatgagcttagggacttgggagtttgctttaccagagttttggagagtggttatggcaccgcacacagaggatgtgcaacctaacttgcagtattcattgacagcatgatcaccttgactcaaattaattacatgaaacttgcatcaacataaatttctttaactaattaaagattttgcacaatagaacaaatgagtattttaattaccagtgttttcaagattgtagtctcttgtccaaccatcgggacaagtatttccagaaatgattttgcaaccactgattgatgcacaaaactccctagagccacccagacggcatgtattatagatatttctggcagtggtgcttgggcagcagctctttgcctcaacttgaagttgtcccacaacaaggctcaataagagaacactcataataacatttttgccttccatcctctcttgattattttactatcttcttataaaatatatagacaaatatcactttgtattaatgaaatattggtgatgaaactagacttacttgtacccaacttaaatagagt

SEQ ID NO: 258602 - DNA, 730 bp, Cannabis indica
gatacattacaaagagcaataggcctcagatcgcccataatagaaggagacttctttttccgaatgagaacaagattagtagcatttagacctcgaggcatgaatttagatcggaagaagtcctaaaccatcttaacaacatccttacccacaatatgccaacacttctgataaaaagcaagcgtcaatccatcaggcccaggtgacttgtctggggtatttggaagccaggatgctatgattttttttaatgtaacattatcctcatatgttatggatggttgtataacatgaagaacctcaacacaattcgaccccatagaatgaaaaataccagtgtaatactctaccataacctgagacagacccgacctccaatgaacccaagaaccgatctcatcctttaattcatgaatgaaattattttttcttcttgagctagcagcagcgtagaaatacctcgtattttggtcaccctccttaagctgcaattgcttcgatctttgccgccaaaagatttttctttgatgataaatttcaccaagttgttttctcgcctccttatattcagaacgagactcaacatccaatcggcctttaaggagaccaattctagttttacactttaaattctctccttaaaatttttagttaaactccttccccacacaccaagaggaccctaaatagccgccactttgtcaacaatgttacccgatacacaagcttc

SEQ ID NO: 258603 - DNA, 613 bp, Cannabis indica
tttattttttttttttaattttaatattattttttaaaaataaatataattaaatattattataatacgtataaagttttaatcgtatataagcggtcatatcgtaagagtatacaccttacatcataataaccacatgatctaaaatcaatggtcaaaaaaagtttcctaccggtaaggaacttttgttaggtcctaccatagtcttgccctatatttatatatcaaaggaatattttgatcaatttttccattttattagttataatagtaataattaaaaaatgtaagattcttttagttcgtcttagtctagaaatgattgattaaattattagttctaaagataaaaatacataattatattctttaacagttcctactttcatttgttctttataataaagattccaaccttcatttgttctttactgtatgaaggtagtccctgagctattagaagtgatggcttccatttgctagccccattgatgtgttatggtggattgttgctccttctttccttggcaacaatataaggtaaatactattttagaccttgtgtttttgtaaaaattatcaattaaattatctgttttgttgaatgacaaaa

SEQ ID NO: 258604 - DNA, 1589 bp, Cannabis indica
cactgatgcaaaacaaaagacaattttttaaattgtcacattttacctcggttacacttttttcatcggggtatgagccgacgctaatttttattttttagcttcagttacacaatgaagcataaaatctccccttattttttgcctcggtcaacaaatttggtgagacgcgttgatcgacgcaaaaagtacttttttgtagtagtgaaatctagatcggggtaaaacattcccaacagatgctatgaaaatatctacttttaagggataattttgtcatttctatttattaatttaatatgtaaatatctattattttatttgttaactaggacttatgctctcctatttaaatagccttaacttaagcctaaaaggctaagtcgctctaagcctcatttaggccataaagctttaagtatgaaatgctaatactcctcctctctctcatacacgctcaaatgactctctacctctctctctatctctctctctatctctctcacatgcctccaaggtttgatctctctctcattagatatctgcctactaattcatactttgtaaccttaaagaaagctatcatatcttacctataatgatttgaatagtattatctctaagtattaatataactaaaaggaaagtaggtcattacccgctaactaagggagccgaatctctataaaagtccttatcttatttactttattgtttttattgtataagacgtgacaaacatcagattaatacgacctcgttgtcagttggccactttttcaagattaacaataacatacttaatttcaaataccatagattaatggctatttacactccaattatgtccttaaaatatatcagtaatactttaaaatatttttgacaaattatttgattaatagttaatttgtatattttcaagcgaaaattaattctagtttagtatatacggaattttaattaattattacatggtttttttgggtaagtaagcaaaatttattgataccaaataatacaagtaaaagaaaaaatgcccatcaacaaccaactgcaaagcaaaagggaaacccaaaaatgactcacaaaaagtgagtctcccaaccacctaaacaatgcttagctaccaaaactaatctatatttgcagtttaagttttggaagtaatgaattgactaatccttttatgaactattcactttacatttttaaaaataatatctcttctaaagactaaagattttgtggtcccaaaagacaatatataactacaaaaaattggatcactaacgaggacacctataccgaagacatgtcattattattgctatttttgcaccagcaggaaaaatttgcatttttttggtgttaagtttttgtactgtggacatgtcctcggtattagttttaccgatgacatatcctcggtattagttttatcgaagacatttttatctccttttatttttcagctgctttgtcttctccaaactcacataacctgaaatccccatttcagactagaaaaccctcgctagaaaacccaaaattggagatcgtccacctcccttcccgacgttttcttc

SEQ ID NO: 258605 - DNA, 648 bp, Cannabis indica
tgaaaaaaaattatacaaaaaacttaatttaatattccacaagtttttttttcttgttctttccttcattaaataccaatgaacataaaattaatatacctcagtcaaatataactatacctcatacttaaactaatatttcatgtttttctctctttcgttcatcatataccatagcacattaaaataatataccacattagttagcacgtagagtatgcgcgttggctattatcttggaaatgatatatgtgagcaataagtaactaggattagggttattaccctaataacatgagcggtttaacagcctaaggttattaccctagtgatatatgatgtgtatatgctatgccatattaattatatgagtatgttaagatttagggttatgtgttcaagacataaccgggttggactcagtaactagaaccgagatgaaccattcaaaggccttattgtaattggacgtgtgagcgtaactgttacgaaatttctgtttattacgcaagtgaacgtatcaagtagtatctcacgcaagtgaggtcgaaccacagggaattggattaagtactactaaattataattatgattctatttggtaaaataacaagttgcaattttaaaagtaaataactcagaaatta

SEQ ID NO: 258606 - DNA, 740 bp, Cannabis indica
agtggcagaaatccaataacagtggatgccccaatggaacgaaattattacaatccccatcatcgaaacgatcagcggctccgtaaactcaagatgccaacctttgaaggggaaaatcccgacgggtggattatgcaagcagagcgattttttgcttgctgccattacagcgaggaagaaaaggtagaggcagcgtttatctctttttcgggtgacgcactcctttggtatcagtttgagaataaaaagcgagcaatcttgagttgggaggagatgaaacgattggtgttaaggcactttcgagatacacgggctggttctttatatgatcaatttgtggcggtaaggcaagagggtacagtgatcgagttcaagaggcaatttatccgacttttggctcctctagaaaatgtctcacctgaaatacaacttagtactttcattaatggccttcgtcccactatccgcgcgaaactccgtgtgcaacgaccaagaaatattgatgaggcaatggaaattgcccaagacattgaggaagagttgaacgcaaccacccactacagaccaaaagtttctggtttcaaccgcaccacgacaccaccacttcatacttcctttaccccagggcatatgaaagacacataccaaaaaccagccgccgaaatacgaaaatataccgacagtcagattcaatacaagcgagagaagggcctttgctttcgttgcgatgataaatggtc

SEQ ID NO: 258607 - DNA, 968 bp, Cannabis indica
gacattttggtcacaggtccaaacaaagggttaatctctcacttaactactgatctacacagagaattctcattgaaggacctcggttcacttcactattttcttggagtcgaggttataagggactccacaggcatttacctatcccaatcaaaatatatattagatcttctggttaaaattcacatggaaggagctaaaccaattccacgcatacattgtcattatctcaaggtgaaccattttcatatcatacactctacagaagtacactcagagcactacaatatcttactttaactagacccgacattgcgttcattgtgaacaaactcaatcagtttatccatgctccaacaaccattcattgggaggcccgtaagaggctcttcaggtatctagaaggcactatccatgaaggtttacacatcaggccctgtcttcaactctgtcttcaggcctactccgatgctgactgggccagctgtcctgatgacagacacacaatagggggttatgcagtgtatcttggggggaacctcatctcgtggttaggcaaaaagcaacaagttgttgcattcaaatcacttgccaacacagcagctgtgataaaatggatgtcctgcattctctctgaactaaaaatcaagttaccatcagcaccaataatttgggttgataaccaaggggctgcatcctttgcagccaatcctatgtttcatgctagatcaaaacatatagagatagacctacaatttgttagagatcaaatacttgccaaagagttagaggttcgacatgttccatcctcggaccaggttgcagacatactctccaaggctttttccaaagacagatttatctacttgaaatccaagcttaaagtttgtaatacaccctttcgcttgaggagggatgatacagttatataaatttagttagctttcagttagttttctgttataact

SEQ ID NO: 258608 - DNA, 536 bp, Cannabis indica
ttagcgtgcttgacctggggtaattttaggatgggtgacctcctgggaagttttcttaggatgtatgcgagtgaggacaaagcatgctggaaacactcgtattggtctgtatggtcagtcgtcattctatgaagcagccagagtaatgtacttgtgtagaagagccatcattctgtgggtgtaaaagcccaatggaggcttgaatccgagacattacaaatggtatcagagccttgacccagccagaagtgtgatcgacgaggacatcagaccctgtaaggggtgattgtgatagttattagtcccatgatccgtaagggtaaataccggataaggttggcaatcccatatcacctggggaatgtcaagtgtgatgattctgagactgtgtaggtacaggactacacatttgaaaaatgcttaaatggattgattggtaatatctaatcaacaaggtgcagcttatttttcggtatcccatcacgaaagaactccacggttaagcgtgcttgacctggggtaatttcaggatgggt

SEQ ID NO: 258609 - DNA, 1149 bp, Cannabis indica
agatgaggtgtcaactgctctttttagagacagatagtatcaagcaaccaagtggtgtgtctcatattgatcaagctcttgtgataaggtcagaatcaagttatggtaggagtacatcgagaggaagatatgatgatagaagagacaatcgcgctcattcacgctcttcgagggaagtggagtgctactatattgtcacaaaagggacatgttaggcaaaattgtgaagagttgaccaagcatcttgaagcaatgaggaatcaagaatgcaaagaaacgtcagattccacaaatgttgctggtgaagggtttgaaagtgactctgagatgaaaatttttttgactcttggattttagattctggttgttcattccatatgtgcccgtataaggagtgctttgacacttataaggcatatgacggatgtactgttttgatggataatgattctagctttaaagttgttagaataagaactgttaaggtgaagatgtttgatggtgttgtgagaaaactgactgatatgagacatgttccaacattaaggaggagcttaatctctttgggagctttggatactcgaggttgtgtctattccacaaaagatggcgaaataattatcaagaaacgtgacttggtagttgtgaagggtaagaaagagtgaaatttgtataaattagtcgggaagactattttaggtggagttgtgaaggttgagtcaagtcacaaaatgcattcagttagtgtgaaggaatgtgacaaggtggagaagactccaatttcagttaaaaattgtttgaagaaagaaaacatcaatgaaagattgaagaatgtgaagacaagtgttcaagtgaagttcaataagagtatgaattggtttgagttgtgagtttagagaatttgagtcaaggtggagattgttggagtttgactcaaattgtttatttctttattctatatatgtaaagttgcaatttatatttgggtaattattaattgtgggaaaaaggaaagtcttggtgaccaagttttgatgagtctttaggaaagatttggattgtcttggtccccaaattatcttgatgcctaaattttgtaactttataaatatgtgttttgtgtgagagtgttagatacagagagagaaa

SEQ ID NO: 258610 - DNA, 3185 bp, Cannabis indica
aatacatccattggatcggatcggatcggatgcctcaattcaattggattggatcggatggcaaaatacaatatccaataaataattggattggatcggatgggcctaaatccattggatgtgatccaatgaacacccctaaatatagtataaaagtaaaaaatcatggaatatttttgtaaaaatttccgttttaatagtataaatataaatctacccaaaatctagtattttcataagaactttaagtggacatgtcctagctgaatagtatttgagcgccgaggttaatttccacctttggaaagaaaaaggcaaggcaagcaaagcaaggcttcattaactgacacactcactgaacttaggccatttattctcttcaatatggtattctgcttcctcttctcccgctctctttccctctcgttttagcaacttctcccatggcttccacttccaccgaagccctaactctctcctcttcccacctctttctcaccgcccaaaagtccttccaccaccatccctccccacctccattctccctctctcctttcccctcatctttcccacaatccaaacgtattcccaagactcgttttctcgtcgacgccttccgccacgccggcgaccactccatttcttacttcctctcacattttcactccgaccactacaccggcctctcccccaattggtctaagggaatcgtcttctgctcccaaatcactgctcgctttctcgttcaagtactcaaggtaccttctgtttttgttttcccattgcctcttcgtgaatctgtaatcgttgatgggagtgagattgtacttattgatgcgaatcattgccctggtgctgtacaattcctgtttaagattccgactacagacggaaattttgaaagatatgttcatacaggagatttccgcttctgtcattcaatgaagtcggacaccattttacgagaatttgctggttcggattctgtgttcttggacaccacttattgtaacccgaaatttatttttccatcgcaagaagagtctattgagtatattgttagtgtgatagaaagggttacaagcgaaagcaaaggttctgtgaaagatgtattatttcttgtagctacatatgttatcgggaaagagaagattttgcttgaaattgcacgtaaatgtaatcgtaagatatacgtggatgctaagaaaatggctgttttgcgagttttgggctgtgaggaaagtgaagtttttactgaggaagaatctgaaagtgatgtacatgttgttggttggaacgttttaggtgagacatggccatattttaggccgaattttcttaaaattaaggaaattatgtttgagagagggtactctaaggccattggatttgttcccactgggtggacatatgaagtgaagcgtaacaaattttcagttaggtctaaagattcatttgatattcatcttgtaccatatagtgagcattctaattacgaggagctcagagaatatgttaggcttttgaaaccaaagcgtgttattcctacagttggcttggatgttgaaaagcttgatggcgagcatgctaataagatgaaaaaacattttgctggattagttgatgaaatggccaacaaacaagatttcttaaagggttttcatcgagggtattgtgaagtgagtgataaagatgggaaggacaccaacaatgctccaaccaaagaattgcacttggacaaaaagacagcgtcctctgtgttggaagttaatgaaaataatgatacttgttttggttctgaatcatcactcccactgcaagaatctgattcacaaaaactaatggtgttaagtgatgcggaagtggagaaaacccttcaggaacttcgtgattgtttaccctcgtgggttacacgagaccagatgttgaatcttattgcaacctctagtagggacattgttcaagcagtttccaccttctatgagcatgagacagaattccatgaacaagcatgggcttgttcaacttctaattctacttcccagatcaacataccaaatgactctgcaccccttttgcaaacaaccactaaaaatcatagtccgtctgggaagattggtattccttcaagtcaagattttaaggttgttaacataaagcaaatactaagtggcgtttcactttctccaggaaagaagaagaatattgaaaataagaaaaacaagaaagtaaacttgaaggctaagtcggaaataagcggattgtttagcagtgcttctcctgggaaaaggaaaaagaatattgagaacaagccaaacaagaaattgaaattgaagtctaagtctaagctagaaacaagtggatcaaaacaaccaacaataacaaggttctttagtaaagttttggatagtggttctcaaagtgctgatacaaccttgcatgataaaatcactgaagatgaaaatttgtctagtgatggcaccaaacaatacaagaaagagatagatcaatttattaagataataaatacaaatgaatcgttcagaagctatgctgcctcaatagtggagaagacaaagggagatattaatatggctcttgatatttattacaataatccagagggtgcacatggtgggggtgaagttgatgtgggcactagcaaaagttcacaattccagtgcagcattctcagcagtttttctggccagaagaaactttcgacagaaaatgtggggcataaagctgaatactcgacaccgggattgttaatggacaatgcaagcacaacatctgtatcactatctcccgaaaaatacaatcccacagagcatggttggtgtctcttgtagagtagcatgttgcaactacgaaagttattttggcatagctataattaattttctttgcatttagaacttttggtgacatgatcgttcttgtgcagcttgttggcgggatggacagcgggctccatatttacatcttgcacgaacttttgaactgcttgagagtgaaaaaggaaagataaaggctacttctatgctctgcaatatgttcagaaggtttttgaaagttctgtgtaaagtggtttttcatattataatgtttttctactgaatgctgttgctatttaaaatgagcttcctcttgttaacttttatcattctttctacttagtttgc

SEQ ID NO: 258611 - DNA, 543 bp, Cannabis indica
agcccggcatggtggtaagcaatgccaaaaggcaaagtttcttctaatactgggtccaatccaacaggacaccttcttaaggcatcaatagcagaagtgatatcagcatattcagcatcactgttctgagagctaactttagaacttcggaggaattttgaaatatgtttggcagttgattcacagccttttcgactagagcaaaatattagcactgaatgaccctcttgaacaacctgatataccgaacaaagtcaatcttctaacaatatatgccttcaaaaacttcattataaaaataaagaaatagatgtttccgtacctcattgcacaattccacaacatgatctggatctttgccaccaagatcagcagctttgaaaattgtcctaacaatatccatattcttattataaattgtgttaccgacctttatatattcttctaatggaactggacggaaatcagtttggtacaaagcagcctggacatgtttgtagaggcaatggccccagaaagaaaaaaaaaagttgagtggcacac

SEQ ID NO: 258612 - DNA, 659 bp, Cannabis indica
ttactatgaccaaattccatttccaccaaactacatcagacaaaagtttgaaaagtttgatggaattaatggttctccccatgagcatttggcttatttcacctctgcatgtggtgaatctgcccaatcagatgcactattgatctgacaattcgtgcagtcactaaaagaggtagcgttcacttggtacactcaattatccccaggatcgataaatacttgggatgacatgcaaaaagcttttctggcacaattcgtgagctcaaagaagaccataagtctccatgacctggtggaaacgaagcaacgaactagtgaaagtgctaatgagttcataaccaggtggagaaatctcaatctccaatgtccagaaaggatatcggaacaagcggcggtttcaatgtgtgccaaaaacctcaaccctgaggtggaaaattttgtgggcacaacagaactcaaaactttcaatgagctcgtctcgaaggcctgcaacgttgaaatacaaatttctcggtaaaggggtcgcaaaccctcactgagattcgaaaacaaaaagccattcaagaagggagaatcaatgaaaacttttatcaataccgcatacaaagataaagggaaggaacgagagccacaaaagaaattaactctcaaagaaagga

SEQ ID NO: 258613 - DNA, 1119 bp, Cannabis indica
gttattctatgatcaggtgccatcagatttaaggagtgtgggacttgctctttacctaagtatctttggtgtgggtagttttctcagcagctttcttatctcaattattgaggaaacaactggtgggaatggccgagatagctggttttcgaataatcttaactgtgcacatcttgactactactatgggctgcttgctggactgagtgcagtagcatttgctctctacttgtattttgcaagatttttacatttatactacaactcattttgtataaactcttctctgccttactcttagtgtccttacaaaaagtggcaatcctgagggtggaaatttttttgcataagcgcttactcatagaaactcaaatctcccatgtaaaataaaagaatccaattatcattggatttgattgcttgagggataaaacattggatcccataacatgaacacacaataatttatcttactgatataaaagtatcatattagtgtgataatctttgactattttacttttgataaaaaatagaatttacatatttttttgtaagtgaagctatcttgatcattattaaataattttgcccataaaaatttatttgtaattattattattactattatttgatatatatatatggtagaacctttttacagataattctcttctaatttatttttttgcatgactgaattttttattaataataattataatagaatttgaaatatatcattttttactgaccttcttttctcttagctacttaatttatatatattatgtgtgtaattaaagttttatatttggctataaatataaaagatcatggttatattaggatcaacaatatcttcatccgtaagaggcattttgagaaagtaccgagggcttaagcccaaaacaaataatattatttttatttttaagtaataatttgtggtttatacacaaaatagccatataaaatgaataaatgatgtggcttcaataataaatcaattttaataggctaattaatattcttgccccctgaactttgacatgtaccaaacgatgtctcttgaaccttttaagatcgttgaaaatgcccctgaactattgagattgt

SEQ ID NO: 258614 - DNA, 3106 bp, Cannabis indica
tgttatgttgtttgaataatggtgatacaatgaaatcacattatttaaactatggatatgtataagtagtttgaataatgatcgatacaatagattcatattatttaaagtagttatgttgtttggataatggatggtacaatagattcacattatttaaacaatgatatgattatgatattttatttaaatagtgtatagtagttaggcattatttaaattattaagattgtagcttatgtgatatgatttgatcgaaaagataatagttaaatacttgattattgggtctatatggtaaataggtcatttagtagtgggtacaattttactaaacccagccctccgtcatttagtctaatagttcaggtttatttgccaaagacggactcgagcgtaatttttttttaatgtgatttagcttggaaactaagttctattagttactagtgataaaattaagcttatctatattgctatttgcctaaatatgtgcattagttgtatttatttttatttatgtgactacctgacacacatttccttactaagtttagtagctcacccttatcaaattactatgtgcagatcgaccaaggtaactaaaagtctagttggtcagtggcaagtggaactttggacacttgtgtgtgtgaactcgctgagggccatataactacgtgcgatctaggacactctatttatttatttacgctattaaatttatgttttaattatttttatttattatttattatgtcttttggtacgaaaattggccaattgtgaatatttttcaagtattaaataaaagacgacatgataatttttcatgttaaacggttgtaaataatactagtatttttatataagtgtgggcggccttacagtttggtattagagccacaattatatcggtattgaatattcccatgagttacacatatcgggtaaaaatgtttcgctcgctaccaagtaagtattatttttgtatgtttatattttatgtgcattttagtaatttgaagatttttttttattttcaaaatcctaaaactaataactcagcaccaacattatgagattagatcaagtagaacacattgttaggcacattaaagacttaaagagagttcccaagaccccacgcatgcgagaagaaaacaaaatctttgatgaattaacaaaatacacgacgcgatggataggataatatgctgctggaactgtttattaaagtcacatgagaagtacatagccctaatgcacgcactcaaaatgccacatttctaacgtagtctaagagacaattgggaacatctaggacatgtgtgggtagatgaggccagaatatatgacctactcatgatcaacctagttgatcaatacaagactactaatatcatatatcaccgtaatggcactaaagaagaaatatatcctcgacctaataatgtcattaggtttgaattctttcaaaatttaccaaacttgtcaaacctagtgtatttagaactcgactatgtagatttgactgaggatatgttagagaatgggtcagacatagaagattagaatagtcaagctgtattttattttatgtatttatttgcttatgtaataagagattttagtatggctccacttttgataggcgttttagtgtaacttttttagcttgttattctttggaattcaaaataaataaagaggttttattctatctagtaaagatttatataaatatatatatgttctctttacgaacgtaagttactttggtcataagaaaatttgattgaaggaaaatctttatttttttaaaagaatactagatctctagctacataatcacttgattattggaatagaaacaaaaggcttttccttggataaaattggacaagctaaaagagactactattcgtcctccacacataactcagctttggattctttagggtcttctttcgggtcttcttctgggtcctcctcgaagtctatttccatttctacatttgctggaattgctgttggcatgctcttggattcagagtctgactcatcaatttccactttaaaatgataatcaggtacgtcatcttctagtccatcgatacttattgctatggatgaatctaagtccccgcttttggtactggagagtaatctagctcattggagccttctagctttttctcatcctcgagttcttcatccaaaggaatctcgaatacttctattatttcctctgcttctatttaaggtgggctttttagttcaagttctagcatttctccttttacctcaaaatagtttggcttttccaactctttcaaatctcattcatttgttatgttcacggattcagttaagtcctccttattgttgtcactttgtttaaatcgtatattcttgacgcgttcttcttccatcttgtttgttttcacaatataattcttttcaaaaataaagttgtggaagttaagtgttagttcacatatgaaggctgtgtatctgattgcgtcaccaagacccaagaaacagtgccaaacgtcattgatatagtagaggagttcggggacatgtgacaatgtaacccttaacactaaaaacttttcttgtgatttgattaaggctcccctctcctctactactcttttgatttcttcattaattgtgatgacttctcgtagagctctaagtatcttatcctgttcgaggtgaatatttttgatctttagcgatagaatgcttttgatttccgtaagtactgtttcgtttgacgccttaattctaagatacatacctcttatatctgcaataatttattctttaactatttagtagaacttagcataagaagatatataaatatatataaatattaaccagatagaataaaaattctttatttatttatggattccaatggataaaaagctaaaggagttacactaaaactcctaactaaagtggagctgtactgaaactccttattacataaacaaataaaaatatgaaatcaaatgtagcctgactattctataatcttctatgtttgacccttcctctaacatattctctatcaaatctacatagtcga

SEQ ID NO: 258615 - DNA, 1081 bp, Cannabis indica
cattgattgcagcggaataataaaactccttccgttttgttcctttctgtcacatagtaataactagatctgagcctagatctctttctcttcttcgggtttggttaccaccgtctaccacactatgattgagtatttgacttgctatgtgtgggtatggcactctatcactaagatcaaataggtgaaaaacaattaaggatgctcgaaatcactatagaagctgcctctcatctactagttgtcaaagaatgaaaactagatttgataggttaaagtgaatactattacatttttgccactttatttcaatactatatatttttctttcaataataccctattgtcaaatttcaatcctataaatgtcaaaactatttatttaataattataattaattatcaaatgaaattttcatttatattatttattaattagaccatacaaagtctcttaattaataaattaaccccaaaactttttgtcttcacaaataaacccttgcttagtgaaaattcataaataagacatagtctaattttagaattatatctgattaattaaaaccaattaactgagtatgcaagcagtattattttaactagtgaggagaccatgggcctacataactgagcttccaataagtagatctagaatataccaagtaaattccttaacttattaattactcattgcgccactatagatgtaacgccctaattcattaggcacgctacccaagatacttaagaaaccctaatcccctaaacgggattactagtaaaattagtccagaaattaaactttaaatttcaagtggaatgaaaataaacttgtaataatttaaactttacaaattaaaagttacatctattgggatcccaaaaatattttacaaaatactattacaagtccgtttccactagctgacctaagcggcaaaacaaagtcataaattcatcactggtagaccccaacctatttggtctagtgtggcccgatcatgtacatacaccgtccagctcccatactcatggctgatcaaaaatagatctaccctttcctgcacagtagagcacc

SEQ ID NO: 258616 - DNA, 729 bp, Cannabis indica
gctttactgagatctatttttatggcacacctcggcgaaacattcttcctcccatagttcttgatcagatcctggaatatcaaaatattatgagcaatggatctcttctttataaaagcaccctgattatgattaaccagccacggaagaacttcagctagtcttttgctcaagagcttagtaatacatttgtataaagttgagcaacaagctatagggcgatagtctatggctctcataggattttccaccttgggaatgagagagattaccgtttcattgaactgcttaggaatcctaccagtattgaagaaatctttaatcgcttggcacacttcagccccaatttctttccacatgaccttgaaaaattcagagttatacccatccggccctgggctcttcgaactagggatactgaacaaagcttccttaatctccttattagaaaaagaatggactaatctcaactgttgggacaacgacagcctgttgccaagctccatggacgctttgtcaagctttttagtaaccgaactgcagctgcccatatagcttttaaaatgattaacataatgcctaaccacatcaggatagttatcaacaatatttccttgcaaatcaacaaagctagctatcctattctcttctcttcttttcttaatactagcataaaagtaggcattattaccatctccttggtttaaccaagttaccttactcctttgg

SEQ ID NO: 258617 - DNA, 537 bp, Cannabis indica
ttttatgtgataagaatttgtatttttttgttgattttggcaaataaaataaaaatacataagaaaaaaatgatcattattagttcttaaaaaatagatttaagaaaaaaaattataaatttaaatataaaattattattttaaaaaaaaaaaaaagaagttgggccggatcaaatccgatctgtataaggcaggttaaatctgttccgatctgagtaactggtctatcgagacaggacgggacggatcattacatgattcagataaggtcgaatcatagccggatttaggggtgtgcataaattatccaatccaatgacaaccgaccgatctaattgtaatcgaccaccaaacattggatatccaattgtgatgggatcggattgaatgttatttttgaatatccaattggatcggattggatgttggatgggatgttcaaaaatccaatatatccaacattcaatcgaactaattagtattttcatttagtttggaggagtaattagattttatattattatacgtaaaatatat

SEQ ID NO: 258618 - DNA, 1745 bp, Cannabis indica
gaaattaatcacccaagtctatttttcaaatcagaaattgtcaccactctattcacttttggcttcttatttttagtttatttagtttaaaatattatttctcaagtttagaattaaggttaagaattttttctcttgaattaattagttactttgctttattttatttgaaatttttggaattgcttttagttgattttgcattatttagtaaaaagtccctatggagacgaactttgattacttatcattgtattacttgtttttgattgtgtacacttgcacaattaaattataaatcaatataaattttcacaacacaagtgagtgatacgttatatgttttatgattttcttactgattctagactcacatatgtttgcatgtgtagattatgaaaaggcaaaggctgaacatcagtgaatccagaatttgaggatgattgtacatatcaatatggttagggctggagttttcagtctcgcgacaacatgagcttttattttgtggactttgggcatcacctttgacaaaaatgtattttgtatacaattataaccttttaaatggaatcctggaaaattataagaaattatatatttattaaaataagtttaatttaaaagttttaatttttcacatttttcaagaagccctttgaataacaaaggtatggaaagtaattagaaaattattatagcatgcctaagtatgtcgggcattacatgaaattacaccaggctacatgtcacctagaattaggcataatgtcgcctaaagtagttttcagtcctaacttttatgtaacccctaaaccatcttatttaatccatttcacacctaattacaagcttataacagccatgggtgcatcatattttatttccaattcttgtgaacacctttgcttatcaaagaatttctcaaaaaatgttatacttaaactttaataaatacatatattgataaatctccatgatcctattaaaagtttataaccgattttaaaatatgttttctacaaaatatgagcccatgtcatcccaaaaaatcaaactctctagacctaaccatcctgatatgtatagtcaccaacaagctctggactcactactgctcagccttcgcctttcctctacctacacaggcaaaatatttgtgagtcgacaaactcagtaggaaaagtataaaacatataaacatataattgacttgcaactaggctcccatacacctatttaaaaggcctaacataatatcagtcactcttaacaagtacaatttgttgggctttgtgccctaaataaaactctattttaatgtaatcttttatatacatttatcaataaagaaatagatttattttcattacttatttaatgtgttatttagtgcatgtgatcatttatttatttatttgatttatgaattcatccaaatccttatcacattgatattcttgtttattgtgtgtcaacacagtggaaagtaatcaagattgtgtgattaaatgtattcctatgatttatcagtacacagggtttaattgataggatattctacaatgtagtttacttgcaccttggataagtgctatgtccttttcagggcattgattaaagtaagcttgggttggatgtatggagtatgcatcgaaagggaacgatattaaacttggataagatataataaacataccgtaatatctattcaattcaatagatcttagatcaaatgatctcaa

SEQ ID NO: 258619 - DNA, 636 bp, Cannabis indica
agatcctggtaaaataaatccaacaattccctacttggaaatgttttttcccttgtctgtgctctggccggaggatatttccttcttagccttggtcactgcaaggttgtaacattcccgagaaaactgctggtttcctcttagacacactaccccattctttgttggaaatttcaggcatgagtgaaatattgatatgatagcctttaagtcatacaaggccggccgacctagcattacattaaaatctgaaggaacatttaatatcagcaactgtgccatgacagtcatgctcgtcggagcttgtccaacagtgaggggtagacaaatttgtcctagaagtgcaactccttgaccggagaaaccatagacaagctggacgcatgcggttaaatccttgagttggagtcccatcttttcataagcaattttgaataagatatcggaagaggctccattatcgatcctggttctggccaccattttattggctatctagacttccacgaccaatgggttgttctgcggaatttaatttgacaacgtcttcctcgttgaaggttatgtttggctcttctgctcgtggaactttgggattcctttcttccatgacaaagataacttcttcttgctcgt

SEQ ID NO: 258620 - DNA, 5275 bp, Cannabis indica
ataaaaatacaaatttacaaaaaataaaataaaaaattattcaaacaccaccttagtccctcactggacgagaaaaaaaagaacaataccgagagaatgagagagatagagagagatcgaaagggagaaaaaatgagagagaaagagatctactgctctaggctcgcttaaggaggagtggtgcaagaaagagatgtcgagaggggagcggatagggcttgagcatcgggtgacaatcagggcagtcgagcatttgaatgacgcagcatagagtgggggtagttttgactattgatgttattgcaagagacgaagccttttatctcagtttttaagggtattttatcccaatttttgctaaaatggaaactgggatatatgttagtgaggtaaaagaccttttaagaaaattgggataaaatctttttgttttttgaatggaaatcgggataaagtcttaatttttatttaaagaaaagaaaaagatagaagtaaccctttttattccactttttcataaaaacgaggatcaaaagtataactttctttgtaaaaagaacattttgtgttctaatatctataaaatcttatttttcatagtatacgaagttgagtggtcctgagtaatagtgatcgacctatgatgggtctctagccttttgctctggtcgactttaggaactctaaaataggtatttagatctcgtcaagctgtttcctgtgagaggaacgaagcaaagtaaataaaccagtgtgcttttattaattgatctcaacaaattactaccaaatagaatgttatttaaattgtataacggttaaactaactaacaaaacagagaagttatacctaactctaacagaataacaacctaagtgacttgtttaataacaacccccctcaaactaattgtggaagatgaagacacacttagtttgtcactgagaatagggaaactagaaatttatatagccttggtgagttagtctactaattgatcaacatcaaggacatgttgaacctttgattgagattgcatcacattttctcgaacatagtaaaggtttatctgtacgtattttgttcaggcatgcaaaacaaggtttgcaacaagcgttatagattgtcacaccacactttaggaacaaaagtagaggagatgcacagttaagtaagtaaagaatgaatccttgtaatatctgtaacagcagctgcattacagatttttatagcaatctagtgagatttctttaatgaacacttatttgttcatagaaattagcaacttagtaatgatttcattactatttatgttatatttgtgtatcagcacaaaataagacctattgtcaaaaataagcatttgtaatataatttcatatatatatatatagattttattgtaatttaggtgtgcccttcatgttatatatgcattttagtattcttcatatttatgacggtatagtggattggaaagatttcgccattagtgtcacaatatgtgattttttgtagcttagtggctaagaaatgggattttgggtatttagccttaagttgattttagtctttagtcgtttgttgtaggtaaagataagctttaaaaaaaaaggaaattttattagaggtaaacattacacaaagctaaaaccacttacatcacccttttctctcactcagttttgcatgcccaggagcaacccaaaggaaacccaagaacccaaacaaaatttagaccaaaatttaccaagttatagctacattttaggagggattttgaaggggaaggtgactcctaaactccaggtaaccttagttctcttcctctatagttttagtgtgagttttaggtgatttcggttatgggtgattttaggaatttgaggttttgttgttgcatgtgtttgattgaacttaggtctattttttaaaaaataaattgttgttatttgtggttgatttttgatggaatttgcacctatagcaagtttgggcaaattttgagttttatgaactcaaccattgctcatccatggtagattttagtgtttaatattttttaggacattgagttgtgacatgtgtttagaatacccgtttgttttttttttctaagagttcggttttgttgatttcgcttttatccaacgacaatgagtcaattaaaccgattagaaagaataaataataataattaagcaataagaacacaaatttgttagaaaggtttgacccttggatagttgtaatagtctactctccttttacttgtattaacttgtgagcaaagaaggaagaagttcttgatctttcttgaaagcttttacaaagatttagcaacttaagtgctctattgagtcaattgctttcgcatccctaaatagtgaaatggctccactattcattgggaagaattacatcagcttggtttccaaagcaataaagaaataaaatgggaaacttgtatatttcctaaattacagaatttgcatgtagaaatctaaataaaatagggatttaattgataaataaaagatgaaagtatctctgaagatatttcacccgcatttaccttggcctattcacgcaggcttgctgcgagatcgacaatagtcagacggtgctatgtacccggtctagatattccagcttattcttttaatcagtttttttacaaatgataaatcactttggatggtacatatgaagcatattacatgatcaggtcatgaaatgttcctcacgtgttactcagatggatgccatatcaccttgtgctgatttggggataatatttgcccctaaatttgtgtgggaactatttgctcgcacgtagacttattcgaccactaaattggtttgatgggtgaaacatgttcgataagcgtaccattcttgatctagtgtgattgaatgaaaaaaatgatgatttaactgtctcttcagtatctagggcatttaaggcctcaacatgaaatttagatctcgattggcacaacgacgattattgaataccacatgcctgtcacatgtactccccaacatgtaatgattacactattttatggggaaacctaaaattttaactttacattcctaaattaaccatgtaaccaccgatgggtcaaaaattcttttctactcttttggctacaaagagaccatggggacaggtacaaagagcaatatactcagctctctcttagatgagagacttcgaagaaaacatgaagcaagcaatgctggagttcaaagagttagattgaaagctcaatcttttgtctagagagtacgataagcatacctaactcttggataataagattgttgttaaagaaactttggagaaaaaggtgaagcttcattcggagatgcaggaaaatgtggaagagatttagaggaaagttatcaaagaggctgaggaaatcacagatgaattgggttttataaaaaaatcccgacttaggcttacgaagagttccagaaaaaggatttagagctggataacaaaatttaaaaaacttcagagctggaggatcaacttcagacagtgacctaggagaagcaagaccaagaggctaggacattagaagcattaaaataagtttttgtatactctctatacaccatatataagcttaacaaatttgtgatggattttttctggatgacgtagacagagaacatctgatgcccgaggttcttcaactagctgaagcagagaaagccaagaaaggagcgagggcagcaaaagtggtcgatcttggaacttccccctagaggatgagaacttggaagacccatatcttcttgctattgatgctcctcccatgactttacaatcccaaaggtctctattgatgtccaagttgatgatgctcagcctcccaaaggacccagctttgccttgaccaaatttatccaactttaacttacttttaatccttttatcatttggggataaggatcccccttttgcatatgcgaagataattttatgcccttgccactaggccattaagtatgtagtagtcatattttagatactcgcatactttattaactctttaggtatttgagatttaatctatcaaggttgctaagttttaatcttattttcagcctccacgggttctggttccaaaggcttgaacctttgggctgctaattaaatacttagacttgattttttctttttaataagttgcttgtatctcttggaacatgggtccaatagcctaaaccttgatactttcacaacttatttttagaaaaaatttggtaagtattttttactttaagactttgaaacttaaatatttaattaacctgagctaattaattattccagaatcaaaccttttttttttttgtaaatattacttacttctaagacttttgaaacttaaatactttattaacctaaattaattaatttctttaagaaatctgaatatcttagtaaatttaaccttagttaactacgaaggttgaacttctacgttaaattaacctgagttaattatgaagtctgaacctctaagttaacttaacctaagttaattattaagtttactaaaaaaatttaatgtataataaggcagtggtttacttcctgttccctggagttctagtttcatgtaatactttctactcttataattcttgttaatttagctatattttatgaaatatgtttaacgttataacgatataatggatgctaccaccaaagtgattaagagtttagacttttgatacctttttacaagtagaactttgagcaatcaaatatgaaatgaaaattccttctttattcaaataattgctgccatcaggcatgcattgaaattagacataaaaataaaaaaccaagaacaaaggaaaggaagctggaaacacccattctatcgatagtatcagcgcaggtggtcaacgttccatgctttgagaatttttggttccatctaatcttctcaagtgataggttccatcaccaattttatctttgacattcatatggaccttcctagttgttggaaatattttacctacattggttgcaacggaataatatgtctccttccactcagatctccaacccttgtatcctttctgtcacagagtatcaccaagatctgagtccaaatgtccttctcttcagtttggattcttcacgatcttccagactatgattgagataccacttgatgtgtgtgggcactactctatcactcaaggttttcgaaattagaagaagaaaagagagag

SEQ ID NO: 258621 - DNA, 3866 bp, Cannabis indica
gtagcctacttttctggcttaaaaaacttactatagaaaattcgtgatgcccaaacacttaggtatcataccgcgctatttagtaccattttaataacattggcctcaaaaattcaagacctcattcttaattatctattcgaaacttctccataatgagatccatggaatgaaattgagacccagtcgagaaaggcaatacaaaatgagaagataatatattctatgttttcaagtttaataggaaatatttagtgcttaaatccatccatgcacaaacacttaaacctaacaagtccggtctttttttttttcaaaataaatattccgtttaactgcttagccaaaagacaagctgtaaggagagcttcttcctctcttgatagcttcagattttgagggtaacccacggtcagaaatcacctgtcaaaacattaaggcaatcaggttaacggaaagtgaacaactgctctacctaaaagtgttaacaaattagcaaactagtgaaactgtaattattatatttattttttattatgtcagaatatagccagcttactaaaagatcggttggtttctcttaatgcgatgaaaacataagtctttaattcaaggattgtgttgatacgaaaacaaaaaggaacatgttgatttagggggaacaagcacaaatgaactagaaaaagctataaggctaaagagtgaaaccgggataagctcttgctagggctcctgctcctgctacggctcctacttctgcttctgctgggacttctgctgacgctgcgcttttttgggctttcacttgtacgtttctgatagtgcaacacaaacaaacgatgagtgggcagaaagccataaaaataattccaacaagcggatcaccgataccaaatgtaccatccagagaaggggggactacaatgttgactgccccactaaacaacgattaggcctacttactatagtagcattatcagaaaaaacatagcagatagagacatcggcatgttctccttttcttgtatatcaaataaccacataaaaaaatgaaaaccaaataataagattcgccctactcttcactattactacaagaaaaacatttcacttaccaacggtaatggagatctagatcttgaccgagatctgcaaaagttccagaaacaaccaatttaaattccacatgttccttttaccaaatttgatccaagatccttgatgcctcttccacgtcagagataccagaaccaatatggataagaggaaagatataaaaggtttagcagttcaacagaagaaaaaacaggtcaatgcatattattcccacctacaaacgacctaagattataaaaacaaatatcttaaagaaaacagtattaattgttttcaagacactagtggacaggagaggagtattcttccctactgtaccaccaaaatccagggaatccagaaagtgtcgtcctattagcttggcaagtgttgaagcaggtaatcaaaagtgtaatgtctctactgcaaattgatggtgacttccaaatcccattgcacttagtacacagttatccagctcaactatagcaatccatgaccacctttgttcccaatctagcacccatggacatttgcaatgctaaaagcattagaacataggaaccatgaaggcttccaaacttcctatctaagaaacagcatacctccacaaccaaaagagtgcaactgaatcatatccaatcaagatcctaatatccaatccccagttcgctgcataaatccaaatctatgacaacagaaaaggtaattccacacgacaaaaggaggaaaaaaaataaatattttgtggtgacaaatataatttcagagtagacccattgctgaacaagcaaatacaaaataaacaagccaacccaatgattctagaattcaaacatgtgcctccacagagaacaaatagaaagtctcctgtggaaaaacccactgcagctaaaagatcatgacacagcaaatttgacgttgacgggaaaaatgacagtttaacacataggtgttatcctagactgaaataagatgctgaaaagcaacacacgacaaaaaaagaataatatctatgacaataaacacatacccagacaaggagcgagagcgtgaacgagacctagatcttgatccagatttagccggtgagcgacgtgaagctttggcttttggagatttgctgcattacaagtctaatatcagaatacataaacactttcagcaaaataccaaattttgtaagaaaaacagtagaacctcctgcttctgctcctactgtaactacggctccgactgcgactgccactcctcccctttgaatgagaacgaccacgaccagggctagggctcctagatgagtctctctttgaatcatattccctaacctatgagatattaatagtaagcagagagttagttaaattattatagagaagagacaaccacctttggtcattaaaataatagaaaaaaccatataaagagtgggcgtgggggtgcacgagaatagatccttacacgaacatatgaccgagaaaatgcattccggaactcagaatcatcaagcttttttatctgcagagaatataaaatattaaagcaaaatgtaatcacaaaacagattcacatcacaaatttccgatacaatatattagactgggaacatcaatcaaaaccaagaacagatgaatttcatggaaaaatcaattcttaaatttagtaggggagcagtcactcactgcatacttcatgtcttcatagttagtgtagtccacgattcctgttgtgcctatatagaaaccaaataaatcaagaaaagacaaaaacagtttctcacaccaaagctcctgataaacaaatggtaaaactcatcatgctcattaatgtatatatgtatgtatctcataatccaactacctacctgcttgagattacacataacacaaattctccttaaaatgtacacatcattctacatgttagagataacaaactgcaaaaatgagaaaattggcaacatttatcttaccactactaccacgaaacacttgagagaaacaaacatcccctgcacgacgcatgtgatcctgaacaagaatatgtaacacgcaattgtttatattaaaaagaaaaacagcacaaataaatcaacactataaagttgcacaaaataggtgggtgggtgcaagtgcgtgtatgtgtgtgtgtaagagagagagaaactgcctgtgcaagaaaataagagctgagagtaagggaatactaaaacatataagtctcaccttcaggtcttgccatgaagccgaagaaggtaatccggataccatcactgtagacaaagcatgaataacataagaactgtgaaccacatcaaactaagtaacaatgtatgagataatataatacaaaccacgatactcagagcgccttgatacgcctcgtccccctcggcctccacccccaccaccaccaccactgtggccactatagcgatcagttgatgatgaatgtccacgtccaccatgcgcaagttcaacctacaagagaacaaagcttattccacaggcacaaccatacatatacagtgaaagcatattagacaaaaaaacaaaatattttaactgaaacattagaaggttgccaacccgcaagcgatgcccgtcaaaatcatagccatcacgaccacgaattgcatcttcagcatctctggcatcctcaaactgtagcaatacaaaaacaaataaaaagaaattaaaacaatgaaataaaagtgtttagaaataatttgactgtttcagaacacacctcaacaaaagcataaccaggag

SEQ ID NO: 258622 - DNA, 1083 bp, Cannabis indica
ggaagcggatgagctccattctaccttggtctgtgctcatcagatcgagaagattgtgaccgtggcaggcatcaagccatctgcatccgggatctttcaccacttgcctcgagacgaagagacgcccaatcacaactatggggggtttggagcttggagccaaacccaccttatgtccggggccatgctccctcttcaagactactttgtcaatttccttgtttttgtcggccttgcgccttatcaattaattccacaagcttaccccctgctctcaagcttgtttattttttacgttgcgagaggctgggcttcacctaggccggccgaaattttatactttcatgaacttgtatctatccccaagaaaggggacaagtttaaagacggttttttcacctttcaggcccatcctttaaatgagggtccggtcccttttaatcatcaaaagaatgtaaaggagtaccaccatcactttttcttttcttctagcttccaagccgtggaccgcccggagcttctcacgaagtgggtcaggattccccctcttctccgcactgctcctacccgtctgtttctccaacatgccaagaccttctccacttacgacaaaaaagacctcaacgtgggagacttagttacgatagaaaactgccgaatggccaaactgatctccgggagccagtcgctggatgacttcaatctctcaaaggttttctgccctaacatccgcaccccggccacagagaaagcgctccgggtggagattatagcctcagtagaggaccaataccagaagtacctctttaggagggaacataaactggcttatatcaaagctcacgttgtgccgggaggacccttcgcttggaagcaggcacagatcggatgccttccaggcctaagtctttggtcctggttcctaatactggggctcccgatgccagcacatccagctccgttaagtctcatttaacggtctatcatgttccttcagtccaagagtattcccggtataggcctgtagggttcgacgaacgtcttctaagtttaggatgcctccactcggtggggggatcatgc

SEQ ID NO: 258623 - DNA, 992 bp, Cannabis indica
ttgtgtgtattgtgatattaatgatttttttttacagattcggatatgttccaccaactgattgcgagttatggtgagactgaggatgttaatgagtctggaggagaggaaagtgctcaagaccttcctctagtccctcgagcctgctcccaaccgaggaagccttgtcctgccgcggtagaaggcgaggagaatgctcaagcctctccttctgtcccaaatattggtggccgcatgaggagaccttccatcgtggttcccataattcgtcccgatgatgccacaattcagatgctagagtctgtgcatgacaacattgacctccttgttcgaaaaactgcaaccgttgaggtggtgcgtgacatgtccaactacgaaggtgatactgtcactagaggagtccaagacatccttcgggtacgtgatggattatttatcaaaatgtattgataatagcctatcttcttatgtgcacgctcatatttatatgatctcatatccttttattgtgctgacaccctttcattctcttattattttttttagggtgtgactcaattcatggtctccaatcttcagtcttcaaatttacaagagaaactagctgccgcagaagcagcccttaaggagcagaagaagctctccgctctttcggacgcaaagcatgagcgtgacaaggatgaacttaaggaaattcttggtaggaggctgacggaactcaataatgcgcagacccggctggaggagagaaagactcaagtgaattattacattgatcagaactttgatcttgcgaagaagaatacggcgctagagaaggcgctagatacagtcactaaagaacatgactcagcggttaaggcttttaaggacaccattcagaaacttgaggaaagggcagcgaaagaccgtcagacctacaagcgcgccttcgacgaccaattttatcagttgtggaaaaataaccaaaaacttaaactttcacacatgcc

SEQ ID NO: 258624 - DNA, 902 bp, Cannabis indica
tcagctccctcaagaaggagcaagtgagcagtgaaactgtaagcatgttgagagagttggaatcaatggctgtggctgttttcgaatcattgctttcattcatctctgggccaaagtcaagcagcagctggtcattggttaccaagatgatgaacaccaaaagagtggctgcagaggatgttaatgaatcgaatgaattcacaagtgctgatgcagcattgaacttgctcatcactgctaagaaggtcaagaaatcagatagcagcctagaagagaatgtacaaaaccatcttcaaaacttggagttgtgcattgaagacctcgaacaaggagttgagagcctttacaggcgtttgatcaaaacaagagtttctctactcaacatcctcaatcactaactcattacaatatcttagatttgtatcataaataggcatacaattgtacatgtttacaagatatacatcgcatactttttgcgaataccaaattattaaatactttctcatatatcttctgtgtttacattacttatttccagccagctattcatcaaaaattacattacttatttctaagttctcacatttgaaacaattcaaattcaaagtttaatatcataattaaaatcaaggctgataatttttaaattctaacttttttagagaacaattaagagtgaagagcttattttaaaacactagcagaatgattaaattggtaaggaaataagcatacctaaatcatcacttcgaagtgaatctttaagaagatatatatttctcaaatgatacccattgagttaaaaattgtagcaaatccggtaatgaacatggaaaatttcaagacttttattgccctaaaattttcttattttgttaaaaatattgactcattatttt

SEQ ID NO: 258625 - DNA, 1768 bp, Cannabis indica
aaaaaaatgagatgcttacctttacatgaccatggagggaggaggagaatggtgtcatgttcatggagtgggcatagcaagctcatgtttgaacggagcgggtgcccagagtcgacaatgagggcaatgctcaagcacacacacacagagccaccaagagaaagagaaagggagggttgggaagtgggcggtggtctttcaaaatggggaagaaataagttgggttgtgctcggatttcataagttaattttgatatgaggaagaaatgagtttcagcgtgaatgaaatttgggattattatatatatacaaaaattaaatcttttttcttcggtggataacagtcgcaaatgttttaacctctgtttccaatcgaagccaaagaaattagagtcttttttctaccaaagtaaaataaaatacaatttttataattttcaccttttttctcagttcctcttttagagtcagagtaacagttgacgttaattggtttcttttagcttcgggttatcctctgaagcataaaatctctacctattttttgcgtcgatcaattattttggacacacacattgaccgatgcaaatcgggctttttgtagtagtgaaagccaagatatgtgcattgatcaagctagcacgctccctactgctgatcttgctaatcaatctactaactttgctgctagaactaaaaaaaccttttgttccctctaactctaataggttatctaactttaatggtcgaggacgcggtcaaggtcaaggaaatcaaaggcgcattgtgtgttactctgcatcaaacctgggtaccctataatcaaatgctactacagggttgatgccaattttgtcgctccaaacaatgctcttaatacatcccaagggtcttcctctgcctccccacatggtaataaccaacaagccttcctagctaactcttgacaacaccctcgacctaatgaaaataactagtatggggacagtggagcattaaaccacataacagacaatatgtcaacaatcttggtaagacacgcctcattgtaggtaatggacattctctccttatatcccatattggtaatttagtgattaagattaatgatgcttccaaacctattaaactaaatagtatttctcatgtgtgcctcatatttctcacaagcttttgagtgttttccaactcacaaaagataacaatgcatatgcaaaattatatgttgactcttgtgttttgaaggacatggattcaaagaaggtgcttcttcaagggaaggttagcaatgggctgtatcaactcataccattagtaagttctgtaagtcacaagtttactggtcttctagctcacgagtcaaccaacaaaagttctagtgttagtccacacttaggggttgtcaagtcttgttttcaagtttctatcgatgaatcaagtttgtggcatcttaggctaggccatccttctctaaatgtactcaaacatattttacttaatgaaaagaagcatttgccttcccatatgcaattttgctctagttgtcaacttggtaaaggcacatcacaaagcatatccttcaacactaaaagaatccaaataaccccttaaattaatacactcgaatattggggaccatcacaacatatctagacatggttaccattattacgttcattttcatagacgattacaactgctacacatggatctttcctccttatcactaatgatgaacgcctatccgctttcaaagcttttcaaactc

SEQ ID NO: 258626 - DNA, 1237 bp, Cannabis indica
tcctattggttaaacacattaatcaattaatatgatttgacaaaacaaacaaagcaattgctacttttctaatttatcattctaataacacagctaataaacttcctaatttagcactaacaacaataacaatcataataataagaaaacaccaacaattaccactttgagatttcaacacacactcaaacaaatgatgatgaataacaaaagaattacattccttctcattcttcaaattaccaaatcaatttcagtatataagctttgtcttagtgtcacacacacacatgtataattataaatacatgacttctcttcaccatgtaaaagcaggtatcacatatgatggataagcaccatatttggaagccagagcttgcacagaagaagagttggcaatctccccaaaacagtttagtccaagttcagttgcgtggattcctcctgtggtgaaaaccgattggattccagcagcattcgcacctttgatgtcgtggtggagtgaatcacctacagctatagaatctgaagcatctacaccagccatggccattgctgattcataaattatctgcaaaagcggtttaaacaatgaccgatacaagcatctaaactaatgtagcaagttccagccaaaaattcatgttaataatcaatggtggtggtgagtatgagtaccttgtcaggcttgcccatccatttcacttcacctccaagctcttcatattttgcagccagagtccctaataaaaccaaaaaaaaaaaacaagtctaaaactgaaagacgcgtttctgggaaacattgtgtaaatttccaatacaaaaatgttcagtgagagttgaaagagaaaccagttgttatgttaccaggcattactctcaaggctctagcttcaacagttacaaaatctggattagccaccaccataggaatctttttagtagcacattgttccaatatactctcaagttcctcaagtttcatgggacacgcaacaccagaaggatggcccaaagcttcggtgccatgagccaagatgaattcagcatccttaaccttgtccacaacttgtaggcctaatccctacaagaaattcctgacatgttaggccattcattacaatttccagtataacagaaactggcgtttattttcatcggtaagctagtcaaaagatgtagttgcagaacaaaatgaagaaagtaacacaagcaaagggatccaattctttgg

SEQ ID NO: 258627 - DNA, 953 bp, Cannabis indica
gtgatatatgatgagtaccgagtgtaggtacggactcacctgattaggtgatgggattttcttggcgacgtactaggtgtaagtacgagcgtcagtgatatatgatgagtactgagtgtagatacgggctcacctgattaggtgatgcgattttcctggcaacatattgggtgtaagtacaagcgtcagtgacatatgataagtaccgcgtgtaggtacgggctcgtctgattagacgatgcgatattttggtgccagattgcggcacgagctcacctgattaggtgatgcaattatatgatatatgggtgcaggtttttggcacaggctcacctcattaggtgatgcagttatgccacatatgggtgtcaggctatggcacgggcttgcctgattaggcgacgcaatacaagattatcaaattaaagcatcgacttgcctgattaggcaacgtgatgttatgaagatggttgcttatgaggtaacatatatattatttatatgattaaatgaatatgaattccattattggtataatggttttgtattaccaaatatctgtatactgatgtttattcgtggcagatgccagtagtgatttggatttcatcttatgaacaatgtgtgatggtttgattcttattgtgtatgaataacaatattcaaataataaactatatgattgttattattacttttcttgctgagtccttgtgactcacgggtgctatgtggtgcaggtaaagacaaagaaaagctagatcaaccatgaggtggcagtcttctccagcaatgtacatattgacctcaccggcctgcgtgccgagttgccaggagtcgttttgggctggctgtatttgctgtgtattttgattttgtgtttaaatagttgttgtatatatttctttagcaaaactttttataacaggaattcccgaaacacgctttttatg

SEQ ID NO: 258628 - DNA, 510 bp, Cannabis indica
tctcgccgcggcgagatggaattttctacttcgatctcttttagtaaaatgggcataactttctcatacaaactccaaatgaactgattcaagatgcgttggaaagataaaaaagagatctaaaacttttatgttttgactttatccaaaatctgaccaaaacatagtcgaattcaggcttaaagtttcagctttattctctttcaaaattttctctattttatagatcactgttttccgaaatttatccaatttatacatcccaagtgtagaaacctgaaatcaaagaaaacaagtataattctattccaaaaataataataaagaagaaaaaaaactataaaatgtgacccgaaacttaggctaaaaataacctaacacttatacacgagtacgtcactctggctacttcctggactgacgaatgacacctacggaccaacacgagtgtttccagcgtgttttttcctcactcacacacttctcaggaaaacttcttaggaggtcacc

SEQ ID NO: 258629 - DNA, 586 bp, Cannabis indica
ctatctgttttagcatccgaaataattttttaatcaaattttttctcatggtcatgtacgttattgttatttaagacatcctgcaaaattttaaaaaatttagaaaagttttaacacgccaaaaactatgttcaaacagtgtattgcacgcgtaactattttattttatacgcgtgtaaaatagattgtttggacattattttctatattgtaaattattccgaatttttcaaaattttgtagaatatctaaaatagctataacgtacatgaaaaaaaaaaaaaaaaattagactaaaaatttttttagataccgaaacaagtagatggtacatcagtacatcccttataagggggtgaattgtagaatcacccgatagtatatactacattctcctagaattataattaaagaaaagtaaacaatatcacctcaattgtttttccaatttgctaaacatatacacataacctctttaagacagcttttgttggcgaagtctcttcagaatcattattaataattgtactgaaaataaaagaaacccccacaatttctttctagcataaacaattttttttttttt

SEQ ID NO: 258630 - DNA, 536 bp, Cannabis indica
atccttttaagggggaatagttgtaatgaccgcttagttgaatttggaaattagcagttaactatgtttaattatgaaaattatttatagatatttaaataattatttatgccgttattattgaattctgaaatgcattttatgtcatatagtaaatttcataattttgcatttctggtgcctggtaacatggaactcggtgtttggctcagtaaaatcacaacttactatgttagaattgtgagacggttattttagactttgggaatgtcgggatttgtcgggtatttagaatttcccaaaattaccctttagtgccctttatgttattttagtatggaagggcgagttggtcattttgccccattgttattttgtcctttagtgatcttttaattgggaattatatgaattattttatatatgtgttggctgaaataaaggtttgttattcgcattttactctcattttattcaaagttagaaaacttagaaaaaattagaaaattcaagagctcttttcctctctctctctc

SEQ ID NO: 258631 - DNA, 650 bp, Cannabis indica
caaaaaaaaaaaagagatcaggacaatgatttttcacaagtagggagagccttcggaatgcacgtgtactccccaaaccacgtgcattccaactaataagtctcatttttctgggcgggtgtgcatagcatcacccgcctgttccatatcagttgaagcagatgaagaaccatcctccctatctccagcacgagctctcttcaattgagacctaacagagctgccaacaaccacttgctgtggaaggaaagagggccttttgacacccgaagctgaagccagccctttcccacgaaccaaagggtccggctgtccaacagcagcagtatctccaacagcagcagcaggtccactcgaagcaggcatcatctcagtaggaaccatagtgctcaaagcaccagagaccacctccataggaccaacagtagtggcaaccaccaaagagtcagtggagtaggaggtgaaagcagagggacgcaacacaaggccagcagaaaaagcattatcaaagttaggattaagaggtgtaggaatcataaccgaagagctagtataaggactaagaaaatgaggtccagaactgccattaccagctagaaaggaaggaaaactaatgatattatccaaaaagtttcgagtgggatgatgaa

SEQ ID NO: 258632 - DNA, 759 bp, Cannabis indica
cggagtcactcggggctcctgcacaaatttcaccgcaccctcgtctctcaaagccttttcaacaatttcagcatatgtggttgcttcggtagtagtgatcaccaaatcgtgcctaatctttgcactcaaaccggccaaacatttctctttcttgtaaagtcagttggcacgattcccgcagcgagcttggccagactgtcaaacttagtagtatactccgtaaccgacatcccctcggtttgtaccaactcaataaactctttccgcttagcactgcgaatagcttcgttgtaatatttagagttaaacaactccttgaattcttcccaggtcatcactgtgacgtcccgagtgagggttatcaactcccaccacacgagagcgtcctcctgaaactggaaagtggcacaggtcacccgatcattaccaaccactcccataaaataaggatgcgttcgaccactgtgagccactgctcagccttcattacatttggacctcccaaaaacactagaggtgcctgctttcgaaacctttcgtataacggctccatacggttgccaacaacaggttgtcctgctggcaccactggaactgcaacggcctgagcaacttgttgagaagtctcagcaggaggaccctgctgcctcaacctctgaatctcttcatcttgttggcgaatccgatcttgcatttctgcaaatatctgctcccaatccggaggagcttgtggtggatttacagggcgaccaccctgag

SEQ ID NO: 258633 - DNA, 695 bp, Cannabis indica
aagattgtccattctgaaaagctacaatcagaatcgatctggtgatgcagggttaatttctgatggtgataacagtgagggatatgacagtgctggagttcttgttgtctcagactcaaattcaagaactggatgggtgatggactcaggatgttcatttcatgtatgtcctgataaatcacaattcagtgaatatcaagcattggaaggtgggactgtaagattgggagacaacagatcatgtcccatcactggaatgggaaaaataaaattacagcttcatggtggaggtgttgcagagttgaaacaagtaagacatgttcctgaactaaagagaaatctaatttctgtggctatgttagatcaagaagggtatactgttcgaatagaaagtggaacaatgagagtgattatgggatcaagaatggtgatgaaaggaatcaaagaccatgggatctacatactacaaggaaataccatgattagtgaagtaaatgttgcagcctgtgatgccaagaaaaacacagaaatctggcataagagactggggcatattagcaatggaggtcttaaaattcttgaaaagaagggtgtttttggtaagaacaagctacaagatctagatttctgtgatcaatgtgtgttggggaagtcaaccaaagtcaagtttggtacagggaagcacacatccaatg

SEQ ID NO: 258634 - DNA, 2021 bp, Cannabis indica
aaggcaatcaagaaaactatccctagccaatcttagtacaaacatttatcaaaacacacatacttcttcataaattaaaattacatagaaacctttgcccgaaaaccattgacacttattacaaagtccttaccttttcgtcatccacactctccaccattgcaaggtttggcacaccatctgcataaaattagattaactaaagattagtatttaacattcttttttcgtcaatgatgaagtatttttgctaattcttcttacttagaagcaatttgactttattgctctgcaaatttccaataaagtgccattcaatatcgtccggaagctgcaatttatccaaacaaattaacttatgtacatgtataattcatatgtgtatctttaagatgccaattcaaacttattttcctgttaaaaaatttaaacctgaggagctttttcgacaatttcttggacgtaattctcgccaaagcaacggtgaccagtgtcgtaaacctgacggaggagagagacgggcttggtcttgctcacggccacgacacggatcgattggggccctcggccggacctttctgcggcctgctggacgcgttgcagcacagaacgaagatttgcagctgcgacggcatccacggatgcggaagtggccatttctgactctgtacccctctttctttcttccttctctctcttctctgcctccaaattgttcggtttggtaatgggaatctaatacggtgcgttttggttctgattacaatatatgagagtgacaagtgtcaagtggtttgccaagcatcaagtaatacggtgcgttttaagcgtattttaagattttcttttttttgagtaaataccattttatattctatgttttgcaaaaattaacaattggacattttattttgttaaataataaaatagatcttatattttctaaaatgataaaaataagaccataagctcaattttcaataattttattttttaatataattatttttaagacaatttctaatatacaaaaaaaatgtaactagttttgtcataacatctttatatcgaattattattaagttttattttgacaaaaaatcaattcagagtctattttgtcatttaacaaaataaatgattaaattgataatttttacaaaacacaaggttcaaaatagtgttaaactttttttaattttttgtaacaatttttttcttattagtttttaattttggtggataaatttaaccatactaaagtagcaattatcaaaattctatcaggtttattatgatttgaataagagcattgctattaagcatcagtggtgcctagcaccttctcgacatatcacgttgtgattggctagcgatactccctaaaagctattatattaaattatatgggacacgatacttagttggacgaatagcgatattaacacatcggagggtgttaggcactactagtgccctttagcatttctcttcagataagtgtaatattttttttacattaaaagaagaaggattcgaaatcgagaccttcacactctttgttaggaaaaatgtgaaacactaggctaatataagttacaaattactcactttattcatgtatttatttataagtccctacaaatatttttttatttatttgaaggaaagaaagtcattttcttgaattcttttgtgaaaataaaaaataaaaaatttattgttgactagctaagaaataaattttgttgttttttgttaaaaattattaggtgggattgaatgaactacctattaaatggggttctgtacttatcgctcctcaatggtaactaactatatacttcctgtcttgcctttgttttttgcctgtttaatattgttagaatttgataaataagatgaacgaggttccattccaaaactaattggtaatgggaggagtagcccattcatcttatatatcacaatttattttcacacattagcaatgtgggactaactctaatacactctcctca

SEQ ID NO: 258635 - DNA, 670 bp, Cannabis indica
aagagaccactttggaagccaaatcctgaataaaaaattataaaaaagggttaggaatctggatactccaccaacagccacgtctcccccttcttcgtctccggcgacgacctccgctgttggttcggctccgtcaccgccagcaacgcgatcgacctcggcactggtgatgaaacccaccccaacgacaccaccagcgggtcttcctcctccgacgctagcactaacagcgggtcttccttcttctccggcgatgtcttcagcggcgttttcttctttggcccatcgtcttcttctccgttggaggtgatctccgcaacgtatctctcaggcgacgccacagaaaatccggctatggaggatcccgacccacatgctgcgacggcggcggtggcagtggatttcaccgaaaatgggtctcacggtagagcagtcggagtcttctgggttacttccgccatgaataatttccagacatacccacaagattgtgtgtgcaagtggtaaaagtgtaataaaataaacttaaagtgtataaaagttgcttttaccgtgttgtagtatatatgtaataaagttagccttttgtatttttagtgtaaaaatttctttaattaatagaaaataaaataaatacatatataaaatattttatattattggtatgttt

SEQ ID NO: 258636 - DNA, 933 bp, Cannabis indica
gtagcgtttataaaatatagaaacacaaggcatttgttcactttgactcaggctgatgttgatggtagtccatcagtggcaacaagtcaattgtctataaacggttgttcttattcaatattatttgattcgggagctactcattcttatgtatcaagtagagtaatagagagtttcataaaccgtttgatgtgtatgctttagggtttggaaccttgttaccctccggagacctaattgtatctacaattatttgattttgatataatcttgggaatggatttcttgtccaagtaccgagcaaagattgattgcaagtggaagatggtagtgtttgaacctgatggtgccaacccagcggtgtttgtgggtaaggtacaaggatcacacatacccaaaattacaatcttgaaagctagagaacttatgcgcagaggttgcataggattcttagttacaacagtggatactagtcagcctatttcaactagacctgaaaatacgagattggtgtgtgaatttctagatgtatttccaaaagatctattggattaccaccttctcgagagatttaatttgttataaaattggttccaggagcgaaaccaatattaaaagcaccttatcaaatggctcaagtggagtaaagggaattaaagattcaacttcaagaattacttaagtacttgggattcaccataccgagtttttctctatggggagctccagtgttatttgtgaaaaagaaagatgggtcgcttcgcatgtgtagcgattacaaggaattttataagttcactattaagaagaaatatcctctatctcaaattgatgacctatttgaccagttgaagggtaagacagtcttttctaagattgaccttcgttttgattaccatcagttaagaattcgagaagaggatatcccgaaga

SEQ ID NO: 258637 - DNA, 1150 bp, Cannabis indica
ggtttgatgattttgtaaccaaatagtgttcaaaagaagtgcctatgacagctgtgtctatgtgagaaaggcaaaaggtttagtgttcttgctactatatgttgatgatatgctaatagctagcaaagataagagtgaaatagacaagatcaagaagctattaagtagagaatttgacatgaaggatttaggggctgcaaagaaaattctggggatcgagattgatagaaacagagaacaaagatgcctaaagctatcccagcatagctatattgaaaagattctaaggaaattcaatttccgggattgcaaaccagtaagcacccctattggcctacagtttagactaaatagctcccaatctccttgtactgatgaagatacaaaatacatggaaaatataccatattcaaatgtggtaggcagcataatgtatctaatggtatgctgcaggcctgatctcagtcatgttgtaagtgctgtcagcaggttcatgggaaacccaggcactgaacattggagtgttgtgaagtggttactaagatacttaaggggaacaatggatataggcttgatctatggtccaaacacatctaatactcaaatagaagggtttgtagactcagattatgcaggagatttagactcaagaaagtcacaaaccggttttgtgttcagaatgaataacagcacaatcagttggaaggctaacctacaaactgtagtagctctatcaacaaccgaagcagaatacattgcttgcactgaagctgtcaaagaagcactctggctcaagggaatcaccagggagcttggtgttgaccaaagcactgttgtcattcactgtgacagtcagagtgcactccatttaagcaagaatcaggtcttccatgagaggaccaaacacatagatgtgagataccatttcattcgagacacaatagctgaaggaaagatcaagctccagaagatttcaacacatgaaaatccctctgatatgcttaccaaaccacttcccacagcaaaattaaagcattgtttagacttactacaaatttcagcctagcaagctggtttttgttttctgttacttataagtctgtaaaattttgtttaagagtgtgtaatcttttgattctgtacattaggt

SEQ ID NO: 258638 - DNA, 707 bp, Cannabis indica
ccgtttaaatattttattttattaccaaaaacctcaccattttcggaactaggttagagttgtaataacttagattaaataagtattttctccgatctcacataattcccatgggttcgatctcgttcttcataatctccatactacaataaagactcgtgcgcttgcgagttaataaatataaaatgtaccacttttggtacacaacaatgcacgactagttgatgcacgaccaacagacgaattgccaacctgctgacaaatgtccaactgaggtacaatcaggtgataggcacgaccaactaacaaacaaccaggtgaaggaggattaactaatggtcaactagctgagggacaaccagttgagggacgaccagctgagggatgaccaactgacaaagggccagccaagggataactagctgagggatgatcagctgacagagggctagctgagggacaatcaacttagggataaccaactgacggagggccaactgagggacgaccagctgacggacaactagctgatagagggccagttgagtgatgaccagttgaggaacgactagctgagggacaatcagcttagggatgaccaactgacagagggatagatgagggatgactagcggacggacgactagttgacggaggatcagctgagtgacgaccagcaaaggaacgactgttggaaattattttac

SEQ ID NO: 258639 - DNA, 686 bp, Cannabis indica
tgctgagttggaaagagaggttgtagcagctaggacgactcaaggaactaatactcaaaattaccctgatccttgggtgagaagaccatgaggcagacctcaaggttcaagagccaggagacaggaagcaaatcaaagaaatccccaaaacaccgaggaagaacaaccttggggtactagggatgttccagtggatgaatagaaaaataatcaagaggaacgtcaagacgttcctcagactgcccaagcatttatgaaccaacggaatgaacctaatgaagtaccagaggcttctcgtaggaatgaggatacgagtaagccccgacctagggattcagaaatccctcgtggtaacgagagaaatcgtaggactacctaagataagtgtgctgccaccgagacaccctcagcgtccctctcaatcagaaagggaaggtggatacacatacctaaatagaggacgtgtatctatcctctttcaaaggagaagactagcacaagatgaagcaagttctagttcgagacactcaaggtctcaaggcacagtcgatcaggtaggaaaacgcaagaaggatgtagacctcaatgttatgccgatcaagagagcatgagcaatacaagaagctaccaatctgagagttactcagaaacaagatctgtgaataattatgagcgaagacaacctg

SEQ ID NO: 258640 - DNA, 705 bp, Cannabis indica
aatatattttggtcaattcttcttactgtgtttcaaatcattaccacttgattttgaactatttatacatcttataaatgaataaatcaagtctccaacaataatattttcaataactatcattcataaacaattagtaacatcttttactaatttaagagtgaaaaagagttgagagttatatatttaagtaatcattaatttaaggatctgcaactcttgttttgtgattattctacacacattttgtaactccataatgtatgttacaatttgacaaattaatattttgtcacacttaattatttaatttaaatattatattatataacagtattttcaattggatcctatttttttaaattaaaatggtagtaatgttaattaatttcctcaaacactttagtttcatattctcttcaaatttactctctccaactctactctctctaactcaaactcacataacaaacatcccaaaccaaacaccacttaaggtgtcactagaatatcaatgacattccaatactataaaatgaaaccaaacaaaaaattggaataatttttttttttttcatttctattctattttactacctcaaaccaaacaccacttaaggtgtaaaaaatcttcacatcacccaaggccgacccaagcattttggggacctcgtgcaaaattttaaaattgggctctttaaaaaa

SEQ ID NO: 258641 - DNA, 693 bp, Cannabis indica
ttatgcacaatgaataaaaaaaaattacccttaaatcattatcctaacctaaatagattcttataaactattaaatcagattaacaattaataatatagaatgaacaaattttaaattgcaatttcatagtgtgatggccccaaatttgagttatcaaataatttagattctagattttaaattctcactttttaaatttctatttcttcaaataaactaaatataataaaataagaagattaagaaataaaaaaatttgaaacacaataacaagaaaaagaatttatccctaaattattaaccctagtctaaatagattattacaaataattaagtgagattaaaatatatataatatataatatacatacttgtttgtaatttttcaattgtaacttcaatctccaattttatattgaagtaattgtaaaatttaacttttttactttggaaaagatctctgcgtgcagcgtgttccctccgtttctctgcaagtgcaacaagccaaattacctttttaattattcaacactttccacaaaaaaagcattttcatttattattttatttcattttataaataaagtaaatatttttaattgggcttttgtttgggctggcccatttagttattacaaattaaaatatgtgggggcttattttttttattgaatgggtatgggggcttttat

SEQ ID NO: 258642 - DNA, 674 bp, Cannabis indica
gtccatcatcacctgacaaacctattatctcaaccataacggctttcccttttccgagcacgagagaaggcggccgagcaggcgaactgggctccctaatacgagttgcatgttcaataggcctgggctgggcaggaagtttcttcctccttttgagcggagtcacctgctcttcctcagcctcatcttaaggattcaagggctcctgagcatattgcctggcccttgcacctcctttcaacttagcctcacgcttcagttgaatcagctcatcctccggatgagctctctcggcccgtctagcatcagatttcctcttcctccccttcactggcttaggaatgaaacccttcggatagagcccgtacttcacaaagttgtcctcggaggtcaactggatgatattccggtcatcccccggcagctgagcaagctcttgagctttatccctaagagtaagagtgaggggaggatggtgatatgttagaatttgctgaaccgagtatgggtgatgcccgcgccatccaccattaagtactcatcaataaaacgcccaattttgctgatggccaaatctccggtgcccgtcaaccacttgaagtcttgttgagagaaatagaagtaccccaacgtgccttgcttaggggtggacttcaaatcaaagaaccagctaa

SEQ ID NO: 258643 - DNA, 532 bp, Cannabis indica
atccattatatgagtgaaattgtgaagagaaagatccatggtgtaatcacaatagctctgatgatcatagttggaagcctgagtacaactataatccattatatgagtgggattgtatcattttctatttattctaatttttagtggtaatttacctccctgtggatacgacatatagcccgtttactaccgcgaccgcagcgcaactaattgggcgacatcacacggtgaaagaggtgttggtacaacaagggctcctaaaggcactgcaaggaaagaagactgagagtatgagtgaagaagattgggaggagttgcaggcaaaagcagtaagcactattcgttaaagtttggctcctgaattaatgtattgtgtattgaatgaaacatgtttgtctgagttaaagaaaaagttagaaaagttttatatgtcaaaatccctaacaaatagattatatttgaagaaacaattatatgagttaaaaatggttgaaggagaagatgttagaaatcatataaatagatttaataa

SEQ ID NO: 258644 - DNA, 535 bp, Cannabis indica
attcagatctaccattcggaggaaaagtagttgtttttggcggagattttaaacaagttttaccagtagttcgtaaaggcacaagagaagaacaagttcaatcaagtttggtatattcatatttgtggtctacattaacaaaattccgattaatagaaaacatgcgagaaagattagatccagcattctcaaattatatattagaagttgggaacggaatacctccaaacacaattaatgaaacaataaaaataccacaccaaatgcccattccatacgttgaagaaaaaatttcagttcatttgataaaagatgtcttcaacaatcttactgatttttgtaacaatatttcaactatgatgaatcgagcaatattaacaccgaaaaatgattttgtggatgaaataaatatattgttaattaatagattccctagtaaactacaacggtattacagttatgaagaaaccatagatgtatctgaacaaccaataatggaagacttcttacataaattaactcctaatggactccc

SEQ ID NO: 258645 - DNA, 509 bp, Cannabis indica
ttacactacatgatatgtaatcaaatcccacgattttagggatacttgatgtaaacatattccggtcaactttgtaattactagtccactatgtaattataaatagtgaaaaacaagagcaaaaaagggacgaaaaaactcatacatgagagttcctaaaagaaaaatcagaaatctaaataacattgactcgtggactatgcagaattttaactgtaaaaccacgtaaaaaaaccatgtgttcatatattatttttctatagcttttattttttctgtgtgaaatcaatatcgtgaggttcaattttagttaacgaaaatctgcgttaacaggtaagtttatcatatctgatccaagttcaatatcggtcccttttgatgcatactccatacatccaacccaatcttactttaattaatgcccttgaaacgacatagcacttatctaaggtgcaagtaaactacattgtagattatcatatcagttaaattatgtgtactgataaatc

SEQ ID NO: 258646 - DNA, 461 bp, Cannabis indica
acaaggaccagtaccgaacacgcaccgagacacttggaccctaacctgtacacgatcgtgtacccagaccgggaccgagacccggacccagacctagacctaggacccgatcctagacccagactcagacctagatagggatctggatacgaacctagactcaaacttagacccagaccaagacccagacctggatcggaactcgggacctaaatccagactgcgaccgtgactcagatccagacgtggacccgcacttgggacacgaactcggacctggacccaaacccagacccaaactgggaccaggacttagacctcgacctagactaagacccaaacccgaacccatacactaaatcgaaatcgaaactaggactaggacccaaacccgaacatggacccagaccaagacctaggactcagacattgacttgtgccttggaaccccgacctagatc

SEQ ID NO: 258647 - DNA, 1401 bp, Cannabis indica
tctgccaccttactcctagcctatacacacatatattacttaatttcttatgatgaatatatataggtaattagttaattgattattaaaaggggatgaaactcatcttactttaatggcacgacgataggtggtagagaaaagtggaaaaggtatggtaaaaaagccttcaattagcagaagatactcttttcttagactctcagtccactctcctggatcaaagctcattagttgcttcaccgctagctcaaatgttatcttcacaataacccaacaacaacaacaataaagattaaataataaataatataattaattctgattataaatatataatattttgttaacaaaatctctcaacattgagaatgattgtctttattatgtcgtaacttcttagcttatgcatgtgtacataccacccactcggcgccgtggaatctgactcattaccaattttcaattacaactcacctcaactcggacgattcaaaaccgagtcaaccagaaatagtaatcagattcatatatattatatttatatatttatatatatatatataccttcttggcttcctccattagaaagatacggtcggtccaggaatccatattgaggcggatcaaacggtcaatatcgtccaaaagatggtctctgatgatggtagagttagcaaagctcatagtgagagaatgcattcttttatggaggctccctttcatcaaaagcagagagtgtttaccaagcaagttcgatatggagctcgggtagctacactcgaaaagcttcccttcgttctgtaaaatgaaccggttcgtttccagttccgccgagaaaaccgtcggttcaccgaacacgtgggtagtgaatatcgacccaaacttgttgaccctctcatcgataaagggctccgggttctccgtcttatacgccgagatcagttgaagggtttctccgattaagggtaaaccaaggttccccggcggcaaccggagccgccggtgcctggatgaccggaggaacagaaggaagaaaaaggcggtgatgattgataaacagaggaggagaaaaacaggggattccatgttgagtctctttttcttcttatttgtacattttcttttttttttttttttttttggtgtaaagagggggtacaaaagagagccaaaaagcagactacaaagagagcaaaaaacctgctgaggctataggggagaaacccagaagaaaacgataaaaagaaacattttttctatttgattctatctaacaaatagttctttttggggcttcagtttcgatttacacggaacaaaccatttttttattttgtcaaaaacaaaagcttaacagacgttaacgtgggtcgttaaattagactaatttgattaatt

SEQ ID NO: 258648 - DNA, 643 bp, Cannabis indica
ccagtgatgctaggctcttcaagaaactggatcgggaccaggttcaccttgtcacttatattgctgctcgccaaacaggctagagcatctgcagttgtattttcctctcttggaatctgcttgaggctatagcttatgaattgtgcgagcagatcatgtattttgctcagatatgctatcattttttctccccgagcctcgtattcgccacatacatgattaaccactagctgtgagtcacttcaaatctcgatgtgctcagctttcatttccttcgctagtttgagtccagcgattagggcttcgtactcggcctcattgttggaggctttgaatccgaatttgaccgctgcgagcaggttttgcccccaagtatgacaagggcaattcctgcaccggatagctgatctgtggccgatccatccacatgaagcttccaggtcggcttgttttcagtgctgttcggctgtggtgttggctcgggattgccttctgagatgctttcagtttttcctatgcattccaccacaaagtcggccaaggcttggcctttgatagctgttcggggttggaagttgatttcgtactgccccaattccaccgcccactagagtaatcgcccagaggcatcttgcttttgcag

SEQ ID NO: 258649 - DNA, 532 bp, Cannabis indica
ggtttaggagcctgtaattcgccgagcagtcgttccactcaggttgaccggcacacctgaatttggaatcgaggtaagattagtataacagtatgcatatgtatttacatgtttagcgtgcatgttaggaagcctgctagattacattagatatgtatgttggcttcgtaccatccaacagtatcacatcggtacggctagagtatgactagcgtaccgagtataggctgatattatggtcgatagtactgtacttttgaccgtatcacatcaataaggctagagtatgacttgcagctagagtatgactagcgtatcgagtacaggctgatactgtaacacatcggtaaggctaaagtatgactagcgtactgagtacaggctgttactatgtcaaaagtaccgttgtacgaacgttcgagactcagtaccgtgtgggacacggggattagggttgcggtcaggggtatggacgtctgatcataacccgagacatatgtatgttttatgatttatacttttcttactgagt

SEQ ID NO: 258650 - DNA, 645 bp, Cannabis indica
ttttcagaaacttttagttggctcaggcttaaaaattttatgaggggttaagaccaaatccaccatgcctagtttatagtgtgaatttttcacctaaaaactcgagaccaggctcccgtaaaaatgacacatggattcactctcctcgaggagtgctgagctgtcaaaaggagattacttgagtataagcctcgcctgaaccagagtcagcgagatgatgtgaccctcacagcgtctagtcgcattattatgcctcgcacgatgcaagactgaaggccgagtttaagactcgcatataccaagatatatgtgatgtccaaaaaggttttcctgtgagttagtaaagatcgattctttactcagagagttagtccagatgacctaacgcgctcgataacccaataaggactcgcatgtcctaagttatcaactttctgcaagatatctgtatacgcgactcaaataagaagcagatatcttaaacacataagactcgaatagtcttggacgcatcttaaactcgcaagcttatatgagactatgaacagacaactcgcaccactaaggtcgcatacgttgttgtagttagtaaattgggtcgaaactattcttcatttatgatatttaagtttttattgatttaat

SEQ ID NO: 258651 - DNA, 754 bp, Cannabis indica
ttgcattacaatttcaacaacaatccacgatccctgcttcctgggataaaaaccttcgtgtgatgcaaccttcggtcaaccacccaacaaccttcatctaatgcaacattcagtcaaccacccagcaacattcgtctgatgcaaccttcgaccaaccacccagcaaccttcatcaaattaaaacctttgtctgatgcaaccttcagccaaccaccatgcaaccatcgtctgattgtgtaagtgatagtgtaagaggtattttggtaattaaaaacacataaaaagtataaatgttgtccacacattatggaggtatttttataaataaagtgtcaatttatattttttatgtaataattcaaataattcaatttaattaacagtaatttatctaaatattcatatgcataactaaacatactgttataccaaaattcggctggcaattcagagtaggacatgtgtcaacttgggagaatatgaatcaacaaatataatagtaattatcttaaaagatgttaaaatagaataactcattagatactgaactggtagagtatatctgcaacttgttgactgaaaagtcttgagcgagacatagatgtacaaactattaagtcacgtattgacgagaaaactgttaacgcagatttttgttaactatattaaagcctaaatcgtgatagatttgcacagaaaataaaagcagtaaaagaaaaaaaataagaatgcaaagctttttttacgtggtttt

SEQ ID NO: 258652 - DNA, 507 bp, Cannabis indica
gatagtactatactacttgacaatatcacataagtacgactagagtacaactagcgtatcgagtataggctgatattatggtcaatagtactgtcgtatgaacgttctagattcagcatcgtgttggacacggggatagggttatggttgggtgtatgggcacctgattataatccgggttattgctatgttattgcttatgcttttcttactgagtctgtcgactaacatctattatttgcatgtgtaggtaagggcaaggttaaggttgagcagccatgagaccgagcggatggaggttgtacatgtcggggcagttaagcctggagtgtacggtctttgggaatcagggcttattttgtatagtcactaggtgacaaacttttgtataagcacagtgaaaacttttgtaaatatttctgtaaacgggatcccagttttatataagtaagttatttcaatgtttataattacttaagaaaatcttttaattaatcacgattttca

SEQ ID NO: 258653 - DNA, 4158 bp, Cannabis indica
gaagggaaacaacattaattgatgatgaatttgctcccaatattaaatgttaaataacaattagaaagaagaaaaaataagcaatggctttcaacttaatactaatattagctagttgatcgatcaactgaaaagagcagcgtacatgagctcattccaagtgtctggcaatccgggaaggcaccagtggctacaatcttggccactgtggtcgccgctatacccggagggatgcccgtctttacggtactgtgacagagttgtcacgtctaaatagaacaccggcttcttcaacctactcatcactttgttcaccaccacagaagccgatggtattccacctggatatcttactccaaagtaaggaagtttctctcctgaacatgattttgatggttggttccaatccctccccctgatatcatttcaaactattatatatgtactatgtacgtacgtataaacaataatgttggtgattattaattacgttttacgatttaacttactcgtaatgtgttggagagatcccttgaaagaagactttggttttgtaaggatcaacgttgaagttgacccatctagcccaagtagttagtcctttgtaaaacgcaactagacggttcatgtctttgtacaatttgttcccgtcttggatgtaatcccatctgatcgatgagagtgcattagttttttaatatatactaaaaacattgcaattaatcataaataaattaatatagtagtaagtcatacggttgagttcttcctgtgtgggtccaccagtgccaggtgttgaagatcaacatgtccattcccctccatccattcccattcttgatcgaatcaagcttcaacacccgtcccactctctcgctcccaagatctacaaggaatggcgtgcgatacagcagtatcttcactccgtactcctgccaatgtaataaacaatattctttaaatctttatttattttcttctctaaaaaaaactatatttatgttcaaataagtttgaacaataataataataatgagatgagatattactattttgaccctttgtccaaagagcatttctcaaagcagtatttatttaacaaacacaaagaagagttttgagattttccagaaaaaaacacacacacacacagaagagactacaaattacaattacaaatatctaaagggatgttaattatttattttattttatttattttattttatttttttcctctgattaaaatttgaaacatgttatttgttacccatttgtaatatttgtaagtcgtgatgtgacgtggtccaatattttaacgagaaaagtcgtgtgtactcaagttagatatcaattatggaattagtaataactagcacaagtggtccatactccatagatgtagactcattttacacaacaaacaaaatttcaccctcagtaacaggcacaccaaacaccacagacaaagtacataaaaaaattatgtggtttcacacctttcatcgatggatttgtttattgtatacgtaaccatggaactaatacacagggggtaggtaccgtagcagtttctacatctgtcgatactattgaatcgaattaagctaagcagatctctcgcacatgtaaaacatatatgggtggtacgtaagtatgagtggactaaaaggaaaaagtttatatattggaacatagaagatgtaaatagatattattatttaaaaattataatgatatattcatgtaagaaagtaaaggaagagtctttatttatcctagcgtgaaaacatttattactaaatagaaaggaccatcaagaaaattgaataaccataaagtgaaagtaagagatacacaaaaggcagaacagcaccactaatcacggctggctccactctcacaaaatttaaagcaataataagttggacctcaccagttcagacaagagaggatattacttctacagttctactactctgtctatcaaaacacattgccccattcaattaaaattggacctaaaagaaagtgcaaagtcaaagaaatttaaccatatattgataaactcaacagccttatactatattccatactttcgactttgtttgtacaaactccaaaaaaaaattaaatttttaaagaacaataactttacctcgtgtaaaaggggtttaaagagacagctaaagtagagaggaaatattcacgcactaaaaccagccagcaatgattgtagacaatttacactctcaaagaaaataataataataataataataataataataaattgaaggaaggaaggaaggaatagagtgaaaaagcgataatttaatttaagagtagctttttcttacctcaaatgtgactgatgagagtccttgagttctgatcactgtggttctggaatttggtacccatgcatgaatcatacaagttaatgattcccactggttctgactcaatgaatcacccacaaacatgatctttttccctctccatttttccaagaaatacaacccattaaacctggaaaatataaaatagaataatgaagaacaaactattgacttatagtagtagtatatacatacatacccatttgccaagtttgatcccaaaatcaaggaaaagaggcgaaaatggtacctgggcaagacgcaagagaaaggttgccatctgtatttgaggtaagacttatcgggtcggccgtacttttggcagttgaactctggatctacaaaaggacatgttgaagcgtcgtagagaggatacgacttgtcgtatacccaggaaccacggtaccagttgcattttccagccagttttctgcctactgagctagtagtattagtagtagaagaagaagaagaagcattattgaaagcaatgaaatcctctgctatggtttggtgagagaacaaaaacagagtcagaaagagaagcagaggtttcaatgggaaacccattctcttgggtttcgagtttccacccaatacaatataaaatttcttttcttttgagtccgaggcaagtgaagagaaaaagttactctccaactattcttatataatggcatgagagagaagtgagagagattgacaaagatcaaacctctctctctacaagaggagcttatttctcacatggaatgtgggagaaatacttattaactttaaaaataaaaaatacaaaatgaaaagaaaaattcaaaataaatttagcagtggaatgttgtgggtttgaaaatttgttggagtcattatgatgtggattctaaaaagagaaatgatatatggccatacttgtagtctatgtatgtataatctttttctttcactttttttatctcccaagaaagaaacaaatacgaggacttttttttaaggtaaattctcttttttggtgggtgatacttttttttttctattggtattcaagaactttaattaggcatacatactatatagactgagaatttctaaaattaatcactggtgggcagcataactataaagtgataaaatacaattagtttaatttaatatcaaatttgatatattttgatttaataaacgtcaagtcgtagagcctactgatatctaataacaataatagtagtgtgtcccaaattttcatatgtatttttattgaacacaaaacagaacacagcattttagtttaattaatgtccatatagctttgtgggtttattatacaaagcttcattactatatctcattattcctcacctatctcagttctgtacaaatttaagtcactatgcattgataggcagttctctttaattaaatattaaactgtttctttttttttttttaaattaatatatatacagctctgataaacttcccttctatggccatgtatgccaatataaaatatagttaaataattagttcaaattttgtataggtgtttttgcgtattttccaaccctttcaatctccatacattaatttccttcattattcaatacctacagttgagtccaaattcaagtaccgtacatatattttaactttttttaaattacatctaaagttctaccattttagtatgtctctacacttactgttaatataatacacacactaataataataattaacctaattaaatcaagtttatgta

SEQ ID NO: 258654 - DNA, 1081 bp, Cannabis indica
acacgtggagtccacttggagcatctgctcggaacgatagaccgaacaggatgcctcgctggcacatccagaatgagatattcagcgagccgtgcagggcaatcaacacttagcaaatttaactttcgcatcatgagtcatcagctcaatccctacaactcaaggatcaacttacgtggatatggcatacacacgatcccactatcagtgtactcaacctcaatcccacgatccttgcattcagcattgatcacacgatctttctgtttatgcgcattgtaacgagagaggaaactcttcctccttaagtttcccagccctataaatagtgaggaatgttcactgggcaaggggaccgaaaaattataagtcgatacgcagctaagccaagactagactattatctaagaagtatatatttaaagatactgttgtaagagctataagaaaaggaatcttcttccttgttcttaagtcaatacaaataacgaggattaggctattaccgaactgctcggggctgaacctctataaaattcctgtgtcttattattgctttattatatatattcattacgacatatcatttatcgcttatcaaaaagactcattgtcgttggctaaaagcgaagtcaacatgtggaataaaaaatgataaaataatagcaaaaaagggacttagtggccaaccatgaagtgggcccaacactagttacatttttactatttttcttaagtatttatctattatttcacaaatgtcatattttccaattttacagaaagctaagtgtataaaatacattaaggggtggaacggtacatttgtccctacttgatgtaaatcatctatagaggatctttgattatttggattagaacgatggataattcatagcgtatctatatcttggaacatatagagcattctatataattaagagtgtaattgtgaatctatagtggcgtaaggagaaattaataagttagagaatttacttggtaaattctagatctacttattggaaacttgattatataggctcatggtccccatactagttgagataatgctgcttgt

SEQ ID NO: 258655 - DNA, 833 bp, Cannabis indica
aattctcatcggtagccatggtaaaaacacaacgttttaaaatgattgaaaatagttgctgcagaaaataaaaaaaaagaataaatttatcgaattaaaatctgggctgagtcgtggactaggtcgctctctttaagacatttgtggtattgcccagaactgtacaagcaaactatcagccttgtcgtccccaagctaaaatagcctagtcgaacacactgtatcggagctctattgcatgatagagaaccgtcaaaataccactcttaaaaactgtactactgctcagaatatatatgtaatataatcatatgtatatgtcttatatgttttttagtgagaaaaagaaatgtgtttctcctgttagttttgatgcattatatagacaatgcacaaaaggtagtaacgagaaaaaagacgttattgaagggaacgttagaacgtgggatagtgtggaatcgtggaaacaatgctaaaaatcaagaagtttgtgtttaccaattaattaaacacatttaaaaactgttttaattaattaaataaataaataataatttaataaataaattttctccaaaaaataaagtgacaccacactcgcccgccgccagctcagcttggttcggcacgatcggtcagatggacgacgacaacggcgcacacgcgtgtggtggtcctctatgtgagtcctcacccatgcgcacaaaattaggtaatccttagagactccattaactcacttcactttttatttttataaaattttataaagctccaacaatatattaaatatatctacttttatataaaatgtggttatgtaacataatttt

SEQ ID NO: 258656 - DNA, 531 bp, Cannabis indica
aagacatggaaggactgtgggtgaatgattcaagtaaagtaaattatgctttcctacagttctacactgaactcttaggagccaaaatggctaatagaagattatttttgacaagtgtcaatgtgttgggcccattcttccaccttgtaagatcgctaccttacattgatttccacattagtatgatattgtccgctttaggcttaagccctcacggttttgtttttgggcaccttctcaaaatgcctcctactaatgaagtaggtgaaacacttatatccaagataacttttgcctattcttccaatgtgggatttagattgataccccaacacaatgaggttggcccagtggtgagtagtgaacaaaattaaatgttggtcaaaccatacacaaaaaaagaagtgaaagctactgtatttgatattccaagtcaaaaggatttgggaccggatgatgtgtgtgatgttgttctttctttcttacattcatggagaattcttaagaaaataaactccacaacaatcactt

SEQ ID NO: 258657 - DNA, 958 bp, Cannabis indica
aaggcctttccttgtagtagtgtgagttggtgtagatataaggacttctaatatatatagacctattatctaacatataggtcattttcataaatctttcttgactttctccttatgttccctgtttgattacatcttagataactcccactcaacagtaggagtctggttaaattcatacataaaagtacatttaacctcttactatagttttcagggatatcttgttgtgacatattattttagtttgaaactgtaagttccttctagactaagtcatcaacatagcaatctagtattaacattaatgtaaaatacttgcttaagattaagtaatcattagagataccataaaacttttcatgaggattaggaatttttgcctaagttattcgaatagactatgcaaaattctactatcttattctcaaaattttgacaagttaattttatccatatgaatggttagatttactttctcagttttgttctaaagttcctatcacaagtgtcaaccaaatgaagatgtgtttagaatcttaaaattctcccactcaaataaggtactgtgatacaatgtcaaagaacttttattggcatcaacttctattacaacaataaatattaattggaacataaattaagaccaagaatatactctgataattagctaaattattatattacatccatgtttaaaaatatttgtgccatagagtactgtggtgtattgagtatagtctagagttcaaaaagaactacatatttcaatagtatagtccacccctaagtatatatagagatcatgatccacccctaagggatatagagatcatggtccatccctaagtgatatagagatcatgtggagttatgaatataatccagagttcaatagatataaaagatctttgaactatgtagaaaatagtgattcgaattgtgtgtatatttcata

SEQ ID NO: 258658 - DNA, 766 bp, Cannabis indica
ttttgggttgttccatgaattatgattaagacatttattgtaaaacatgatatatttgtaatttatattaattttatcatataaataaaaaaaatattttaaaatgtataaataaacaaactattatttttaagttgctgtaatatatatttataattatatatatggaaaatttgttgtgaaagttttcaaaaagattagtccccaacttcaaaaatagctgcaatagtccttaatgttatgttttttatttgtccgttactcttaattttaattgaatcgtttactttttaaaaattaccacgtgtcgatggtccaaattattatttttttaaaaaaaagataaataaatgtctaaatatttacaacaaagggcatactcgtattccccaaagcactaactctaaattttagagcatacttgcctaaatgagagctacgaaattggcttttctaacgacaaatctaaacccagcaaagccactacttggaatgatgttctttatggagtagctctaatatggcttcttgagattattctatcactaaactatatatatggtcacgattcaagaagattcattctaccgaatgtagatcctttccaaactttttgtattacatattgtgtctagccaatataaatatgacatgttattaattttattttattagatttgcacactattcataaaataatgtttaaagcatattcttcattttgtagtagctgatgaaagcctatttttcatacttttttaagcta

SEQ ID NO: 258659 - DNA, 449 bp, Cannabis indica
agggatatgaggtttcatctaagctttggggtgtgccttatgttcatcaacaccttaattcggccatcatactgtttgatggcaaccttctcgattctaatgaccctaaaagaatgatcatttcccattagaactttacctccatcagctgatttataatcaaaaaatgattctcgacttggacacatgtgataagtgcatccggaatcgagaatccactccttgttcattgaagattctgagatggagaacaattctccatctgttgaccagtcatcactatccttcacaattgcagcagagtccttcctagagtgatggtttcaaatgtccttcctctctccattatgagatttgttgaagccttatttctccttgtacttcttgcagaacctttgaaggtgtctagacctaccatagaagtaacatttccttgtttccttctctct

SEQ ID NO: 258660 - DNA, 639 bp, Cannabis indica
actaacctaaccgttgaggtgaaggagcttcgtgattttagggagcaggctcagaaggaggcggctaaggcaaaaagagatgccctcctgaccctagttacctgccagcactacaataagcgtttcgacaatggagtcttcatggcctggcagaccaatggccagaatcttaagcttgacttctatcccaagcctgaagaagttcttcctcgcttctgggaaaagaagaaaagggttgatgcattgctggaggagcgcaggggccctcgtcttccacctagcatcgactgagccggttgttcactaccactattatcattactttctccctttttttattacatatttaattcttctcccttcttcaagacaattttgcttatttttcttaagttgagacacttaaggcccgtccccagacccctttttatctttttgaagcttttctttgggattccaaacactttatatttatgtttgaatacatacttagcttttaactttgttaaatttggtctgttttacatttttccgtatgatatgtcttattaccccctgagtgacgtgaaaatcaattttaggtcactcagttttacaagatttaattagaggttacatatacttgtccggtacaaattt

SEQ ID NO: 258661 - DNA, 1606 bp, Cannabis indica
aaaatcattagagggagtctatgttttgtctaagtcaattactttgtacttgttgaaatttgactaatgaatcttatctctgggcgtggcctagtgtactagtagcaatctgcaatgattgttgataccacatacaaaatattgtgtgtcattttaatttctacaatttaactttctacattataattctgatctatcaggttcggtaactgatagagcagatttcaattctgttcaaacaattttataacggttccgcattaattaaattatttgttaatttcacttggtaatattaaaaacataatttcagcaacaatcacatccaagaaagttttggaatttgtggtaaaaaaatattatatgtcggtacaaactcccataaaatattattttaatggaaaataatttgacagttagatgttcacagacttctgcataacacattgaattataaagtgtttctcagtagtttcacacccctaaactaatggacaagtcgaggcaatcaataagacattaaaagacaccatgaagaaacgactcgaaaaagccaacggtaattgaccagagaaactactagaggtactttggtcatacaaaacaactgaaaggacagaaactaaacaaacaccttttctcatggcctacggctatgaggcaatgctgcccgtcgaattagaacctccatcccatagaagattgaattacaaccaagagactaaccatgccctcctagcataatcacttgatgaagttgaagaaaagagatttagaaaatctaaagctgctagctcatttgcaaaaagtggctcagtacttcaacaagcaagtgaaagaaggaaattttttgtggcaaacttggtacttagaagggtattcctaaacactaaggacagtgcagcaggtgtactcgaacctaattgggaaggatcataccaagtaactaaagttacaaaatcttgagcatacaagattggtcggtataatgaaaacatagagatagttctggtactaaggtattagaataacaaacatttaaaatatactaccaataagtgtaaatggtttgaccaaataaattgcacaattcttggacattactcttaagtgatggcattctgagcggacctcgctcaaaggttcaaagaataattggtgctaaggtcaaatgaccactttcaaagtacagttagtttaaaatcattgctcttgagtgatgtcttttgagcagaatatatcgttcaaatgttttatgttttagttagctaaagatcagatagatcgtgtgatagttttttataattcaataaatgtgtgttaccacagtaacaacacataccgaccaataataaataaaatataaattattgttcaaattgtgttaattttatacttttttacaaattatagcaagttatttaattgcctaacatgtgtacatagggtttgcctaaaccaaaaagccaaataggttaaagaaaacttgtgaaatgtaagtgaccaagagtcaaaagtctgcttggtcacttgggggcacctatactcgtacaagtatggtaaaaagcaagctaaagcaaaaaaaaaaaaaaagaaattcaaatat

SEQ ID NO: 258662 - DNA, 706 bp, Cannabis indica
tgccatggggcagcacaccacatctatcgtagtccaggccactgttttgtttgctatctgtacttccacgactaatggatcgttgggcaggaagcgaacatgaatagcgtcttcttcagtgaaggttatagtgggttccccacccgtggcatttttggcttcctttcttccatggccagaactacttccttttgttcatgttgtaaagttcgggcatacctctcctgagctttgcccgaatctctagcaatatgcgggcctttgatgatgacttgtaaatgctcgtccactggtggaggcattaatagatcttggttgttgtctgcttgggcggcccgttgattttggtcagccttgacatacttctgcatgtgtgggttatttttccttatcaggaattcaatttccagcttcaggttgttgcactcattagtgtcatggccatagtctccatgaaaacagaaaaatttggagatgtcccgcttgcttatgtcctttttcatgagagcaggttttttgtacgagactacagactgagtcgccatgtagattgtctccaagttgtcagttaagacagagaaagcagtgaacttgaaaggattttctctaggggtttgttcggctttgcctgtgaactttcccttctttccattgccttgtctttcgtttttattagatcttttgccactcggatttgaaatactag

SEQ ID NO: 258663 - DNA, 1391 bp, Cannabis indica
attagtcaatcccccatatagcaaatgtgtagggcgaggtcatcaatcttagttttgttggcggcacgcgaggtatatgtgaaaacctctgacacttatcacatttctcgacaaactaatgggtgtccttattaatctttggccagtaatatccttgtctaatgatcttcttagattggctttgcaaacctgcatgatccccacaaaagccttcatgaatttctctgatgatttcattcgcttctatagggagaacacaccgaagtggaggcatcgaataacatcttctatatagtttgccttcaattattgtgtagcgaggcaccgaatacaagagttttcgcacctcatttttgtcaattggaagttgtatgtcgagtacatagctgattataggagtcatccatgtaggagagctgtctatgatctctacatctttcgtttcacatatactttgctcgcttaccatctccaccggaactaagttcaattcatccaagtccttctgcgaggccagttttgccaaggcattagcgttgaagttttgttctcttggaatttgctcgattttaaagtaatcaaatctttccaagttcttccgaaccttctctaaatactttgccatttttaagcctttggcctggtattcccctagaacctggttcataattagttgtgagtcactatggcagatgagatttttgactttcaacggctcgactatctttaagccagcagtcaaggcttcatactcaacctcgttgtttgatgcgtcaaatttaaatcttaaagcatagtgaaacttaaagccttctggtgagattattattacccctgcacccaaattctgttcattggatgcaccatccatgtataacttccaagtttccgcgtcttggtgaacaggtggaatttcttctggagttataccttctattaagaagtctaccaaggcttggcccttgatggatgttcgagggttgtatgttatgtcaaattgccccagttcaattgaccattttatcaatcttccagaagcatctggttttgataaaacttgtctcaagggctgatcggttaacacttttatgggctgtgcctggaagtacagctgtagcttgcgagaggcgtggactaggcacaaaatgagtttttcaagaaggtgatatctagactcttccccaagtaaccttttacttacatagtaaataggttgctggtgcttaccctcatctcgcactatagccgcactaatcgcatctttcgagatagccagataaaggagtacgtttctctagttattggtttcgccaaaaccggaggcgtcgctaggtgcctttttatgttctgaacggcctcttcgcacttttctatccactcaaatttcttgt

SEQ ID NO: 258664 - DNA, 577 bp, Cannabis indica
tgcaactatctgattttgacataattctgggaatggattttctgtctaagtatggagcgatgattgactgcaagcgaaagatggtagtgtttgagcccgatagtgctaacccagcggtgttcgtgggtaagattcagggagcacgcataccaagaataacactgttgaaagctaaggatctgatgagcaaaggttgtctgggattcatagtcactgcattggataccagccaacctgtgacatcagggcctgagaatacgagattggtatgcgagttccttgatgtctttccagaagacttgccgggattgccacctacccgggaaattgaatttgttattgaattggttccgggagtggatccagtatctaaggcaccgtaccgaatggctccagctgagttgaaggaattgaagatacaattgcaagagttactgaatctgggatttatcagaccgagctactcaccttggggtgctccggttttgtttgtgaagaagaaagacggaaccctgcgaatgtgtattgactaccgagagttgaacaagcttaccattaagaacaagtatcctttacc

SEQ ID NO: 258665 - DNA, 647 bp, Cannabis indica
aaatatttccaacaactggccttagagccatggtaattgatttaccttcaagaaatttggacttaaatgatttgtgtgtgatttggatggtttcatgttgatctgtgtgttatatgatgattgattgatgcttgtgaaattttatgaaaagaaattaaattttcgtttctggagttattttttttttcgatagtttggaaaaaattaagcaattcacttttttacagaacttaattttgattttatttgaattaggtatgattttttgaagttttgaaaaaagatagggtgatgaattgaattagttatgattttttgaagttttcaaaaaagataggttgatgacacaccctcacgcgcgcgaacctgagcttcactcggtcagcagcgtgttcggacagcccctgtccgaagaaacacgctgagggatgtctgaaatcccttcctccgcacgcggataggctgcgtgcagcctctagtgcagaggttcctcagctgtgtcacccagtgagcgcgcgcacaactctaactattaatttcatgctttttcatgctttttcatggaattaatttccgattttttgtgtaattttgtattttgatttttacattttatatttcaaatctaactatcataattaaattaa

SEQ ID NO: 258666 - DNA, 990 bp, Cannabis indica
atatatcttataaatatgattaatttatttattaatattcttaaatttttctttaaattattgattagtgtgattttaatttattaggttattttaaatactattcatccatttagagtcttttggagggattttaacatattttggtggaaaatagtggaagtcggcgagctcgattgtacaaggcggaacttaattgcaaatttggacgaacttaaacgcagaattggacttggagctcaacatgaaagttctagatctcgttcttagctttccagaacatcttgaattgtctaattctgagtaatattgagagagttatggccaaaatactatcagtcatcgcagtagtaattggaagtatgagaattaaaaaaatagtaaatttgttgtggcttacgacacgcatcaaatttttggcaccgttgccggggactattattttattttattattcatatttaatttttgttactaacctgttttactttgataatctcaggtgtacatgtctagtgctgacgatactcaagagagactttcaagggttaaacaatatcttgagtcatcgtctgcttctcgatcttcaaagactataaccgacaacccactctttcaacctcttggtcctgccaaacagccaccatcaactgatcccgagtcagattctgacgactcggttacttctcacaagaccatggctcaaaacaggacattgaaggagttggccgcgccaaatctggaccagcaaccattgtgcatctattatgcacctttggatgtcaattttgaactgaaatccggcctcatccatttactaccagcttttcatggattacctggagaagaccccaacaagcaccttaaggagtttcatattgtctgctctagtatgaaacctacatcagttactgaagaacaaatcaagctgcgggccttccctttctctttaaaagatgctgcgaaggagtggttgtactatctaccacc

SEQ ID NO: 258667 - DNA, 934 bp, Cannabis indica
tttttttaagaaaataataacaaatattaatgacccgataattttgtgccactttaggccctatttttcatcgcctgcactattcctatgatcaaaataattattatattcgtagagaagtgtaattagattgagaaatgctaaaatgcaccagtggtgtgaagcaccctcctacgtgtcaatattgtttttggtctaattaagtattgggtctcatatagtttaatataatagcttttagaaaatatcgctagctaatcgcaagacgacatatcttaaaaatgctaggcaccactcatgctcagtagcaatgctctaatttataatggagagttttttttaattattattattaaataacctacaatattaatggagtaatactaattggatacatggcataaaatataacgccaattataaatttaaacagagcggaatgtagaggaacacaagcaaaacatgttattttccaaaaatacaaaacaaaaaacaatgcactttgcacgtgtgacataaaaccccccatttacgcgcctggctttggcggaataaagcacgtgcctacaatgaagatttttttattgtagcaaaatattgaaaaaacgtaagcaaaaattcttatcgagagagagaggtggcgtagtttgaccaaaaatcaaatagtattatcatcacaaaaaaaatgattattatattattctttattttgataaatttgttattattcttttattattttaagaagctgccaaatatgatttttctttttctttttgtctagagaaaatagaatgaacacacctaaacctagctaatatagaattggagaaagcagtgtcttgaagaatgattcctattacttaattttatacgtaattaatctatctaaaaaaaaatatttacaatactaaagatataaaagaagaagaac

SEQ ID NO: 258668 - DNA, 608 bp, Cannabis indica
ttaaataactacaacatatataactataaaaaaaatagattaaatttttttctcaaatgtcaataaatgaagggatcagttaaaaactagccattttttattacatattaacgaaatatgactctaaaataattttaattgataaataccctcttttataatcaaagtaccaaatataaccttacataatttattaaaattagattttgtaatacacataatgagggtaagatctaaaaaattgaatataaattaaagagtaataaaataaaagtaaaaattaaaataaaaaataaaaaatgaatatataatataattttctcataaataaaatatatcggtacattcttttttaatattttagaatttcttatattaataaataaataaaatttcaaatatcttacaagcaccgcctttctttgtggtgggcatttcttggcacttctatcttacttcaatgcatttgtatggacatcttactatcgatatatataaatgcatatatacacatatatttatattgtaaaggtagaatttcattaaccaaaaacatcaaatatccttagatcaatttggtctaagaaaaattaacaaacacaactata

SEQ ID NO: 258669 - DNA, 707 bp, Cannabis indica
ttcatgaatttctagcaatgttggaaaactcattatggtaagtggttaaagatcttgcgaactgatagcggtgaagaaatatttggatatccagttcaaagatcattaagttgaatttttgaattgtattcaaacttacctctccaaaaattcaatttccatattgatgacagtataaggtttatgattaatttgttactagtagttgcttctgtccttctagggatataccctagtgataagaaaatttcagaatgatagaatggttgtgtacttagtgtaaactattattagattcatggatgtcctgatcgtgaccttacgaaaagctagaactgttaactaagctaggtttgcatatttgatatctattctaagtgattaggggtggaccatcctatggtcattaagataagaaagtgtttgtttcaacaaatactacgtttctaagaaaatgactaagtctaaaaacaaagtagcaaagtaaaggagatatattttatcttgattccaaattgttctgtcatcttattctatataagatggtcccaatgcctctgttctattgacacaaatgaagaggacaatacaacttatgttcatagacagaaagtcacggtacattgtcgtagtgggacggtttcaaggaactcacactattatgacttggaagacacttgtgatgaaaatcttgttggaaattattt

SEQ ID NO: 258670 - DNA, 620 bp, Cannabis indica
agctcatgttgtactgttttcttctgatgccatttctgaacaatccctaaaagtgtcgtcaacaacaatgtcttttcaggtggagtgtagtgtgattcatgaaacatctctggcctcttcaagtgtatcagtggctgagtaggcggagccagaggatcttgggtagctttcatctttcctttcacctacaaccaaaaaaaaaaacactttaatgtgaaaaattaagatttttcaacattaaggctaattatagtttacctggagtgaacaagctgaaggcatatttattagtttcttcggccagaagacgaaatgtttcacagctgaacccactttgaagaagccttcttgctttagagggcatggcagatcggcattttcttcaacaaccttttctatgaagacacgtttaaagtcacaatgcttcttcttttctccatgtaccgtgatctcacctttctcatccgatttttctaatttgagatacccaaatgcaactaggccatttcctttgatgttaggatcaatcacgtgcaaactgcactcaattgtctttatttgcaaaccaaacaataaacaagcttgtattataatatgaaaattaagtaagtgagatatga

SEQ ID NO: 258671 - DNA, 517 bp, Cannabis indica
cccaagcccattagcagatttaaaaacccagtagctcaaacttaacacagacaatacgagaacaaatatggtaattataaaaatgtgaatatactacatggactacacgagctcaacagtgaagaaagaaaaaaaaaatgcttaatggacacacacaccagtgcaaaaacaatctgagaaaggcactacacaagacaacaatacacttggcacagataagatagtcaattaaaatgtgagaacatcaaggagcaatgtcatatgctagaagggactataattgacacatgatcaaggatgaatcaataagctaccatttgtgtgtgatgtgtcctcatgtgaaacaccaagagattaatcaaggcacttcactcatctcaaaaaggggcaacacgaattgaagaggataattgacttccccccctctttttttattcaaatattgaaagacttccctttttctgataaatcaacactctctgggttttgccaaccagttaaagctttcactctttca

SEQ ID NO: 258672 - DNA, 644 bp, Cannabis indica
tcttttcattccaagaaagagatttcaactactagacctttgccattgcttcatattgatttatttggtccttttagaattgctagtcttggtggtaaatactatgcatttgtaattgttgatgatttttcaagatttacttgggttattttttcttgactcttaaaagtgatgttttggaaaactttgtcaaattttgtaaaaatgtgcaaaatgaaaaaggatattctattacctccgttaggagtgaccatggtggtgagtttgacaatgatgccttagaattgttttgtgatgatcatggttttaaccataacttttcggcaccaagaactccacaacaaaatggagttgtcgaaaggaagaatagaacaattcaagaaatggctaggtcaatgctaaatgaaatttcattaccaaaatatttttgggccgaggccgtcaatacttcttgttatattttgaatcgtgttttcattaggcccaacatgaataaaaccccttatgagctttggaaaggaagaaaacccaacattggctattttaaagtttttggatgcaaatgttacattttaaacaccaaggacaaccttggaaaatttgatgcgaaatccgatgttggaatttttatagggtattcaaca

SEQ ID NO: 258673 - DNA, 619 bp, Cannabis indica
tattttattattttattattaacacctttattagttttaatagatattatattagttcctttcatagatctaacttccatgtgcatttgtggccgttggatgaagcttggacggtccgatttggttgccttattttgtagggcttaatgagaaaatttcccttgtactcaaatttctctctctctgtaactaatcggtttgagtttcatatttatgctaatttaattatagaaaaatgattcttcaagtcaaagctggattaataattggtgttcaaagctgacatagttaactaagtacctagaaatcattccatagtgagggtctagaatttttaatttatggggcttatttatcataaaaaaatatttatagttacattctaattactcttacgaaatttatctaattttgtggaggcttttctactattttagtttataattattaaattaaaaaatttacatttaattttttaaaagacagtatttttgttagtggggcttacattaatgttaatgggtctctccctgtatatatcactctatttactcttcatattcttcttcttgatcgtctttcttaatccaattctcaaaccctaatcacattcctcgat

SEQ ID NO: 258674 - DNA, 870 bp, Cannabis indica
aatttttagacacataagaagagtaaaaaaacctatatgtttaacaaaaagtaaataaaaatgaacataacaaatagaacatggacaatactaccattaatataatcactaaataaaaatatataaaagagtatgactataatatcatatacagtaatatagatggacgaagaacataaaaataaaagtggaataaaaatttgcattactcaaataaatattacaacaagtgaattaaaaatataaaataacctcactttgcatatgcaatcatccctaacattcaaatgaatattaggtcattatactcatcattctcataaaaattctaagaaatatgagaaaaaaagtgaagagagattttgctataatttttttactctaaaaattaccctctcactactaaaatgagctctatttatagagtcataaaaagactaaaaataaataaaagaaagtttaggattataaaataaatattaatattaaatttgacatttgaaattaaaaataaattaatattatttatgttattattgctattttgtcttataatatttagatgaagattgagtgtgaaagagaaaatagagttgatgatgacctataggggtgttcattggaccacatccaatatttttaggcctatccagatctgatccaattatatattggatgttagattttaccatccgatccgatccaattaatttcagtcatccaatcgatccaacatccattggatattggattggattggttctataagttggatgtatttcatatatattttattggtttaatttttgagttttattctaaatattttttaagactatagtatttttttgaaattcggatcagatccat

SEQ ID NO: 258675 - DNA, 1049 bp, Cannabis indica
gttttacccagaaaacccaaaaagcttcaaaccctaaccaaaacgattccaaaccaattcaaaccttccagacctacatactacaccccaataaactatttccaagcaacaaaacaacaatcaaagctcagaatcgaatttcaccattaatgagccaagcttgagtttcaaaactcaaagcttgctcaaacaataaaccagccattaaaacaagccaaactcaacatttctaaccataatttaactacaaaaatgcatacaaaacaccagcagaaactacagcaacgaacaactcaaaacatgcataaattcaattccttaaaactcaagaaacttaagaggataaagtcaagaatttacgtagaacttaagaaaacttaatccttgaagaaacttgcttgaaatgcaaaaaatcacacctaaaccctagctgctctagggagccgaaaaagagagagtgagtttgagagagaaaagcttttctcttgattttttccaaattttctattttgtaaatgaaatggataaatgatgctttattaacacattaataacagcatataactcataaaaattaatttattaaataaaactaagtccactaaaggacaaaataatgttgcccctcccacactaaaacaacataataggggtacttaggggtattttgggcaattctaaaatcccgatcaatcctgatattcccaatgtctaaactattgtcccgctatacaaaaaatactaagatgtgattctaatagccaaacaccgcgttccaatgtcgccggacacaaaacatgcaaaattatgaaatttctatatatgacataaaaatgcattctgaattcaaataaatcatcatatattaacaattcaaaattaataaataattttcataattaagccctaattatctgataatttccaaattaagctaagcgatctttacaattatccccccttaaaaggatttcgtcctcgaaatctaaccagaacaactctggatattgagctctcatgtctgattctaactcccaggtggcttcctc

SEQ ID NO: 258676 - DNA, 1889 bp, Cannabis indica
ttttaaaaaaaaaaagtactttatatataagatcactctagatttatgtggtttgttaatttaggttttttttttttgggaagaacaaaagttcaattaacggaaaagcaaatgggaaccacaggggggaattccctccccttgaaaagcttcagcaaggtcattagaaaatctagctcttttgccaaaccatttacaaaagagagattacaacgcttaacataagagaaaatgcaagaattgaaacacttaataagatctagaatactcaaggaaaggttgagaagcatctaattaggaatacatctcctctgagccaaggcctagacaataatttttgagtctgataaaatacaaatttgatcctaattattttgagccgcccaggatagagccataagaatggccttagtctctgcttccaagggggaaagagcagtagctttttgcatcttataagcccacccaccacttcttaaatcaatccaaattgcagcaagacatgcggatccagatagccaagaggcatctgtcatcagcacaaaagaaatctcactcctaattttttagcagtagggacattttcatatagctccaaatttaagtctagaacctgggataattcaacccacttagagtatatctgattctttaaaaggccaaatcgacagcagcacttttgaagattattctattcctttgattccaaatctcttggtaaagacatcccataaatcacaacagagaatccctccccaaagctggcacagaaaggactagattctctacaaattctaggatagatacactaggaattttatcactaaggatagggaaagggcccaagaaccacattgctttcgacacagaattatccctaaacacatgtaaactggtttcgagctcatcaccacatagaaggcaaaatttctcaatacataaaggtagtttacatcttaaagggatggcctcattgagaattctccaaaggagaacccctatcctgggatgtatcttcgaattccacaaccatttccataaaattttctttggccggaaacgaagctcttgatctaagcagtaagcacttttaacagagaaggcaccattaacacttcccttccaaacaatttggtctgaatgattgagatgtgaccttggaatttctaagattttcctcctaatagcaccaaagatctgaagtagcatcaaccatgctcctgtccagacttcccatcagctaatcaaagcctacatgatcaagccaaagaatccaaggttgttgataactctatggtatagagttattttttatgcttttaaactgaaattattgtgagaagagtagtaaaaaagtgtttgtttgcttaattttagttagttttagtttcattttttatttagtaaggaaaaaagccaagtacaccatcgtttttccatcaatgagagcagctgcaacttttggaaaggggaagtaaatgcagaaaaaagtacagcagaggaggaagaaagagggaccaagctttagtgtttgattttttcttttatcctctcttaatagttttctttctttttctcctttcttgttgtttgtacttagttattaaaaactttgttaaattgtaaaatagggcagcagccatggaagatagctttttagcttggattttagtttttgatttgaatatgagctagacttttgaggcttgaatgactatgaacttctacgttgggtatatgattaattgttaagcttattttaacattttttgtctttgttcattcaagtgagttttattttatttaattgttgttgcttggccatgaataataattttataagctagatcttgttctggaagggctagatctagtagttcaacttgaat

SEQ ID NO: 258677 - DNA, 467 bp, Cannabis indica
tcgtcctcttgtgcgattgctccgtcccgccctgagcagagagaaatcgaaaaagagaggggctaagagagtggatcgagaaagagagggactgagagagtggagagaactcaagcgattgcgtactaaatcaagcgatgtcgtcctcttgtgcgattgctctgtcctggtcaaactaatgtactgaatcaagcgtctctgtccttaacggaccatcgaggaacccctggttcgcacaccttgttcccaaaagacggagacgacgacgacgatgacctcctggttcgcacccctagttcacaggtcgacgacgatgacctcctaattcgcaccccttgttcccaaaagacgataaggaacccctgacctgaatcgtagaagagaaggaggaatgggattttctcagatttttaaggtttgtattttttttttttgggtgaattataggtttgtatttaatttaagtt

SEQ ID NO: 258678 - DNA, 581 bp, Cannabis indica
gatgacatatcttagttaatcaattggattactcatatcttagtcagtcgctcggatgactcgtatctcagtcggttagtcagatgactcgtatatcagtgtcagccagttggatgactcgtatctcagtcagtcgtttggatgactcgtatcttagtcagtcaatcaggatgactcgtatatcattcagtcagtcggggtgactctcataccttagtcggttggtcggatgactcgtatctcaatcgattggtcgaggcgactcatatctcagtcagtcgattaggattactctcatatctcaactggtcggttggatgactcgtatctcagtcggtatgtgagatgactcgtatctcagtcagttggttgtgatgactctcatatcgcagtcggtcagtcgggatgactcatatctcagtcgataagtcaaatgactcgtatcttagtcggttggtcaggatgactctcatatctcagtcggtcggtcgaatgactcatatctcatttggtcgatcagggtgactctcatatctcaatcagtcgatcgaacgattcatatctcattcgatcgatcgggc

SEQ ID NO: 258679 - DNA, 824 bp, Cannabis indica
ttgagtgttttataaatcctatcattctttcaaaaaaaaaagaaaaaactcaaatgaattttttcaagaactcaaaatatttaaattatatataaataatttatatataaataaaagaaagcactgaaggtggcaacttagatgagttttacctcttttcaatttttttatttttcttatttatttagttttaattattttttattcaacaataatataaatactaattattatataaaataaatgttgcagttacaaaatttatagcaccagtcatcattcaataaacatgtgaaacatttaaacataattcaaaagtagttacacaatttttatagaaaacttttttctatgtctattattattacactaaataaagatgccatttattaaacaactacagtataaaaaaaaaaagtgatacatataaaaagagattttcacatctcttttcattgatgataagtaatatatatttagtttttaggcaccaatctcaaagtttcactaacaccaaaatctaatttatcctttaagtgtctctaagatatgcataacaattattatttttttttttccttctaattaatctcataaatgcgaatataaaaatatgcattattattcattttctttgttcttctaattaatcttattagtattgatatgaaaatttgtattagaactaaactttttacaaaagattttcatgaggtgttctattcttactctaaaaattcaagaaaaaagtaagcatatctttatatattaaaagtgcttatctaacggtattttttggtttaacagaatatactttaaaaata

SEQ ID NO: 258680 - DNA, 885 bp, Cannabis indica
tggttcgcagtgtgcggtggtgagcagagtgtggtgcacgatggtgagtttaaatagtcttttacgggagagagaatgagatgaagaagatagagtattgagaaatttgaaatgagagagatatttttgaatttagatgaaataataacatatttttcttatttctattatgggtgaattaatttgaatctatgttttacatttaaatttaaatatgataacccaaatttctcaaatagtaatactatattctaaaatttattctccaatgaataatgtgtattaatttatttacattatttatgctaattccttttttttttatatatatattattattcttcttcacctaattcaattatactttgcctttgacctcactccaaaagacaaattataattaaaatgattatataaaaagaaatataaattaagaatcttttttactttaataaattaaacgagcgatatttatttatttattttaacaaaggagagttatttattttttaacaaaagcactatatgagtaaaattaaatattaagttccaccaaatttaatttaataattattttaaaatatataatatctaagaagattttcaaccacactctctaaatacatttttaactaaaataaaaagtgtacttaaaaaaaaataaactctaactatataagcagctactataataaagaagactaatattttaataaaaaatattactattttttcattattttttaaattaatttatatttaacaaattcacacaataaatatactattaagtacaagatagttttttcatttttacacttcaaaacagtttttttatttttttttctatttttactagaattctacatagaaacatctattgca

SEQ ID NO: 258681 - DNA, 1921 bp, Cannabis indica
tcaggaccaggatttggatcaggcaaattggtctctccaaattttttcagacttgccaagcgcaaagcccaagttctctctccaaacttgatgactcctacaatgaaaactaagatattaggccacaacaacctgtttttggatcctctcctgaagagagtaaaaacagctgagagaacttgcaaaatgaggccaaacaagtgtctgatccacagctcgttgtcttctaaagacaatgaagtaatggtatcagggccgccgagatgcatcaaaagaaaagaagcccacaacgagtaatgatcgtcggttttagtgtcgttgctcttgatgatttgtcctataattgttgcagcaatccagtctgcaaccaagtaaaatccccatacagaccatgcaatgaggttgcttcttgaccattttcgaataggtgccaaaactaacaagaaagattgtactgagaggcttaccaacatggacaccttcagtaactttcccacgctagaaatgatgagtgaagacatgaccaaatctgtttgttggtgttcagctagctctccatcttttttggctataagattcaatttcagaaattcaaaggctcataatagtcatatagtttagataaaatatgacgtagccaggtcataaagtagccaatgtatattagaaataataaaccactatattaaatatttctatggcaagttaattagtttttatgtaaattaggtgcattatcagcattgttattaagtattagtgctgtttagtattttctagatttattgcatttctaaaaattattatattaattatataggatccaaatacttaactaaatctcacatacaaagatattaagcaccactaatctcctttaatatttctcttatattatatataaaagtaaccaaaagaaaaaactacaaactggaatcttctcagtggaaagttatgtgtatttatgttcacttttctcccacattttttatgtggggacaattaatacggttttaatatcattgcatctaatgtatgttcagtgtctcagttttttttttaaaaaaaaatatcattggatctaatattccctctttacttttcctttgtttcttttaaggatatttaataatatattaattctagagcttcaatatttaataataatgatgtctccaatttgtcaacccaaaagctaccgcagttcaattaaaccaagaaaagaaaattgggatccacaggaggtaatccaagagaagaagctctggccttctagacagtttgtcaacaaaactgataacatcacgattaacatacacaaaagcaacatttccaaacttaaactttcgatcaatcacagaagaatagagacactgaacatacattagatccaatgatatcaaaaccgtattaattgtcccctgattgtcttcccgaaccagatctgattgtccaaatcaatagccagtaaaccaccaccaaacttaccatccttgaatgaaccatccacaagcaaagctttaagagtatagggagctttgaaaccacttttaggattcctcccacagttttgtatgctaagggattacaccatataccaaaattatcaactcttttactttcatattttggggtggaatttttttaaaaatattgtatttttttccaagaatattgtgtaagttttatattgtgtattgtgttaaatttttactgttgttctacggttgtttttagttgttccactattgtttttagttgttctgttttgtgtttcgctgttgttttataaaaatacatttttgaaaagatttctgtgtgacaatatttttataaaaattaacccaaattccaatatttttgtaagtttccttatgctaatactaaaagaacatttttaattgtgttaaaaaaatgatgt

SEQ ID NO: 258682 - DNA, 1058 bp, Cannabis indica
tatttatttaattacttaaaatatagtaaattataattaattaaatctaaaaatggaatttttatctattagtaaccttctattataggtaaaaaaaaaatgtaaccatatagttacaataaaaatgtaaccattgaatagtcaccctacattatttattaaaaaaatattttttcattcacatagctacaatgaaataaaataaattattattgttttatgttttaacaataaattaaaataaaaaataacaaattttaaaaaaaaattatatttttatgaaaaaatatttaattttgttttagattatatatttcatataaataatattgaaatatacatctaaactattaagttttaaatattaaattactattttttatattaaaatattaattgtatatataatttttttaaaaaatatataaatatgtgtggactgaatgaattagtacttttacatgttaatcaacatctcatacctacaagtataaattttagatttttcaatctaatacaaattgaatttggtattttataaaagcctctaattttatagattatcaattaaaaacaaaaaacccaactcaaggtatataaatactaactagacccttttcaatttattgcaatagtcattgtaggaagaaaacaaaaataatggaagtgagagaagatatagtgattgtgggagctggaattgctggtctaacgacctccttaggacttcacaggtacataaaattgacccttttatcttctatttatatatattgattatatgatttttgaatggaaaaaattaaaatgttttgaatagggagggtatcagaagcttggtattggaaagttcagatagtttgaggacaactgggtttgcttttacagcttggactaatgcttggaaggccttagatgcagttggtattggtgactcccttcgccaacgacatgatctcttccatgggtatatccatattattcgtgtctagtattttttctcgatatcatatcgatattagtgtaattagtatcaggtcttatataacttaagaaaa

SEQ ID NO: 258683 - DNA, 771 bp, Cannabis indica
ttgacgagaggcataggctatgactttgtcagcttgcatcagaacacatcccaaaccctgtcttgatgcatcacagtaaacaacgaacttttctcgatctgatggcaaagctaacaccgaagctgttatcaaatgttgcttcaacttctgaaaacttgcttcacatttgtctgatttttcttagttaactcggtcagtggcatagagattttagaaaatccctcgacaaaacgtcgatagtaccctgctaaaccgagaaaacttggaactttagtcactgattttagcctcggctaattcttcactaactcaatcttgcttggatcaaccataattccattctttccgaaaatatgccctagaaaagataccttggacaaccaaaatttgcactttttgaatttttcatacaacttgtgatccctaagtcgctgcaacaccattagaagatgatgctcgtgctccttctctgaatgagagtatacaaggatgtcatcgataaacactatgacgcagttatcgaggaaatccttgaataccctattcatgagatccataaaggccgcgagagcattagtcaatccgaataacattacatgaatctcgtagtgcccatatctggttaggaacacagtctttggtatatcttcttcctgtattcttaattgatgataaccggatcgtaggtgaatcttcaaaaatactatctttccctgaagctgatcgaacaaatcgtcgatacacattttaagggaaccatctttctttttc

SEQ ID NO: 258684 - DNA, 562 bp, Cannabis indica
taaggtagcatgtaagtcactcggttattcactttatttgtaatgagtacagaaggatgaccaaggcatgtgtgccaaagattttgaatttgtacattacaagcgtatgtggtactgttgacaattggcagtgaaagatcttgctaaacgtagtagagttatccatgcttcttagctatcccaatcttcgatgtctgtgaagggccctgtatataacaaatatgaaaagtaaaagagatagtagtgaatgtattatgtagtaaggcactgacagagaagagattgtacttaaatgtaggtacatataagacattgtgtagtatgatattatgatttatgattatggttccgaatttttctattttaacagatgtgtcactaggtaatgtgacatgtatgttgttgattagtttagtgaaggaagagaaacattgaatgtgacaacaaatatggtgagcacctctgtctaaaatccaagaagtaggacaaagggtcgatattacccgtaaggttgtttattgcaggagtgtctgatgtagatgcatcagttgaaagatgcaat

SEQ ID NO: 258685 - DNA, 1223 bp, Cannabis indica
gagataggcacctcgcttattatctctcgagtccactcgactattgtacttagtttttgcattttacactaagtgttatcacagtcgatatgcgtcgcttttgtctttccagatgtaacgaagtcgatgtgtcactttatacatccaatgacgcatggtttctcgttaatacactaaacaacagtttgtatatctatttctcgcgaaagaccttatagtcagcgagttgcaagtatactctgttacttacgcaattaatgagttatttcattaaaagtgatttcatcgatccatattcttgttatcttgacacgtgccctccactgagatggtagccaaatttcgggtataataattgcccctaaaaaagttccttttcataaaaagtgctttttaataattacagatggccctttcgtcataatcctttttggagaaacgcgtcctttgattctagcggttatacggttttaagggtcattatgaaccgtcttttcattttctgccccactcccaactgttagatttcccaacctttgggcttcttttaactagactttgagtataaaatggtggcttaagcttgccatattccatacacttttggttttctgtttggcttcatcttgagattggattgtccttctctcgtcaagatgccccatctgacttcaaaaatttgttcctctaaattcataataccaaaattcgccaactacctctcttctttgtacattcccattgatcgttacgggggatcctcacaagtgattttcgagggtaactattatcccttgtgaatggtggtttgaactggattatacatattattattttttgttgctccattgatctttatttctgtttccacaggaatggacatagattttgcgagcgatcttagaggtcctcctcagggtgacaaggaatccaggaggaaagttagcgtggtttcggattctactaaacaacccaaccaaccaagacccaagcttgcaaaagaagacctttgtgccaacctctctctagtatcgagaaatttcctgaggttgggaatgaggtctcggctgcaggaaatgggatcttttgatgtggagaatgaggtctatgcagaggtcgagaccttctacgtgtaaacggtctttctcgagctatgtgtagccggtctttctccaagctatgtgtacacgatatttctcagagctatgtgtagacgatctttc

SEQ ID NO: 258686 - DNA, 553 bp, Cannabis indica
aatccgttgacaaccaggtcctattaataatttcttgacagtcaggatccttcaaccaatgagtttcaaaccgaaaacccctctttttatcatacttttgccgcctagcaacattctccaaaattgccacaataggtctatgatctgaatgaagaaagtcaccattaagaaccttaacaaaaggaaacaaatcatgccacctttggttgcaaacataacgatcaagacgttcttggacatgcgcacccccattccttttattcatctatttaaaacattgaccctcaaaccccaaatccgccaaagagcacccatccaatgcattttggaactcagtcatagccaccatactccgatcagaaccaccctttttctcatttatcgaaagaatctcattaaaatcaccaccacagacccatggaagatcaaataaatccttaagtcgacataataatctccatgattcagaccgacacctcgccttcgggttaccataaaaccccgtgaatcgccataaatccctaccagggcacttaaccagagcatcaatatg

SEQ ID NO: 258687 - DNA, 1320 bp, Cannabis indica
attaaaagaccaataattgactacaaaacagcaaaacaagaattaaaaagctaacataaagatttgaagtcgatacctttccttctccaacgccggcgtctagatctccgtttcttcgtccagatcggagctccgtcgcaggtcctttcgtcgcctgaagctttccaaactgaagtcgatctgcctgtagcacaagggattaaaaagaagaagaacgtgagagtttctgggtggggatttggatattttgatttttctttccttttgttttacgttttataaggttagttcaattattatccttccaattagcaagacccgaaaatctcaaagaactttctcaacaccccaaagcagggagggaagaactttaacatcatttcacatcgaagctattaatgatatgaatgaaataaaagtctcaatcacattacattatactttgaatttcgaaaccatcaaagtcgatgcagacaacaaagaagcataaatatatatatataatgagtggtagactcgcaatgggtgtggatcgagaagatcaattggaagagtttaccgggatgagattaataacatacgatgggaagtaccacaagaggtgagcagagaaatatcaaacgtaattagcaccaaatccagaaagcgtggacctatatatgtcaagaacctagaaaccgtttggactgtcagccattgatatgggttgcagtaacactagtaacgctaatcatcatatatatgggagggagagagaagatttgaagaatttacctagtggatatgggtgagtgtgcgaaagagagggggtcaggggatattagaggttgaatgaagaagagtttcagagtgagttctgaattgagaaagccaaagttttgcgtcgctgattagaaattctcaacaaagaagaagagcaaatactccgtctctgtaccgccacacgtgcttgctaagatggcacgttacaagctaagtgatgctcacgaattggctaagtggtggcgcatgttgtggtgcatgctagcggcatgctgatgcttagtttgtatgcagtggcattttcgtaaatatcttcaatattgtccggaacgagacgggacttggtattcgccatttatttggggtctacaaataaaatggtgcagtcggtttggcgaaactatgtgatttgatatatggtgtaggccatatgtctacagagccaaaatcatttatgttcctagtagaaggctaaaagctcagaatactctttaaaggggtaccctggtgtcagctctccaccactccttgcaccttggtgctaagtgagttactact

SEQ ID NO: 258688 - DNA, 743 bp, Cannabis indica
ttccaattttaaaaatagaaaaccgattaaaaaagtgttaccgcacgccaccttagtaaattctagagctacttattggaagcttgattatataggcccatgatcctcatactagttgagacaatactgcttgtaagactcaattaattatttttaattaatcaattataatctaaaattagactatgtcttatttataatttttcactaagcaatgacttaattgtgaagataagaggttttaagggttatttgttaattaagagactttgtggagtctatttaataaataagataaatgataattttatttgataattaattatcattattaaataaatagttttgacatttatgagattaaagttagaaaatatggtatttgtgaaataaaaaataaatggttgaaaaaatagcaaaattataacagtgggtcccatctatatggccggacacttagtgtataatttgctattattttatcattttttattccatataatttgaatcctaaccctaggtaagatagtataaaaggaataggattgtctcattatccaacaactcaaataacctagtttacattctgtcagacaactagagttcttgagacctccttcttccttcttctattttgaatctccttcatagttcttcatcaaattttgagtctatagtgagtaagtgcatacccacccatagaaagtctagtactcaatcatagtgtgtaagactgtgaagaa

SEQ ID NO: 258689 - DNA, 760 bp, Cannabis indica
aaagctataaataggatagttcttaattcatagtaattcaaaaattattagaactaaagaaaaatgaagtactcaacattctccttttggtttgtttgcaagataatatttttctttctctcattcaatatccaaacttcaattgctaatcctcgagaaaacttccttaaatgcttctcgcaatatattcccaccaatgtaacaaatctaaaacttacactcaaaacaaccaattgtatatgcctgtccaaaattcgacaatacacaatcttagattcacctctaacacaaccccaaaaccacttgttatcgtcactccttcacatgtctcccatatccaaggcactattctatgtccaagaaaattggtttgcaaattcgaactcgaagcggtggtcatgattctgaaggcatgtcctacatatctcaagtcccatttgttatagtagacttgagaaacatgcattcaatcaaaatagatgttcatagccaaactacatgggttgaagccggagctacccttggagaagtttattattgggttaatgagaaaaatgagaatcttagtttgggtgctgggtattgccctactgtttgcgcagctggacactttggtggaggaggctatggaccattgatgtgaaattatggcctcgcggctgataatatcgttgatgcacacttagtcaacgttgatggaaaagtgctagatcgaaaatctatgggagaagatctcttttgggctatacgtggtggtgga

SEQ ID NO: 258690 - DNA, 626 bp, Cannabis indica
aatcacgtaatacgcctatgctagttagggtgttacatttcctaccatacaacatctcataaggagctatccctattgactttggtagctgttattgtaggagaattcaatcaaatgcaagtaattactccatgaaccctcaaagtccataacacatgctcgttataagtcttcaagtatctgaatggttctctccgactgcccatccgtctgagggtgaaaagtggtactgaactttagttttgtgcccatagctctttgaagacataccaagaatttcgatgtaaactttggatctcggtctgaaaaaatagatttaggagctccatggagacaaactatctccttcacatacagttcaacgtattgatccactgtataagtaatcattacgggtagaaaatgagatgactttgtgaaacggtccactatgaaccatattgaatcatacattcccgtggttctaggcaaaccaaccatgaagtccattgcaatatcctcccacttccattaaggaagggctaatggttgcaataaccctgcagacctctaatgtttagatttgatttgttggcaggttaaactcttagatacatactctaccacatctcttttcatcccatacc

SEQ ID NO: 258691 - DNA, 577 bp, Cannabis indica
atgaatcagagcatcattggctgtgtgctcattgatagccaaatagatgaataattcttctccatctatgtgtttggataggatgggatgtcttgctagctgatatttgaaagcttagaaagcttgcttgcatttatcaatccattcaaacatcttgtttcttcctttaagtagattaaaaaagggaacacacttgttggtagacttgcagatcaacctactaagtgcagcaatccgtctagtgaggctttgtatgccttcaattcgtgacagtgacctcatatcttacaatgccttgatcttttctaaattcgcttcaatccctcttgagttgacaatgaatccaagaaactttcttgattggacaccaaaggcataattagaggattaagtttcatttgatattcctataggatgttgaagcattcctctaagtctttgatgtggtcttcagatttctttgactttactagcatgtcgtcaacacaaacttccatattgtttcctattaattaataaaacatacggttcactagcctctggtatgtaacacctgcattcttgactctaaagggca

SEQ ID NO: 258692 - DNA, 644 bp, Cannabis indica
ttttggctcacaaggtacgggttcatgtccaggttgcgatttggggctaggttgaggcttgcgtctagtttcgggtcccagtctaggttcgagttcgaggctgggtcccagatccaaacaccgactacgggttcgtttcaagccccaggtctagatctggatcctgatctcgggtctcggtcgggttccatttcgtgtgtcgagtcacgagttggttcctagatttaagtctgagtttggggtcgggtcttgggtccctgtcctagttccgttgcccaagttcgtatctcgattcttggtctaagtccccgtttgggtcccattctagattcaagcatgggtcctagtcgaggttcaggtttgagtctcggtctgggtttttatttgggtttgggttcgggtctgtgtcttagtccttgtcctggtcctagtcctagtccagttccagtttgggttcgagttcgggttggggttcgagtcctagttcgagtttgtgtttgggtccagatctcgatataggtcccaatcaggcactgggtttgggttggggtcctaggtctgggtcaaggttctagtccgagtcctaggtgttgatctcaatctaagtctgaggttagttctgggtctaagtccttggttctgat

SEQ ID NO: 258693 - DNA, 1409 bp, Cannabis indica
agtctgctcattgatggccttttcgtgtcaggtagacatgaagaagcaatggttttctttgaggagatgactgtatatggttgcaaacctaactgtgaggtttatagtattcttataaatggatttagcaaaatgggagatgtggaaactgtctgtgaattgtttaaaagaatggttaaagaaggagtaataccagacttgaagtgttacagaattgctatgaattgtctatgcatttcagagaaaattgatgaggccctgtattactttgaggaactgaagcagaatagtgctattagacctgattcacattgttataaccttttgattaaggcacttgtaaaatcacagagggtagaagaagctttatctctctacactgaaatgaggagtaaaggaatatttcctgatctttacacatacaataaactaatactaaagcttggggtcacaggaatggtggagcaagcagtgagtatgtataatgaactacagcttaaaggtcttgaccccgatgtttacacctacaatgctctcattcaagcttacaacatgtcaggaaatccagaccatgctaatgcagtttacaagaaaatgatagctgctggctgcgacccgaatgaagaaacatttgcacaacttcctaatcaaactttgaaggacttcaatcctttgaaacagaaaatttctcagaagtgtgtttgaggtataaacccttgtgtttttattaagggtgtgtttggaaaaacacaagatttgatgtaactcgagaattacttatttggtgtgtttatctaagtaattacacaattggagataattgaagagttttatttacactcttcaattctcatattctcattagctatcagaattgagtgtaatttgtaatttgtaatttgtaatttgtaaattgtagttatgaaatattaacagttttagataattttaatcattatacaatgttattttctaagtaattgccaacttgattatgtaattactactttgatatccggacacacttgctatattataaaaaaaatgtaaaaagaaaaaaaattacttatatttatcttacaaactcttaaatatatatgtatttattacggataatactcatttgagaagtatttcatatatataaggagtaggttttaacggttacattaaatatgtaacaaggttacatttttttagctattaaattattattgaatggttgtgattaatttgaaaattaaataaaaataactaataattaacttataatctaatagtcacctaataatttattttcttataaaactttaatgaagattaattatattttaaaattaaattaattataattattaattaatttttcataatttattattaaataagaatcttttagtaattttttt

SEQ ID NO: 258694 - DNA, 612 bp, Cannabis indica
atacaaaaattatccatctatccgactgcagtacaattgatcgtacaacctacttcactacgaatgaatatctaagatattcaaactctactaaataaagaattttaaaattttagtaattatacatttctccaataaagttagctactttcgcgcttttcaatcaacactaaaaatccgatacctaaaaataataaaaataataatattggttagattataattttacaattacaattaacttatatatatgtatgaactaaaaatatatatatatatatatatatatattaccgatgataaggagcctttcgaaagaccgccaaaaaaagaggaggagctcgacgaagtttgacaacgactaaaaaggtcaataatatataaagaaaagtttcaataacaatttaaataaaaataaataatctaaacaaaataaaatagatttaataaaaatttaaaagaaaaatacaaactaatagctatattgttgctccagaattcgcccaaaatacgtggaccagtcgagaggggacacgtgggtcagataacttggaaacatttgctaagtctttgtgcgcgccaggaagcgctgttagcatgggtcccggagga

SEQ ID NO: 258695 - DNA, 1415 bp, Cannabis indica
atttcttaacattttcactcaccgctaatggttgtggcggccgcggttgttgctgtagcggtggctgttgttgcggttgcggttgtggccgaggaggagtggattgcactgccgtttgcataaccttattgtttaaaattggggcggcaacggtggcggtggtggcagtggtggcggcgggattgtcgttattattattttgctgttgctgttcggaaactttttgaagaaatgacatgacggcggcgtctttggcggcggcgaaagatctttcttgagctaaaatttctctttcgcgattaattctggacatctcttgcaacctccaagcttcttccctaaccattctctcttgctctcgtttctcaatagcttccagaaacttcttctgcaaatcttcttgtctctgaatcacttccttcatcaatctctcaaagaaatccttccacttcctcttcctcttcctactcctcctcccaatttcaacatcttccatctcctgatcatgatcgttatcatcagaagacgtagaagacgatgacgtcatcgaattcgaaacaagatccgctgaaatatttctcataaatgtagctgtagccgcagcagtagtagtagcagtaggaggaggaggattcattgccgccgaagatattatcggcgccggtggtggtaaaatcgaagtagtagcagtagggtttgctgaaacaaacggagattgaaatgagatgttcatggcagtagtaccaatcgatggaacagtagtagtactactagtagtaatattttcaggcaatggcgccattattggactattattattgctcggtggcggcggcggtattgccgatgctgttgcagctggttgatgaggtttgggaatatttagctgtggctgcggaggcggcggaggtggtggtgaagatgatgatgatgagaaagaagagatgagttgatgatgatctagagcttctaattgatcgaagaatcgatacgtttttccgtcggatttaccagttcggccatctttggttcttttgtgatacttgtaaacgttttcgaatttctccttacatttcttggcgcttcgatgataaccaagctcagctagcttcctgtattaatcatatatttatgtaataataacaacaacattagtttaatttttgctgtaattaattaattaaaactcgatcgatgcaataatattatatatatatatagcatgaaatatgatgaaattgacagccacacagggaaatgagtttatttatttatttattttatcagtgaatttttagaaagggagtgatgagagagctaactagctactactgatgaagcttgggatttagcaataacgatatatttattattacagtacgatattgtatgtatatatatgccatgaatgaata

SEQ ID NO: 258696 - DNA, 547 bp, Cannabis indica
gcgtgctctaggttgtgtcccaacatttcccttattttcttatgctgccctggccgcggttgcctcacgttcaaactcagcattgcgccagtttgcctcctccaagtggcgcccaagatgacgattttctaatttgacaattgatatgtactttgttggatcataggcgccatcctcaccaactggattagggagaggactgccgttgttcattctaggcccttcatgactgattcccagattatgggttctctccgaactagtagcccgtacaaatggttagttgaaaggcctccgagaacccattgactcttttctaggataatgtggggtttctttgtgaggtgtgtcaacattttcttcgatgttagccatgaagaggattatattttatatataaggaaggtttttctaagcttttttttatgaaggctctcaataaaagcaccaaactattaacgtagattttcactaactatatttgaaccttaattgtgatgaacttgcacagaaaataaaaacaataaagagaaaaataagaacacaa

SEQ ID NO: 258697 - DNA, 788 bp, Cannabis indica
aggctgttcagactagatggacgccaggcggaataccaggagtcagggcaactcggtcgggtcaaatcagggtcaaggagctcagtttcccccgaatgttagggccgtggtagaggtcccaagggcagggcccgtggtcggggtggtgataacccgccacaggctgcccaagccgatcaggaagcctaaaattaggaaactaggtttgctgaaatgcaagccagaatagaggagcaagatcatgagattcaaagattgaggcagtagggtgctcctgcagtggcagtgccggaagttcctgtggcacctgcccctgttgctcaggccgaaatagcggtaacgggaaatagaatggaacccttgtatgaaaggttccggaagcaggcacctccggtttttctgggaggtccggacgtcatgaaagccgagtagtggctaacagtgattacaaaaatattgaactttatgggtgtccctgggaatgacagggtggtgtgtgccacctttcagtttcaagaggacgcgttagtctggtgggacatggtgtcccagattcatgatgtcacaactatgacctgggaaaggttccaggagctcttcaatgcgaagtattacaatgaggtcgttagaagtgccaagagaaaagagttcgcgcacctgacccagaatgaaaatatgagtgtgactaagtacactacacagtttgacgggttagcaaggttggcctcgggaatcgtgccaaccgacttcagtaaaaaggaaaagtatttggatggattaaatgtgaa

SEQ ID NO: 258698 - DNA, 1915 bp, Cannabis indica
ttttcacttgttcgtattcaaaaagtaggaagacaaaaaaagaaattaaaatcagcgtagtattttccaataaaaaaacataacaagttttaacagtcttattcttgtaggaaattgataggtgcaagatactacaacacaacactactatcaaaatcatacctaattaacaagagccattatggtaaagccaaaaactctccaagggatactattggacatgggacacacacaacatccattgcagcaggagcaagagttgccaatgccagttactacggtttagccaaaggcgtggcgagaggcggctctccttccactaggatagcaagctacaagacatgctcggccgagggatgctctggtgccaccatcttaaaggccatagatgatgccattaaggatggagttgatatgatctcaatctccattgggatgggttcactctttcaatctgattaccttaatgacccaatagccattggtgcttttcatgctgaacagatgggagtcatggtcatttgctctgctgggaatgatgggcctgatccttatactgctgttaatactgccccatggatctttactgttgcagcttctagtattgatagagatttccagtccacagtcattctgggaaatggacaatcttttaaagtaagccttctaaattaaacttctcacaagttcacaacatagtgtgcatgtttttttcagtctaagccaccaaaattgagcgtacaatgtgctcatatcttaatgtttgagcagggatctagcataaatttatcaaaccactcgcgctcgaatgtgtatccagttgtgtttgggaaggatgtggctgcaaaatttacccctgcatctgaagcaaggtggttaaaattcatgattctttttttcttgaatagatgtattattatatgaatgtgtgtggtttatacttgtatcacatgaataatcttcttgtagtaactgctacccgggatcattggatgctaaaaaggttgtaggcaagattgttgtttgtgtaaatgatgatcctacagtttcaaggaaaatcaggaaactagttgtagaagatgccaaagcagaaggaatgattttaatcgatgatggtgagaaaggagtaccttttgactctggcattttctccttcctacaagttgacaatgatgttggctcacatatcctaaaatatatcaattctaccaagtaagctttatgtttacatttactaacaaatcatactctttaaaaagctcaatcactataaatactactcaaactagtttacattcaactttgcattaattggaagtatgtttttttggctacttttctaattcatgaaaaaaggaaaccaacaggagcaattattcctactgttgaagttctaagacaaaggccagcaccaattgttgcatttttttcatcaaggggtcctggacagatcacagaaaacattctcaaggtcattataactactttcacttccatcttattatttgtgtagatgccaatttcttaaagcttttgtaatgtgcattaaaaaagtgaaacaattttccaaatttcagccagatataatggctccaggagtggccattttagctgctatgataccccaaagtgatgaaccaggggcagtcccaacaggcttaaaaccttccgattttgctttgaaatctggaacatcaatggcttgcccacatgttacaggagcagctgctttcatcaaatcagttcgaccgaaatggacgtcttccatgatcagatcagcactcatgacaacaggtgaaaaaaattacacaaaatcttcacttagaactggaattatccctttcaagaacaaaatttaatctatttttctatgttttgatgcagcaagtgaatacaacaacatgggaaaaccatt

SEQ ID NO: 258699 - DNA, 793 bp, Cannabis indica
ttccctcactgacataagaacacaacctaacccttgcttggatgcatcacagtatatcacaaacttttcatcacttaccggtaaggttaatacaggagcggtaatcaacctttgtttcaattcctggaaactactttcacacttatcagtccaaacgaacttgcagttctttcgagtcaactctgttaagggcgtagaaatctttgcaaaaccttcaacaaaccttctataataccctgccaatcccaggaaacttctaacttcagttgctgacttaggtcgaggccaatctcgtaccgcttcaatcttcactggatccactaaaataccatctttacttactatgtgtcccaagaaactcacctgaggcaaccaaaattcacatttcttgaactttgcatacaacttatgctccctgagacgttgtaacaccatccgaagatgtttttcgtgaatctcttctgagtctgaatagattagaatatcatcaataaagacaataacaaaatcatccagaaaatctttgaacactcggttcatcaaatccataaacgctgctgaggcatttgttaatccgaaggacattaccagaaattcatagtggccataccgggtccggaaagctgtcttgggaatatcctcttctcgaatcctcaactggtgataaccagatcgaagatcaatcttagggaagacggtctttccctgcagctgatcaaataaatcatctatccctggcaaatggtacttattcttaactgtcaacttgattaactcccggtaatcaatgcac

SEQ ID NO: 258700 - DNA, 524 bp, Cannabis indica
ttcagacctatctctctctgcaatgtgctgtataaggttatatcaaagattattgcaaatagattaaaacctattctcccttctctaatttgccctactcaagctgcgtttgttccaggaaggaatatccaggataacaatgttatggtgcaagaaattattcattccttcaataggaagaaaggtaaagaaggtttttttgcgatcaagattgaccttgttaaagcttatgatagagtgagctggaaatttattgatcaagttctgcgggatttcggtttccctcaacaattctgtagttgggtttctcaatgtattaccacttcctccctcaatatttgcctcaacggtggccctgttggtaagattcttccttcttgtggccttcgtcaaggggacccgctatctccctatctgttcatctgtgctgcggaagtgttgtctagacttttggaggatgagttaggaaaaggaagtatccatggtatcaaactaagtagagggggcccggtgctatcccatgt

SEQ ID NO: 258701 - DNA, 578 bp, Cannabis indica
caaggacttctttactctacttcctcttcccttcaactaagaggtttctctgattccgattgggcctcctgccccgttactagacgctccaccaccggcttctgcatattcattggcgattgcttaatatcttggcgaacaaagaaacaaccaactatatcacgcagttctgctgaagcagaatatcgggcactagcagcaacgggaagtgaaatcacttggcttcaataccttcttcaagattttcaaattcctcaagagcaaccagctttcatatactgcgacaatcaatctgctatccacatagccaacaacccgaccttccacgaacgaactaaacatatagaacttgactgccatttcattagagacaagattaaccgctccaaaatacgcctcagtccagtcaacagcaacttgcaactcgcagatgtgtttactaaaccccttgcttccacgattttaacttctcatataagcaaaatgtctgtacatgatgtgtacagtccatcttgaagggggggtattaagattcacttactatagttctctatgttttagttcactgctactgttat

SEQ ID NO: 258702 - DNA, 493 bp, Cannabis indica
atattatgatagcgtttgaggctatgcactatctcaaaagaaaagcgtaaaggcaaagaaggctatatggcgctcaaaactggatcttagtaaagcttatgatcgtgtggagtggggctttcttcgagctatgatgagtaaaatgggatttgatttgcccttcattgatcttgttattgctacggttagctctgtgaggtataaaataattcatggcggacatgagctgggtccgattgttcctgagaggggtatagacaaggtgatcctctatcaccttatttctttcttatttgtgctgaaggcttctcatctttgatatagaagttcgagcgggatggtaggcttaaaggttgcaaggttgctaatggggctccggttatatctcatatgctttctgcagatgatagttatatctattgtcgtgcaaatgatagagaggcttcgaatatattacatctgcttcagctatttgagattgcttatggtcaac

SEQ ID NO: 258703 - DNA, 572 bp, Cannabis indica
acaacaaaatatttaaacattatattcaccactgtaaactatttaattttttttaaaaatttactgatagtcttaataaataactataatgtacacgatcatgaaaacaagttaaattaaaatacactcttagatgctagaccagataagaagtctaccaaaataaacatttaagggggtgtattataaacataccctacctttttatgttttcattacttttatatatgtaatatatataggaaatttttgtagactccctaaaagggtattttagcagaccattgatctgtttcgataacgggaaaagttctttagtttatttttttttattttcacgtactttgtacttatttaggattacatataaatttttaaaaaaatttaaatagtttgcagtatcaaaaataaaactcaaataattatttactacatgtataagaacagatatttatatgtgtaataaaatatttaaactttatttttatcagtaaattatttaaaattttaaaaaatttacaaatgaacaatcaaaacacttaccttatcaccaaaaaacaaaagtaaaaaac

SEQ ID NO: 258704 - DNA, 657 bp, Cannabis indica
tttttgaaaatatacttgtgatactatgtgtttaaacatattaaagtttatatctaattgtgtgtttagaaaatatatgaaagagctttcgaccctctctccttggttgacatttctccctgatattctgggtgtgggtttccaaatttttattgtgttttctcctctggttatcatggataatgagggttttgttgcattgcaatcagctatggattttgatgggaatgatgattatgatttggattctttaattgtctctaagggtgttgatagagtctctaaatctcttattattaatgctcgccttattttaagggtgtatcatttttgagacgccaaacatgtaattacttaagggcctttttgagtcagtaattgttaatgtgttcttaaggaagcaccgtggattttaaaacacgttttgccaacgggcattggcaattatcattatctgaattttgattagatttccttttggattcaacttcataacttccctatttgtagtttgtcagatgaaattggtcgtgagatggggagttagtttgacaatgtggtggagattgattcccacttgcaatcatgcaggacattatttctgtgtatgtaattctattgatatcactaaacctttgactcatgctctgaaggttg

SEQ ID NO: 258705 - DNA, 582 bp, Cannabis indica
aaaatgatacaaaatgaagaggagagcaagagaaatgagtttttagctcaaatcctctctttgtaggttgccttattctccttcttctcaatcttcttcttctcttctttgtactctcttcttttttctttctttctctgtacttattttgttctactgtaagttttcgtactagcccttcaatgtgaagccaccctttctattctatgtccttctctttctttttgctccccaattacggtaccaaagtttaccctaattggaaatccaagtcatcgcccacttttccttcattttccacctatttgttgagtcattaaccacatttcgcaacctcagctcatttttctcttcattaatgccagctggactatctgccaaaataaacttactgggctgacaaattgctacgcgatgattgctatagcaatgccagtcagcaatcagcatttttctgctccttttcctccttttcccaaatatttccaaatacctattcttgcatttttttctgctgaatacacataagaacaacaacacaactctatttaacacttactaacacacacacttccatttatt

SEQ ID NO: 258706 - DNA, 390 bp, Cannabis indica
gccctgtttgtgttaactgagccgtctcctgaacagccaggtgacaatgcaaccaaagctgttaaagagaagttcgagcgttggcagaatgctaacaataaaggcatctatccagtctcgctttgacacgactaagaaattcatcaacgcacggatggaacgccatcagaatgtgcgtgatcaccttctccaaatggcaggttatttccaggaagcccagaatcatagtgctgaaatagatcaaacaactcaagtgagtctcatcttgaatagtctgactccagattttctgccctatacatcaaattatgtcatgaacaagaaggaacaagactttcacacgttagtcaatgacctttagtcatataaaaatttgattggagaacccaa

SEQ ID NO: 258707 - DNA, 1299 bp, Cannabis indica
ctattcgtacacccagtacaagtagtggagaggtgcatggaaatggtacaaaagagagccagaaaatgccatctgtcaccaaaaagatgagtcctaggatttcaaattccaacaaggaacattatgacccattacaggtaattgagaatcaccctatttctaagttgggctctaatccccatgatagtaatgttattttgagcctgatgccaaatgtgggccctacggctttgcaaatggtggagctccctcatgaagccatctgcaaatcaagaaccccccacatgcatcctgagcccataattttacccaagcccaattctgaaaagggagagagacttgttacaaagttgttgggctcctctattgcatcgggcctgcctttggaccgtgaggcccattcaaagaaaagaaaggctagtggaagtgtaacacctattgtctttgacaataatgagaaaaatgaagtgggctctttgagtgggctggctgataacctctctttctctgtgggaaaagatgatggaatgcaggggaacaaaagttcagagcgtaagaaaagaggatcgaagagaaactctacttctggtggatcgatacacaaaagtggtggaaaaatttacactagatcttccctagcccagaaagactcaagcaatggcaacgatgaatcaatggagaaggatacagtatctgggcagcatggaatggtcattgagattaatctggatcagaattttcacatgggcgaggaggcggcccttatcaagcccccctctacccaatgagagcaatttcatggaattgtcgagggtttggccgaccctcggcaattcaagctttggcggcctgggtgaagaggtttaaaattgattgcatctttttgatggaaacgaaagtcggaaaggaacaaatggttaagataagtagtgctttgaactttgattgtggggaattcatcccttctaagggcttggcgggtggattttgtctgctgtggaacaaacaatctgggattatttcggttaccaaacaccgaactggttttgaatgtgggatatgggatgctgatatctctgctcgatggacgcttcttgcgttatatggcaccccatatgaagaggagaaagatttgttttgggaagaatgttcggatgtcatcaagaattgggatgaaccgtgggctgttatgggagatttaaatgtgatttcgtcaagtcatgaaaaatccgggggccgagtatttactcgtaaggatgggctttatctcaatcgatttttgtgtgatactggcggaat

SEQ ID NO: 258708 - DNA, 364 bp, Cannabis indica
aaaataatttccaacagtggatttctcaagtcactggggtaatcaaggaataggtaatgatcagcgagagcccctggtgctatggagatacatcaacaagttaatcttgctccaaggagacctagggttcctagggttcaaaaattcttcaaccttcttctttttctcctttaatggcagctagggttcttccaatatttttcttttcttctttttcctatttcttgctacagccgaaaatactaattttgtaactgtttttcttttctattctaatggcagtaacgaaaatggttaggttttttcaacagaaaaagcaaataaaaccagaaaactccccttaacaaccagcttcagcccaata

SEQ ID NO: 258709 - DNA, 923 bp, Cannabis indica
agaggatggaacattagaaggagttatatctgaaagcatttcctctaatactactttgctttgtggtttgaaattcttaatatagtcatcttcaaggaaagtagcatttgtggaaacaaacactttatcatccttgcgactataaaataatccacccctagtctctttcgaatttccaacaaacatgaaaacctcagttcgcttctcaagtttgccatgtttctttcataagacctgagcaggcacccccagattcagtaatggcgtaaacttggtgtacgaccattccatagttctaaaggtgtcttaggaactgatttagatggaacaacatttaaaatttgggtcgccatttgaatttcatatccccagaaggacgtaggtagacttaagtagctaagcatggacataaccatttccaaaagcgtgcgatttcttctttctgcaactccattttgctgtggagtgctagtggtagttaattgggattcaatggcacgttcgatcaaaagatctttgagttgcataaccatatattctccacccctatcagttcgcaagatctttaaagttttacccaatttgttttgtgccaatgcgagaaattcttgaaagttttcaaacatttcagatttcttatgcataaggtaaatgtgaccatatctagagtaatcgtcaatgaaagtgacaaagtactcataaccacctctagctttgacattcagtggtccgcaaagatctgaatgtactatgcctagtggttctttggcacgctcccttttgcagagaaagaacatttggccatctttccttctaggcaagactcacatccaggtaattcacctaagatgatatttttcaatggaccgtctttggttaacctattgagtctgtcctagcctatgtgacctaaacgtaaatgc

SEQ ID NO: 258710 - DNA, 526 bp, Cannabis indica
tgtcttagcccaaagtcagaaagatgatggtaaccatcataagtatttgagttcaaaaactgaaatttttctcatggtgcttttaatcggggcatttttcttaatttctattattaaatgtatacatatattatatcacgataactttcacggtgatgaagaaaatccatctgtgcaattatctgtgcaaaatgcatctgaagataatgcaccagccgtgaatttacctgtacaaaatgcatctgaagataatgcaccagccgtgaatttacctgcacaaaatgcacctggagaaattgtacccgtgcttactatagatgcatttcccgaagacaagtatccgtatggagatgatacaatatttgaaggagaagaatgtccaatatgcttagaagaatacgaagagggagcgaccgtaagaaaatttccttgcggtcatgtatttcaccctgagtgtatgcaaaatatattaaacagtagacttaagaagtgtcctaattgtagatttatgtttgcttagtactta

SEQ ID NO: 258711 - DNA, 2551 bp, Cannabis indica
ttttgcagttttttagtttcgcgatgcgggtgcgatttgggaaattaaaaaaaaacacatgtgcgtgatgatttgaaaaaatagtcaaaaaccgcactacccgcaccgctaacacccctagtatttatagcctcataaagaaggtaaaaagtttactattgtcgcaagtgtagaagcattacttgtacaaatttccaagttcggataacatggtatttatgtctgtttggtaggttgtataggcatttcatgggtatttggtgagataagcctttaacctttcttgattgatgcaatagttcattatgcagccgtcataatattcatagattagagtgtaatcaccgaataataggtttaatgcccctaacacgtcttttcagaaccattcatagtcgtcttccccatactgcatttaatgtactcataccagctcaggtctgggatctaacatccggacccggatgttttatctagctccttgaggtgggcataactcttgacttggcacgacgcgactgaagctccaagaagggcttcctagacatgaccattaggtctcagactgagtcttaagaggtttactttacttactctagatatttaggctttcctgccacctaaccgacttcaagattgtcacgtgtgttagaaaaaatcagggacaacatctacccccaagtctcattttgcacctttgtaaaatgaaacttgctactttcctcagggagtgatgccaccagccatcatttagcacgcacgtgagtcatttattacctataatcatttttctcatttttggtgaaaacgattcgattcccacctgttcgatagagcctttcattaatatctttgttaggaaaatactcgagtattgcaatttcccttttcactatattttcttactaggatgtcccgaccattggattaaaaagattcggatagtttgagccttgaccattggatggtcgtcaattagtatttgccttggaaggtctataaatgcccgtgccttttccttctgagatttttacccactcatcttttttcacttccaaagttttcctaatcttttgccaaaattccactctccaaattgcatctttctttttctccatcgctgtcaggcaaagttctactggcgtacgacggtctcgaaaacctctgctttccctacagcatgtaagtttcaacttcgcccagtttcaacttttgaactatcatgcatgcatcactacacaatatggttctcattttctttttgttttggtcttttattatcactggaaatttcctttgaactgccattttttgggctgcttttctgaaaactttcgttttaagactatggttggaatttataggcttatggttcgtaaaaattgcagtgtttcccatttttttccttttccttgttcaattgttgtggctaggatgtctttcacccgatatatggcaacatgagtcattgataattgctctgcctacattcagatggggcctcttctcagcaattagaggaccctcattcccctttttggcttagggtttaatgacggggctaactgttgggtttcaggtcttttaaatgagtggagttctataggatcttcacaagtacagtttctacaaatttgaccaagaaattttcgagctccgctcaaaaggcactatgtcgaattctaaagtgccatccaacgatacccctatcggtactttttccgcagccacaacagtcctaagggtcatccctttagatgttgttatgcaaggcctagtgccctacaagaagtattcttgtcgctccaatgactcggaagccaatgagttacacttgtccctaacatgcgatcattaattggagaagatcgtagcatagaatgggatccagccaaccgatttcagagtgtaccatcatctgcccttggatgaagaaatgcctaatcacaattacaataattttggagcatggagttagacccatcttaagttaggagccatgttaccgcttcaagactatttcattaattttacgtttttgttggacaagccccatataaactgattcctcaaccttaccgcctgctctcaggccttttcatttttatgctgtaaaggctagcccactcctagcccacaaaattttatatttttacgaactactatccatccccaaaaagggtgacaagtacaaagatggattttataagttactaacccatctagccaatgaaaccctagttcccttcaactctcaaaagtatatcaaggaatactgtcataggtttttctcttcattggggttcaaaaccttcgaacgctcagaccttctgactgagtggggtatgatcccttctttgcaccgaacggctcccactaaactatttttaaatcatgccaaaatatttgctggttataagagggaaaaattgaatgtgggtgatttgatgactacttttaattgctgctagggtaaacttatcttgagccaccaaacatttgaggacttcaatttatccaaggtatcatgccccaatgccaagaacctagg

SEQ ID NO: 258712 - DNA, 766 bp, Cannabis indica
taccgcataaacaaaaaaaaaatagagtttaacacaagcaagtattaagggaaaagccaagcatttggagcagtaggaacagacccatccgcgactttgctgacggcttcattctcgacttcttcagcatccgcaacctcagcttcctcgggaagattccctccaccgccttgagtttgtgcgggcgacatggcacgaaaagcctcagccatttcagcggcttctgctccaaggattgaaaagtcgaaatctggaattttggagagagtgttttgtatgtagtccgaaaccgcctgatcatactacttcttcccatttctcgacctccaaatcacgagacatctcctcgatcttcgtctgagcactcttagcctcgagctcgacttgctccttggccttgcgaagttcctcgagctctttatccttggaagtcgcatcttgcttcaactttttaatgtcctcctgaagctgagcgttctgtctcttcacgagttcgacctccttagatccagtaacaaaggccctcgagaacatggcaataaactgcgaagctagctccacggagcgaggcagcagctcctttacaggagtcttgtcgatcttcgattggaactcatcacttacaaacttctcttgaagagacagtatgttgcgggctcggacagttgggtcaattacaaccttcttccctttctctagtatccccttagctggcctcttggaagaatccgtgacaggggtaaccaccacatcgctcttcctcttc

SEQ ID NO: 258713 - DNA, 2105 bp, Cannabis indica
tagacaaacaaacaaatatataaaccgaaaaaagagttgtattaataaatatccagaaaagaaagtagtttcaccttgagtcattacgagaagaagtgtcactcccacgagccttatgaatgggcctaggcccagatttaggcccatctttgctggaagatttgttctgaatcttctgctgattagtagaatgatcttccgagatggcatggaggcccggccgccaatgcgtcgccgaattacaccttctgcgcttggaagaagacacgtggcggccactgttggtagccacgtggacgttagtagtctcctccggcggtggcgctgcccggcagcaagaacccagctccgagaaattgaagaacttcatattttgtaaggtacttgccttagatcgtacgtaaactaaagttaataaagccttattaaattaggtgtagatgaaaaatgtgctctttttttctctttattgggtatgaactaaagaggtaaaggtaagggtggtagtttatgaatcattttctttttcattcttttattcctatttatacatataaaaagtctagccaatttatttatttatttatttatttttgtgataaatacataacggacgtgtatcagtgaagccaaagaaagtagttcgtccttatctgaacttttgagtagtgttaactaattatcagttacacaaattatatgggcagttttattatctgtgggcgttattattattattatttgaaaggattatttgtattactagtattcgataaattgtttataataatgttctcaactgtaacatctccatttaatacctgaaccccacaacattaactagtgaaagcatatataattttcagtgtcaccatctacttcaaccaattttttgtgtttggtcattttctatttatgaaataaattgtaatttttttattttgtggcaaaaattaatcgcaaatgaaaaatctagaacatggacaaatattttggaaaacttgtagaaattaaagcatataaaaacggtgagcatcactctagattaatgactcatcgcggtggaggaaaataccaacaattctctaaaattaacgaaaatgaacaaagcaagaacacatgggttgagaattacaggtattttactctccacgattgatcagtttatggcttcaagatctctcagcccagagaattacattccaacaatggaagccaatcaaaaatattgaaacaataatttataataatgagttgttgttaattatataataaagtattatatagtataaaattattgtgaataatataataacgagaaacagaaaaagtagaagaaatgaagatatatagaaagagaaagtaaaatgagaatttctgactcttttactcaaaatatgaaaaaaaaaaattaagaactaaattaaaaaattatattgatagtcactttaataattttatatattttaattttattttttttctatattttttaaaatataccaacttttatagataatgttcccattatacctctagatcaatacaaattatgtgttatgcttaagtagaaggtgagggtatattgagcaactcactcataaaagggtatattttaatgaaaaataatttgagggtatttttgattaatgaatacaagaattaattgagaaatttaacttggtgatttgaacattcaaatatattatttataacacgcagggccgactttaaaatttagtaggtcataggaaaaaaattatttttgggcccttatttagaaaaaaaaaatgtggtatttttcaaaattagcaagaaattgtataattttaaaaggagaaaattttttgggctcctagactaggtggaccctacgcacagacctagcctgcctatgcccaaggccgagcttgataacacccttccatgaatgttcataataattgtctcattaaaaatgttattagaaaacacaataggacaaaaaataggttaaggaaaaagaagtgcaatttgtatttactcccccttacttatggcatctacgatatcctgtagttgatgcattctcatcttgtgtgcgtctaatctttttgtaatgttga

SEQ ID NO: 258714 - DNA, 817 bp, Cannabis indica
tgtatattattataaagtgtaatacaaaattaatgaccaattttgtgtagataccataagttaatttataatttattgaggagccaaattataaatacacaaaactcattataatgagattataaataagtagtggccctcaagaaacactagatttctatattctctcctttcctatcagagaatagtgtattattggaagatcataacattttctaaaatttctaaagcttcaaaatagtgcttccactcaacttttatcatcattttcttctttaatttaataaagattctatagatttataatttaaggttttttatattaaagtatttttaagaatatatttagatgtgtgatatatatttcttgagtgaatcttaacaagatcattatagtaacattagtaaagaaacgttaatgaccttttgaatcagctaatttttatggcctctccatatagtaaacttggtcaattgtggggtttactttcatacttgcaaattgtcaggtattaatgactgacaaacttacgcttgataaggataaattacatgtttgctggcgtttctgtaatcttcaaagaataattgaaggagaaaaatgtgtgtgagagagaaagagggagagagatcgttggtgttggcacatacaaagacaagacaagactgtacagcagaatgaaaggtaatccttggctgtttcattcccttccaagttccatatacatttcaacggagtgatgtattatcatgtgtttatatacactaggagaagaccaggagatagattagatgagtgagatttgcttcaaactat

SEQ ID NO: 258715 - DNA, 402 bp, Cannabis indica
taaaataatttccaacataaagctagcccaaggtgtcaacttaggcgttgtgcccttttttggtactcataaatgattgtttctcctctaaaaaggacatatttccccatttttgaagaagacaaagaatttttaaaagtcagatctctgatcgaatacttggatggtacccagattaacagattgtcaaatgcgtgctaagtgcttgggggctcagggatccaagtgctcaaaaatcaacttgctccgattctaatttgaatgcctcaaatatgtccatggtatgtctagttgatgacccaatgcaagttttgactcttttacactaagactatcctaaaaattgaaaccctagttgaggatgttaacttgggcatcgggtgatgttgggctttgtgccct

SEQ ID NO: 258716 - DNA, 1094 bp, Cannabis indica
tttttatcccagtttttatgtaataaccgggattaaaagtctctttttgtcccagtttttatgtaataaccatgataaaaagtctcccttttataccggtttttttaaagattttttatcccactggcatatatttcagtttttattttagcgaaaaccgggataaaaagttttcaaaatcgggattaaaggcctttgtttgtagtattgatttttcatgctttttttctcttgtattttgcattatacctagtttggattgatggggagctccagatctatttgttagttcaagtcatgtattgtcaattatgacccctacattttacattatttttatttgtatcaaaactattttcaaactattataaaactaacatgcaactaatttcataaaactaatcatgttctagaagtgtttttgaagtgaattctctttcttcactgtcaaataaaatacctgcattattaatgaacactattatgaaatgttaatgcaactataaagcaacctaaaaaaactcggaacatacttctacatacgtggttgtagattcattcaaattttcttttctttttttatttataaattaatatattcaatattagaaatctgaaatcgaagacaatgcaactggatacaccttagatctattattcatgattttttttcttgtatttgcagtgtacctgatttggattgatggggagttccagatctgtttcttagagatctatattatatgaatctgaatttcaaagttaggaggagttgttttgatagaataaaactgaaatacagtgtttaatttcagtttcgacccaatttgtatgctcttatttttgtcaattttagtttccattgtttcatgttttcttttccagtgaattcgtcggaattaatggtggtcttcctcctgatttggtttcatttcggttgtgttgtcggtcttaacgatcgaagctttttgttggtgatcattctgtttcgtgcggctgaaggtttagaggaggtggtacttttgtaattatttgtttgtaagctgtataaatgttgaaatggtcgacccattgtacttcagtatttttttttt

SEQ ID NO: 258717 - DNA, 743 bp, Cannabis indica
ttttttttttacacatattgagcctaaaaagataaacccatgaatatcaaagatatttaaccctaatcataccataagtagatctttagtttgggggaatttggatggaaagtttgttgtatgtgtgtggaaaaagtgtgaaaattgagagaatataaaaaaaaaattgattggcaacaacttgaaaaaaaaagaagagaaaagaaagaaaaatctgacaaccagtgtcaaataaaaaaaaaaaaaaagataaatataaagttgttgcaaccttgttgaaaaaatatatctctcatgtaattaaaaaaaaggggtattgggattgtgtgaaaaatattttgggtgacatgattggagaagcttatggtatagtaaagcctaaatgaccatttcaactacctttaccctaagcctaacattacaagcctagaaagaccttctgattcttggttgtgcattaatctatattagtggagaatagtaagtattgcaagcatatggaattttgggttagtggattgatgattgtaattggcatgcataaagtggtttaattgttagttaattgcattctatggtttcatgagctaaatgaaaataaattgaaatctgtcaagggtgtaattgaactgaaattctggattatatgtataagtgaattttttcataatcatgttattgaagctacttaaaattactcatgttttggagattgacttgtttaatgtttatttagtgtctta

SEQ ID NO: 258718 - DNA, 631 bp, Cannabis indica
aagaatgagatcctaactaattataatccaaaagcataaacatgatttctcaaattaaaatgaaagatgattagatgctagaaaagaaaaacttaacaatattgtacaaaaatatgaacaagagagattagacaatgcaaactcccaaagacgttttgagggagtcaaagcgacttgagtctagggccttggtgaaaatatcagccctacctccggccactccaccaatgagcgacataaaattctccgctacaccaggatataatcagagcccagcctttactcccgcatcatcgcattttgggaatcccctaggtaactcctcagggatgaacggacaagccccgtcgcactccgctcccactgcaagcctgaccggacctcctcagagatcaaggagcgagagatcctcaaaatgcagcaactggacggaggacaagcgacaacaaagggggtatacccctcaatataccatgtacacggagctaacggacacgcaagagcgagtatatttcgccacaaggcaaaatacacactaccggaagcctcctcctccgtacagggatagttcgcgaagggatcccagcaagagatgcaaataccacaacgacattggacacaataccaatga

SEQ ID NO: 258719 - DNA, 920 bp, Cannabis indica
tatagtggcctggttgcccacacttgtaacaagtcttgcctttcagtcgacattctcccggatgcttacgaccacatgttgggcatagggggtactccacatatggcttcttccctttgtagttattggaccctatcttgtttctcttgtcggcttcgttgtgttggttacttggcagttttcttttgttatcaccacctccattactggcctttctggcctcccaccttgctgtattgtctttctgtatacgactttcacacaactcagcttctagggctttttccagtacctcagcatacgtggttgcccttactcctgacatcgctatgtcccgacttattcgggagtcgagcccttcagtaaaacgatgaatcctcaaaaactcagtaggaaccagatctgtggcaaactttgctaatctgtcaaattggcgagcatactctgtaactgtagacttaccctgcctcaggtttgtgaactcattaactctagctgagcgtattgcttcactgtagtatttttgttaaaaacttgtacaaagtcagcccaggtcattgcggccacatcccgtgtttgtttaataacatcccaccagatgcgggcatcctttttcaataaactagcagcacaagctacactatctccgttaccgagccgcatgtactcaacaataccttccactgttcttaaccattcctcagcttccattggatctgagcccccttcaaaatttggtgggtgttgcttagggaaccttttatatattagttcccaccgaccctccagcactgacatgtattatactggcaaaaatcaatgttgtccctaattgggttgttcccgacggttgtgaagttcttcatctcgcttcctaagttcctccttgagacgagtaacttcttgcgccaaatcttgtt

SEQ ID NO: 258720 - DNA, 526 bp, Cannabis indica
catgtttagaatcctgcgacagtataaaatgcgactcaatcccctcaaatgcgtctttggagtgggttcaggaaaatttctcgattttatggtgaatcagcgaggaatcgaagcaaatcctgcaaaaataaaagctttggtggagatgcgatctcccaccaaaccaaaagaagtccagagtcttacagggtaagtcgctgcactaaataattttatatcacgttcatctgataagtgtaaagagttttttcagatcctaaaaggaaataaaaagttccaatggactgataagtgtgaagaggctatttaggctctgaaaacgcacttggggcaatccctgatactatccaagtcgatgcttggagaagttttgtcaatctacctcgcagtgtccgaatacgcaattagttcggtactaattcgcgaagaccaaggtatacaacatccagtataatatgtaagcaagcatctcttggacgttgaaactcgttatccataaatgaaacgactagcatttgcactggtg

SEQ ID NO: 258721 - DNA, 577 bp, Cannabis indica
gcagaacctacttcactacagttgaatatttaagatattcaaactaataaagaattttaaaagttttagtgataatattatacttttctccaataaaaatagctacttgtgcatttttcaatcaacaccaagaacccgatactataacatatttaaaatattaaattaaaagcttcattttataaacttatcaattaaagtaaaagtagataaaattttaatttttattgctattatcaacttatatgtaagtatgtatatactaaaaatacaaaaatatatatattatcgataatacttaaacttcactaaaaatattaacaatataattttagtaacttatcaagtctaataaatctaccaatcaacggactcagacaagatcaccaccaatacttaaatataattaaaattaacaatgctaaacacttcaattttttcctaagattttaaaatattgaataaaaaagtttaagtagcttaccaagtttaatatagtgtcccgaaaattttcaaacaatcaccacaaataaatacctacacaaaattaacattaaaaaattaattaaataattaa

SEQ ID NO: 258722 - DNA, 609 bp, Cannabis indica
aactcgccaacaaaaaccagagaagtgcaaagcttaactgcacgaattgccgcactcagcatattcgtgtcaaaataaacggacaaatgtgttccattcttcaacatcctgcgaggaaacaaaaagttcgaatggacagaagaatgtaaaaaagctttccaagatctaaaggcacaacttgcaaaacctctggacgctgaggagctgggaatatacctagctgtcacggaacatgtcgtgagtgccatgctgatcaaagaagagaacaacatacagcacccagtctgttacattagtaagagactcatcgaggccgagggtcgatatccgttgatagaaaaactcgcctactgccttattctaacaataaggaagttgaggccttatttccaagctcatcctgttcaggtatataccgaccagccttacgaaaaatactgcaaaagccaaatgcttatggatggttactcaagtgggcggtagaattgggtcagtacgaaatcaacttccaaccccgaacaacaatcaaacgccaggcattggccgactttgtgctagaatgcacaggcaaagaagaaagcataccagaaagcaaccccgagccagcac

SEQ ID NO: 258723 - DNA, 3036 bp, Cannabis indica
ttaccagacatatcagtagtagttctatcaactaatcttgtacactaaatagtagtacaagattcgtaaagattgttcatttgaatcacataagtaaagttactgcaaaagaaaaaaattccttctttcttgtcttatactcagaaatatatactgcagtgaagcccaatattgtagtgtgtagataccaaatacagtagtcactgacatcaacggtgactaattcatcattctaaataaaagtataaatgacaagatttaattcgtttatgtaacaaagaatcaaatttcgtggaagaataactgaaaaaccatcacctgggaaattcaaaacacaagatttattaacaaataagaaaatataaatgaggaaacaagctaaaaagacttttttaaggctaagattgacctatttgctataattatactgcagtttccttacgtttatacctcaccatgtcactcaccccagggttgaatcagctttaaaatcctatatacaatattgtttcgaaaatctccatgcctttattctaattatgtacttgaaatgctcagcaaagttgcaatgtcaagataactgttagaatggttttgctatttgtatatgaatcatgttcacttgagtagaagtctatactcagcaaaagaatctgaagcaatcacttatctgctcccagttttgtacgctgattcatgcaaacaaatcttctcaagcttcgtaggccaatcttctccgagaagcaaagggttcatttccattacaacccggaaatctatcatggatgctgaactggcttgggtaggtgcctttacaaatctcatatctggcagtgcttgattatgtccattgtttacatgtttatttccagaccttgaaccagccagttctaaatacggctttatcaatctcttcaaataaacatcaaggctattattcatcatgatgacacaatcttctgtaatctttaatccttcagcctccaacttttgctccagcctcttcctaagaaaatttgtgtcaggtagctggccacagttaagacaagtatcaaaggaagctgtggatggtgatacattcaggagtagtttctgtgtcttcttagcatttcttgggatgccaagaggagctgtaagaggactcctgctatggatgcccgggcttccagcagcctgatcaacctcttctccatcttcaacagagcaagggggttcgccacccaaaagaaacaagtcagttgcactttcgtgttcttgagttctagcagttacatcttcacatgtaatgttatggctcttcccatttggcccaagaggacttagacggtccctgaacttgcgatcccggtaactgggggtcctcccctttcgaggtgattggggaaatccattgcacagtgactgaaggccatttctttggctaacatttgcagctttaacactgaaagaaccagcttctttgcttacttttggtggaggtgtccttgaaagacttgcattttttaaaattgatttgatgagttgattatgaagaatcagattgtctctccctattgtactaatgcaaagtctgtgaaactcaactttgctgatcttaaggctcaagtatttttgcaaaagactaaagtacacttctgcttttgaacgcccaactttgctttcaatctgtgattttagctcccaagtattgattctagaaaaaagccgacttgccggcattttgagatccaaattcttacttcatcaaggaaagaaatagaaaaatcatatcaaaagaacgtccaatcaaaaattaaacatctatatcccattctttctgtttgtttcccaaatacaatatctttaaatgacaaagcaatttttgtcaaacaagtcaaatgtaaagtttttcacataaatctttagtaccaaaacacacttattccttttgtttgagagccaacatttttagaaacatatgcagcaaattcaaattcaacacccaatttcaaacatgtacacagaactattcattcaaagttgactaacatctgaataactagcatttttcatcttaatattaatttttttttaaaaaaaaaggtaaagaaaccattgataaaaaaagtcaacagttcttggtaccaaaatccaaattactcaaatttgataaaaaaaataaaataaaaaccatatacaatcacattctctgcacttctttctactatcaaaacttcgaaatttcagacatcaagagcgaattgaacgcacagaccacgaaacacgtaagtgttagcactgatcgaaattccagttccagcaagaaacatatcaacaaaacacgaaattccaatacaattaagctttctgaaactatcaagatagtaaattcaacttcccaatcccagtacccacttgagaactccacccaaaaaagacactaaacagagcaatccaagtttcgaaaccaaactaaaactgctttcggaaaacaaaaaaaggttcgaaaccaaaataaaactagataaaacaaacctgaattagcagaatgcgatgaacaatcgtcctgggcttccttccagaaactacaatttcacgatctctcactcaacacaagcttacttttttgtgcgtgtgttgagattttggggtttttcttcttaattttcaagaagtggtgtaatagaagaaatactctaattttttttcagaaggttctgaagtcgtcgtttaggtcaaaggcacgtgcgttttatgtaaaagtgtgggttgtagttgatgtgaacaacaaaacggtcaaagaaccgaacccgtccaatcatccaaatttatgtaatacattccactagattatgcctaagatggaacacttattcttataaatataaatgataatacatatttgttttgtttgaggtaattaagaattttgaagaaaaattaaataaaaagctaccactaactggtggcaaaatgataatttattttatatatatattataggaaaattttataatgtacctctttaaaagaaatgcatcgatacatctctatcta

SEQ ID NO: 258724 - DNA, 704 bp, Cannabis indica
aaaccgtaaatttaaaaaaaaaaaaaaattttaaaaaatagtatatgaggtaattccccaataataaattattagtaataatgtaattatataaaaatatatatttagtgattcaatattaagttaaaaaaattaaaatttaattttctttaatatgaatttaaaaatattttaaaatttttaatttttattatatatataacaaatcatatatacataaatatatataaattttctaatggaacttaaatctattatttttctcaacaactccagttttaataatagtaaaatgggtcacagtgggtcgacacaaacacgacacgattttttacgggtcgggttagggttgagaaaattaaacacaaatcaaaaaaacggattgacgactgacacgaaatataaaaacgggttatataaaatatgacacgaacacgacacaatgacacgttttaccacccctacatgtgccacatagcacaaaataacagaacaagtaccatcacatataacaactaataaagaaatcacctcttcaatgagaggtctaacaacaatactatcatgtggattattaatccaattaaagacaataatgaaatcacattcaacttttgcaatattaaattggataattacataagacactattttttgtaaaaaaaaaaattacatttttaagtttacagaattttttttacatt

SEQ ID NO: 258725 - DNA, 829 bp, Cannabis indica
atgcacaagtcaattactttatattattaagaccgatctaatgaatcttatctctaggcgtggccccgtggactagtaacaatttgaaaggattgttgaaatcacatacaaaaaccttgtgtgtttttacttttctggactgtttgtttctctggtttcttttggacttacatagttattttttgtaactacagaaaaactgtttacagcaccagttctattattccacatttaattaaataattaaactgggaatattaaaatacaaaatttcaattggtatcagagcgggtcactaaattcttattgagatcttaagattattccgtttaatttattttgtgtgagatatatttgtttgcagaaggaagctctatctctcgaccacatctgttgaatgagtcgaattatccttattggaaggtcaggatgagagcattcaccaaatcacaagatgagaaagcatgtagagctatacttacaggctggtcacaacctactgaaagtgatgatgaaggtaatactaaggtaaaaccagaactcaattggactattaaagatgaaaaattgtctgattataataataaagctttacatgctatttttcaatggtgttggtgaaggttttcttaaattaatttcttcttgtaaatctgcaaaggaagcgtgggaaatctttcaaactcagtttgaaagtgccgctgatgtgaaaagatcacgttttaccatattgcaaactagatttgatgaattgagaatgtaaaaaactgaaactttgtttgatttttatgaaagattatttgatatttctaatgagttttttgccttg

SEQ ID NO: 258726 - DNA, 2204 bp, Cannabis indica
tgtgttttatatttcttgagtgtttttttttaaatcctaacacccttcacttgattaagaaccctatgttgcatgaaagatcaaaacatatagatattaagtaccattgtatcagagacattgctgtcaaaggtcaagttcaagctaagaaagtcaacactgaagataatgttgctgatatgttgaccaagagtgtgaacttacagaagtccaaacactgtctcaaccttctaaacattgacaagtgcaactgagattcatactctctatgaaactcggcttgctcgactctttagtttgtcctaatagctaatacaaggtggatttgttgtgtgatctgatccagctattctaacaacctttcaattgcatctcaactgttagtagttgcatcttttaatttctgttactttttctgtttttcacttatgttaatccatgtactataaatacaagtctaacactcattcatttatgtactgaactagacttagaaacagtgtaagtattgagggttgttaaagagtgcattgtgtttctgatcattgcctctcatgtgagataacttgtaatagtttaggccatgcttgtattggattaaattcagattgaatgtcaattaaagaaagcaaccattgttaaagctgcattgctcaagattagtctctaagtctcctcttcttctcttaatactggttctatattgaatgtgcgttaattctaattagcttgatgatcatttttctttgaattctgttcttgtattggtgtagcttccaacaccaacactcttttttaacaattataactcttatagcttttgataatttcaatttataatgtgtaacttatactcttaatattagtgattattgtgaaggttactcatagcaataagtaactctccaaatattacaaaatgatgatgacaacttgtcatacccccacttattagtatgttacacatacttaatctatactaggttattactacgtgcctcatgtatattcaaatatattttttatttttattatgtgtatttttaaaaatttataatattaaaggaaattattttttaatttttataaaaaacaatatttaaagttctaaaaatttgagaaaaattaatacaaagtttaagagtattaaaatttaacatactctcaatattaaaaataacaaaaaaaataattatattacaaataattatattaatattatatatatttaaattaatctaaaataaataatattcatatttttatatatatttataaaactaacactattaacaccgtaaaatttaacgaaatattcttatattcttaaaatattctgttaaactaacaaaaaaaaaaaaaactgttagataaccacattttatatattatattattcaaaaagaaatataacatttgtttgaagaggcaataaatttctctttactttctttactttccaatgctgtgaaaaacaaccagaatagttcttgcattcataagtggatatgtcaacttgaacaaggttagtgaggttactgatccatttgctaagtgatcttggcagatcgttctctgcaagactcaaacgagttagcttttgcagcatatatagactttgtagaagacaccctccaagaaattttcagaggtgtaataaaggtaaagggagagctgtcaaaatatgggttgatcgatcatttgagctcaagtctagaacctctaaatttggaaaacagaataataattgatcctagtagaaaattgtgggaaagattgagttgatccaaactgcctaatgagtaatgattaagagagcttagctttacaactttcacattatcattaacaggattagtcttcaatcccaaagaagatgaagagttgcattttattccattccattgactaaatcaaaataggaaatccttcaaagcctgcaaatcatttggttaaaattgataggctttcaggtttcatagtcagagagagcctagaattgggtgggagaagaaaaagctgtacattactcagggtgatgaagacataaaatgtagtgagatagaatgctgcgagtgcataatttccaggaatactagaaatccaacctattttagtctctaaaagcagactccttagctctgtcttctcgtgcaacaaagcgtttgcacaagcgacaaaggcacacacaaaaaaaactaagg

SEQ ID NO: 258727 - DNA, 1320 bp, Cannabis indica
ctccatgacaactaggtatatccccagctcctcatcatccagaggtttagaaagcacgggaggttttgcgagctgtgcctttagatcttgaaaagctctttctgtccactcgaactttttgtttcctcgcaatatgttgaagaatggaacacatttgtccgttgagtttgacacgaatctgctgagtgcggcaattcgaccagttaggctttgcacctggagggcttgatttttttctggattggcttcaattcctcgggcattgacgatgaaacttagaaactttcccgagcttactccaaaggagcactttaagggatttagtttcatgttgtatttcctgaggactttgaaacattcgtccaggtcttctatgtgcccctcagcctttctggatttgacgagcatgtcatccatgtacacttccatattttgcgcgatctggtctttaaacatcttgtttaccaatctttggtacgtagctccaacattttttagaccaaacgacatgactttgtagcagtagagacccatgtctgttcagaaacttgtatgttcttggtctggcagatgcatttttatttcattgtagcctaaataagcatccatgaagcttaaaatttcgtgccctgctgttgcctctacgagctgatcgatccttggaagtggaaaacagcttttaaggcatgctttgttgaggtctgtgaaatcaatacagactcgccatttcttgttcggcttgggcacgagtacaggattcgcgacccaagccaggtaaaaagcttcaattatgaagttgttgttgcgcagtttttcaacttcatcttgtagggctactgctcgttctttatccagtagtcttcgtttttactgaactggctggatgttaggatcgatattcagaacgtgtgaaataatagaagggtcaattctgaccgtatccacatgtgaccaggcaaaaacatctatgtttgctctcaaaaattttatcaactctgattttacttcgagcaacaaaccctttccaatttttagctttttggtcgggatagttggatcgatgtcgatctcttctaattcttccacaggtccaagattgctgcttgggtccccaagtcgaggatccacatcttcatccttgccttgggaagtttcctacttggtaatgttttttcccttgtctgggctctggctggaggatatttccttcttagccttgggcactgcaaggttgtaacattcccgagcagattgctggttccctctaagacaccctaccccattctttgttgggaacttcaggcacgagtgaaatattga

SEQ ID NO: 258728 - DNA, 5108 bp, Cannabis indica
catgtttgtttatggtaataaagttctcatttttatgtatcttttttccaaaggtttcagaacttatttattgattttgtttaagcttttgaaatcatttttgggtgttttcatttctcttaaagacattaatcattatattaaaagaaagtgttgctttgttgaatgagaagtaagacttattagttattacaatctataaactctccagtttcctctcatagcaaaatgtgggaagatggcacaaatttatgaagaatctcaaagtactcgtacgaagattctcgatacaaatctggaagaattccctggtggccctgataatttcttgatagctgttaaattttgctatggtgtgaggattgagttgactccaagaaacacagttatggtttattgtgctgcagactacctcgaaatgacagaagcgtatggagaaggaaacttactgtctaaggccgagaatttcttttataaaaatatacttcacaattggaaagattgcatcttggctctccaaagctctgagcccgttataagtagagctgagaagctcgggatagtaaacagatgtttgaatgctttgtctgtgatggtttgtaccgatcctagtttgttcggttggccaatgatgatgtatggtagtctacaaagccccggtggaagcattttgtggaatggaataaataccggtgcaagaattcgaagctctgaatcagattggtggttcgaagacatctcttatctcgggattgttttgtttgagagacttatcaagacaatggaagcgaagggtatacgagctgaaaaccttgtaggcgctataatgtactatgcaagaaagtacttgcctggtttaggccgatggcacagtggacaaagtagcatagctagaatggttacgagcattagtttgaaacccgttccccacgatcaaaaggttgtattggaaaacattgaaaggctacttccccagaaaaaggggaaatctttttgtcggtttttacttggactacttcgtgtggctttgatacttggagtcaatcaaccatgtttggattctttagaaaagagaatagggatgcaacttgaactagcaaccttagacggtcttctaattcctacatattcggatgctgacacattgtataatactgattgtgttcaaaagattgtccatcactttatgtcaacagaaacaactattgagtcattttctccaacatcacaggacatggaagcatcaccttcatctgaaccggtaagaaaagttgctaagttgatcgatagctacattgcagaggttgcttctgatgtaaatttaaagcccacaaagattcgttctttagctgaggctataccagggtctgcaagatcattgcacgatgggctttaccgagcactggatatatacttgaaggtatgaaacattgtaatatgctgctagtgctagtgctagaatctgaaataaaagctgataattgctaatgacaatgttgcaggcgcacccttggctcccggacaaagagaaagaagaactttgcaacatcattgacttccagagactttctatcgacgcatgtgctcatgcatcccaaaacgaaagattaccacttagaattgttcttcaagtcttattctttgagcagatgcatttgaggaccgctctagctggttgcctccatgtcttggacaatgaaagcgcccctgcagctcccacagtcgaaacagctggacagattgtgcaaagagacggttgggtgactgttgtgcgagaaaaccaagttctgaaagtggatatggaaaggatgaggtctagagttggtgaactcgaagaagaatttagtaaaatcaaacaggagatgaaaaaagtgagtaaatctcatagctccctcggttctccccgcttaataggtagaaaattcgggtgtaagcttcttccacggtcatctgatgctcaacaagagacacttgagattaccgagccaactcctagaccatctgctggatgtgagctcactccaagagcatcatcagttgaaaaggctcatacttcgggtcattctagacaccgaaaaagtttctcattgttttaagagagaactagtacatattacataagcgaaaacaatgaagtctgccatgacaactatagactctgtttggtactcagaaagttttaaggaaggagagaattctttttgcttgtaattttcgactgtttcgtgctgctttcattactttccttccggattttctgctgaccaaacagagtaagaacagggcactacttcaacaaattatacacacattgcaactgtgaatgaaaaatggaaggcttttcccaatctgctaagtgaggtaactactcatcattctttcggtttaattttcgttggtactttgagacattcttttcactatcacccttttgaaatcgaagaccagcagaagcgatgaatcgggacaagaggttagattttccattgaagatgaattggtttgatcacaacaaagtgcatacaagtaaatattacctttgtttcatagatagaaaaagaggaatttttaatttttaatctttaatgtttattttcttgttgggctttatacatgtaaatttatcaaaacaatgagaagattaaattatatataataacatcattaaaagcttgatcatataataagattgtattgtagttattattttggttgaatttgattttttctgaagtggtcctaaacagaagtttatgctaataataataattgctttgatagtaacatcaaaggcatgcataggtaatacacacctataatatttgtagctatctttcaaatgttaaagtatttaatgcataaacattatgagataatgagtcatatgatgttgatttgggcatttatttatcactttgcatttgttcatttattagctacaaaaaatactaatgctaatacaaagtaccattttttccaaaaaaagaaaaatgctataaggcaccatcgcgcctaggtgtcttcctataaacagttaacattttttttaaaattattattaaagtaaaataagtaagatctaatattaaattatacctcaaagctatataacacttcataatagtgctaggtatattttacttcataatttcatatctcattaaacttgtattatgagatgttaaagtagataggtattcataaatatatgtcattactttaaaattaaagtggcaaggcatgtataggagagctctcattacccttaacttaaatcataagtgtgctactcatgacaagactattgatgtactaaggatattagtgttataggtacttaatattttgagtttataatcaacataaatttaatctttttagcatgaaaatatatgaagttattaaaatgataattctgttagtctcaatccattcactttcataagtagtacgaatttacagaaatatactcaaaatactaaggaaagatggtctagactagccatcaatgtactcctaaagtccattagtaattacaacattgttgattcactaggttttccatacattaacttgtgtcatcaagttttacaagggttgattcatggaaggtaaagtaggacggtgggacgaagtgattttcggggagaaggtgagatggggcataaggggaaaggattctgaaagcgatgaagagccaaccatgaacgccggcagaagcaacggttgcatacatcaatgattttggaagagtatttaggtataacatagtgtggggagatttttaagccatataataattagtgtaataatcatattagttttggtatattctctaactttttggtatatagtaatatgtctctccttttatttatagtcatgcaaatatctgaggatactaccatagttctttattctttatttctcaatttacaccattttttgcaaggtatctttttctctttcttcttttcctcgctctctttctacgtttctagctcttagcccagccaccaccaaccctagcaccggcgacgcctcaaccacgaagatctcactattactggcaaaagaaatctctctctagcactggcggcacccaacctcgatgacccaaccaccactgaaggtcccatcttttttcttctaccaggtttcggtcccgagttcgggtctcgggtccaggtctgagtcctgggttcgggtttagatctgcgtccaggtcccgggtatgggtctcgagtctaggtctgggtccgagttcgggtctaagtctgggtctcgagtttgggtcttgatcgagttcaggtcttgtgtttgggtcccgagttcggatcctgggtctgggtcccaggtccaagtacaagtccaggtctgggtctcgcgtctcgagtccgggtctgggtctcgggtttgggtctgagttcgggtctcgagtctaggtcccgagtccagatcccaagtccaggtccgagtttgtgtctcagatacgggtccaggtctgggtcccgcgtccgggtttgggttcgggtcctgagcttgagtccgagtccgagtccaagtctagatcctgggtgtaggtgtggtgggtctcaggtctggtctgggtcccggttccgagtcttgaattaagttttttaaagtatatgaaaatcgaatcggatcaaatccgaaaatacattaagcaaggcgaagcgatctgatctgagatccaataaatatccgaatgtttcggattagaagtgatctgtcgaatcggaactccgacccgctccaactaaatggatttttttgacatgcttacgcctacggttactaatttcaccaaaactgcctctaagtggtcgaaaaaactgcatttaaaggtcttttttgtagtagtgaatctgatccaattggttattgaaaaataacattctttccaatccgatcataattgaatatttaatatttggtggttgattataagtgagtcgatcgattattaaatttagacatactcctaaatacatatatcaacttattttgtattattatataatatttcattatgatggatcttgttacaactatatatatttataaatggaagaggtttcaatggt

SEQ ID NO: 258729 - DNA, 1247 bp, Cannabis indica
taatgagagaattaatgggaaaacaaataaagctaattagagagattgtagagtacatgtcaccgcctcatatctctccctttatatagatatatagatatagatatatagattggttgtattgattatggtaggattaaataacttaaatattttgtacttttctagctacaattattgtgttaagtagaaaataaaattaattaaaaataaatatataaatttcaaattaaaaaataattaattgaaaattataactagtcataagataaataagtaaaaaaaaattaagtttggagttaggtttggagtttgttagttgaagttgtaattaataatattcaaaattaattataaataaaaaaatatattaattttggtgtagttttcaagagttgatttgagccattgaattaaatcaatggctataaattactatcaatagaaattacaatacttagctcccatgtttccaaattatacagagtaattcccataaatattcaaaagaacaaaatagaagcaaaactaaatcagttaaagtttttattcttttatttacatataacattctcattacagtatatacatcatttcattaattgagtgagtcccatgtccttttaagcaggtcaagaaattttttgaaataatttgaaaagatgacactgtatattaattaaaaaactgattttttaaactataattatgtaaaaattcaaaatctgaatttcgcgttggtatttttattataaattttttttacatgattttataattttgatcacctattttagtatttatattttcaaacattaaaattaactagcttaataattatagattaatctttttactttttctaacaaaaaaaaatcatttatacccatagattatttaaaataaagactaacgagcactcatcaaattcataaataaattatcaagacataattttcataggattttagtaattagataaatactattttagcgtgattaaatctatctcaaaaaacttataaataaatattgagaatataaattttataaaacccaaaaacttgaaaattggaaaaaaaaaaaaaaaatacattctattcagattagtatcaatttatttgaacatgactagctctgaactcttattcttatacattcaattttacaattatcatagaaccgtatattttttcagtctataactataatgaagacgttttgtataagatggagtatcaattttt

SEQ ID NO: 258730 - DNA, 987 bp, Cannabis indica
ttggctgtgaaggtgatcgtcgaagggtcatggaaggccagccatggcactttgatcgatctctcatgatcttcgccatccccgatggctttgacaccatcctcccctcccaactgcgttacatcccgctctgggttcaggttcacttcatcccttttgggtccagatcctatggtctggctcaatttgttgccgatgccattggtgacctcatagaggtccatctcatttctctttatgactctgtcacccccttcatgcgagttcgtgttcttctggacactactaagcccctccactgtggaatgaatgttcgttttaggaaactttcccttaccaaatggctcaaattcctttacgagggaattcagaactattgctatcattgtggcaaacttgaccacactttcaacaagtgtgacaagtttcttcatcactgtgaccataacccttttccccctagtttaagctacaaggacgtccttagagcccctgccaaatccatttataagaagagtatctttgaattgtccaactccatccctttgaggaacaaccatccctaaccaacctcgatcaccataactcccaggaccaaactaatagttttcttgtgaccaccactctccctgccactgttgcaaccactaccttcactcactgcaccaccgatcccaaccccaacgttactcacccccaccagcctcaaacggtcaatcccactctccactgcacccttccaactctgcccatcatgaccaccaccacccttccaaccacttccaaaggcaaggcacctatgtacccacaaccatcccaggtttctctgaacagcccacctctctccagtcttaacatcaatgatccccctactgccccatcctccaccaggaaacgatcttttgctcgtcagacctgtcaagttggctcctcggtccgcagcatgctgaaacgggcccgagcctctcatgccgactttgctgttgt

SEQ ID NO: 258731 - DNA, 972 bp, Cannabis indica
agtgaggtaatacaaggaaaaaagagttgaaaaacataattagttagttaataagtgaaactaacagaaaaataaaccagactattagctactaataattacaatggtaaataaattatggaaatattgataccaagggcatttggtcaatgtcaggatcattttcatgatcaatgatccaatttacagcatcttctatactgttattgcctaaaaaaaaattaaataataataattaaaaagtaaaaaaaaattggttaaccaataacaaaataaagtaactaatattgatgagtctcaccagaataatgaagtgctcttgttgactgagctaaaggaaatcccattgattcaagttgattaagaaaactctcatttactttaggaacatacattttttttaatcagaaaataataaatatatacccttttggttttgggtgtaattattacaagactatgaaaaatctaatagtattgatattaagacaaatgtacacaaaaggggtttatgagatatatgaaagttattgaatatgaagtgtttgagtagatggagtgggtttttcatattgggtgtttttgattgaatgattttaagagagtgtgtttggattgaaacaagagaagtgtagatatgtgtagctggttctggcatttgatgattctttgcctcttttttgtgttgcttcatctgagtaaacatctcttgattctcactgcttcccttatttgtaccttttggctctctctgtcaattaagaaaggaattctctaacattttataaaaatttaatgtaaaatctattatccaaactatttagcaacaagaattgagtattgttatttatcactttaaaatgcttaatactacaccgatattaaaatcaaaatgtgtggagttaatattaaaatgtacaaataatagtttatcactttttgtgtggtgtttattaggagtgttcatcaaat

SEQ ID NO: 258732 - DNA, 622 bp, Cannabis indica
tctaggtccagcatttcgggtccaagatttaggtcaagggccgttccggtttgggtacacgaccttgtccgggcccgagttccagtctcaatttgggtttgaggctaggtctgtgttcggttataggtctgggtccgtgtcctggttcatcgattctggttcaggttttaattttggctcccaggttgaggtctgggtttgggtttggttcttcgtctgggttctggtcctagtctgagccccagatctagacaccgactactggtctgttctaggccccgttacccgaatctcgagtcaagatctagatcactgtcacgggtctcggtcttgttcttgttcgggtcccaagtcccatttttgagtttgggttcgggatggagactggggttcggttctacgtcccgaccctggttctttctccctagttttgttccatgtttgggtctgagttcaggttctagttcgtgtcccttgtctaggtttgggttgggatcctggtccggctcccaattcgggtttaggtctgatttggagtctgggtcctggaactggtctggttacggttctggatctaggtcaaatttcagttatgattccaagtccaagtcctagttccagt

SEQ ID NO: 258733 - DNA, 2094 bp, Cannabis indica
ttttacactttaaaatatattttgttttttatttgcttttttacaaattctatatagaaacccctattgcaactagcgctgcaacctaaattgcaacaaaaaatcgtatagaaacccctattgcaattagagctgccaccattttagaaacccaaactataaatttaaaaaattagtatatgggataattccccttattaatttgaaaaaatagagaaaatcaaacttcgttttttgttttttttttttaatttttaaacatgtgtgcataaagtttggttcttttgttttgtgttcaactctttctcagcttcaacttcttgctctctctgttaaaggttcggtaagccgtatcggacttggttcgtagaagccggagttgccatgtccgatttctatacctcgactcaccgtgccaggtggatcttctctcctcaggagctggtaataattttaccccttttatttttttctccattttgttttatgattcctcagtttttcagctgaggttgttttgaaggttattcgtgattgtgatgaaacagcaggacgaaagaaaaaaagatcatttttttcccttgatttatcaagttttagtatcaactagtttatgagtccttcacttttatcattaaatatacgaattactgctttgttcaaggtcaaacgattaaagaaaatggtcatgttaatggttactaaagataagatttgaaaatggaaaaagcaagaagaatggaaggaagataattacctaatctgagtggttccacttaatccctggcttggtttgttggtgtaaaaagataggcttttagtttaattttatttcattgctgttgtaatcagacatttgttgtatgttgtaggttgacaaatacaaagctgctaaccagagagctattcaaactttggagaaggtaattacactcttgttagtccttggtagatgtattgtaacaataaaacaggttgttgtaaattcttcttttcatttacctcaaatatactccgttcaagtgttactacattttgattttaaactgttatatttctctgaagtatggagctacactaatggaagtagatgttgatgggtcactgtctttccctgagcctcaagttaaagagaatggtattatctttgaaaatatataatttcttccttctttagtttcttgactaatttattgttttaaatatatttttgttgtgtgtcagcagacaagcattctcgttcaaaaccccttaatattgaagaagagcactttattcgagtgttctatgagaataaactccaagaagtttgtaacaactttcattttcctcataaaattcaggtatgcagttttgcatatatgctaatatacaattgttggcattgtgttatttctttctaaagttggttatcgtttcacaggcaacagctctcatatatttcaaaaggttttttctgcaatggtcagttatgcaacatcatccaaaaaacataatgtaaggttgaagtatatcttcttcttcttttttcttttcaaaacccttactgttatgagtgcataaacattctgctgtaaaaatttaaattgacttgctccaaatagttaaagctttcttagatttattgccaaaaggttccgtacatggcacgaaaatcgttcatattctcctgtttggcacctgttcttaatatgggatagacatagctaatatgcattttatttaattatgcaagttcctgttctttacaatgactgacttctgcacaggctgacctgtatatatgcagcatgtaagatagaagaaaatcatgtatcagcagaggagcttggtaagggaatctcccaggatcatcaaatgatactcaataatgagatgataatttatcaggcatggaatgtgcctcacaattaatttctctcattactataccttcttttttttttttgtttattgaaaacaataaacctctgttttgcagagtctcgattttgatcttattgtttatgcaccctatcgatctgttcaaggcttcattaatgatatggaggtcagttaaataccgttttttttttaaaaaaaagaaaaaagtaa

SEQ ID NO: 258734 - DNA, 1241 bp, Cannabis indica
tgatttcatttcattttacactcattttctctttcattaatgggaccgcatcatccaaggaagaagaagaaaagtatatataatatatgtgtgcgtatgtagatgtatgggattttggcggcagcaagtggaccccgattgaaacgaagcccctgagattacgccacatggatgagtgccacgtgtcatgtattgccggtattgacggttgaggcactccgttgtgtccctgggcggaggaacacacatgagattgtcgacgcagcccttgtcgggtgccccaaccttccacacattttgtttggtgtagaccccacatgtgtgtttcacgactcccattctctttttactctgttttaacatgttatccttgtccttatatattaatataccctaccttcattcatttcctaaatattatccactatccatctccatcttcctttctcattgacttaattattttattttcttttataaaacaattattagaagatgatagctaggttaaggaaattcaaaaaaagaaaaaacaaagcaaattaaacctgtctttcatgttataagagtatgttgaaatgttgcttaaaagtagattgacgtcctagtaaaggtgttaaatttccacacattattaataatgttgtgagagtactctaacattttattattatctcaattgggagtcaaataatttctttattgaagcacattaaaggcatggacgtaaggtgaaaatatatatattcaagaaaatgaactttcaattgaatggttttaaattatgtcggaatcttagtcatatatatatgcattgtacttggaaatgttatgggtctagttcagtttttcacaaataaagaattactataaactgaatttatacctatcatataatttatttcgtcaataatcagatgtacttaattgtgttatgtatttaattattgaaggaagaaagcagaggaagaaaagagagaaacagagtgtgtttaacaaaaagaaaaactgaaaaactcaattctattattgcagtaaaacaagtgtttatatacacactgattacaactgaaaacaaactaaaacagaaaagtaatcaacattaactaatttttaaccaacattaattagttggttatcaattataatgatcaccatgataaattaataacaatatatgaatgcttgattaccaaattgtcgagctctccccaacactttagggtaaatagtggcataag

SEQ ID NO: 258735 - DNA, 744 bp, Cannabis indica
ggggaaggttaagttgccaccatttttttccaccactcatgtgtttgttccatgttcaaacaacgggtaggactaaggtgtaattcccgagctactctataaccacttctaaccacatactcatcgtttgatgtgaacggccatatgagagaatcctccatatatatgttcacgggggtgcccaaaatccaagggacatcctcgtaatgaaagtatgtatgtatagcctctttatcccattcaccatcttcatttaacaactcgtggatagcagagttaggagccaaactcggatgccgatataaaattgttccattttgcctaggaatccatttatcttcccaaatgcgagtgtgtcgaccatttccaattctccaacgagccccctcttgaattatttgtcttccccaaattattccttttcatatgctagaagctccttgagggcatttagccgtgaggaaatttgtctccgcgtagtagcaattttttaacaccttagttaagagagtattcggtttgtgaattagccgccacccttgtttggctagcaaggcttggttgaactccattaggcttcggaatcctaaacccccctcttctttcggtctacaaattttatcccaagtactcaaatgtatctttttattttcttttgtgtcaccccaccaaaaattggccgctcaaggagtggagattcttgaccaattttttttgggagccggaagcaactcatgaagtagc

SEQ ID NO: 258736 - DNA, 850 bp, Cannabis indica
ttaaatatcacaattatacgaatttttgcatttaaattaataatcacaatatttacctttcggttcattaaaccataattaagatacttggttacctattaattaaaaggctattttcaaaaatatgtaaaaaattattaaggttatgataaatatggcataaaaagtaaatgccactaaatatgacattatctaacctatcaaactaaaaatatggtaaaaatcatataaaacattaaaaagaaaatctgaatttaagattcataaaaaataaaaacttaattaaattaccataaaaaatattaaaattcccttcattttttttttacaaaaaataaaacaaataaaaccataatgattgccggagttatcactcttgccgaaaaagtcaccggagtttgatgctggcaccggaaaagtcgacggagtagcttccggtgccagagttgctgcgggcgccaaaaaagtcgtcacaattagcattgttgccggaaaaatcgcaggaaaaatcatcaagaaaccggtttcttggtgatttttccgatgacaatgccaattttgacgactattctagagtttgatgtcggtgccggaaaagtagccggagtaactgctggcgtcagaaaagtcgtcagaattcgcattgtcaatggaaaaattacaaagaaagtcgtttcttaatgaaaaatcacatgaaaaattaccaagaaaccggtttcttcatcaagaaactagtttcttggtgatttttctggtaattttaccggtgacaatgccaattctgatgacttttttgaagtttgctgtcagtgccgaaaaaatcgtcagagtagttgctagcgtcagaaaa

SEQ ID NO: 258737 - DNA, 679 bp, Cannabis indica
agtaggttgtccctcgacattccctgcagcaaagacatcattccttctctcggcagacttagcagcctcaatggtaagctggctcaaggatttcttttggttggccatggtcttggtccttttcggttgtttggtagaacctgaggcctcaccggcttgggcaaccctcttcttagatttcttgtcagctagggaaggacttttgaacatattctgcaagtctacatccatatctacgagacaagaaaaattcattaacacttagacaaaataagtaagtgagaatggggaagaactcccacttaagaaggttaccatattcttcaaaggatgacgagggaggactataatattcattaaactctctagatcctgtgatcataaatatgtcataagggtttagtggatctaattcccagcttgaatctatgtgacctgctctatctaacatggttccatactgcttggcaatcccatagaatgagctagtacatctaatttgaacatggagcttttaagtaccaactatcaaacctatgggaaatgcgatctatgaggaaagggttctaagtgaaaaaattataccgactatcatgaaaatagactaaggtattatgtttgaccctaagcactgtgggtgaccacccacattgattacctcgggatcttccatctacca

SEQ ID NO: 258738 - DNA, 669 bp, Cannabis indica
aaaaacatctagaaattcccgaacaaccttgatgtcttctggccgaacagagtcaggccgagtggtatccaataccacggccagaaaccctagacatccatctcgtaacaactccctagctgttagcactgaaattactgggatccgagatccttgaaccgatcggacaaaaacaaacagttgagtactaggacaagaaattgattccaaatataatatcaaaatccactaaattcatctctatcaaattagcgctcaactctctatcctctattttgatcgacatagacgtaattcaccttttggagataacgaactctccgccaggcagtagggttccaaaccctgtttcataaccatcatgtggtctatccaatttactaaaaattcttgctgccacaaacgaatgagtggcccaagagtcaaacaacatagagaaataagagttgttgaccgagagctgacctgttaccactgaagggctagcttctacatcagcctcagttattgcgaacaccctagctcgagtgggtttctctgcaatcttcgatgcttcaattctgagctgggggaaatccctcttgtaatgccctggcatgccacactggaagcaccgctgccctcactactacaaatatcagaattcgcgacggtcctaaaaatgatttt

SEQ ID NO: 258739 - DNA, 808 bp, Cannabis indica
gatttgcaaaaattgtcccaaaattatggtccaatcatgcatatccaactcggtctaattcccactattgttgtgtcctctcctaaggccgccgagctatttctcaaaacccatgatcttatttttgccactaggccatctcatgagtcggccaagcacatctcatgggagcaaaagagcttactttttgctccttatgggtcttattggcgcgacataagaaaaatgtgtactctcgagctactaaatagtctaaaaatcaactcttttaaagacatgagaagagaagagcttagccttcttattgagtccacaaaaattaatgcctcaaatcgcgaggcgattgatttgagcgccaagataacaacaactaacacggacatgagttgtcggatggtgttggggaagaagtactccgatgatgaattcaatgaaaagggtttcaaggcgattatccaagagggtatgcacttgagtgccattcctaacatgggagattacattccttttcttgctccatttgacttgcaaggcttgacaaaacgtatgaaggttgttaggaaagtgtttgatgaattctttgataaaatcattgatgagcacattcaagccaaagataaagatcatggttatgaagctaaggattttgttgatgttatgttgagatttatggagtcagaacaatctgaatattgcattgatcgagagaatattaaagctataattttggtatgtacttttcacattcaattttcttgttatatttttgaaaatattatgcatttgtagttaaatgattttaactttt

SEQ ID NO: 258740 - DNA, 2283 bp, Cannabis indica
cagagaatctaattgataatttttgcaaaatacaaaatccaaaatgatatttaccaaaaaaaaaattgaaaaaaaaatcaattaataatttttattaactcaagcctcaatgggatgtgccgtttagtggaataaggttttcaaacaattaaatggatgatgcgttaatgccaacattttaagtttattacaataacatgtatcgatgtaattattaatgaaattagaacaaaaggtgtgacaattagtatatttatttatgaatgatatgatgttgttaataagcttacttggattgtaatgaccaaaaatcacatcagcaatggcagcaccaccagcctcaccaggataacccacccaaagaatgctagtaatcttatcatcatttttggcaaaagaaatgtcaaaacctcctccagacattataacaagaataactggccctttggcagcccttgctactgttgttattaggagttgctgctgtcccggaagatttaggtccactcggtcgcgactctcggcttctatggactgatcggcacccaccaccagcacggtcgcgtcagctactgccgctacatttgcagcttcgttgttctgagcagtgccacatcccacattggcgcaaccttggtggtaactagttgttactaaggccgccaagccttgtaaaggagtggtatatttgcatggtgtgcctgccaaaatatatgaaataagttactttatagttattcaaaggctaattagtaattttttttcccgaactttgacatataccaaatcatgccccttgagatggctgttaaaaattctccatgatttagtacatgttaaagttcacgggatttaacgttcaagtggcatgatttagtacatgttaaagttcggagagaaaaattgctaattaaccttattcaaatgtaactttacattttgttaccctattttgaaaatcctattatgttaagtatcttattgttgtgtaccttcgtaatttccaatcatggttttggttacatttgcattgggcccaataacagccaagtttttgatagcagtgttagaaagaggaagcgacccagcactgttcttaagcaacacaatgccttgccttgcggcctcacgggccagctcttggttggcctgactgcacacgtcttttgggcctaaattcccgaattgttgctttcttggatcgccatcgaagaagcccaatctcatcaatgtggcgaaattgttcgatatggccttgtccaccgcagcctcattcaccattcctcctttcactgctgcttctgtatgttttcctaagaaagatccacagtccaaatccaaacctgtacaattcaaacaaaatggtaaaatttcaaatctaccaatttctctttctggttttaaaaataccactttaaaaagaagaaattacccgctaatatagacttggctgcagcttcttcgggtgttttagtgtagtgttggctcgtatacaacacatccaccgagtcacaatcagaaacaatgtacctacaccaccaacccaatgttttatttaataattttattaaagtaaaagttagatagaaacgtaacacaaaaatcaaattggtatccagctatctaataacattaacatatataaataaatatacatgaaatttaataggttttagagggaaaaaagataggtacccatttaatttccattctcctctaatgataccagagagaaggtcagggtcagcacaggttggcttcccattaacttggttgtaagagcacatgacactagcaacattcccatccataacacaactcttgaatgggggttggaaagtgtcatccaaatcttgctttgaaacctataattgaatgaaaaaacaaaaataaaacaataataataaagtattatttcaatattaatcaaataattatataaaaatatgatgaaaaattgttagttattcacaatacactacttcgcggtagtattgggcaccactaatgcataatagtaatatcataaaatgtgatacacttttttattacctttgcattgaagtggtagcgatcaatgcctttccagttgtccaaatcataagcagtgtaatgcttgcaacacgcggcaaccttgagccggttagggtctttgccaccggtttgttgtaggcctcgaacatatccggcagcgtatttgctagagaggagagggtcttctccaggtgtctcttggcctcttccccatctagggtctctaaatatgttaatatttggcgacca

SEQ ID NO: 258741 - DNA, 846 bp, Cannabis indica
taatcaaaacttaccatttttacctcaatttccattaataggaaagctagacaactttcattccaagtttagatacacacaatcagaaaactaaattaaacatacaagctgaaattcacaggaaataataaaatatttttgtcaattaaatatgccaaatatagaattaacagagagaaagaaaatgaaaaaagaacattcaatcaacattcaatatgtgattggaaaaatattaattaaaacaagtttttttttatatgcaattttttttctttcaaatgtaagttatatagacgttacccttattaatgagtttaagtaattaatttagaagaaaaaaagaataatgtagataaaaaatatacagaagttttgtctgagaccatttcttcacattgattatatattataaatgtatacgtaggggtatttattggaccacatctaatgtttttaggtctatttagatctgatccaattatatattggatgttagattttaccatccgatccaatctgatccaaattattttagtcatttaatcgatctagcaactattggatgttggattcgatcggttatatctattggatgtatttcatgtatatctattgagtaatttgggtttatcaaatattttagacatagtattttttagatcggatcagatccatccaataatttagatccagtatttattggattgagaaaagtaaaattttaatgttaatttttatatatacatatattttttatgtataacaatataaaatcaaattactcatccaaactaaataaaaatattaagaagttcaattggaattggatgtattggatttttgaac

SEQ ID NO: 258742 - DNA, 929 bp, Cannabis indica
tgatatcagtttgttgaaaaccttagaaattatttaggattgtatgttttagaattttcgcttgtcattcctacttgctaaatgctaataatttctgaatatgattttgtgttaaaccttatttgatttctatttattgttatttgtagtatccaacatgacaatgaccaaccccatagtgtcattgttgactgataataagctcaatggagctaactttatcaaatggagagagaacattaacattgctctcgttggtgagaatgccctatttatgttgactgaagaggctcttgagcagccaaatgagaatgcaaccaaggcagtgaaagaaaagttcgagcgttggtagaatgccaacaataaagctcgatactttatgctgtctagcatggttgacaccttgaaaacaaggtttgcaaacactctcacggctgcagatatcatgaaccagttaactgtactgttcgggatggcatcaattcaagctcgctttgaagtgactaagaatttcatcaatgcacggatgaaacctcattagagcgtgagtgatcatcttttccaaatgactagttacttctaggaagctaggaatcatggagcggttatagatcagacaactcaagtgagtttgatcttaaacagtttaactttagtgtttctgcccttcacttcaaattatgtcatgaacaagttggagcttgactttcacgagttaatcaacaaccttcagacatttgaaaattcgattggaggaccacagaaaggaggagctaaagctcctaattctgggaatgctaatggtgcggctaaggctgaggcaaacattgcctctacttccaaacccaacaacaagaagaagtggaagaatagcaagaagcctgttcaagctgtgaaaaatagttaaaaagaaaaaggactgctaatcc

SEQ ID NO: 258743 - DNA, 2507 bp, Cannabis indica
cattagcatgcatcaacattgggggatgtggctagacttgtctacatgatgtttctaagatttacgtgatattgcatgggaatgcatgcaagcggtttctcaaacgatgtgcatgaagataacacatgtgaatgacagttaccggtagttatcaatgcttatccaagggcatgcacgtgggctgaagacatctgttggtgaatagatgcattgattcaggcttgaatggctgacacacgggtgtgttggttatttgtacatgcgatgttgatgtgtaaaatgctggtgagaccagcatggcctaggcggttggggatgtcaaccgcaacctaatgttggattataaaataggctaatagtgcttgagtcatcagagtgtgatgtccagcgtttgaacattgtattcctttaataacaaggttgggaaagggttctcgtatgctgtgtgtgttattatgctttatgtgcatttacttgataacgagagagagagtgtgttgttgagtgacgatgggcaaactaaactatgagtgtgtgtgcatacaaacgggtgttggattggctgactagattggggagaatccatgccatcgcagtctcactcagaaatttccctgcgatggcctagattctccccaatctagttagccaatccaacacccttttgtattcacacacactcacggtttagtttgcccatcgtaacttaacaacactctctcttgttatcaagtaaatgcacataaagcataagaacacacacaacatacgagaaccttttcccaaccttattattaacacaatatcaaggaatacaatgttcaaatgctggacatcatactttgatgactcaagcgctcttagcctattttataacccaacattaagttgcggttgacatccccaaccgcataggccatgctggtctcaccaacattttacacatcagcatgacatgtacaaataaccaacacacctgcgtgtcagccatttaagccttcaacctgaatcagtgcatatgttcaccaaaaaatgtctttagctcacgtgcattcccttggatagacattgataactcccgataaccgtcattcatatgtgtcatcttcatgcacgtcgtctgagaaactgcttgcatgcattcccatgcaatttcacgtaaatcttagaaccatcacgtatacaagtctagccaacatctcccaatgttgctgcatgctaatgatactgctgcatactgccccctagtaggtgcacttcactcgtatgctgctatcccacaagctaaccacgagtgatatcaaggtttgccgagcgaacctaagtgggggtctcacaaattacccccactagaagaaatcgacgtcctcgtcgatacacttctgatatagctgttcaccttgtcctcaaattgccacaaagtcacaactttttcccatgtagcatcagctacatcttcaccctcccattgaaccaagtactcggttctcaggttctttttccttgccccaaaagtacgatggtcgagaatctttgtcaacttcttctcaaattgtttcctcacagtaggcggagctcgcaccacctgctgccttccttcagctttgtcctcatgaaatttcttcaagaaactgacatgaaaagttgggtgtacagcttgtatgctactgcccccaccttttggacaatctcaaatggaccatcatatttttgaaccaaacccttgtgatgcgtttgtcagttattttcttccaaatctgtggagtgagtttcagcaacgcttgatctttgacaaaaaactctaagtccttcgatgcttgtttgcatacttctttatcctccttgtagctttttctaggttgtccctggctagttccagcaattggttctatcctttgcaaaccggtatgctgctgggcaaacaccttgagacttctgtttagccacttcatgtggtgtcagcagctgcctccctaagacaatctctgccggattcattcctgttgcagaggactgttgaatgttatagaaaaattgtgccacatctagcaactcaacccagttccaacttgccgtcacataatgtcataagtactttttcagtaactgattcatcctttccatctaaccatcagtttggggatggtttgatgttgagaacttcaagtctgaacccaacatgttgaacaacgtcgtccaaaaccttcccgtaaatttggaatcccgataacttatgatgtcttcagctagcccaaagtacttcaccacattcttcatgatgagttctgccgccacatttgctggacaagcattgggcataggaatgaatatgccatacttggagaatcgattcactaccaccaggatggaccaaaacccttttacttccggaaatcttactatgaagtccatgtttcttgactgccatggcttctctgggattggcaggggttgtagtaatcccatttcttaccttctttttgttggaatttattttaccaggatct

SEQ ID NO: 258744 - DNA, 855 bp, Cannabis indica
tcttgttcttgtttttgtacaatttctgagttgttctttgcttgcatctaatattgtttcattcttatttgacaaatcatgattatgcttttgaattataattagttaaaatattgtacttatcatactttcgaggttgagttaaaagattcatgttacttttaatgtgtgattgggatttataatgttcttacagagttgagcatttcttgtttcagtattatcaagccccttactgggatagagctacccatactgaggtgtgaaagtcatcttttgagtaagctggaacgttgtaattaagagttatgataaggatacactaccatagaaaagggcaaccttcagtatggtgtgatagcatccaattgcgggatcaaattgaaaaaggcaaaaaaacaaaaatcttgccaaagataatgatcctatttacacacacttatgtctgacaagtgaattcaagtgtgcaagtctcctcttctttaataaaaattatcctaattcacattatttgtaacatgtctatttttctcaacatttgttaagtgtggtgagtttttgagattctcattagttattctcttttgaaagcatatcatgaatatttgtcacttgttataaaatttaattagttgcttgctctagaataccttttttcattattgtacatattttatttatttttatatgttttggattttcaaaaataaaaaaaataaaaaataaagagggaggcgtttgtgacttgtcttgtgggctagaaattttgtgctttgtttggtaagtatcaacatttgatctaaaattgatttatttagacaattttcccttaaaagtttgatatcatattcattg

SEQ ID NO: 258745 - DNA, 473 bp, Cannabis indica
attccttttcttatagctcttacaacagtatctctgaatatataattcttagataataatatagccttagcttaactgcgtatcgacttataatttctcggtcctttgcccagtgaacattcctcactatttatagggctgggaaacttgaggaggaagagtttcctctctcgttacaatgcgcataaacagaaagatcgtgtgatcaatgctgaatgcaaggatcgtgggattgaggctgagtacactgatagtgggatcgtgtgtatgccatatccacgtaagttgatccctgagttgtagggattgagctgatgactcatgatgcgaaagctgaattcgctaagtgttgatcgccctgcacggctcgttgaatatttcattctggatgtgccagcgaggttgtaacgccctgactcacaggaacgccacgtgtgtgtgtgcttttataaacttattattattaatctata

SEQ ID NO: 258746 - DNA, 698 bp, Cannabis indica
gttgcatgcattcctcgcatcacatggtctgcagctttcagaaccatatcaccttcttggaacgtccttggtcgtacaagtttgtcatatgcccgagatacacgtcgttggtattgcagcaaattaatttgggcttttctcgacgttcatcaattaattccaattcttctaaccgtgcttggtgtacatccattcccgcagacatggctagcctagttgacggcacagctatttcgacaggcaatattgcttcagattaggggtgtacatcaaaccgctcaaaccgcccgcaccgcaaaaaaaaatgcggtttgaaattcttcgcggtgcggttacgatttgaatttttcccaaaccgcgcggtgcggtgcggtttgcggttttgaattattaaaccgcgattcaaaccgcaccgcaccgcatgttttcaaatttcaattttcatatttatttaattaagcccacatatgagcccaacccaagcccataaatcttagggcaaaatccataacatttcacaaaccctctcttcttagcaacaaacccaagcccatacatgtgtattgaaatttggagttagaagtttgtgtttgttttatttttaataaagtatgttagttgtacatttatattgttgttggaatttaattagtttcaagtttgttattttgatttaggtgtgttgttgaaactttaaa

SEQ ID NO: 258747 - DNA, 603 bp, Cannabis indica
aaagaaatggaaatagctttctggaattatcaagcttatagtttctagcaaggtgctctctttgatagaaactcacaaaattgtgtcttcacaagtgaaccaaagacctctatttatagtgtttaagatcacacactttgaaattcaaactcataaccctcatggatgatatgtaactcatgcacacaccataactcccatagcattaagaatttcaaattaaaatgtgtaacacctttttacacacttaatattggtgataattgtggaggttacaaaatgtaagtaactccacctcttatgttacaatttatgtgaatattagatgtatgtaactctcaatcacattatatacattaatctcatatcaatatataatatgtcacattttaatattttaatctatcttatattataacaatataatataacaggtttagcattggatgttttctccaagcatcataccgtttttggtttttcacttttgatatttcaagtttactatccagttttctagaagtatccctagtccatgtcttcttatgaatttgttgtgcatacattcacggtgaattagaaacttgtttggattagtttgat

SEQ ID NO: 258748 - DNA, 1060 bp, Cannabis indica
tcctcccggagagacaaaagggggatgactcagactctgattgtgaggaccgggagccgtgtgccagacacattttagaggcagagctccccaaaaattttaagatgcccgaaatggcagcctacactggggactcataccccagcgatcatttgtctcggtttaaccgagtaatgacggttatgagagtcagtaatgatgtcaagtgcttatgctttccactaacattaagcggttccgcggaggagtggttcaaaaagttggaaccaggatctgtggactgctggaacaaattgcaagttagcttccggagacagttcgtcgccgcaagaaagattaatctcgaagtcagtgccctgactaacatcaagcaactacccacagaaacgttgaaaaattttataaagaggttcaaggaagaagcctcaaaaaccaagaaagttgatgacgggcagcaacttacgcttcttcaagccgggatccgtacaggaaccccgttctggaacgaattacaacaagaaagagctgctaacctccaagatttccagaagagagtccaaaagtacatcaacttggaagaggcccaaatagtggcctacggaggatactacccaactggagtggcaggatatgtactcggggttcaactctcgagaaccctacctttagctactccacaaatgagtgatatacagttctccgctactccaggatacaatcaaagccaagccttggctcccgcatcttcgcattacgggaacccctcaggggtaagcggacaagtcccatctcactccgctcttgctgcaagcctaaccggaccttctcaaggctcccggagcaagaggtcctcaaaaggcagcaaccagacggaggacaagcgccaaaaaagagggtatactccccaatatacccagtacacagagctgacgaacacacaatagcgtgtgtatttcgccacgaggaaaaatacgcactacaggaggtcgcctcctctgtacagagatagttcgcgaagggatcccaaaaaaagatgcgaataccacaacgacattggaca

SEQ ID NO: 258749 - DNA, 547 bp, Cannabis indica
ggaggtaaagaagtacttttaaaggcggttgcgcaatcgataccgacttatgccatgagttttttacgactctctaatacgctcatcgatcaaatggaggtcatgatgaataagttctggtggggctccaattctttaggaattggtatcaattggaaaacttggaaagctttatgtcaagctaaagtggaaggtggtatgggttttaaaagtttaattcatttcaatcaagctttactcgctaaacaagcttgacaaattttttcggaaccaacctctctcctaagccgtgttgttaagccaagatatttcaagcataataattttttggatgctgaaattggaacttatccatccttaacttcgagaggcatcatatggggaaaagaggtactaatacaaggattgagatggaaggtcagcgatgatcacaacatttgttgtgcaaccgatccatggatacctggtttcacttactttaaacctcttattttcaaatgaggtgatagagaaatgaaagtttcgaacttgatttcagacaatagac

SEQ ID NO: 258750 - DNA, 2099 bp, Cannabis indica
ggttgcttcataagtcacctggtcaccccccccttaaagagcttattggggttttaagggatttccaggaacatagatgattttagctctgtagacatatgtgaaggaaatacaaagaaagaaagctaaacaacaaaaggttcccaacccccatgaggtgcttggtgcaagacttgactaatgatcaagcaccaaggcatgctcatgttacaaaataccccaatgaggtgcttggtgcgagacttgactaatgatcaagcaccaaggcatgctcatgttacaaaatggccctattgtgggtgtgccatggggcagcacgccacaccgggcaccgaaaatgcaaaattatgagatttcactatatgacataaaaatgcattctgcattcaaataaatcaacataaataattatttaaatatcaataaataatttccataattaaaccctaaatatttgctaatttctaaattaaactaagcggtctttacactctctcatcacacgctttcttggtattgaagtgacacaaacagatgctggtatacacctgtcacaagccaagtatgccaaggaccttctagcaaaagctcaaatgagtaatgccaagcttgcacccactctaatgacaagtggtattcgtttatcaccttaccagggggaacctttggaagatgttcaactttataggtcagttgttagagccttgcaatgtctgaccattacaagacttgaactttgctttagtgtaaataaggtttgccaatatatgcagaaacctttgtctacacattggtcagctattaaacgaatacttcgatatattagtggcacaacatactatggactgcatttgtaaaaaccatgcactcttgatcttgtggcctactgtgatgcagattgggcctcagatccagacgacaggaggtcaactacaggatttgctatctttcttggctcgaatttaattgcttggaaaagtaaaaagcaacagactatctctcgatcaagcactaaagatgaatataggagtgttgctagtgttatagctgaactaacctggttgcagtatctattctgtgaacttaagatacaactctctcaacctcttactgtatgctgtgataatctaagtaccataatgctcactcagaatcccgtgttctatcaaagaacaaaacacattgaactcgacttgtatttcatcagagaaaaggcgcttaataaaactgttcagcttaaacaactctctttctatgaacaattagcagatgggttaactaaagctatatcaagtcaaagatttgttgagttcagacacaaactcaaaattgaagatcgttcaattatgagtttgaggggaggtgttgaagacaattaatggtagttagagttattaaacacgtgtttaactgctgttagtttgatatgaattctgttagtgaattcttgtactgaattgttatataagctgtaacacatgttattgattaatgagaatcttttttcaatcttcgcatctcttttcctttcctcttcttcttctttctctctgtcctactctgttcttggttctaagtggtcttcaatggctagaaacttcaacaagtaaaaattaagaggccgatcaaaacgccaggaatgcatgaagcctttttttttttttttgaataaactgatttgtaacattaaagtaaagtgagagtccagttacaaaatcagatgatacacaaattggaaccaatacaattccaaaccaaatctctatccgttcctagagcctttatagcaagtgtgtgtgcttttacattgttttctcttggaatgtaacaaaccttagcactaggaaaagaagataaagattccaaaactttaccaaccaaattcgacaaagaagatctatccttccaattgctgttaattttctttactaaaaccagacaatctgaatgaatggaatgcaagggaaatttaacaatgtcacaccattatagggcttgcagaagagcatgagcctcggccaaagtgcaccagttttagaggaacaaaaaccaactacaatctgacccctacaattgatggaatttattttaccaggatc

SEQ ID NO: 258751 - DNA, 795 bp, Cannabis indica
aaataactccagatatttttacgaagttttatagttaaatttgcatactccacgagtttatcttattatgatattttctggatacatgatacaatatacaattgataatctttttctctcaaactcttcgtccatttttctgtggaatctgtccttatttatacgaatataaattgacagttatttatttgggatcaatttaaaatgtaactgttcatgaaacgtggacaattcctacgtttcatttaattgtatgtaggataatacttgataactgcttaactgctttttgttcttatccttttcgatggttaatgctgatttggataattgtatctcccttaattcgagttatcttttttgttcatcttgatttcgatggttcacctcgttaaattttattagttaaaatagcgagataactgtctcgctatacataacctgaggttgccatatctgattgtatttattctacttcaaatagatgaatatcttctttaactatgtactctaaggcaaacgcatgtctcgtcaatgcaagtcttaataaccttttatccttatctcgcctaagactatatagctagcgagttatgaatgttttctattaaatctttgttaacttgttgttctatcttgcatttaatgatttaattttattatatcaagtggttcatattctaccacaagacacatgtcagtttttgtagtgtagtcgaatttcgggtataacaattgccccttaaattcttttttaattaaaaagagctttttaaatgattacaagggtatttt

SEQ ID NO: 258752 - DNA, 1271 bp, Cannabis indica
aaagagttttatttagggcataaaacccaacaaccaatcctcaccactcgttatccacgagctgcgtatgtcactatcgtttcccgataaagcaaacgataagtaagaaacctatccgcgatttcaagaataattactcataacggtaatgaccgtatcttaattcattcacaacaacggtgataaccgtgttctgccctcattcataaataattctcaaacgacaataatcgtttctcatcattacctcgattgctatcgagtcacaacaaatacatattattaatctcaatcaagatcgagtcacaacaaatatatattgggatctcgatcataatctagaccataacaatcatatcattaaccataaacagtgcttagcagtgcaaataacttttcttacctcaagttctagtttaggtatgttggctggcctacttggagaacgatcgatcatcccggccctatgtcataacgatgataaaccaataagtgtttatcccaaaatactgtttaataactataaaggaacacctagtgtttcttaccaaacgtcgatgtaaaaatttactaaaataaaacttatattttggctttaaaatatacaccatatcatagagctcgttgcaagctttgaaacggtatatagaacgtccaaaacgaacacccaagtgaaaaattatggccaaaatacgaaattcgacttttccgaaaactaaccaaacggaattccggttggtacatccggaattccgattctgaacaaccaataacacgatttttctcaactttaaaccctccaaactagctccaaacctaaccaaatcattccaaacttcatataacacatgtatatcatccatataacagtttcaacgtaacagaaatcaaaatcatacccttaaatcaaaagtgccattaaagctcaagctttgagctttaaaagctcaaacttagttcatacctcaaaactacagtaaggcaaacaaaagagcattcatagcacttctaattccacccagaaactcaaccaaaaccttacccaactcactacagccacaaaacaaaaattccacttccaaaatcctaaacttttcatgaaaaccaagggaagaaattagaaacactaccttgagcttactcccttcttactatgatcacaccttggctatcaagagcttgaaaagctgagtttgggaagaagaaaaataaaaaaggaatggtttgtgtgttgggttttgtgccctaaataaaactcattacaatctgat

SEQ ID NO: 258753 - DNA, 568 bp, Cannabis indica
aagcttaccgcctgctctcaggcttgtttattttttacgttgccagaggctgggcttcgcctagcccggtcgaaattttatatttttacaaacttgtatctgtcccgaagaagggggacaagtttaaagacagttttttcccctccgggcccatcctttaaatgagggtgcggtcccttttaatcatcaaaagaatgtaaaggagtaccgccatcgctttttcttctcttcgggtttccaagtagtggaccgcccagagcttctcacagagtgggttaggattccccctcttctccgcactgctcctacctggctgtttctccaacacgccaagaccttctccacttatgacaaaaaagaccttaacatgggagacttggtcacgacggaaaactgccggatggcgaaactgatctctgcgagccagtcggtggatgacttcaacctctcgaaggttctctgccctaacattcgcaccccggctgcagaaaaagcgctccagatggacatcatgttgggttttgtgccctaaataaaacaatttaaaatctgattagttatcaatata

SEQ ID NO: 258754 - DNA, 1059 bp, Cannabis indica
atctcctaattagtacagaactgtcgccccacgagctagaaatccttagtggacttcatagtcatgtatttgtgtattctaccccactaagtggacttgcttttacaaaaaaaaaaaaaccttaagaatgagtcatgggtatgtctgaacccaaactctagtctatagaaaccccattattcctttatgcaaggtctgctggttttattcaaagatttcttcttctctaagagaaaccaccttatatcaagagttaggattccttattataaaactcatttgtaatacacttaaagcctaaaaggtcaatacactaactcgtggactagggataattcacacccaaactacgtaaaagtcctcctcctcttttacttaatcattgtttaaattcttgaagctctcacttatttagtttctaaaaatctcagtaaataaatgctatttcaaaattcctcaaaacctccattgatgagtgaggtcgagtttaaggagtaaatcccaatcccatcgagatattgtttagaacttcgtatgatgaggcactatcataaagggtgggaatgcaagccgaagaggatcatgcttcacatgtgcatgatcggcatgcatgcatgcatgcacgtcaaactaggagaggaataaaaacacaacccgatcgggtttgggttttgtcaaacaaccaccgaagggacatgaggtcccatagctcatgcaaggtggtcggtcggacctaaggatctcatggtcaatgtcgacaacatgcagagaggaccgcaaggtttgggaccctttgagctctgtccagcttctttcgtggttatttgggttcgagtgacctaattttgctataaacggagctctgctccatgcacctccttacactgatgacctaggctgttgttaagctgtcagtcatccctctctacaactagccatggtggctggaccactactccaccgccactttatatatgaatattgtatttataatataattttcttattataatttaattaatgtattaatttaattttaaaaattggttagaaagatat

SEQ ID NO: 258755 - DNA, 646 bp, Cannabis indica
aagtaattacatatttaataaaatatgtccatttaaatattatttattttctgggatattacaagtatacaccagtttttataaaatatggccaataggcaagtggaagagaagattgaaaagctagagctcttgcaacatttagtatgtgttggtgttttctctcaacaactgagttttgttcagttgtttccacacatgaattgtttgtttggatacctttttgggcataaaaggatgacatattcaattctttagcattatcacaccgaattgcttttatacttgttgagaatcgcgtgtgaacaaggctataaaattgaggtatgagctgttgaacatcagctttggattttaacatataaacccaacaaaatcgtctgtaatcatcaactatagttaagaaataacaaaaaccttctatgctatgtatgtgaaaaggaccccatatatccatgtgtataaggtcaaaacgggaggctgcaaaattgttattggaaaggaatggcagcctcttttgtttagctaaatgacatataaaacatggtaagactttagtggaatctttgaaatgaagcattttattgataaagtttgtagtagtcatagaggggtgtccaagtcgggcatgccaagaatggacatt

SEQ ID NO: 258756 - DNA, 2435 bp, Cannabis indica
tttctcaatttatttcggaatcagaccatttaaaatgcattggaaagataagaaagatgtatggattttatatttatgacaagatctatttctaaatgcatcattatgaaaaaccctcggccaatttccacttagtaagttgttcttactaactctactcgtgtccaccggcctccatcgaaaatacctcaaacaatacacatgcatgatagaccttttaaaatcttcatagagtgatgtatcctcctttgtgctttcccaacttacccaacactttgcttgcgggcgaccatgagttcgttctccaaaatgcttggactaatctctgagaatcgtcaacgctaattcttgtagttaacatcgggttaattgttgactgatctcgaaggttagctttgctaattcttggagtttggaaaataacatcacagtggaaagtgtgctccgcatgcagtgtgcgcccacagctccaagctccaaacccatccgtgcatttgataggtgactccacgtggagggagagcctattctaagagagatcggggatgtggcgaacccctcatctcccactgggaataattgtatatttcctccacggccaccttgttgggttgctccacgtctgaaaaccatttcatcttctcatttttgctggctcatccattgctccactactttgagatcgatgacgcccaacatgatggtagctagaaagaaagaaaaaaaaataggcaaccaagtagttaaatacccacactaagagaaatagcatgggtacaggaaacctccccaaaaactgcttgaagaggtctctgctggacccattgtctagaagcaaagcccttgcagaacttcgccccaagacgatcagatcgagaactcaagagtgaattgtagattctaagaaatttgtctataaccataagagccccaaatagaggaaattggagattaagattgtttaaaggtatcttgaactcgctcaatgcaaataatgaattacgagcaaaattcacagatcctaatctcgactataggcggcattcataccaagataaacccacatgcaaataatcacctaaaccctcaacagagaagaggcctatcctgcccaaaatctaaacacgcatttcaacgcaaaagaaatcaatagttcaaaggggagaaggatacttactcaagcaaggagttgtgggagtggcaagatttgcggtggtataaccgtagtaggatctcttacacgatgatgaagtctagcctgaaattcgtacgacaacacaagtaaattgtcaatctttaattgaatattcagtagcctcgatggatttagacggttcattgtcaagtctagtattaatgctcctggtttttctctccctcgaactcaaagagaagactaaggcaatcgtcgaaaggattggacattcactaggggaaaagtttgagtttttctctcttgaaaaatttaaactcaaactgcaaaataagcctatttataagtggtgaaattttttttcttcaccctatttataagtgagagattttcacccgtttactttcacgatcaacggctcaaatggtgtctcaaaaaacgcaaaagtgatttaatggttggagagtagaagggtcatcatttaatgcatataattggtactaattcatttttaatcataacgttcaccttgatgccagtgctaacataaattaatcgtcagtacattaccctaagcaccgcacacttttccaatgctcataaagttcacagaccaagaagccaatgtcgcgtgtactacgttagctataactcaaaggtctctagtcatccacgaccaagaactatagaagccgaaaaggtcattcctttttgaattatccatgtgtccatgacgattcggagagaagatttcaagcctctaccactctcaagtctcgaaagtttgggggataaattttatttgtgttttcgtaagggtgacacgtgacgttcccgattgtaagaataatctgttaaggtctggccaaaagccctaccaacagaggaggcctaacccacacagagggatgggcccaagcccatcctaggcccaaaggatgcacttttgaaataggagttatccggattcgaaaaggcatcccacctttctgagaagaagtgattgaagccctccggatgtgcatttgtgatacatctagagagagcattctaagaggtgctgcctcgaaggtctagtacaagatgacatggtcgccctctaacaccaaatctcataggatttgggatttgtcccctgtgtcaaagcctaagagtgcgcacaccaccaaaaggaaaccacccttttgtccaacaacatgattttgacacaacattacatataaacggaccatgcaggacatctgtcaaggatcacgtgttccccagacatacagaacgcctc

SEQ ID NO: 258757 - DNA, 1901 bp, Cannabis indica
aaagtctgaggggcatgattcggtagatatcaaagtctagggagcatgatttagtacctaaaatagtaaaattgaatgaaattagacaaaaaatccttaaacttaacaatatcaatagtttaggaagaatttttaacggccaaaaaagttcagggagcatgattttgtatatgtcaaacttcggagggaaaaattactaattagccttaaaagaatacatcaaataaatgatttattttaattgccctacatcctaaaacttctatattttaaatcatatattttagtttaaataaatatgattgattaaaatagctatcactttatttttatagttattagacatcagtagtatttagtatttagtatcaacttgaggtaatatttgtgattagttaacaataatttataaattttaattatagcaataataatattttgccttgaagtactaaactcaaaagaaaaaatcttttaaatccttgtatactttattaagttgtgcaagtaaataagttgtgtagtaggctagatatttgtcccacatcgacaaagaaccaaacaaacaaaaagccttatccaaatcactccactacaactccaatagccacaactttctccattacaataaataagcaaaggtcaaacaaaaaaaaccacaactttaatctcatcaaaacaatcaaaattttctttctcaataaataagtaaagtaactatggttgctgcaatttcagctgggactactccatctttctacacccaaaatccaatcaaacgacaactcccaaaactacaccaaagtggtgtcgttttggtgtgttgcctcaatagacgtgaagaacaaatcaatggtacaacaacaacaacaacaaataaagaagctaaagaagagaagaagatgaatatgatgatgtcgtttgacaagtttggaaagtgtttgagagagaatttgagcccaaaacaaaagggtgattggaaagatttgactttgatgagtttgtcgtttgctgtttatgtttatatttctcaaaagattgtttgtgcttactttgcttgggtcatgtccatgcccaaacaattatggtagcattttttattcttatatactctctttcccatgatcatgggaaattggaaagtgggttgtgaagagatctttgtatattattggatcttaaaaatttggatttggttataattgttgtataacttgatttgattatagtttcaataagtttagtagataatgggtattgatgattcttgcttcttttttcttctttcttccaaggaaaatatctggagaaaatgtaggatattttgggcaaggaaagtacaaaatgacatgtcgttttagtgaggaaagaagaattataatgtcgttttgagagagaaacgacacattgtagctgttgtacattttcattcttttacagttttactctctcaattctcaaagaatgtaatatatgtttggattgcaattattactcaattggaattgagtgtaattcaatataattacaaagtagtgtttttgttcaaccaaataattacacagtaattatgttattagaggtagttgaatgatcttaattatactctttaattcttatggtctcatataaaatattactatctttagttaatgctattaatctatgtaattactaatttatttgccaaacaataagaattcatatattattactacactttacatttaaacaaacattgtattttaaaagagaatgtaattatttaaaactaattaatattggaagaaaagtacaaaatgaagtagtttaagtaaaagtgagagaagagttatgaatcaatagaaaactataatgtcgtttagaatcaaaaacgacaagtcgtatatataccaaagctt

SEQ ID NO: 258758 - DNA, 601 bp, Cannabis indica
aactttttagcttgagggcgaggacccctttgtatttgtgggtaagatgcagggatcccgaattcccttaatctcagcgcttaaggcaagagatttgttgtgtgaggggtgcatcagtttcttagcaagtgtagtggatactactaaagaaccaccaacaggactgaagcatgtcccagtgtggttcgagaatttctagatgtttttccaaaggagttaccaaggttaccaccaaagcgtgagattgattttgagattgatctaataccaggggcagagcctgtatcaagagccccatataggatggcacctgtggaactgaaagagttgaaagtcctattacaggggatgttggatttaaaatttactagaccaagtacctcaccttagggtgcaccaattttgttcgtgaaaaagaaggacggaactctacaaatgtgcattgattaccgggagttaaataagttgacagtgaagaacaagtatcctctgccaaggatagatgacttatttgatcagcttcagggaaagaccatctttccaagattgatctttgatctggttatcaccagttgaggattcaggaagaggatattcctaa

SEQ ID NO: 258759 - DNA, 755 bp, Cannabis indica
atgagttatttgtgaaataaaatatctcatgttctgcgaccttggagacctgattggagactaaaaatgtcacagcagttttagttagaaatattgatgggattattgggataagttgattatagaaatatccagatattttagattactcggagttgaccaaataccctagaaatatagatttttaagtggctaaaaatgataagataactatcaataataaagtttttattaatattatattataatattattgttgatattatattattatattattatatatataaatgaaacttatcagtttttatatgttttaaaaatataattgaaaaacgaacgaaagaaaccctcatcctcctatatctattttctttgatgtttaacccgaaacctagcgatctaagctttggtagtagcaggatagcaaatccttgaatagggaaagcttaaggtatggtttaattatgtttaatgcaaaaaatgattggttttagtggctttgtgatttagagtggttatgaagattttgacttcgtagaattattctttggtagctatgggactagttttgatgtttacttgttgaatttgaggtgattttgagttagaaatcgagtttggaaatttttaaagcttagtccaaacgttaattttttcatttaagggcttgattttaatttttgttacgtaaggattgtaatatttatggtaaatatgtgccctgtgaagtttggagtgatttggataagttt

SEQ ID NO: 258760 - DNA, 677 bp, Cannabis indica
ttaataattttttcatcaatattttttatacatatattagattttattccattcctgttcccattcttattcctatgttttcatttctcccaaccaaacgccacctaatagtttattaggaaattaaggtaattagtttgtgttattttaataaaaattgcatttcgttttaatttttaatatttaacattaataaaacatagtttaatttttaattatatccgactatatttttgtcatatcaaattcttatatgtgaagaaataaaagttaatatacgtaatgaacactataagaaaacagaaactagaatttcttcatattaatttgatattgtcacatgaaattgatatttaactatatttttcatcgattaataattaaaatacattatatataagcttataaatataagaaaacatttgttaagtaccacatgattattaaactatctcaactctacaattgggacaaaatttactaacttgcagccactcaacaacacattgtttatgatacgcgtgagtgcatggtaacttagtagcttccgaaccaaccgaaacatcctccaaacaaatcgaacaaaaaattggattatctttaacctgaactttttctaatttttcaattgactcttcactcgacgccacaaaacaaataggaaaatcatccatatt

SEQ ID NO: 258761 - DNA, 892 bp, Cannabis indica
ttgccatgaactctgcttctgtgtagagctacaacaggttgcaattgagatttccagcttatccaacatgagtttaactgaaaacagtaacttgttagagatttccttgtatctctatttgatgcataatctccatcaacaaaaccttcaagttccaccttgatccctgccttcttaaatttcagaccatagtgagtagttgtctttagatatcttagtaaccacttgactcctttccagtgttcttcactagggttagacatgtatctactgagtgtaataacagcatatgctatgtcaggtctggtactaatcatagcatacatcacacttccaattgcttcagcatatggtacttctgccatttgtttcctttctttgtcatccttgggagattgacttgttgaaaacacaaaatgtccagcaagtgggacttttgcttctttagaatcattcatcttaaatttccttaagacagcttcaatgtactttccttgagtcaatgtcattttgttgtttttcatgtttctctgtatttcaatccccaaaatcttcttagccactcctaagtctttcatctcgaattcactattgagaacatacttgagcttgttaatttgattttggtcctttcccatgattaacatatcatcaacatatactagtagaaatgtagcagcttgtgtttttagctttgtgaaatagaggcatgtgtcatattttgatcttgagtaaccaaccttagtcaatactgagttgaatttcttgtaccattgtcgaggtgactgcttcaaaccatatagagatctcttcagtaagcacaccagttcaccattgattccaccttgaatccatcaggctatttcatatagatagtttcttcaagccttcc

SEQ ID NO: 258762 - DNA, 1600 bp, Cannabis indica
aatagtttgatgtgacttcaatctgttgacaactactaaagagtttgactctatgtagtgaattggtaaatgtagatcattaatccattaaagatcatacatcaaggctaatgcttccataattttcggtttaaaacaacgttggaaaggtttggacattgcaacgatggtatcaccataactgttgcgaagtattacaccaaagtcagaagtttttgtctttgcattaaccgttgtatcagtattcaattttagcctacctaatggtggattcatccactgttgagtttgttgaactcgacggttttgaaaatgaacatctcattgaaaaataatcattagtgctatacattcaagagaaaagaaagaaaaatcacttaagagtgtgtttagaaataagtgtaaaattactaagtaatgtatactaaaagtaataattacattatattttaaataataagatgtatttgaatataaggtaataattatacaaaaaaacaatatattttttttaaatggaaaaaaataatattttagtagttagtgtttaaaataaaatatttttagtaattatatagtgtaattattttcaaaatataattgaaatctcttaattacctcagatcacaatgtaaaattaagtaattacatctaaacatattttgagaacaattatagagaagggatctcctaaacatattagacgaacaaacttacaatatccacaaagaaagaatttctcctaaataaaaggcatgtaaaaaaaaactgcccacttaagaaaatctttcagaacttttgctttaagtttggttcggtttaaacttttgaaatggcactaatctaaaatcttaatttgagatttaaattgctcatatgatttaattgtactgttaaagatgaaattttgatcatattattcatgtgtgatcatatgttgaatgatcatgatgaagaatgtttgtgtcttttaatgtttaattgaccaaaatgaaagaatagatatatatggcagagttacaagtactttacttgaacagaacttcacaaattagaggcatagtaactatggtgagcactactaatagcattgagagccataacctattttcatgaattgtaagtcaaacttcaagaattcccgtcagtggccgactaatcaatgtcgatgacaaggaagacgaaacaccaatctgtagatttcagccgtcatgaaaaaagaattcatattcactgttttcattggcgcaatatctgctgcagttggagcacttgatttctttggtcgggaggaagaagattaatttgttcgggagttaggctcatgacttgttgaagcaatgccttctccatctcaggtgtcagctgcacaatgacaagaaaatgaatattatgagtaaaccagtgagaaaaggatagaagattttaacagttgagattgagaaagagagtattaccgatggggcccgaggaggctgatttccaggacccatctgaccatgaactactggctgatgtgcagaaagctgagttatgctgaatttcgggtggagcaggcatccatgcagatcctctatccatttgcatcggactttccacc

SEQ ID NO: 258763 - DNA, 246 bp, Cannabis indica
tttaaatgaaacactttaataaagtttttgatctctatagggatgaattcatgaccaaaaagcttacctcgaaacgaagaacttcattgataatatgctgaactaattcgtctccgatttcatcattcaaataaaatattgtcttcttcctttccttcttattcgtctcgttataccaaaatagtccaaccaactccattgcttttttgaaaaattgcaatgaagtatcagaacaatctatattac

SEQ ID NO: 258764 - DNA, 1058 bp, Cannabis indica
acatataattcaatttaaatttattttgtaacaaaatttcagtagcaaaattattatatttttaagtactaaagttgtatttgttaccaattttaaagtgatttgcaaccaaaatgtagtagcaaaaaagttttagtagtctttcaaagtaattattttgctactagatttgacattttttgctacaaaaatattagtagcaaatttgctacaaattgtcttggtagcaaaaaactttcagcaacagagtattagctacgaagtagccaccaaaaaaagttagtagcaaaaagtttaatagctaccaaataggcattatttgctaccaatttttttgtagctgaatatccttttttttgtagtgagttacggttcgggatatttgtccaatttcagttatgattccaagttcaagtcctagttcctctcccggtccacttcccgttttggttcgaattttgggtcacagggtacgggttcgggtccccttttgggttcgagacttggttcaagtccaggtgtgggttcgggtccctttcagggtttgggtcaagggctaggtcccaaatcacgacaccgactacgggttttgtcgaagtctggttccatttctggtgccgggtcacgagctgggtcctagattcaagttcgggtctggtggggtactaggtccctatcgtagttctgtttcctaggtccctatccttattctgggtccaggtcaaggttattgtgtgggtttgggtcctggtctaggttaacgttcaagtcctagtctcggttcgagtttaggtctctgtctggattttgatctgggttcgggtttgggtttaggtcgtggtcctggtcctagtcctagtttgattctagttccatttgcgattctgacttcgagttgggtatgagttcgggccggagttcgagtcctggtatgtgtttaggttcgggttcagattaaagtctaggtccagatcaagctctgggtgtgggttcgcgtcctaggtcttggtctaggttgggtgcgagtcccaagttccaatcccgatctgagtctggat

SEQ ID NO: 258765 - DNA, 566 bp, Cannabis indica
ctcagatcgggattggaacttgggactcagacccaacctagaccaagacccaagacgggaacccacaactagaacctgatctggacctagactgaaatccagacccgaacccaaactcaaacaaggactcgaactctgacccgaactgaaactcgaagtcagaattgcaaatggaactagaaccaaagtaggactagaaccaggacaaggacctaatcctaaaccggaacccagataaaaaaccaggcagagaccgaaacccgaatcgagactaggagtcgaactcgaacctagaccgggacccaaacccacacaataactgggacctggacccagaatcaggatagggacctgagaaacaaaaataggaccaggacctagtacacgaccaagacccgaacttgaacctaggagctagctcgtgacgcaacacgaaaaatggaaccagtttgggacccgagattgggctccgaatctcgatccaaggcttggacaaaacctgtattcggtgtctgtatttgggacccagccctagacctgaaccctaacaaggacccgaacccaca

SEQ ID NO: 258766 - DNA, 641 bp, Cannabis indica
atattatttaattaatatttattttttaaaaactaaattaaatattatttaaattagttttatgattaaccaatatacttaatttcattttatagaagcaattaaataaattataattatatattacacgaatattgtaaaattagtcaaagtgtgaacaagttaataaatctaattacaagttaacctaaaaaaatatgtcagggaagaaaaaatcttataaatttcatcatcattcgtcgaaaccttcgtgaatcactgccattaattgttctatccactgtcgttgtaatggtaacaattcagtttttagattgtatgtctgcttttctccaaactgtaaaaagaagcaaaattttttattaatttatgtatataattatttgttaatataataaatacgataattaataattaaaacttacagttttttgatattgtatataacagttggggtttgcacgtccgacgatatcagtcatgtatttcaaaacacaaaacacattcttagtttttaggttgtctggacaatttgctaatgaaattcctggccatggcctgagatacacatttgatgtccctataatctggtatgctctgttttaaaaattatattaacatttcaatttattagttaatta

SEQ ID NO: 258767 - DNA, 2027 bp, Cannabis indica
atgcatgccttgggaggaactcatatcaacgtccagaatgatacatgggtacaaatgcgtgtgacctatctgagcgacatgtaacccgaagacgtcccatagaagcaaaagttctcatgcagacttgggcaaatgttatctcaaatgaaacacacagcgagcaaagattctcaaagatatttttactaaatatctccaccattatagtctatttaaaatccctatctttgtagttttgacattatacaattaagaaaatcatgggacttgatatttaagtttccctacttttctctcattaactcgtgataattgtatttgtacttgccttataaatagtgtgtcgatatcactatttaaggacttcttttttgcattctaaagagcagtcactctccaaaaatagttgtaagctttcttaagatttttaagaaactaacatggttgaaccttgtgatcttgataattctctataagtaataaaaaaagggagtaacctattaccattattaggggttgaacctctataaactttgtgtgttcttattgttttattttattattattctatcaatcattatcatcgctttaaagactcagtatcgttggctaaaagggaggtcaacagaaagaattcccaaagtgccctaggttgagataagttaacctgagcacccataatggccttaggcatgcactgggcgcctaggtggggagaaaaatctctaaaattcatctcattggtgctcaatcttctttttggttaaaagtactcaacatatttcattttcgtcaaatttgcacaagcattacccattgaaactaaattggtgctcaggttggaatgttaacctaggcacccatagttatgaatttgctcctttaggatgtctttgatgaaatatcatgtcttggaattgttccttgatggatttgagtaatcaaggtccaagaatgttcgtagaaacctaaatcctagtcatggtacgcccagattgactaaatgtcaaccttaatgcccattagggcttcatgatgccccggtaccatttctcatagacttatctccaaagtctaaaactttcatgcgccatgtgtctcatgtatcttaggacaatggctaagtaaatttcccataagatgtaagtttataggaaccaaaactgatgcaagatggcacacaagatgtcaacctgggcgcccaggactgatgctagacccaagttaagccctgggacgtccatatgacatcctcagcttcattgttcatcattttagggtcactaagacttgttcacctaaactttgtcaaaggatggcacccaaaaacaacttgttggatcatgctgcctacttgggcacccactgctgtcaactagggcatcgacatagtttccattgcccatgtcgaccaacttagtcctagtggttggccctagggttaattccttcttaccacgtgttaaaattgttgtccacatcaccgtgtcaaatttttaggtaaacaataactattgaggttctcatcttgaaggtacccaatttgaagaaagtttcttaattcaagcatttttctctttacaatgttgtttcaaggtcatctcaaaaattattttaaatagaattagactaatccttcctagattaatattccctactcaagcggttttcattcctagtaggaacatacaagataacaacattttagtctaggaaatcatccattcgtttaaactgaaaaagggaaaggtaggactttttgcgattataattgatccgttaaggcttttgatgaattgagttggcagttcgttaatcacgtgctccaaagcttcaagcctcaagatatgttttgcgatggttctatatgtaaagcgcgcttagttaatttggaaattatcagttaattgtgatgaattatgaaattatttatagctatttaaataatttattatactgttatttatgttattcagtagcatgcatattttgcatttccggtgtccggtattttggaactcggcgtt

SEQ ID NO: 258768 - DNA, 513 bp, Cannabis indica
ggtttttctttttatttatctttttttagaaaaaaaataaaattaaaaaacactcatttttagtttttttagtgtttgtttactagggtgttaattacacagtttagtaattacactatattttaaaatgcaaggtgtgtttggatatgaggtgctaattacatatgaattcctaatgtcttatttggcaaaatagttactaattacatggaaaaataatattttttagtagctaaggtttaatatggaaagtttttagtaattacacagtgtaattacattcaattctcatgggggcatgagaattggagagtgtaattgtaacccctgaattactttcaattacacagtgtaattacatggtcagacaaacatgttaaattgtgtaattacctctaattacacacaaatcccattacattgtggctttccaaagtcgtataagacaaactttgtaaaaatgtagaaaggaaattttatttgcattctaaaaaaattataaatgcatcctaa

SEQ ID NO: 258769 - DNA, 891 bp, Cannabis indica
tgtgagatttactacttgattgcgtatacttgcgtagtgtttgaaaatatagcaacagcaggtgttgcccccgggtgtgacaagggcaatccctacgccagacagtggatctgtagccgacccatctacgtgtaatttccaggtaggtttgtcttcattgttgctcgactgaggttcttgtactggcctcgggttgccttctgaaatgctttcttctttgcccttacactcaactacaaaatctgctaaagcctgtcctttgattgttgttcggggttgaaagattatttcatacttacccaattccactgcccatttgagtaaccgtccaaaagggtcgagtttttgtaatatttggcgtaatggttagtcagtgtatacccgaacaggatgagcttgaaagtaaggcctcaacttccttattgctaagattaggcagtaaataagcttttcaatcagcggatatcatccttcatattcaacaagtcttttgctgatgtagtagaccggatgttggacattattttcttccctaatcagcacgacactcacagcatgttctgtaacagctaggtatattcctagttcttctctgtctagaggttttgagagaataagaggttttgcaagttgtctttttagctcttaaaaggccttctcatattcctctgtccattcaaatttcttatttcctcgcaggatgttgaagaaaggaacatacttgtctgttgattttagaacaaatctactgagtgcggctatccgaccagtttcgtctatgtgcccacaaccttcttggatttgatgagcatgtcatccacgtatacctccatatttcgtccgatctgatctttaaacattttgtttaccaatctttggtaggtagctcca

SEQ ID NO: 258770 - DNA, 3175 bp, Cannabis indica
aaacagatccatccatcctaccacagttgctaagtactagctagatattgactgaaatacaattaccaaacaatgaatgcaacaaaaaataatatactaaatccaaacaacaaaaatattatgcaaaatgaatgaaacagatctgttctaccagagttctgaaagggtttggaagtgttcaccaatttccacaaatttgtcatagtctgaaatatgattagtaatgaaatcggctaacttatcgaaacttgtttacaaacaaataagactactagggataaatgatgacaaaatagttaaactgctacatcagtaaccttatttcatactcaaactaccctcagttttagtattatactgttattaaccaccaacacaatggtaaagtcaagacaactgatagatagagaagataaattggaatatgaaaaatagactatcagaaatatcattgtgaagttaagttgaccaactataactactgtaccgtcaaagggatgacttggttgaaaatgaacttgcaaaattgccacacataagacaagtaacaactctatgttaattgtcaaacttgaaccatatacatttcatattgaagtcagtgtaatccttttcatacatctcaggattcacccagggaaagaaaaaatataaccccaactgaaccaccagacctaagctttatacctaccatgtttccacaaacgctaattttgatgcacaaatcaaaatagtattctctgaactatttcatcaataatgtcaagatatatctctatattcagttctctatttaattttgtatgtcagcaatcgtttttagtagtagcatcgcagtaaactaatgtgtgcaacagtaaaattatcaacaagaatatggaccatttgctttttgaatgggaggcagaagagatatagtgggaacctactaaatgtactgtaccagttttttcatcctttactttaatatttgatgaacctgaaacaaacaattcaaaagtcaaagttgagctaagaactataccaaaaggaggcaatcatgtacgcgaattagctactatataataagccgggactcacagttatattcagtccacccaattgcctgattttcaagatcatatactactagcttatttgatagtaccagatctgcaagaaacacagaatcattatctcacaactcaaataattggaatgtttagcttgtactgaaattatcattgattgtgtccatcgaaattctaagagagatttataatttaaactccatttgtcttgaagaattttcgtactaataacacacagcactcctacaaattaaataatgccacatcatatatcacagcagtttgctgatctgaaaatcttgcgctaggacaatttctagaaagttttcagaagtaaaatccagaaattcactagtcatcaagttccttccaagaaataacaaggacaagaatcttcaaattacgaaaaataaagcaaaacaaagatgccaagccgcaaattatcaatactcaacttaaaacaaaaggaatgcatatcattctaaagattctaagttgctgaagatctataatgccaatgaatttaagaattcaaaagtacacttttactttggatgatgttaaatggctcagtggcaatataagaatagtagcaaacggatctcatgacatagaggggctgataataaaaatgcgaattgaagatccatatgagtataactagtttaacaacacaaatgatactaataaatctacaacacaacgcaagaattggttccatgttcaacaaggacaacagagcaattgttaaataactgcaaagtagaatagaggaatgatactcatgtgcaaagcatttgaataaaagctatgtcaattaagttttacttttcatcaaatccaaaggcaaatcataatttcaaagaatacatattatcaatttgtcagtttccagttttaccaaaataataaagccctctctttcatgaatatcctatagagcacaatcatgccattcaattttcatgagcaaagggaaaagtttgaattacttaattattcatgaatataataaaaggatcgctaattttcaaggaatacctcccaaaagggtcaaattcttcctatcactggattgcatcccactattttgccaaccaatacaccacatcccttcctgtaaatttaaacatgttattaataaacaacagttaaaaaaattatgaataaatgataaaaaaaatggatcacggagttgttaaaggtaaaacaacaaaacagctaaatgcttacaagagattaaaggccaacaattgaaattctagtaactccatgaaaaaatgaatagatattacagacattgcatatgaaattagaaactttgcttctcagtatacttacaaaagggaataaatattcatgtggataaaccttcaaatgcagcgaattctcaaaataaaacgtgacagttggaaacgcatcatccacactgccaaaaaagatgaaaattaaagcattagtaatggacttaagaaattacaggacaagaattctcaggtaaaaatagcatcccagattcccagcgagaaatgcatcactacatacagacaaatgcgaagtatatgcagtggcggaaccaacctctaattttaggacgggccaagtataaagaattttgtttccagtacaagtgtgaggaattttgtaatttgcaattgatatagaaaacttcttataagtagtaaatttactttactttgtttaagaagaaaatctttaaaagaaaaaaaaagctatacattcatagaacatataaaatatggaatttaatatatggtatatggtatagcccctccaaaggcctactaatttccgccaatgagtatatggtatgaaggttaatagataaaaagtagttgcataaaatattaaatgaaataagccaatccttcaggaaacacatcatacacaacaatgtctaagacaaaaaaacctactttgtttggacatcattagagataccaattcaaaatgaaatgtgtggaaggtaacaaatataatttatttttttcatttctttttctttttttttttttaaagttttggtactttcagtgtgaagctaaatagttttgcttggtcaagaaaactggatataaaagttc

SEQ ID NO: 258771 - DNA, 6817 bp, Cannabis indica
aatcatcatttcacttctaaatacctatagaagctatagattccatatctatgatcagcgctcccactcaattgaactaccatgtccttaatatgtatgtcacgagaagatccaattggttgactttaacgaacaaattgaagaacataaatgataccactaagttgaacctaaccatatcaggattaagatccatagacctaggatcaactattgatattgacttagaaagatataacggtaagtttatgatatcttatccaagatcaatatctgtcccttccaatgtatactccatacatccgatactagtaaactttgccagtgccctggaaaggatataacacttatccaaggtgtaagtataccttatcgctgattatcatgccagtttaaatccagtgaactgacaaatcatgggaattaaacttttgaacatataaccatgattatattctacggtgctgacgatactctaatcatgaataaatatatacatattaatatatgttctggatttaatagaatttatacattaaatataatcataaaataaatcatgtgaaccatgcaacataaaacgatttctgatctttatcaattagtaaatttgattatattgaaatgagttttatttaggacacaaaacccaactgattaatgttctaaaaatttgtgatcaagccagatctgcgaagaagtttagttgtcactaaatcctcaacctttaattgatcttcggagaagccttattctgagccgctttcttggctatctctgtagttttagcacttttggatggaagttctggaaaatgtcacaagagttggcaagtcatttatagcataagaaactcttaaaaaagcaaaattaaagttgggtgatattaatacctggtagctagaagttcaggtgaagggaaggcaccccttttacaaggaacacagaggagaagaactaatattcgcggagatcataggtatggtccccatggctaacagggtagtaagagtccgggtgcttgtcgaatctaaagaagcccaacttcttcttatttatcctcatggcattagcctttacactgtagaagtaaaggatttcttccggggagggtacttccaatttgttcatcttgcagaagacatagcactatgctagacgcctatacaatgaagggattagctggaaaggagctatccaattttttgcaattagatgcgcaaagtaggttcttagaggaagatgagcaccattagaaatgttggaccagctccactcattgaatcccttcgtgctggtagaagcagaccctcccgtggtagatatcctatgccacatcaatccagggacattacggagaccatcgccatcagcatagacctacaacatcccataggaccaaaagcagttgactttctggttcatctctcagacggagttgttgtatgcctatgcagtaaagagtgtcttggccctcctctttcctttggcctttgcaagggagccttcctctacagcaggttcatcctttggaatagttttcagggtcgcttttgactgaggtattatagcgggagccatagcaagaccaccttccattgtagtttcctcaacaagagtgataggcgtactttcagtaattcctacaatgcccgcttaggaatcctggttcaagtctatttctactagcacaaaataaagagaaaagcgagcatcttgaagcaactgaccaagaaaaggaaaacctccagactgataccccaatcgacccaatcccacgattaacaaacgtacaggaacttactataacctcacatgatcaaaaagaaacatgcctaaacaacattattttcttttatgaaaatttgattctcagaaagattttctcttaacattgcaaaatttctttggcatattctactttgctactcaacacgtaaacagtctcaaccctagcatgagcaagaaatttctatcctacacatgaaatgttaaaagtttagctaggggttagtgtacttacttgttgagtggagagaagatgggtcagtgccaaagaatctcgtctcaaattttcaaacccaatcgatgaggttgttgcaactggcctaaaagtcgaatccttcatctggcaaagggtcgagttggtcaatttgtagaggttcaatgtcaggaaaaagcttcacgcgaaagttgagcaattgttggatcaaatttttgcactcttcttgcatgcaataagattgacaatagaaaaatattataggggaaaagtctgaagtatggtgtggaataagtgaaaagaacgttgttaatgtcaatttatacttctagaagacaatcagttctttcaaaattatcggcccaaatcttctatcataattcgacagctggggagttgaaaaggccagaggcatttattagtcacgatttacctcgagtccatcaagccataaagaaaggtcttttcaaattgtcgcaccatcagttttaactttctgtggtagatgcatcccaacacgcgtgtaatgaattaaatagggcattttgtgtgccgcatgattgccacgtcaacaatttttgatgctccatctgcccttaatagatcacagctcatcaataagatacatccgcgaccccaatagttaaaaggttagtgcatgacaatagtgtaatgaattaaccagggcatttagtgtgctgcatgattgccacgtcgacggtttttgacgctccatttgccattaacagatcacagctcatcaaaaagatttattcgcaaccccaacagttaaaaggttagtgcgtgacaatagtcggttccagggagaagtagcaagctcccagaactcagaaagtcctggaagcttgcaggggtaaatgttatctgtatacccatatacttgatacgtggcattcgtggaaaggtgccaccatgtactatttgtaattagcgtgtaccctttgtaattagtgtgtacccagaatctatctagctatattccacctagagcttaaagcgacagtttcataccttctgacaccgaatcagatcttgccccctgtgtcaaaccatggtagtgcacatacgtgtctttgtagcccctttttgtccaacgacttgtctaggcaaccacttttaaatgagaaacctttgagcaacatgtgtcgttgttcccaaaaaatgccttgcaatggccatgcaccacacaatggaaaagctacctactaaaccagtagtcggctgatcatcctattgtaatatcagcccatgtggcatattgagtaagaaactctaggtaagtaaagggtatgcccttacccacatgtgtgcctataaatattccgactttttatgtgaaaagggtgaataatttttttctgccaaaattcctggaagctttattcttttctaagagaaacaaaaggaatacacaattaatattcatactgtaaacacttgtaatacttaaactctcgccggcaaagctaatataatggattcgtggactaagaattattaatgtctaaaccacgtaaaaaactacgtgtctattatttatcgttttatattttttttaagttctaattaatcggcttcaaaaaaaacaatagagtgtggtacaagttatttattattttttaataaatttatatatcatttcttaattataagtattaaataatgtaataaataaacatattatttacttaaatatatatacctctaatttcaacttctccaatataataccggctaaccggtttcccggtccgtaaaacgattacgtctccttcccttacgtcgtcaacttaccacacccacctacttttttcatactcgcctatttataaattctttctctttctaatttcacaatcttcgaaatactaaaaaaaaaaaaataatcactctcttcattctcttctcttacaaaatctatctcaaaacttttccctgaatctcaattcataaaattttcccaaacggtagatgagaaactcaaaaggaggatccacaatggtagcggataggcccaataatggtctccttgccagacccaaattcggagcactgttgcattccgaatcaaatatcttctcgccacgtcacaaagcgtcccacatcgacgacgacaacttctccggccaccgtcaaagtagctcgtcggcgatgagtccgggatcatcggttagtgcttctccctacgccatgtccccttggaataatcaaaattcttctccgtacaacaagtctccttggctaacatcctctccgattattttcactccttacgaagaagatcatgagaattttcctcgtaatggcttaatccggtctattgtaagagaagagggtcatgtatattctttagctgtttcaggggaccttctctacactggatccgacagcaagaacattcgggtttggaaaaacatgaaagaattctccggatttaaatgcagcagtggtttggtcaaagccattgttatctcgggtcataagatttttacgggtcaccaggacggtaagattcgagtctggaaagtctccccgaagaatccgcgggtccacaaacgaatcgggagcttgccctctttcagggattttctccggggctccatcaacccaaagaattatgttgaggtcaggaggcgacggaatgttctccgtataaggcattacgacgccgtttcgtgcatgagcttgaacgaagaacaagggttattatactcagggtcgtgggacaagacaattaaagtctggcgaatcgccacgtccaaatgcttggaatctatcactgctcacgatgacgccgtaaattcagttgtttctggtttcgactcgttggttttcaccggctcggctgatggtactgttaaggtttggaggagagagctaaacggggaagggacgaaacatttcttggttcaaactctactgaagcaagagaacgcggtgacggctctagcagtgaacgtagaaaacgccatagtttactgcggttcgtcagacgggttggtcaattactgggaacgagagaagcacttgtctcacggtggggtcctcaggggacacaagctcgccgtgctttgtctcgccgccggcggaaaccttgtctttagcggctccgccgataagaatatttgcgtctggaggagggagcctagtggggcccacgcctgcctctcggtgttaacgggtcatactgggcccgttaagtgtttggcagttgaagaggaatgctacgaaaatcggggctccgaaaaggacggtgcggttgacccgaggtgggtggtatacagcgggagcctcgacaagtcagttaaggtgtggcgcgtgtcggagcacgtgccggacgtgaatcggggtagagcgtgggagcatcaatatgggagtagcggccaagggtcgcccaatgagtccgttgttagtggtcggtcgagcataaggtcggctgcggaaaggagctttaaccgtaggcacgaccaaaactaaaggaacgtcctaagcagtatctctgggaacaagccaacgcgctttcgatggtcgttgatggtacccgccatcggattggttctggggtggcgtagcatcgttttgtggttccgtaataaccttcatacgactggccaccgtcattcgttaaaggtttctggactcttttatctctggattgcattgattttttttggttgccgtcctacataactactaaccaataggagtgtgccacgtaacaaacaattggtcgatctttctgaaactgcaagtgtacgtatgatttttttgtatttgtttttctcttccaaagtacaaattttgcctaaaaaaattttcaagaaaaaaatacaaagttcaaaatgtcaaacccctttctgtttatatgtatttattatattaattatttgaaaaggagttgggtttgctgtttcttatttttgtaagtttcattttatacgttatagtccaaaagaaggtttagtgacctaaatgttgaattgaaaatttacgagtgtttgtacatatttggttttgttgggtttgactttgtgcaaatttgtgttgttatataattgttatacataataagtcgtatgcgtacaattcaaactctccttgattacacaattgtatgtatttataaattatcataatgaatatttatagaggcagctacactgtacacaatagtttgtttcttcctttatgggaccaaagtcataaaacagtggaccaaaacatatatgatatagaagatattatatatagcaaagacaacagtacaatatggacggttatatagtaagaatattaatgtatatcaactttctcgtttgtctactttatctacacttcttaaaccattcaattttacaagagaaattacagagatattacaagcagatgatttataaaccattcatcaatgatataatatctaaataaattctaaatgaaaaagctaagaaaaaaaactaaagaataatttcgattaaaataaaaatctaaccatgtccttattaggcgagagtcaaagttatttttattttataaatttcttcagtgtttcatattgtaaatactagtctaagttgtcatctttagatgtacagctagacgttgcatttacaaatatttatcaatcgagatctaacactattatgtttgtctaacggatgacaatcctttgagatttgtcccattaaaacaacaaactaagttactaacaatgaagattcgaaatttatactacaattaatgatagaaaacaacataggttcaatataaattcatacacaattcagaaattat

SEQ ID NO: 258772 - DNA, 1361 bp, Cannabis indica
aaatatttttttgggcccctgggctaggtgggccctaggcacaggcctagcctgctgaaacccaaaaattctcacagctctcggcataactctaaataccaaacccaaaaatctcttggccaaaacacaccaaaccgaaaccaagaacaaaatacacacaaatactataaacacaatatcagagaaatcaaattagggttatgagaaaataaaaggtgcaaagacaacacccgaaattgttctcagagttcacccaactacttctatgtcaagctccccatcttgatgttcattcatcaacatatcaggtaaaggttacaattgtgtctctttttttgttctcactatttttctctccttttacaaagatactaactctctcttttgcaaacacactgagaaaaactcccaaaagagttttctctctttttacaatggctctctttactgctctgtggaggttttgtgtattgtgtttcttgtatttaaatttggttgtaagttgtaaactgttataggtaaaaatatcattttatatcaaataattagtgatctgatacttaggttatttaagagaaactgacttaacaaatttctgttatttatgtttaagctagttgactaatttcatgtttaagctaggtgactaatgtaggtgatcaatattttgggttcttgtttataatcaatgtgggtattggtatatatagcaagcataattttctctgagaaatgttgtggacagctgacaagttaattaatttgttccaagagatgaaaatttgctggattccaattgattaaaaatgcaaaaattatagcagaaaatgaaattgtaaactgaatctgtacacagttgatagattatcttgtggcttgtgaaagaaataaatgattgattaaataagatataacaaaaaataaagtaaagaatgaagaagaaaaggttcaagctttttcctaaattttacttccatttttatttttttcaatgtaagaaactacactaagtattgtgtaatcattttgtataaataatccaacaagtacaaataataatcactttggttttcagttgccatttcttggtacaagcttgatcttagaactcgaaaaaacaagtttaattaacatgattccacccagctgcacctgggaattttgctgtccaaaacatgtctcaatctcccagcatcattccactgctcggccgaggcatagatgttggcgagcagagaagaatagcccgccttctcaggctgtaacttgaagcaatttctagctccgatctcctcgagctcaacattgttgtgtattcttcaggcgagaagcaatgctccccaaaccccggcatgaggctg

SEQ ID NO: 258773 - DNA, 726 bp, Cannabis indica
gcccatggtcaggaaggagcgttgatgcccttgcataagtacttcaaggatgtggcggacttcttcggtctctgcccgacccagttcactccttaggcattaagtatttgttttccctcttcgtcctctacgcttcccaaggatggggtactccttctcctcacgaggttgcctggttcttcgatttgaagtctactcccaaacaaggcaggtcggggtacttctatttttctcagccagggttcaagcggttgaccggcacggatgacaaggccatcagaaaaatagggcgttttgctgatgagtacttcatggtgaaggatgcgagcattacccggactcggttcagcatattttgacatatcaccgtcctaccctcactcttgctcttagggatagaactcaaaaacttgctcggttgccgggggaagaccggaatattatccaattgacctccgatgataatcttgtgaggtacgggctttatcccaaggactttactcctaagtccgtggcagggaagacgaggaagtctgggtgctggccggactgaacgagctcatgaggaggatgagctcattcaactcaagcgtgaagctaagttgaagggtggtgccagggccaagcaatatgctcaggagcctttgaatcctgaagatgaagctgaggaagagcaggtgactccactgaagaggaagaagaaactcctgttgggttttatgccct

SEQ ID NO: 258774 - DNA, 537 bp, Cannabis indica
agactgacaagctgctaagagtattctgcgcacacaataaagccattgggtgggcattggctgatattaagggaatcagtccctcaatagttatgcatcgagttctaatggaggagggcgctaaactgactattgatgcacaacgaagacgtaatccactaatgaaagaggttgtaagaaaggaagtggtctagtgggtagatgctggggtggcttacccaattttagatagtaagtgggttaacccagtgcaagtagtaccaaagaaaagagggatgacagtgataaaaatgaaaaaaatgaattgatccctacaagaacggttactggttggcgaatctgcattgactacaggaagcttaataaggcaaccagaaaagaccattttcctttgccattcattgaccagaccggttggttggaaaagagtttcttagatggctactctgattaccatcaaatagccatagcaccagaagatcaagagaatacaacttttacttgtccatatggtactttcacttttaggagaatgcc

SEQ ID NO: 258775 - DNA, 511 bp, Cannabis indica
cttggaaatcctgtttagacatattatgtaaagcttgtaaaagaaaatccttaatgtcacttctatgataggtcaagtaaaactgcttgaatcttgaagatttccatatagactttgctcttatgcaaccaataagggcgtgagagactgattcagtgttgtgcccacagatagagcaatttcggtgaggaagactccttttaaggaaaagattgagagcacaaggcaaaatatggtggaaggttctccaaataaaatgtttaattttgggaggaacaggaagagaccaaagggttttccaccaatgaaggtacgggttaggattggaagaggagggaacctcaaccaaatcaagagagcaagcgagatggtaagcagatttgacagttaaaatgcctgaggagtggaaaccccaaataagagaatcagaagatgcagggtcaatgggggttgtgaggatatgatctacttgataagaatggaagtattgctgaagcttacgaatgttcca

SEQ ID NO: 258776 - DNA, 540 bp, Cannabis indica
tcatccccgtctccgccccgtttaatattcagggacaaaatttgatcccgtccccgccccattccccatttagatggaaaattcccaacccaattaggggcaggttcgcgggggccatcctggaaaatgtgcatccctagtgttgagtttaactagcatttccgtacttttcattatctcctcttctggtcgacgacatgacgttttacaaatgcaacggcaaagttttattagaatagaatagaatagaactgaacagaacaatcaagaagaaagtgcgaaagccattagttagtttcttctacaacattccattgccctcttccccaagcttcttcatcttcctcttcttaatcttaatattacttcccttctgccaccgccacttccaccgctttctctcacacctcaccactcgccggactctctctctctcaactcactaactctcctgatctttcctgctagtctatgtgattctctcgccccttcaccttacagacactgtacagttttctgttaacttgggtctgcggcatt

SEQ ID NO: 258777 - DNA, 651 bp, Cannabis indica
aactagaaggttccttatgtaatcgaagaaatagttggaaccggggtttacaaattggctcggctaaatggctcgctgataaagaactactagaacatggaaaatttgcgaccctactaccaataaattgatgttgtaacttctattttctgatgtaatattttgaacttcagttattaataaagttgaatcatttttcaagtaattacaaagtgtcatcctttaaaattacttgaggggcatatgtgtatgattaaccagaatctatctagaaatacatgatgtattgcaaacccattgctttagaattttttaaatttttaaagtttttcattaaagaacctttcccacaagaaaggaaaattaaaagtagcagttgtaaatgagatataactcataagaacaacattaagctacatgcgaagctaaatgctaacgactcgcattttgtaggaaagtattaaacgagacaccaagatgccttgaaaaaaaatacttaaacttaatatatgaataaaaggcctaactattcatatgagcaatcaaaaaatataaaaattaatgaatcattaaaagtgtatttaagtttgcttaaaataaattataactggttatgcgaagtagaatcgataactgctcgcaaatcaaaag

SEQ ID NO: 258778 - DNA, 653 bp, Cannabis indica
aaagagtccaaaaatacatcaatcttgaggaggcccaaatagtagcctatggaggatattatcccaccgggatagcagggtatatgctaggagcccagccatctggtactgtcccgactgcagctccaccaatgagcggcatacaattctctgctactctcggatacagtcagggccaggccttggcccccgcatcgtcccattttgggaattcctcgggtatgaatggacaatccccctcacactccgctccaaatgccagcctagcaggtccttctcagggctcaaggagtaaaagatcctccaaaggcagcacccggacggaagaaaagcgacaaaaaagggggtacactccccaatacacccagtacacggagttgacagactctcaagagcgtgtgtactttgctactaggcaaaatacacactatcggagaccacctcccttgtacaaggatagttcccggagggaccccaacaagagatgtgagtatcacaacgacattgggcacagcaccaatgaatgcaagaatctcaaagatgagatccaaaacttaatccgattgggacacctctacgagtggatcaagaatcgcctgcctcatctcaacccaagacaagcgactagaacttggccacagggaacaccaggg

SEQ ID NO: 258779 - DNA, 688 bp, Cannabis indica
ttacattattttataacagtatctatcattaccattattttctgaaaatatatatttagacataatatataaaatattttctcatataatccttatacatagatagattaatataaaatacgtataataatgaaattcattcttttattgtatatataaaatacatatatataattacatctaaagagcacgtacatgtagccgcaatagctaaaaaaaattctggaagatcaaaatctcaaaccccctatttaaattaaaaaataaaaatacattgcctaattagaaaaatttaacatacatgtattgcacttaacatcacttaattaaacctcattgaaaagaaaaattaattatacgtgcattgcacataacatcaacttagtatatatatagaattacaaaataaaaaaccctaacatatatataaaggatttttatgtatatatatcttatatataatatctttgttattcaggtcgagcttaaaagactttataaatttcatttttcaaatattttactagtgctatataataattttatattactaaatttattttgttttactaaaaaaatatatatataagacacgacttccaaatacaattaatgcaaactattttaaaactacacacaattttccatattaagggaaattacccaatatattattttttttaattta

SEQ ID NO: 258780 - DNA, 2765 bp, Cannabis indica
tgagatttaagactagatcacgaattatgaaagttataattcatgcatttggatgcaattatgagtgttaaaccaactttatccaaaacaattataaaatttaaaagacataataaactattatcccgtgcgaagtttctcgtctataataaagagtcattaggaagtttcgaaatgttccaagaaaggtggcttaagacggcaaattgattaaattatgtgtattttgctatgatatacagaaagaattatttaaaaacaaaataaattagtataatgttagcttacatgtggacaaggtcaaacctgtaatttgcaaacccaaaacccaagagaggtgcaggtcaagatgaaatgcttatgggaaagtatagaagaaactgtaaattgactattatttaataaacttcaaaattatatggctaagtaagtcttttaaaaaaagccaaacaaattcaaccatagaggaaattttaccttcatcaagagcatctccaacacattatgacgatgatttgttcttcaaagcatataatagtaccatcaaaaataaaattagaaaattaagaattttgaccctatcaacttggtaatttgacaatttaatattactcttttagcattccagattatatgctacaatattttatatatataaacatcacttattttatagtatttaaatcataccgtatgtgcaatgttacataaaatatttggtaatttttggacaatatcccttgattcccttcttcataaagttaaaaaaaaaaaacaaaaatagaacagagtaagaaaactagtcgagaaaatgacgaaaatgccccttacatacttctacgaaacatagaggcaactgcagactctttctttcagaggaatcatcaaggccgaccagcaattaattgcctgttccattgctgtcatccatcgagagaccattcccttcctccttcgaagaacccctctttctctctctaacccctctctcatatatatatatatatacacccctctcctcctttccctcacatcaatcaacaacttctccttctctttctctttctctaaaaacaatttcaagaacagtaacaacaatgaccaatggaattgggaaaagcagggccttctctgagtttgaagatttgttgcctgtaatggccgataagttagggggagaagggcttattaaagaactctgtaatggattcgagctgctgatggacaaggaaaaggggttgatcacgttggagagcttgaggtcaaacgctgccgttttgggtctgcaaaatatgagggaagatgagcttgtgagtatggttagagaaggtgatttggatggtgatggagctcttaaccagatggagttctgcgttttgatgttcagattaagccctgatcttatggaagaatcttggttgtggctcgaagatgttctccaagatgagctcactaatactaaatttaacgttttttttttttatcttttctgaaagtttaaagtagaaaacatttttttttttgaatgattttgattggcattgaataaaaaaattaccatttattgtacattcgttttgattgcaatgcccgttgtttataatgaagaagaacattctttcgatcatgattaactgttctcattatgaatttgaaaggaaatttgatgttattattcattgaattaattagtcccaagctatatatttaatttattttcttaaattaatgaatctcaaatcacttgatcaaacatgcaaagcacttatgaattgattagattctttctttatttccaaatatacctttaagaaatcacatactcaattttgtaattgcaacaattgtcgattgaatattgattgaaatactggaatcattttacatatatatatatatagtaggttacgccatacaggtatacttaattttctttttaattagatttaattaagtgattttaagtgtaaaatatacatgtttgatttttttaattaagtaatgtatatctttttgagataggtttaagattttgatctttaagaatttattttagctgttacaactatactggtataccctttaaatgtggttatatacatacattttatatgtataataaaactcaagtaaaatgagatataatggtgaatcgttgtgtgtccaattaagctgaattgtctcttattttagttcaagatttaaccaataaaattaaaatatggttaaatttttttacaatatctcaagtattttaaatttaaatttaaatttctttatataaaataaaaatatttacataaattttaaggaaattagttcatatactactttttaacttgtttccagtgatgtttatgtgagttgctatataaattttagttgcgatttagattattctattaattattatggggtttctaaatggaattctaaaaaaatacaaaaaattatatatattttgaagtataaaatgagaaaacctctaatttttatttttaaatatatatgtaataatattataaaatttatagataatattttgttaagtaataatatgttagagttaacgatcattttttaataggtattacccatgaatggttactaaacaaatttaactacaaatattaattttaaaaatattaaatcatcaaattttgatctaataacgaataataaaagagaaatttaaatttctatgcttaatttaactacttaattaaaaaaataaaaaatatttctttttatactatatcaaaaat

SEQ ID NO: 258781 - DNA, 2082 bp, Cannabis indica
tatgctattgtttatgcttttcttactgagtctgttgactcacagttgctatttccatgtgtaggtgagggcaaggctaaggctgagcagctgtgagaacgagcagatggagattgtacatgttggggcggttaggcctggagcgtacggtctttgggacattagggcttattttgtagtcactaggcgacaatcttttatatatgcacagtaaaacttttgtaaatacttttgtaaacgggatcccagttctatataagtgtattattctaatgtttacaattaattaagcaaaattttaattaatcacgattttcaataaactcgttgattagcaacgagctgcacagttagttaaaaatcatgttaacatgcctaaaatagtttgggtgtgacaatttggtatcagagatgccaggttgtcttctgaagatcgtcgtgacatgcacaatcatcatcagctattagcttgtcttgcggttcggtaagcttttattgctttagtagtttatcttaatagtatgattaagaaaagcctgataggaagcatgttagtagcctgatagttgaataggcgcatgtttttaatttccaaaataagcggcagttagtaagttttacttcatcacgatctgaccagactagctcttggttacgcaggctgttctaatagtatggacgccaatcgaaacacaggagtcagggtaactcagtcagatccagtggtggtcaaggagtttagattcccccaaatgctcgtggccgaggtagaggccctagaggcagggcacacaatcggggtgatgttaacccgccacaggctgcccaggctgcctaagattgggaaaataggtttacaaaaatgcaggtcagaattaatgagcaagatgaagaaatcagacgcttgagacagcagggtgctcctgcaatccctgctccagaaatgcaggtagctcctaccccagctgtgcaggcaggaccagttactacagtgagtcgaatggaaccactatatgaaaggtttcgcaaggagacacctccaatctttatgggaggtcccgatgtgatgaaggtcgaacagtggctaacaattattactagaattttgaattttatgggcatcaccgacaatgacagagtgacctgtgccacattccatttttaagaagacgctctagtatggtgggacatggtgtccctggcctgtgatgttacaatgatgactagggaaaagttccaagaattgtttaatgcaaagtactataatgaagctatcagaagtgtgaaaagaaaggaatttatacagctgacttagaaagaaaatatgagtgttactgaatacataactcagtttgatcgtttggcaagattgggctcgagaatagtgccaaccgattttagtaagaaagagaaatacctagatggattgaattcgaagataagacatgacctgattatcaccactgatgacaacaccacctatgctgatacggtgggaaaggcactgtgagctaagggcgcagtggagtgcacccagaagtctcgagggactcaggtcgttggttcgttggtggggctcctactcctcctacctcaggctttcgtagggtagatagtggctcgaccactgaccaaaaaagaaaggcacctattgcatctagtggctcaagtcggaataagaggttctgagggaaccaaggtcgaggcaatcgtcagggtagctccgaaacctagtataattacccagaatgccccagttgtaaaaagcgtcgtctgggtgagtgtagagggaaagggtgcttcctgtgtgggttgtcaggacgctacaaaagagattgcccacaacttaagaaagaagaacaaaagattttgctgcgaaacctgctccagcaagggtgttcgcattaactcaggaagatgcaaaagctagccccttagttttaataggtcagctctcggtcaacaactcttacttctctatgttatttaactctgggaccactcattcttatgtgacagccagattttttatgatacagcgtttggaacactactgccaggcagagaattagtcatctccaa

SEQ ID NO: 258782 - DNA, 1085 bp, Cannabis indica
gggtttgggtccaaggctgggtcccaaatccagacacagactacgggttttgtccaagccctgggtccggatctggatcccactttcgggtccgtagtctggttccatttctagtgccgggttacgagttgggtcctatgttcaagttcggttctgggtcgggtactaggtcccggtcctagttctgtctcccaggtccctatcctgattttgggtccaggtccctgtttgtgtgggtttgggtcccggtctaggttcgggttcgagtccttggttctgatccttgtctggattcgagtttggatccgggtcctggtctatctttgggtctgattctaggtgtgggtgtttgagttcgggttcgagtatgtgtccgggtttgtgtcctagtctggaccccgatctgggtctaggttcgagtccaagccaagttcgggtcccgagtgcgggttcaagtttgggtctgggtcatgatctcggtccagatctaggtccagcatttggatcccagtctgggtcttggtccgagtccaggttcgtatctggatccctatctaggtcctagtctgtgtttgggatcgggtcctagatttaggtccaagtccgcgtctcagttccggtctgggtacacagccgtgtcggggcccgagttcttgtctaattttgggtatgaggctaggtttgtgttcggttataggtctgggtccgggtccgggtcctggtcacggtcctagtcttgttctatggtcctggttcggctattcttgttcaagttcaaattttgggtcccaggtctaggtctgggttcgggtttggttcttcgtctgggttctggtcctagtgtgagtcttagatctagacaccgactactggtctattccaggccccgttacccgaatcctgagtcaagatccggatcactatcacgggtctcggtctggttcttgttcagtcccaagtcccatttctgcgtttgggttcgggatcgagactggggtgcagttctaggtcccgaccctggttctgtgtccctagtctggttccatgtttaggtctgagtttaggttcgggttcgggtcccgagt

SEQ ID NO: 258783 - DNA, 690 bp, Cannabis indica
tctttgtgtctaatattttttttgtactttgattctttatcaaatggaaagtaaatcagaatccaaagtttcctttgtacttctatcaaggctaaaggtcgaccaagaaaatcttcacggcaagctaaagtatgttttatgtttttaataaaattggtttttaatcttaagttttattttgatttctttttattgattctcatgaaacctggttttaattttttttattaggatgcttctgttgaagaagaaaacactgttaaagttcaaacgaggaaatctccccgtaaatctaaagtatgttctatgtttttattgaatctggtttttgttgtttattcattttttcctttatgaatttttttggatgaaactgattttttcttgttttgtttaagggtgctactgttgaagaagaaatttccattaaagcagcaacaaagaaatctccccggaaacttaatgtatgttttaaatttttactgaaaccggttttgcatttttttttatgtttcattattgtttcctaattgtattttgtttaaattttccaagtctttgttccaccaaaattggtttttatcttttatatgttagttcctgtttttgagtatgttatgtgaaaccagttttttgtgttttgtaatttgttattctttttctttgtgtttgtttatgatttattaattt

SEQ ID NO: 258784 - DNA, 706 bp, Cannabis indica
ccctgtagtcaggtcctcaatttaaggtccaaggttaggtcccgtgtctcgagtctagggtcaagttttgggtctccgtcctggttttagggccaagttttaggtccaagtgcctcatctaggtcttgatccttagtccagggtccacgttcgggtttggggcccaggtcccccatctaggtcccggtcaagatccaagctcaggttcgagtttggctcccaagtttgggtcagagtctaggtcccagtataggttcaagtttaagtctgggtccgggtctcgatctgagtcaaagtccctattccgttctgggtcggggacacgatccgggtcccactaaaggtctagatcccagaccaggttcttgtctgggtttgggttcgggttaaggtcctgagtttaggtctaggtttgggtttggatccgggtcttggtctaggtcttgggttccaatctcggtatgggtattggtctaggcccgtgtccaggttagggtttagggtttaaggttttgggtttagtatttattgatttagggtttaggatttagggcttaggtcttaggggtaactgtaaagagtttaggatttagggtttaatgtttagggtttagggtttaatggtctgcttccagttccggttccaatttcgggtcacaaggtacgatttaaggttttggtgtgggtcttggtccgactcctggtt

SEQ ID NO: 258785 - DNA, 1213 bp, Cannabis indica
tcataacagcaaaatccatctaaagagagttgagagagcgaggaagcccgattacccacatcaatcggtttcttttgcagatcaagcttatgtgggattaaagctcaaagattcaatggctggaggtatttcgatccttaaattatagtgcatatatgatttattaattccgcactttattcataatcatgtatgttttagtctatacaaataaatgtctaacagtggttactattacttcttgcttttctcatctctatcatcttcaaaaaaaatcaatttcttatgcttctttttcatttttttgcatgttcagtgttagatttgagattttgttcattattctctgattttgttaaattttatatgttttgttgtgatctgcatgtattattcggtgttaagtattatatactttatttttatattttttaacattttttttttgttattctgattttttttaatgtattaaggaaagggagaaaaatttaaggtgaaagttcccctcgtgatgttatggaagtttcaactggcgaaagagttattgatgtataatatttttttatgcttttatttggtgattttgttttgcagttttactgttattttacagttttttttaatttattttttatgttattgttctaggattgaactttttaatacttacatgttgacggaataatggttatttttcagctgttctagtagttcggaccgtaggtgttgaaaatagacgcttcgtatgtattttggggtgtgtacagtataaaagaaaaaaattaaggtgacgacagtatttttgtaaaaaatttcgtgtggcagtataaatataaaattgcccctaaaatttagtatttttgtaaatttcccaaaatatatactattcatgggaaatggtctaaagtaaatgaaaaaataatacattttgcatgatatttatatagtaaatatcatgccaaatttgatataacatttacaatataaaagagaaattactccacatactattttcttaattttttttttttacaaatttacgggttaggtttctaaagtggtttctctggtgatttttatgtgagttgctatacgatttttggttgcgatttaagttaattcgttagttgcaataagagtttttaatatatattccgtaaaaatgtaaaaaaaaacctattttagaagtgtaaaaataaaaaaagttctt

SEQ ID NO: 258786 - DNA, 2234 bp, Cannabis indica
gcccaagcccaagcccaagtccaagtcgaagcccaattctcttccacgctctctcgtctccattttcattaatccatttccatctttctcccattaatgtctgattcaaaaaatattcataaagatatgttctttctgaaaagttcttcaattccatcgctaaatacttcagtgagatgataatccttgcaaaaccaagcacaataagaaaaccccaaaatagttcactgtaaaaatcccaaaatagaatcaatggcagttttcttatctgcaacagccaccaaattgagcttcaaattttccaacaatggcggcaaaagagaaaacccaccatcaatttccccttcttcaacaggtaactaattaattccactattcattttccattttcctttaaagttttgaactttacagtagttattgttatttgttatttattttctcaggaattagttttggcaaaaacaagcttaataataagaagtcattagttgttagttgtggtgttaaaatccaagaaagtgagaaaattgatgggaaaattagaccaaggaaaggtggtgggagtagggttttgagtgagggtagagatgaggatgagagctatgctcctatttgtcctggttgtggggtttttatgcaagataaggactcaaatcttcctggtttttttcaaaaaaaggaggtagttaaatcagaaattgaggatgttgaggatgaacttgaggtgtttgatgaaattgaagaagattatgatgatgaagaagaagagtttttggatgaaattgagggaagtgatgttgaagaaagtgaattggatagtggggatgatgagcttgattgggattctgatgaatgggaagctaagttattgggtgaggaggaagaagataattcgttggatttggatggatttactccacctggggttggttatggtaacataactgaggattttttgaagaagttgaagaaggagaagatatcgaaatcggagaagaagaggaaagttagggaagaagctattaaggataaagaggaggttacagtttgtgctagatgtcattctttgagaaattatgggcaggtgaagaatcaagcagttgagaacttgatacccgattttgatttcgataggttaatttctacccggttggtgaaaccatctgggaattctaattccacagttgttgttatggttgttgattgtgttgattttgatggttcattcccaaaacgagcggctaaatcgctgtttaaggctttagaagggaacaaagatgatccaaagcttaaaaaaaggttaccaaagcttgttcttgttgctacaaaggttgatcttttaccatcacaaatttcgcctactaggttagatagatgggttaggcatcgtgctcgggctgcaggggcgcctaaactaagcggggtttatttggttagctctcgtaaggatttgggagtgaggaatttgctttccttcatcaaagagttagccggtcctcgagggaatgtatgggttattggggctcagaatgctggcaaatctactttaataaacgcgcttgcaaagaaagaaagtgcaaaagttaaaaagctaacagaagctcctgttcccgggacaactctcgggatcataagaataggagggattttgcctgccaaggcgaagttgtttgatactccgggacttctacatccttatttggtatccatgagattgaatagggaggagcagaaaatggttgagattcggaaggagctaaaagctcgaacttacagaatgaaggcaagttgttcaataccctctttgctttttaatcatttcatgaatagtttgttaacatagtttgttacctgaaactcctttcaataacaaacatgttctatctcatcaaatttcggacactaaggtcgcatttggtttggtgtaatggaatggttatagtaatggtgattatattgtaaagagattagagtgtttttaaattcaaacatgtttttgtatgttcaggcagggcaaaccatacatgttggtggtttaatgagacttgaccttgttgaagccaatgtacaaacaatttatgtaaccatttgggcatcaccaaatgtgtctttgcacatgggaaagaccgaaaatgctgaagaaacttggaataaacaccttggcattaggctccaggtaaaaattccgaaatgaaaagaagtacttgtgttgtgtgcttaatttggtttaa

SEQ ID NO: 258787 - DNA, 1319 bp, Cannabis indica
tacgtttttatttttacatctctcactaatactctactgaattctatcagatccaaattatcacttggtgaagatgataaaagtcaaaaatcattaaatccaaacaaagatcttgaagagcaatatgtaaacattgaggccaaagtatgcatgtccttttttttgtgtgtgtgtgtgttttgtgaaccgtcctttctatgaaagcttgattagtttttggtcttattttctcagtttttaaccacaagcagtgtagtggaaaccataaagagacagttctatgtccaaactgaaggcattttcaggtacatattgcgctcttcatgtcatgtatacaaatctcagtcccctttcattttaatgaaattgcattatgatattattctcaggaaagaagatgacaaggtaaaagagctttttgatgccattgataccttaagagataagtttgaatccatagacagacctatattaaagattgagactccaaataaaaattctgtgaacagtaaaagtccatccacaaaaaacatacatgatgtaattcagtcttcactgattagagaaaagaaaacagtgaaatctgtggaaaatttaacagaacttgactcagagggaaatgatggcagaagtgactcagcagaggagatcaatgactgggagtttgatgcttttgaaaaagactgattacatagagattcctttatatgtaaaaatatatttctaatatataatatatttatatatgacatgttacttaggagaaaccaaagaagcaacaattttcaaaaggattacactattacaagtattctagttgtttttgttaggttatgcacagtcgggtcttcccaaccaaggtttgttttaatgttgtaagtaacttgaattggatcaaagttatcaacaaacaaagcttccatctttttcttatgtttttgtttgttagaaacatatactttgaatgaagaagcttaataatttatttgagcatttgaagggacaaagaacctaaaaaggtggttttcttgttgaacttgatgttgatgacttctcaaagaacacctcagacccacgaagaaagaagcttaattaaaactttcttattaagcggataagtatgtatctatctttaagacacttaaaagtagcatatatccaaagtatgtaaaaataacagtaagaacattttttcctttttctgtatttttttttcttcataaaattcttagtttatgtaagaaaaaataattgtccataataaacttaggattttgtaaaataaatatctagaaagacataatgtcagaatatttctt

SEQ ID NO: 258788 - DNA, 1407 bp, Cannabis indica
ttgtctttatcactgctcttgacaaccagattcgattttcccacagttgtctttccttgcagatagtaaattccattcttgatgtctcccttcattactatcctagtgcccttcattactttcattgaaccatctatctttagagtgcagccttcggatacaagttcactaattgaaagtaaatttctcttaagttcagggacatacctgacttcttgtatgagcttggtctgaccatcattcattttgatcaagacatttcctattcctgaaatcttgcaagctttattgtctcctaacagaactgatccaccctcaattttcttgaagtcactaaacagttccttccttggtgtcatgtgaaatgaacacccagagtcaagaatccattcacaaccagattcttgacttgtcacaaccaaagcttctacagactcatatccataaaaaacaatgcctgcagcacctctctcttgtcccttttctctctctaattttgccttaagtgctctacattcatctctgaaatgtccttcattcttgcagtagtaacactgttttccttgcttggattttgctttggatttgaatcctgaattgtgtcccttgttctggttgttcttgtgattagttttattgtgtacacctctgaaatctcttgaattgcttctggttttcacaaacagactatctgctatgccatcaatcctttcatcatttcttttctggatttcctttgagttgagtgcagccttgacctctgtcatggtcaaggtttctttgccatatagaatcgtgtcaacaaagtgctcataggtttttggcagtgaactgagcaacaagatcccctgatcttcatcttctattttcactccaatgttgctaagatctaggatgattcgattgaactcatcaaggtgttttctgagttctttcgagtcttccatcttgagtgtgtacagtttctttttcaggtatagtttgttggcaagtgacttcttcagatatattgatgccagcttttcccataaccccagagctgtttcttcattggatacctctctcagcacttcatctcccaaactcagcaagattgcactatgagcctttgtttcaatttctttgatcttcttcttgtcatctcccaattccttcaattcttctttatcaatggcttgatacactccttgatgaaccagaaaagctttcatctttattctccacagcccaaagtcattggttccattgaatttatctacttcaaaacgtgcggaagccatagattactttcttgattcagttcttgcagcaagaaacctgagctctgatgccaattgttgtgaaacaatacctcagcaagaacaaatatagaacaagtaagatcaatgaaaccaacaatgacaataa

SEQ ID NO: 258789 - DNA, 649 bp, Cannabis indica
taaaattattgtagttggaaatatttaatttaatttaatttttatgttatttttgagcaaagttgtgtaaatgaaaattgtggcaagtccaacaaaataggcccaactccaattatttatccatgcatttatctctctccaattaaggatacattaacttggacaatagcttcaacgagcaactacaataaaatattggcccatgattcaattcaaggtgtggacaacttctttaatcaattaatgggcctgcgtttatgatgttttcaccagcaaccaaagcccaattgaagaagcaatcgtgtctttctgtgaagttagaaccacgttagtcagtttcacacgcccaacatcccaactctccagttgtgacacacgtctcccacgtttccaatttgctcagaagtagaagccactcttctcaatattttgtggcatttcacccactatatggtacacgaaaatagcaagtattgagagcatttcatcactataaatagacccaaagctattgagaaagcatcagattttagtagtgttattataccaaaattttatcttttctttattttactttattaattttggtgtaaagacaatgccttttctaggctaatttctttgggaagactcaagtgtaagttcatgt

SEQ ID NO: 258790 - DNA, 523 bp, Cannabis indica
tttcagcaataatggcatgatgatttaaggttttttttgttttttttttcgtttttctctctgagtcctaagcccacacccccttatagtcagaccccaaccttggcccttgggtgtgacattgggaaagatatggtgcaggccaacttaaaaacatatcttgactaagtaattgagggttcggcctaggattttcgacactaaataatttcatgcttaaagaagtaatgagataggtcaaaagtacacactatttttgcacactatggtatttaagtgggattgatcttcacattttttaattgtgtggtttaatagcacatcatagtatgcaaaagaaaagtgaagtgtgtaacttgagactgtacctaacattactgtttttgaacatgaaattatatctaatgttgtagctcctataccgaaccctaatgttgagttttcgaatatgtttatactcaacattaattaaatacatataatgttgagttttcgaagtacaattgaagtaattaattaatcg

SEQ ID NO: 258791 - DNA, 539 bp, Cannabis indica
aatgaatattcatgagaaaaaaaaaacttactccccaaccagcttgaatggtatgaagtccattttgtaattttattcgaccgaaagtatattttgagccagtaacattatatagtgtgtaaaaacttacaaatgttccacgtacctccattgtatttcttggttggatcagatgtgtaaacaagtgcatgctattatattcaaattcaaaatataattatatttcaattattgagtacaccatttaatttgtcaaaacaatatttaaatctaaaatatgcttacatgaaaagtaggaggagaattaattcttgaagcatatgactttgtaaataatttggctctaataagatcttccttggtacttcttcttattggaataaatctaattggacatttttcaccttttaacccactatttatcgatacttgtttcacattttttggaggcttgtcttccctaaccatcgggttgggatgagaagaaggtcccatctataccacaaaaactcatgcttatttactatggttttagaaaa

SEQ ID NO: 258792 - DNA, 570 bp, Cannabis indica
ggagcctgtttcagtccatatagggctttattgagcttgtacacatggtggggatgatgcgggtcttcaaatagcggcagttgtttgacatagacttcctcttgaattaccccattgagaaaagcactcttgacatccatttggaagagtttgatcttcatgaagcatgcaatgatgagtagcagtcttatagactctaatctggccaccggtgcaaaggtctcatcaaagtcgattccctccacctgactgtatccttgggccacaagcctagctttatttcgagtcactgtcccaaattaatctgccttatttttaaagagccattttgttcctattacatttgcgccatcaggccgagggaccattatccagacaccaagtcttttaaagtttcccatttcatcctgcattgcagcaaaccagaactcatccaatagggcatctctgacactttgggctcaatttgtgatagataccaggcaaatgctaataggttctgcagttttcgtcttgtgaccatggtgtcatttggatctcctatgacagttgcctgaggatgagctttct

SEQ ID NO: 258793 - DNA, 526 bp, Cannabis indica
ggagctcgaggtatcttcgaaaatctctagaatttgtcacatttcttaacataggcctttgaatcttcaatcattatcggccagaaataaccttgccttagaattttcttacataaactctgcccggcgccatgatttccacaaaatccattgtgcacctcagacagaagtcgtgcaacttcttcttgagtaacatatctaagcaatggcatggagaaccctcttctgtacataattccctctactataatataccgtgcagccttccttctcaattatttgggagttccctagtgttgagctaggcttctatcggtgtcatccaatttaaaggaagtatcaatcatttcaatcttttctgcaccaatggtgctaggctcttcgaggaactagataggaaccaagttcgccttatcacttacattactgcttgcgaattgagctaacgcatctgtagtggtgttttcttcccttggaatttgtctgagatcgtagtttttgaattgtgcgagcaggtcatgtattt

SEQ ID NO: 258794 - DNA, 541 bp, Cannabis indica
aacaacaacattaaccatgataggagtagagtccagggaacaaaccacagaaggcataacatgcaacataactgaagatgaaatggaactattaagatagacaatataagggttagtagttgaagaaccactaagatcaatacaaagagactgagaagtttcataaccaacgtggtgttggcaatgttaggcaccagaaatcggtcaaaaacatcctgaagactttggttgagacaaaaacactcctacgtgtatcctcaataggagcagagttggagagctcaaatatgcttttcttgtaaagagttttggtaggagctctaaggatatccttagagctcaaagtatgaggggagatagagtcatcacaaagtttttgaaagttgttacacttgttaaaagaatgatcaaccataccacagtggtagcactagttttttataccctcatatagaaactttatccacttagtgatggatattataactcatattatatccacgtattttaaataaatttctgtaattaataaattacgctt

SEQ ID NO: 258795 - DNA, 936 bp, Cannabis indica
cagttcgggtcccgggtcttgggtcagatcataagtttgggtttgggtccgggtttgtggttgtgtcccggtagttaggtcctgggttctaggtccaaggtcgggtcccgtgtctcgagtctagagtcgagttttgggtctcggtcacgaatctggggcctagtttcgggtccaagtcccccatctaggtcttcatcctttgtccaggtctgggtttaggttttggtttggggcccaggtcccccatctaggtctggatcctaggtcccagtctaagtccaagtttaggttcgggtttggatcccgagtttggatccgagtctaggtcctagtacgggttcaggtttgagtctggattcggggcccagtcttagtccaggtccctgtttgggtctgggtttgggtcacgattcaggtcccaatcaaggtctaggtcctgagcgaggtttttgtttgggtttgggtttgggttcaggtcctgagtttgggtctaggtttgggtttagatccgggtccaggtctaggtcttgggttctgatctcggtatgggtatgggtttgggcccgtgtcaaggttaggatatagggtttacggttttggatttattgtttagggatttagagtttagggtttagggcttagggtttaggggtaagtgtaaagattttaagatttaaggtatcaagtttagggtttagggtttaagggtctgcttccagtgcctgttccaattttgggtcacagggtacgatttaaggtttgggtgtgggtctgggtccgagtcctggtctaggtctaggtctgtgtttgggttcctgtccgattccgatcttgggtcccgatccgtgtccgggtccgaatctgggaccgagaccaaggtctggtcttaggtcccagtccctttcctgggtcctaattctggttctaatttcgcgt

SEQ ID NO: 258796 - DNA, 1050 bp, Cannabis indica
gaggacattgtctgattttagttgggggtggtaagcatattcaagcatgtttcttcctttttgtcatattattatttttatggtcaaatttttccaaaattactcatttattcttataaaatattattttcaagccatttttactatctttattgcttagaatttttctagagttacaaaatgcacatgtcaaactttgtggtaagatggttgttggcacatatttgcttagaaagctaccaagtttaagtattcatattttttgtgagtggcgagatttgagaaaacaacttttgaattttcattgattcctagaaatggttatcattattttggacatggtactaaggtttgattggatgttgctttaaaggataatctttttatagacaaatcttattagggagcctttttgtaattattttctttttttttaaaaaaaaaaaagatataagagcaacatttccatcattatatccaacatgttgcctcttgttcaaaaaaaaaaatgaaaaaataaaagaaaagaaaaaaaaaagtttagtagtatttcatttttcatttgttttggctcctagaataaatgtaaaagattatttattttcgttcaaaaatcccgaaaagctggtttgtggtactcttatggtggttggtccaaataattcataatctatcttcgtttcaatgtttattcaaatatttgtcctaaattgatttatctatttcaagtgctcacttttcaatttccaactccatgagtgataccttagccatatataaatattttcaatgacctgtgaggctaatggagttgagacttctatttggtatatttttcgaaagtatttatgtgctacggtttgtggtaagaaggtttaagtttggtgcacacatactcacaactttagatttattcaaggtcattttgtagttcttattggcttgttgctaatattttgcttgaatatttgtgccatttttaaaaaaaaattcctagaaaatattatgtttacattattattctttcgtttgaattgttagagactagca

SEQ ID NO: 258797 - DNA, 548 bp, Cannabis indica
caatggtggaaaaaattctggcggttgtccttgccttccaaggttcgtatttttttatggcgtgcgataaatgattgtataccggctactgctgttctgtttcacaggcatatagctcagtccccaatttgtccactatgtcaacaagatagtgaatcaattatgcatgctttgttctattgccacaggcctaggaaaatttggaaagattcctctttctcacttgataatatactctttagcagtatgactttaaaggaatgttttctttatttttctaccatctggtctgattctacaattgaacaatttatcacaatcttgtggtatatttggaatgaaaggaatagagaaaagcatggaaatagaaccaagccatatgatatggttctctattttgctctgtcttatattgaggattatcaagctgcccagaagccgaagactactccaacattgtcttctccctcacggtcgaaatctgctacagagactccttggcttaatcctccttcgggcaagcttaagttgaatacagatgcggcagt

SEQ ID NO: 258798 - DNA, 975 bp, Cannabis indica
tactagtattaaactagtttagaaaatcatacacgcggcgtctctatagattagggcgttacacccacacggtactgagtctagaacattcatacgacaatactatcgaccataatgtcagcctatactcaatatgctagtcatactctagccttattgatgtgacaacatcgatcagtatttcagccaacatacatttatcagtaatcagtacaactctaagtatactattactgctatcaatataatctaacatgcataataaacatgtatgctaaacaggtaataacatatgcatgacattatactaatcttaccttgattccgaattcaggtgtgccggccaacgtgagtggaacaactgctcggtgaattacaggctcctaaatcacatcgataacaacacgaataagcgatacgctaaatcacaaccggggacttaggttttcatccaaaaccctacctactgtaacttaacatggtaataccctaaactagcagggaattaaccaaccaaaactctgaaactagcacgaatcgacaacacgaatttttaggggaacccaacagcaaatccgggtaaccagttttacagaccagttagccgatttataccagaaatcccaaaaaaatttcaaaacctaaccagatcaattccaaactttaccaaaccttccagacttgcatattataccctaatagacatatattttccaagctataaaacaactaccccagctcaaaatcgaaaaacaccattaaagagccaagcttgagttctaaaactcaaagcttgctcaaacaacaaaccagctatcaaaacatgctcaaagcaacatatctaaacataaacaaagttcagaaaacactaacaaacactaacaacaacagtagctaaaatcacaacttcatgcaaaaaatcaacttccttacaatccaagaaactaagaaggttgaagctaagaacttaccttg

SEQ ID NO: 258799 - DNA, 1038 bp, Cannabis indica
aaagacaacacaggcatactatataataatatagttctatgaagcacataattaaattaattttatcattttacccttctagggtcataattactaaaatgtccctggctcaccaatcgggtcttaccatgttataaaccatatcaattcttatataataatatacttcctcaattattcataattatctaattagggttttgttaatccatttcccagttgaacaagtgttaccactagctcctattctagtggtgggtaaccctggatttatactgccacatcgagacttgattttgagtgttttttcaagctatagcctctgacatttttgggaggtaccgacatcattaaggcagagcagtggatgagcactattacccgcatcctggataacatgggagtataggaactgaacgagttaattgtgttgcattcatgtttcaaaagcattcccacgtttggtgggatattgtgggacatactcgagatgttagtataatgtcttgggatgaaatcaaaagtctgtttgaggaaaaaatttataacatccccatcagaactttgcacatgtttgtaaaattgactcaagggaagaagacagtgactgagtataccctagaatttgatggtttatccaagttctctggagatctcgtgccaacgaacttcactcggaaacagaaatatgtaaggggattgaatgccactataagtcgggacttgaatattaccaccaatcacgatacgttatacaagaaagtggttgagttagtattaattggtgaagaggcagaacaacatgtgatcaaagaacatgctgctaaggatgtaacaccctaattaatttaggcatgttaacgtgaattttaatgtactgtgcagctcgttgctaatcaacgagattagcaaaaaatgtgattaattaaactttgcttatataaatagaaacataaagtaatacatttataaaatctcaggatcccgtttacaaaatacatttacaaaagttttcaattcatatacaaaagttttttc

SEQ ID NO: 258800 - DNA, 821 bp, Cannabis indica
atgtgagcataggtgtgcatccaaatacttttagatgctcatacttagggatttgaccagtccacatttcttgaggagttttaaagtttatggctgttgagggacacctgttgattaaataacaggctttctttagtgcttccccccaaaactttctttccaaaccagcactattcagcatgcatctcactctttcaagaagagttctattcattctttcagccaatccattttgttgtggattcttgacaactgtgttgtgtcttctaattccttctcttgtacaatagctcttgaactcatctgagtataattcaaggccattatcagtcctcaaaaccttaatgcaaaatcctgtttgttttcctatcatggttctccaattgacaaaggtttcaaaagctagattcttatttttcagcaagaacacccagaccttcctagagtagtcatcaatgatactgaggaagtcgtttgcaccccccaatgtttgaatcttagagggaccccagaggtcagaatgtatgtaactctgtttctcagttgttgtatgcatgccctttgggaattttactttacaactttttcccaatacacaagattcatagaactctaacttgtcctttagaccacctttaaataccccttgcttgacaagttctatcaatcctctctcactcacatggcccagcctaagatgccacattttaatgctattttcaagagacttgtctatcactggtgctgcagaaccagtaacagtatgaccatcaagataatatatgccatttctaagttttcctttaacaataacaagtgaa

SEQ ID NO: 258801 - DNA, 714 bp, Cannabis indica
aaaatgcacagctaatccacgaacagatccaatacaaacttggctaagagaatactccttacttgcctttcagccgaacaacaaaggcgacacgcctttgcatgtggcggccaagttagggaacaagagtttcggggcggttctaatagaacatgcaaagagagttgtagaaggccataattatgagtcgtatagagatctgttgaggaaggtgaattatgtgaaggaaaacacagcacttcatgaagctgtgttcaacggtcacttcgaaatcgcaaagctgttaatcgaagaagacccaagtttgacatgttttgagaataaggatggagagtctcctctgtttttggctgtagaaggaaggttttatgatattgcttccataattttggacacttatccaaattgctctttgttaggaaggaaaggcatgaatgttatgcatgctgctgccattcgttcgtgcacaaaaggtaggaattaattatttgatataattaacgatttcaattttatttccattgaacatttcttcaaaataaacaatataaaatgctcctatactataaatttatacacataaatttcatattgtttttggttattatactaattcacttctatatttgtcttatatagtagaaacattgctgctttcaagaagtgttaccaggggttttgacggtgagtttaagtttaattttgagttcaaaa

SEQ ID NO: 258802 - DNA, 1197 bp, Cannabis indica
agttgattcagtagaagaagaaggaggaggcatatttcaggtgaggaagcgaagttgataggttagagaaggagatctaatatctgggtatacgacattttgatatcaaggctcacaatccaactgatccatcaccatgaatgataattgtattggttgtttcgattaactgcggcctttcattcttatgggtttggaatattattctttaatctttctttttgttcgtcagttcaaatttctttttgtctccatttttttactgttattaggttaattcctattagtatttttatagggttagaatttttagtttcatgtgttgaaactaattaggttttcccattagtcttgttttttgatatggttctatagtttgtctcattggttttggtttattggtttctggcgttagttactggttcttattttgggttcgttcgggtgtccatggcgtcgagtagttatcagtgaatggaggcagcggagaaaatggcagggatttttatgccgaaatggcaggtgcaacctgaaatagatgtatttgttggtataaaagaagctttaagctggattgacggacaattgattttggaaactgatagtttagtttgtgttcaagtcgtgcaaagccaaattattttgtcattctcttttggtcttttagttcatgatgttcgtactcctcttttatctttaaataatgttgagttgcgttttatcaaacgatctgcaaacaagctggctcatgttttagccaggattcttttttctctccaggtcatgtgcttcaattggagaattattccaacgaagtgcgttctattattattaacgattgctagtttattaaaaaaaattataaaaataaaatcaaaataaatattaaaattaaaattaacatgaaataatgtgaggaaatttttttaaaaaaaatattaagagtaatttttaaaaattatttaagttaatatttttttttaataataaggtgtatttatttattattttatgaaatgcaaataaaattttaataaaattacaaaagtacccccttacaaacttctttttttttctaggcaaacaaaccttccttgattacttagtgcatttcttaaatctctgtaaaaccctaaaagctggtgttcctcaaactctcaaccactgcatcactaccccaagaaccagccatggcgc

SEQ ID NO: 258803 - DNA, 1546 bp, Cannabis indica
aaataaataagtatttacgtattaaattagtaaaatacaaatcattaaaatgcctcttaaatatagatattttccctctattttcgtgggctgttgaggcccaattcataatctagcctggtgaccatgcatgaagttgtacaccagagtcctgccacgccaagttctagctggccatgcatctacaggatgcaggctggccagccttgtgttgtccaaaagctggctggcccatgctggccatagggccggccgaccagcctccttaaggtggttggtccattattcttcatcccatttgagtgtcgggactccccattggttgaagtgctgagtatatgacttggcattcttgttggtgagttgtactgccacgtggtgctgatatccgcgacgtagacatgccatgtcatgtgggcgaaaattgggataacatttaccgccaagtccctatgtggacgtctatgcagatagggactttccagctgagttggggctgatgtagccttaattgagtatatattaatgtatttttagtctttgaaataactgcttttgactgtttgatctcatttgttacattaagttaactgcattgtacttctacatgctttttagttgaacactacgtggcaagtgaagaagtggtaccatagaagctatataatccttatggagggaaacttctcttcacttttcacttttcattctctcactagaaaaagtaactttgaaacgctcctccttctctagaggtcgaagcccacattgctccatctcgagatttttgtgccatttcgacggtctacgcttcccattctcttcgtcaaaggtttcttgtagtgggtaagctttctattcccgctatttacttgatttagttgatttttccatgattgcataaatcttttctttgctttgaacttttttgattcccacgttagattgtaatcttttttggttttttgatctgcatggtagtcttaggatgtgtaatgtatgatttttaaacaaaaaatatgtgatctgaccttcgttgtgattcttatctctttgaatcacaaagaacacgaagaacgtgtttgagttcttgaaaaacacacgttcgaatccttcgtataccctggccggcaatgaaggtcttgttcaagacctagctggccatggatgttcaccatgggatctggttggccatagggggataccctaagagttggtcggcctatgcctagaagtaaaattcttggccggccctaggttggatcatgggacctggtcaggcctctaaggcttgggaaccctggccagccaaggccaaagttctaagtggacaaccaatattttatcctctattaacctcaactaaggtcttatgacgaccttgtatgcatatacaattgtaatcttatgtgttgttcccttgggaactctgtataagacttggtagtgagtccattatagtgaagtgcacaacttaagactcactatttgttggatatattttaccaggatttagatttactaacaagtatgtttcattaacatc

SEQ ID NO: 258804 - DNA, 835 bp, Cannabis indica
tcaagcatacgtgtattaaatacgttgtaaggcgtattgttctgggaaatctcgcaaggagcatcgcaataataaccctggtagcgagccatagcttttcccatgtctttttgaggttgataatgtaaatcttatcgtttccgcgattgaagacataacgctccatctaacaatctcagttcttggtgacaaggtgaacttcaacagtcaacatcatttgaatgtcagcttctatctgagagagctgactcgataaagctgtggatctcattgaaacatgtctggagctgattagtgaaggtaccatgagtgtgccttcctatagcgagatgggtgcctcgctattcgtagttttggattcgttcggttgttatgcttagtttgtataatgggtattatacactaagtgtcttaacagtcatcatgtctcgtctatgtctcttcatgcatagcgaggttgatgcctcgtcttgcactactgatgttgtatggtatctcgttaacgcacgaggcaacagttcatatatctttatcttgcttaagaccttagagtcagcaaaatataaatatactctgacagttctgcatttaatgagttatttcattttcaaatataattatcattatatttgttgattcatattctcctagtttgacacatgtcctcttttgaagtgctagccaaatttcgggtataacaattgccccttacaaagttctttttaagaaaaagtgcttttaatgattacagagggtatatttgtcataatcccttttgaaaaaacacatgtcctctgattttggtggttttgtggtttcaaggtacatcaacatt

SEQ ID NO: 258805 - DNA, 530 bp, Cannabis indica
cattatttcaggttcccggggtatcaaagttcaaattcagtcaattggtgaaaagacgggacaaactaacgaaaaatcggaaaaatctgctcaagaggtgtcagtagtcgcgaccaccattgagccaggtcacaaccttttctgtggtcgcgactctagtcgcgacctcgaggatttaaaaaaaattcggtttttcgagttttgcttgtagtcgcgactagcttataggctagtcacgactaggtacgaaaaatgcagttttgacctaattatgatttttctctcaattggaggcacacctttcatccctatataaggaatacgactcagaaggtcaaattaagcagaaatagacctgaatagtggatgaaagtggagaggaagctatcttgaagacccggagcgatatcaccttctagtttctttcttttaccctttattctttcttttatgtctattgttgtttcagatttaatcatggatgtttttattgtttttatgagctaaatttcccattaagggaggatgat

SEQ ID NO: 258806 - DNA, 1356 bp, Cannabis indica
agtggcatgaaaactttgtttttgaggcactcgattttatttaaaatttaaaggttgcatacactttgacggtacaaattctttaaacaaagcctaagttaacatattaggactattggtaatactttcggagatgttcggcgttccaagcccttggcacaatagttccgtccatcctttttagcttataggttccggagccgatctcatcctcgatttcatatggcccttcccaatttgacctcctctcgaagctttgcctccgcaagggcctcccaaagcttggcctcctcccaaagcttcaccttcacaagggcctcccaccgtacagcctcctcctggatcgcccgcctttcggcagacaaatcccgaaggatcctcatggcctcgtcaatgccccccgaattcggacatgacgtaaccatggttgattagagtcttggaaaggtgaccggtctcagcggtagtctaaaaaaaatatacaagtgtgagatcagatgccttagacaaaatattaagaggtggaataaattacgaagtactcaccgcggccatggcagagcttatgtcttggacctggtagatagaattcagggaggcgcaagcagcatatctcttgggcggaaattgcgttaggtgggagacgaactggctagtcatctccgaggcaaacggagccaaggtgggcccaacgaaacggttgaaccaatctgtaaactgatccatgttcaagtcccacggattctggaaggcttcctcctgaagagtattctgctgctcctcccgaaggatcttcttcagggcctccacctcggcatgcccccgactatactcgtcaagggcgtaattgtgtttggccactcgaagattctgcctctcctcatcagcaggaaccggagtcaacactataccgtgaggcacagtgtattcctccgcctcggaaggaatcccagagtcatggctcggggccggagtgtccaccctacggggccgcttagaaggctcctcctccaccatcttgcccttttgcttacgctcaagggtgtccgggtcctcttcttgaccttcttcaacttcctcctcctcatccaccaagacgatggtgcctgaaatggcattggaggaggatctcccgggagtgaccaactgagaagcagccggaggtggggaagcatcaggactgtaggcttcaacaagagttgccaagagttcatccatgggcctggctgctgcaacaaaggagataagtaaagtgtcaagacatccataaaaaaaagagcatacacttagcaaaaagcaataaaactagtcctaccctgactctctaattcttccctagcaaagtctcgaatcatg

SEQ ID NO: 258807 - DNA, 1098 bp, Cannabis indica
cgttgtactcaaatgttggcattccaaggattttgaattagcctaaactacccaaggacaaggagggtcaggtgaaaatggatgtcatgaacaccctcattttcgatcggtctttgaaagaggtaattctgttgttttttacactattttctattgttgtgttaatgttgtttttgtatacatttgttatacttgatgtttcaattgttttaatgtagcatcatttgctgagtatttctttgatggcaaacccatcccatcctctagttttgatgtggaaattcaccgcgatcgtttggctgtgtcattttatcattatgacatgaagaagcaacttgagaacattgaaagtgaatctgaggcccctcccagccttcccaagaagtgatttgttttttcaatcagactgtcattgttcttatgtttttttaatgttgtttttatgttttttatgttgttttcgaaaacaaacattggtgttctgttatgtttcttatgttatgttaaatgtgttagtattttcattccacatcacatctttttatgtttttttatatagttttctgtttttttgaatacaaatattcatttcattattaaaaacacaaactgtttcaataataaacttcatatatatattcaatttagtatccaacatcttttaatatccaatctaaagtatcatcaaatcccaatgtaatcaatgttttcaaataaaaactgtattccctatgtatttcagaaatttaaattcctcaatatctcattctcaaaacgtatgtgtagttttcttttgtttttccactgttgttctgttgttgtttttattcccttctacgtcttctgctgcatgttcttttgttatgccccagttcaccacatttgctgcacttgttgtgttgatccttttcccatccagccttccttcttaatgtttttggtcttcctgattttactctttcatgcggaggcaagactataatattcttcacttcttccggtacctcccactcactttggtgtcctattgggtaaactgtccctgaataagttgccagccaatttttttttgttgtagtaatctgaacagtaggtgta

SEQ ID NO: 258808 - DNA, 810 bp, Cannabis indica
aaataatttattataaattttttaattaaaacagttttttttacaagttgggttatactaattttagcttttaacttaaagtttttcataaattgttcaataatattttttatctacttagcaaatatctatttatcacaattttttttatgaaatagtttttagttttttaaaaaattatgccaaaggggtatagtcactaatgtggtaaaaattggtaccaataattgaactattgaactttttgtaggaagtggttttgatgatcagcagtaatggataagaggggaaagtcacgatttgactcaaacacaattatttggattaagttagaaaaatttaaaactcaaaatgctttgaaaataaattaaaaaaaaaaaaatacatcggcttacctatatgaccatatgatatattgaaatgattatagtttatgtatcaaatcatgctcctaaatatttttagcggttaaaaatttcttttaattattgagattgttagatttaaggaattttgtctaatttatttaattttactatttcagtgatgatttatgtactaaatcatgctccctaacttttatatttaccaaatcatgtttctcaaactttgacatatactaaatcatgtcttttgaacttttacttatattagactttttttactaaaattggataaaaattcttaaatctaacaatctcaatagttcagagacatgatttggtacatgtcaaaattagagaagaaaaatcataattagcctatattatatacatacttaagagtcaaagattagttagaaagtaaacc

SEQ ID NO: 258809 - DNA, 956 bp, Cannabis indica
gtataatttttaagttttggaaatcatttagttgaaaagaggttcacatcattttaatgtacttgaatgtgtaacaggcaagaaggatgaaatgtctgttaatctgtgattagggttgtcttgttttaggattataatttttttgaaaaattatttttgtcgtaaataccatttgaattaagttgatttgggtgattttaggtgattataatgtacgattttaattgtcatttggtcatttttttttctatagtgtatttgctgaaatatgtagtcgttatctgttaaatttgtttttctttaatttggttaggttcatcaaacatggctgggaaacgaaaaaggaaaggggcagcagaaccctcaaagaaggatgtttcccctgagccgaaggataatgccgtagcttggagacatttcttgtaagttttgaaatatggatagttgtttactcgtgtcactgatgtttaacatttattgtattatatatttgattgaaattatgtccatatgtagcaatgccaactataaagcccttcgagcagttgagaaggaattaactgaaaaagaggtttgatcttgactgttactcaatttttttttaatcaattgtccttaattcatcgtacttgtttgacatgctttccatgtactcttgagttgatgtaagtttgcctcatatttcaggttactgataaattaaaagtgcaatttaaaggtttcaccgacgatcagaagtctaagtggagaaactatgaccctaaccctactcccgccaagaagccagtgcaagcaagagggaggaaagcaaaggcagttgagggtaaggggaagaaagtggaggtgcatgaggaagaggttgccgctgaaactgaagaagcatctgtgtacggtcgatgctgcttcaaccgtttaattcggattgcaagaacctgaacttggagcagaaagatgtg

SEQ ID NO: 258810 - DNA, 740 bp, Cannabis indica
aacccatactatgagagactttcttgacagagctgatgagtttattaattagaagaattcgagcgaaacgctctaaacttcaaccacactaagaataaaaagaacggaacaagttcaaaaaagcaaaacccccaaaggggtaatggtaagaatggctccaacaatggcaagagatggaataacagtaatggcgttaacaacaatgataacaggagactaaagaatacccccaagccagccaggagagatccaaccccaaggttcactacctatagcctactcctggacacaagagaaaatatatgcaactcactcgatggtaccataccgtaaacctttttatcccatgagaaaggacattagcaaatgcgacatgaacaagttttgtcgattccacaatgactacgaccatgacactgatcagtggaacaatctaaaggaggaaatagagttcctcattagacaaaacaaccccaacatgaaaagatatgtacgtcgggacaacgaccgacccccacgacaacaacaacaacaagcagttggggatgaccaacaattgttacctcccctcgttgctggtcatttggacgttatatctggaggaccccaccttgtcgggaactatgaaaaatcccgagagaaatacgcttagcctctgcgacatgaaccgggtgatgatgtgttggctgtccaggagcgagctcccaagcaacctcagtatgaacatgagtcaatcacgt

SEQ ID NO: 258811 - DNA, 1694 bp, Cannabis indica
acaaggttggaatggcaacagcgaacagctgaagctggaattattactgaattggtacacttgcttgagtctggaactggattgaccaaacagcgtgcagctatagctctttctcgtttttcagagagttcgtcaaggctaagcaggccattaccaaagagtaaagggatctggtgctttgcacctcctcctgaaactggatgtcccgttcatagagggatctgtggcattgtgtcaacattctgccttgtggaggctgatgcagttattccacttgtgaggatactttcggaacctgatcctggagcttgtgaggcttctttagatgcacttttaactttaattgaaggtgaaaaactccaaaatggtagtaaggtgcttgacaatttaaatgccatacaacccattataaaacttcttagctcgccttctcctagactgcaggagaagactctaagcgctcttgaaaggatattccggcaaatagagttcaaacaaaagtatggtggctttgctcagatgcctttagttgacttaactcagcgcggaaatggtagtgtcaaatcactagcagcaagaatacttgctcatctgaatgtgcttcatgatcaatcttcatatttctgaaggaaacttgttgcttctggtcaattacaaagctcattttgatgctttggctccataagattcttcgggaaaaaaccaaaaaaaaaagaaacagatgctgaaggaagcacatttcaagggggaagaagcccttgcatttcccaaagaaggcagatcatatctctcttattcatttgtaaaaaagaaagaaaatttagattactttccttcttcctgagtttaccaacctgtctgatttgagagcatgtagtttggttactctcctaggaatcaaaagtgatctaattcaatttgttaaagctggctgtatagataattatgacgagaccgttattggacaggaaggaaacatataatgtagctcatattaaatgctgcagatgtgttctaaagcttcattgatttgatgatgttaatgctaaagaaagtagaagcaacactggtggactggttgccaagcttagcttcttcactttctttgacagaatacaattctttgacaaggtagatcctgttcttctggatttgagaagagggagttcaagctttgactacagggtcttttgtgttgaatttattaagcattttattccaagtttatgttgtttttagttaattagttagttattgtttttttgtgtagtaatgtgaatgtatatttgattataataatttctcttgtaaaatttctatcttcttccactaagcttgtaatgcccttctttcaataacaaaaatacttttgcatctctgtggaatttttttaaaactcttatgcaggcagatgtcatgtttcatggaagttcgtatttgtctggtgtttactaagtaatttccatttacttatttacacagtaatacatttgtgataacggagtcacggaccttgttctttttcaaaaattaaaaaaaaaaaaatggtgtaataacattaaggtgtgttcaaaaaagatatacaacctttgttcaaaatatatatatatacacaaatttgatgggtttttatactttttaagtaaaaatatatattttataagaaaattgaacaaaaaaattaaaaaaaataa

SEQ ID NO: 258812 - DNA, 755 bp, Cannabis indica
acttagtttaatgaaatatattcaagaaactatatgtatttttctgtaattaattaaataaaggagttataactaattagctttttctagatacttaattatttgaattttcatagaaaatatatttaagttgaaaatcagtttttcaaattgattttggataaacttaaattagaatattttgaaatttataattaagtagattttttttggacaattatttattcagatattctttaaaataatttaagttgaaatttgttaattttagattaacttaaatagggatattttatgaaaataaggtaattagttcaagatacttaacttgttatttaattaaagtttgagatttattttaagttaaaatattttttttattttagaacaacttaaaatagttttttttcaagaatttattttattatattttaataaaatttcaaaattatatatagagatattcaaaatttgtttttaaaaattaaattaaagttgaaaattaattttaattaattttggaccaacttaaattaagtaatttttattattaaaatatataggctaaaataagtgattaattaaaaatatattttttaaataatcagctttaattaaagagatattcgatctccattgttggttctacatagttcttattttaatgagattcatccctaatagatggacgttcattagcaatttaacgtcgtagaattttcaaagataagtattattgtaagtgttttattctt

SEQ ID NO: 258813 - DNA, 939 bp, Cannabis indica
tgattcatagccatctgctatgtcagcttctccattctttccacgattcttttctcttttcagttcagccttaagtgccaaacaatcatcacgaaaatgaccttctttcttacaataatagcattgtttacctactgcagccttaggtttgaacctctcatttttgtctctgctattgttgtaacaattcttgtgccccttgtaatctttcttctgaaattttccttttgcaataaacagtccatcaccactgttatctgcttgatcatccttcttctaaatttcttttgagggtatcccgaaggtctctacccccttgggggcctacatgtttaaaaactgacccggttcttggcctacctcctacattttgactttagccttccatcgattgggggtggtacttggtcatctctaccccttcggggcggattctcaagttaatattgcgtattaggggcatacagccctccggcttgataacccttagctcaggatttggttggttgttggcccgactttcagcttcatcatcaccgtgaccgatagggtagtttggacggtagtcactattgacttcggggtcttcccttctccccctggacctagtgtttctcgggcgatcatcgccctctcgtggttggccgcgttggtcacggggttgccactccctacgttggggtgttcttccaccatttctgccacaatcaccattgttgttcctagcgtttcctccactactctgccttagacagacattgtgggagttatcacgtcccatataatgacctggtagagcttgttcatcggccgagagcggtcgattatttttgcgaggaaccctgttagaggggtgactcctagccctctcttggttccttgggcgctcttcaggaccatagaccaccatctcccactggtttctcagggtacttcctg

SEQ ID NO: 258814 - DNA, 581 bp, Cannabis indica
tgttgaaacttgatccctgtaactacttttgtaagcatatctatagggttatctgtaatcttgactttctgaagaataacattcccttcatcaatgatctcacgaaaaaaatgaaaccgaacattgatttgcttagtgcgaccatgatggacttggttctttgccaaacaaatggcactctgactgtcactaaaaacctccatgttcttctaaaaaatacccaaatccttggtcagcctgagaagcaatataacttctttgaatgcttctgttatagccatatattctgcctctgtagtaaacaaagctacagttgactgtaatgttgatctccagcaaactggtacacttgccactgtgaacacataactagtacttgatcgacgcttatccaaatctccagcatagtcaaaatcaacatatctgaaatgatgtttaccatcagttctaactctcttaaacttcaaaccaatatctacagtaccatagatatacagtagaatccacttcactgcttgctagtgacctttatcaagattgtgcatgtagcgactcacaccgtactaacaatatatgaaaaa

SEQ ID NO: 258815 - DNA, 1117 bp, Cannabis indica
ccataactctctatagacttatctttagatgtaaactttagatctctgtttgaaataatggatttaggagctccatggaaataaactatcacttacacatacagcttaacacactgatccactatataactagtctttattgacagaaaatgagctgactacgtgaaacagtccactatgacccatactgaatcatacatttccgtggttctaggcaaaccaaccacaaagtccattgcaatatccttccacttccattcaggaagggctaatggttgcaaaaccctgccagcctctgatgttcaactttaattgctagcgggttaaacacttagatatatactctaatacatctcttttcatcccatacaaccaaaaatagggttaagattctgatccattttggtggttcccggatgcaacgaataaggtgtagtgtgggcttcatcaaggattttctttttaaccattatctgaaatacaaactcgagctttatatagtaacactccattattcgagattgaaaggtccttaggtcgacctgcccatacctcatcttgaatttttgactagctcaggatcttccaactacacccttctaattctttctaacaaatttgattaaagtgtaatgttctgtagctttccaactacaaattcaattccaaccttaaccatttctaaagtcagttaaggagctatcattatagtgttgaaaacttgctcaggaccttttctacacaaagcatctgctacaacattagccttcccgaggtgatacagaatctcaccatcttaatccttaactaatttcagccatcggttctacctcatattaaatctttccgggtgatgaaatacttaaggttcttctaatctgtataaattttacacttttactataaaggtagtgacgctatattttagagtagaaactacaggggcaagctctaaatcatgcgttgggtaacgccgctcacattccttcagttgacagaaggcataagctataactctgtcagcttatatcaggatgcatcccagaccctgtctggatgcttcacaataaacaacaaacttttctcgatctgatggcaaagctaacaccggtgttgt

SEQ ID NO: 258816 - DNA, 1059 bp, Cannabis indica
ccagctcgacacgtgtcttcctcttatgtgcttaccgaactttaggtataacaaaaacataaataataaatagtctaaaaaggtcatttctctacaagttttgtaataaaaacatttactaacatagttctataatagttctatagaagtgatctcaaaagaaaaaaaaaaaaagaagataaagctaaaagctactgcttagtagtttaggaaatattgtgtacacatttaggtaattacttttcaagcattacatgtccacataaaaatatagtattgcccaacactactagtgaagactaccctacactactactttatgttaaaaatgaaaaaggaaaaaggccaaaaagaaagaaagattagttggcttgaaaaggcattagataaattcaagtgctgctcttccaattgcaatgcaacttatactacaatataatatgtgcatcacatatacttatactacaatataatgtgtgcatcacatatacgcatgtattccaataccactaacgaggtggtcctaacataattagaggtgcatgcatataattatttacagcattgcatagatcgatatatccgtatcaacttttgttatatgaaaggtgttatttgaagaattataatcaccaagtataatcagtagctttaagcaaaaaacaaaaacaaaagtatgatcagtaacttaaattaatagaatctccctatccattgatctaactatatagcttcatctcatagtagctaaaaagaacgtatttgttgctaaaaaaataaatacaaaccaatttcattaaaacgtgtctagatttttgcccaaattattaatgtatacataaattaaattaactataattatttgtggtatacgtacttaattactcatagacactaatattactaagcatggaacttgatctcatattaatcatttaaaaagaaaataagtatacaatagctttaataatgaagatgaactatacacattgtaatcatttctattgtccaatcagattccaccactaagctattttgcctccttgcaagtgatgcatt

SEQ ID NO: 258817 - DNA, 1030 bp, Cannabis indica
aaatatcatgtataatagtaagcagttacaatatcataatagattttgtaataagtggtaatctaaatacacaccgtatacctatagatatcaattttgtcaagtggaaatattttgaatacttattcaacaaataagactcacctttgaaagtttgtcctgatagcttatttaattttttttttttcccttttatccttacaaaaaaaaaaaaaatctttttaatatttccatgtaattttaagtgatttttacttctatttagcgtgcaaaaagagagtgaacattctaacaataagacagtatgtattctttaaattagtcgatgtcccacaagaaattacactgaaagttataatcatttttccactattaagtaatattaacccatttgggaatcacaaatgtgtagttgttcagcttcaactccaatgatacatcagcaaaacctgctagctagcctaagtccagtagtgccatcgagtattactattgctatctacccaaaagcagaagttaacaaaaatataaagtgatctaggctttaagatacttggtgagaggctgggacatatcttcaggcttcatatcccaaagtgacttgcgttgtttcttaccatgaatcttcctggacaaattcgctaaaccttctggtaaaggatccggtgtcaaatctacaagatcattgtcgttgtgatcttcgcagctggcactaacccaaccatgataatgtcgacgcttcctcagtgaaagagagcattcctggtttgggctgtgaatggggtagtttgaagtatttttgtcgtatcccgaatctttggcacacacaatttgtggtttatcagtttggatttcagaatcaagaaaactatccacatcattcttagtgaaattcaacttcaagttctcatctgccaagttaccctctccaccttgtttagttggtgggttgctatctttcgcccctcgagaaacaaattaatgaaaaagcaggttgcagcaatatgaagctagagcattcttagttaaa

SEQ ID NO: 258818 - DNA, 1147 bp, Cannabis indica
taataaataaaaaaataaaaaaaaaatacttgaataatataaaattatttatgttaaacactaatttattataaatattaattttctaaaatgtttatataaattgtctagtaatgtaaaaataatctacaattttattgtcatattttttctcttagaatcaatttaagtaattatggtttaattaataatattataaattttgaaaacttatatataataatttaaaattatatatttttattaattttaatgaataagtttttgataaaaaaatttataaataaatgtgtgataattttttcatttgaattcatattaaatttaaaatatattaataaaatcaaaatttaaaaaacgataaaaaaaatctctcctgcatgggattatttatccgaccctactagatgagataaataatctgttataccaaaaattcagctgaaggacacgtgtgaagataaagagaatgtgaatcgatgatattgcttcttgtggaataactcattaattacgtaagtatcagagtatatatttgtaacccattgactataaggtcttaggcgaggaatcaatgtacaaactgacatttaatatattagtgagaaaccatatgtcgcgaaatgcgaatagcgaggcaccaaagaaagcgacacatatcaattgtgaaagtccttagcgcacaatgaacaaactaagtgtaaaagtcagatcagctcaagaacaagtaagcgaggtgaccgtctcattatgggaagacttcatataacttcatcccactagcgttagcgaggcttacaatcctagcgagctagaagatagcattcaaatgagcctcgaagaattctttgaggataagaaccatgatcgacacaagacatacatcgtcgacctcagaaggaagaatggtcctagctcgctattgagatcactggaacaaagtttctgtcgagacatcttcagatactatgactaaagacgtgtttaatacacgattgttttgacccagtataagcgaaaaatcacatctatatgattttcaaatccaaaatctcatttacattacgtgatatgtaatcaaatcccacaattttagggatcattgttgtaaattgttacaaaaattataatcactacgcaagtatac

SEQ ID NO: 258819 - DNA, 566 bp, Cannabis indica
agcatctgggacgtgcctcccggagaaggcatacggagccccctatgctcctggaagcctaagtaacatcgaagcatctccgcgaggtgtcaggcttcccctgagcagtcatttcgcatttaatgccgcatgggaggaaacgtgttgggactgctacacgcaataaagtctgacggcacaatccccaatttgcacctgcgaagtaatgatcatttaagtctattgacggctacactgtgaagagtcacgtcagtcaaaagacaataaggacattccacataaaagccctacaacacctagggatttgaccatgcattactcatggtatattcattgggaatacccaactttatggatatttacagagacatatgtacaataatcctgggaatcaccccaccaaaaacactataaataccccctcaaagctcattaaatggggtcgagaatttgggattgcataagagcaagaagagtaaatactcaccaagaacattctctatatttaatacactcataaatatactgactcgtggactaaggctcattaacgccccaaccacgta

SEQ ID NO: 258820 - DNA, 511 bp, Cannabis indica
tagtatgggaatttatccaacatgtttccatactagcagtcagtccaaaaaagtctttgcctttgctgtatttatttgttgctgtctttgagggtcattgcctgattaagtttctatttaccatcctgtgtcaactcccaacaagttcatacaatgtttgaacttgttgagagtcaccaccttagttcccatatctgctgggttctcctcagtaggaactttttccgcatgtatctcaccttgagtcaccttgtcccttataaagtgatacttaatctctatgtgtttagttcggtcattgaacacagggttcctacacatgtacacaactttgactgtctgagtacactctaggaacctctttaagtatcttgatctctgtcaagagtcctttcatccatatgacttctttaatagcttctgtggttgatatgtactctgattctgttgttgaaagtgcaaccacaggttggagttgggctttctgttggaatttattttaccaggatct

SEQ ID NO: 258821 - DNA, 1198 bp, Cannabis indica
aagcagccagagtggcgtactcgtgtataagagccattcattccgtgggtgtaaggacccaatggaggcttgaagcggggacgttacaaatggtatcagagccttgacccagccggaagtgtggtcgacgaggacgtcggaccccgtaaggggggtgattgtgacagtcagtagtcccgtgatccgtaaggggaaataccgggtaagctgtgcaatcccacaccgcctggggaagatcaagtgggataattctgagactgtgtaggtatgggacaacacagttgaagagagcttaaatggattaattggtactacctatatcaacatagtaaaatcctacatgaaagctccaagaaccacctgtctaagttgaaaaattcttggtgccctagcatcagagatgaacgactccgcttcctcaccaaggatagccaattgagtaggacccaactcgataataagaccctattgaaaatcgaggatgtgagtaccttgaccctgagtgggaacctccgccttaggctgaaggtcatcactaccctttcccgacccatacgagccttccacagacctcaagctgcccaaatcaatatgatgtcttttaccaaagtccacaccttctgccccactcgaagcattctcactaagattaactccactagcctctccaaacacatctgtgacactcgttttatcaactacaaggatgcaagtctgcccctgactttcatcaacaaaattgttcctctaagagagattccagcgtttttcttactacttaccaacaggattcaagaggctaagatgtaacaatgtgataatatttattaaaaagtatatggcatctaacaataagttgattataatattgtaatgagattgaagtaccttgcgaattgctttaatggcaaccagaagctttacaccaaatacgtttgtcatgatgacattgtcttcgttcaatgctgctacagattctaataatgatttgggcaatctttttacttcttgaccaaaactagaagggtctgtatctatttttacaaacaagtacaaagattaataaaatgaggaatataattataaagatatgtggttatgaggaactaaacttaccaacaggatttgggaggctaagatgtttccgaagcccatcaatgccagcagcaagtattgcagccaagcctatgtgtggatt

SEQ ID NO: 258822 - DNA, 1223 bp, Cannabis indica
agagaaggtggcgtcggctgagagtgggtttgggatgggttcttagtttggctgagagagaggaagagagagagatggtttgaaatgtgaggggtagtttaagaaaatcattaaagtggtcatatatgaccaattttaatgattatacatttaggggaaaaattatagggtatttaaagcatggaattttaaatttcccaaaataaatactctatgagattagtctgatgaattgttaagtgaatcagaatgtgtatctaataagatatttttctcattgttagcctcttcctttgttaagtggtctcttccaaacatgtgatcagaacatcaatattagaagtttaaatatgagcattaatcaacatcaataagaaagattagaatacataaattagaaaaaaaaaaaaattatcttacaaacaaagcaattcatttagattaaaactactattctttaaagtaaaataaaaagggcagaaaattcacttataatattgtgcagatagataatgtggaatcttgtcaaggaaaccattgaaggtggattagtatccctgtgtttgcctccatggatgggcttagaataaaatattttaaagaaatcaaataaaaaaaaccttcataatatgtttaatcatgcaaaaacataactataagtttttttagaattagaaaatgtaattaagctataactaaaggagaagaaaacataaacagaaataaaaaaaaaaaaacaatagagtaatacaaagaaaaataaatactagtatatatgcatgaaaaaaaaaatagagtaatacaaaagaaaaacaatgtattatgcatatatatatatgtatataaaacacttcttaatggataataatggatattacctatgaatggttactaaacaaatttaactataaatattaattttaatagttattatggtgatattgacaaatagagaaagcaataatagaaattgctggtattgataaatttactggcaaaataaaagagtcatagtcacatattatagagaacaataatagagattcatggtattgataaagaaacatgagttttagtttcgatttatataaagcacaacatcaatattagaagtttaaatatgagcattaatcaatatcaataagacagattagaatacataaattaggaaaaaaaaaaaaaaaacgatttactcttacaagcaaagcaattcatttagatta

SEQ ID NO: 258823 - DNA, 886 bp, Cannabis indica
gaaatattttaaaaaatttaatatcttgtgggttatggcttatgtttttcaattaatagatttataaactcttctatctttaagaatcgatatagctaaaattgcaagaggtgtgtgcatcagctcttctcttccatggcgaaaaaagaagagagtgatacgaaagcctactattaagccgaacctagtagatcccccttcaatccaagacaattcgattgatcaattggatttaactgactcaaaggattctaatttggtggagataactttgcaataggaggatattattgaggcagaacagaacttaggaacagagaaggaggataacgaggttaatggaaattgggtagatgacgttgagaaggaagacttactagcgaattcccaacaaaaatggagacaattcactaaaggtaagctcttgttctctgaactaaaactaacctacactaaatcgatccacaaaaattggaagaaattgctcaggtgtatttggaggagtttaaggatcaagcggcaacctggagtactgttgtagtttgtatggtggtaggagcaaacccctatttgctgttttgagggttttataaacataaatggggaaaactaggaattcaatagatagttaggatgaatggtggattcacaatagtgaagttcaatgacacaggtgactcgcgatctagttttggaggtaggagttctctaattcgataaaaaacaagtcatagtccatccttggtcgactgatattactactttgagtcttatgaaatcggttcccctatggatccatttatatgatcttgggttgcactattggggtaacaaatgcctcagtgctatagttagtacgattgggaaacccataattgttgggttt

SEQ ID NO: 258824 - DNA, 501 bp, Cannabis indica
agaaaagtgatgcacaacggtcttggctttgttcctgtgaaatttcacaatttttttagatgtgtagagtgatttttgaagagaacattaacgagtgaaagggtaaggaaaatactttttaaaatttaccctgaaaagaagaacatttttaatttttgaattagggggtcattttaaccaaatttaacgcaaaagaaatcttcatattcatttcttagtagtacaaattcattgtgactagtggcaaaaatattccgagattggtgagggccacatttcacaaagggatatcactaccaaaattgcgagatttttactatttcgataaaaatgattgttagtgcttgaaaattacttttcctctcaatgtgtcctataggaaagtgatgcacaacgtttttgacttcgttcttgtgagatttcacaattttttgagatgtgtagggtaagattttaagagaacactaacgagtgtaagagtaaggaaaaaacttgttaaaa

SEQ ID NO: 258825 - DNA, 559 bp, Cannabis indica
gcgagacgcggaaacctggaagttatacatcgatggtgcatccaacgaaaagggttcgagtgcagggctaatattaatatcgccagaaggttttaagtttcacatgctctgaggttctaattttacgcatcaaataacgaggctaagtatgaagccttgatcgccaacttaaagatagatgaggcgttgaaagtcaaaaacctcatctgtcgtagtgactcgcaactgattgtgaaccaagtcctcggggaataccgggccaaaggcttaaaaatagggaggtatttagagaaagtttggaagaacttggaaaaatttgattactttaaaatcaaacaaattctgagagaacataactccaacgccgacaccttagcaaaactggcctcgcaaaatgacttggatgacttgaacttagttccggtagagatgttgagtgagccaagtatatgtgaaaatcaagacgtcgagatgatagacaactctcctacatggatgactcctattagcatcatttactcgacgagcaactttcaaatgacaaaaatgaggcacgaaa

SEQ ID NO: 258826 - DNA, 503 bp, Cannabis indica
ataatgaaatagagcctcacaagacatattgttgagcactcctgtagggagcctattaattgtaaaaactgcactattaaaagcatgccagagttaagagaactcaagaccagtttcagccaatagtgtaagtccactttcaatagtgtgcctatattttttttgcgagttggacttcttttcaagttgcaaagaaagtttatctcatgaggagttagaataggccagttcttaaggcagtagattatgaagaaggtgacaagaattctatagccatttagatttatctagtaagggtagacaccgaagaaattagctatggatatcaaccatagatgaaagggcaagtaagcacctgcatgcatgtggaatctcgaccaagcactacaacaagtattatgagagcccttgggagcaccatgtcgaggcttccaaacaacaattttaggaagacagtaattatctcgaattgtttaagcttgaagctcagtgagggtgctaga

SEQ ID NO: 258827 - DNA, 979 bp, Cannabis indica
tagtacgatgaaataaacacatacaaagttttagaaattgttacatgatgccagtggaataatatgtctccttgcgctcagatctctaacccctttgtttctttctgtcgtagagtaataacatgattttgatctggatctcattctccttcagtttggttaaccaccgtcttctgcactatgattgaatacttgacttgctatgaatgagcgtggtactctatcactaaaggcttgaagattgatgaagaacaatggtaaggattcgaaatcactataaaaggagtctctcatctactagttgtctgacatagttagaaaactagatttagtttggttgaagggttggatgagaatgagagcatcatgttccttttatagtatttcaactagggtttatgatttaataatatagattaaaataagataaataggcaaaattcaacatagtggctagccatacatagtgggtctcactagttataattttgccactttatttcaaccatttatcttttctttcaataatgtcatattttcaaatttcaatcatataaatgtcaataccatttatttaataattataattaattatcaaataaaattaccatttattttatttattaattaaacttaacaaagtatcttaattaacaaataaactccgaaatctcttttccttacaattaagaccttgcttagtgataattcataaataagacatagtctaattttagatttataattgactaattaaaaccaattaactgagtctacaagcagtattatctcaactagtgtggggaccatgggtctatataataaagcttattaattcctccttgcgccactatagatttgaaattgcactcttaattatatagaacgctctatatgttccaagatatagatacgctatgaattatcaatcgttctaatctaaatagtcaaagactctctaaagatgatctacatcgaa

SEQ ID NO: 258828 - DNA, 3287 bp, Cannabis indica
tgcctttcatctaatagcttttcttttcttttaaatggagaggttgtgggtaatgtttgaccaataaggggtctaagataaggagatcctttgtcaccttatctctttctgatttgctcagaaggtctttcaagactccttaatcatgaagaacaaatggggaatttattaagtctgaagctcactaggcgtgccccttcggtttcacacttactgtttgcagatgacagaatgccgacctgtgagtgccatgaatcttaccttggtctccctgcctattcaagccatgataaaaaagcattgttcagtaacgtcaaggaaagaatttggaaactcctacatgcttggaatgagaaactcttctccattgcggtaaagaagttctattaaaggttatggtccaatctattcctacatacactatgagttgtttttcgattgccaattgggttttgtaatcaaattgaatctatgatggctaacttttggtggggttccaacaaagatgggttaaagattcattagaaaaggtggaaatagttatgcaagttgaaatttgaaggggggatgcgctttcgctccaatgttcatttcaatcaagctatgcttgcaaaacaggcatggagaatatttgagaatccacactccctattgagtcggcttttgcagcacaaatacttttcaagaaactcctttctagaagcacaccttgaacacccaccttccttaacatggaaaggaatacattagggaaaagaactgctattgaaaggcctttgatacaagataggtaacgggtttcgagttagaagttgtttggatccttggattccaagacataacaaatttaaaccaatcagttacactagccaaccaaccttgtctgtatccaccttcatcaatgatactatggaatggaatttttctattacaagagaactttgctcaaattgatattaatcgaattatcaccattcctttaagcttttaccaatctcaggatcgactcatatggcaccataacacaactagggtctactaagttaagtctaggttccacctagcgaattccatctcagaaaaaagtgaagaatcaacatcagataatttcaaaagttggtggaagtttttttgggctttacaattaccaccaaaggtaaaaaaatttgcttggaaagtcattcaacatgctttgcctatagccactgccttgcacaaaaaaagatttattgatatctggaatgacaggaataaagtgcttcatggtggaacaaaatgtgatgcctcttctctagcaacacacactataagttacccggataattatcgatcagtcaagcaaagttgcaaaaagaaacaacaccctaatatgtcacaccagcaaagctcctcagcccgtgcggcgttgcaccaacaacatccttcatagtccgtgttacaccagtaaacacacatacgaagtgttgtgtcaaaccagcaaggctcgactcagcatgatgcttcagattacaacgtaaggccagcaaatgtgataccatggaagcaatcagatgtcaatattcttaaaatgaatgtagatgcgactgtcaatattaaagataagatactgggtattggagcagtggtttgaaattacaaagggaaagttgatgttgcattatccaagctagtccaaggctgttttagaagcgatgaaatggatgctcatgcactcttttatagtcttaattgggctaatcaacaacaaatcacgatagcatatgttgaaagagatgccttaagagtttcctcgctttgacttcttctcatacaaacttatcttgtttttcagatctaattgttgatgttcgatgtcttcggttccttttttttttttttttttccttggagttactattactcatatttgtaggcaagttaatagagttgtccacggcttagcaaagtacgctctagagttggatgaagatgttttttgaatgggagaaattctacatcttattttctctattgttgtaaatgacctttaatttataataatattgaaaatttctcaaaaaaaaaaaaaaattaatatcttaaagttgttataactatatttcgtaatatctttatgaacaaaattatagaatgaaagatataataataattataattccaaattaattaaagtagatatataaaagtgaatattgttttattttgactctaattcgtcatcaagtaaacttattttaggagcacccccaccaataattattgcatattttcttcgaaatatagataattttcgaataaaaaaaattgtagttataatttaatgtaatgatcttttatgcaccaccacatagactttattcttctatgcacccacataaactttattctaagaaaattaatgcatgattattacgattgatattatcattatatattatgtaatattattagttggcctaaaacatctgctcaaaaatttaattagtatcatgactagtaataccaccattttataattcataaaattaaatatttttatttgtatatgtagatggtgtatatatatatgtaatttttgcctataataacttaaagaaatgtaaaaattgcttcaacccttttccaagcaagagaataacttttttttactctaacttctaaaagaaacttaatttttagagaagaaaatagacatacagaaaaatcaattgggaatgcataaagatgttaaagacattgtaaagcttattgaataaaaaagataagaaaaagtcacatggtgtgtagcaaaaattgatggaccattgtgtcatgatggaatatgagttcatttattagaaaaggaaaaagaaaaaaaaaagtttgaaataaaaaaataagttaataaacaaaggttcatgaccctactctttaaacatcattttggtacttttggttcttaattattaatgcctccaatttagtgtaatggtccacacgcatggacattcaacaaagctgtcccaaactttacgtagaaattaatttagcatgcaagaatttctatatatccaagcatataaattaatctattaaatacataattttttttaaaaaaaagtattttattttcatgtttttttataataacatattttcataaatgtattacatatattcaaactcacttatctagctagccagcgactttgatgcatgtatattcaaatcaatgaaaaagaagtttgatcaattgatagttataataagcttagctcaattgtattaaatattaataattttttttt

SEQ ID NO: 258829 - DNA, 702 bp, Cannabis indica
gagtaactatgaagagtcattgaagctgctggtgtgagtaatagaccatgagaaatggttcctttgaggtagcgaagtagccgcttacatgcttcccagtgaggtacagtaggagccttaagaaattggcttagtttattgataacaaaagccacatcaggtctggtgagtgagagatattgcaaggctcctatgcaacttctgtagagagttggatcttcaaataattcaccatcatgtagagaaagctttgtagtgttactgatcgggttagagcaaactttagcaccctccatgtgcaacttcaccaacaaatctgtaatgtatttagtttgggacagaaacatgcctgttgaatccctgaaaatttcgacccccaaaaaatagtgtacatccccaagatctttaagagagaacttgtgattcaaatcagtaaccaactttgaaatcaatgagggatttggaccagttatgagtatgtcgtcaacatacacaagaagaataacaagagaagtacccgagccatgaataaaaagggaagtatcagactttgaagcaatgaaaccccactgtattagactggtccttagtttgtcattccaagcccttggagcttgtttcaagccataaagggctttgtgaagaagacaaacatggtgaggttgagatggatctatgaaccctggtggttgactcatgaac

SEQ ID NO: 258830 - DNA, 707 bp, Cannabis indica
tattggttggaatatgttgtttataccctaattaggtactctggaaggtttggttgcatttggtggagttttgagcaagaaataaaactttttgggtgaactagtacaaaccgactagccagttttactagtacctgtaaaaccggttagccggtttttgcaaggtttcccgaatgttccatttcctcaatcctcatccttttcagtgccttagttgggtgtttccctatttcctgtgttagagtaatccgtagagagtataacagaacctagagtggtgggtttggatttcccggattaaggttttgatcatgtgatttacccggtttcgttatgtgattagggcatccatttcacacaagactttctgttcaggtcagctagcacactcgaatcttgaaagaaggtaagaactgggtgtaatgtgtaatataaatatctgagtgtatatatgtgttaagtgtatatgcatgcttaaatgttagttacactaccaacgcttgtacagttatggtacagagtgcattggtatagtgaatatcgtttaagagtccaatacagtgataccagcactagtacgggaaagtgcagggtgtctacggtatatcactcaatggtactaggcgtacgaaacaaaccctaccaacacgcgtacatcaagttatgtagtgtatgtggtatagtggttgttgttggaaattatttta

SEQ ID NO: 258831 - DNA, 2617 bp, Cannabis indica
acattaaaaaaaaaagagacaaaaaccaataattttgttagatgaaagcagggtaacgcaagaattgaattgtaagcctcttttgtaaagcacatacataaaatataatactggcttatttttcaattaattacaaaatctgatagtaaaaaaatatatagttcaaagaaatcaggggtctccttaccagctcaagaagaaaatgtgaatcctgagaatataattcctgagaaagacaatgcaacgctcttcctaagcgagcatgctgcttctttaacatgccattgtccgcgtttgaaaggcttgaatccaggccaaattcatcttttctgatagattcaataacaagagctgcatcttcatgttcattaagttcagaaatttgtagtgagccagacacttctgcatccttggccacagcagaaactttagtatgttttcttttcttttttaaagcaactttagtatgttttctgcttttctcgttttccacaattgtaacacattcatccttattcccttcatcagatgtgggaaacttgcttatgacatcttgcttatgtacagaacctggttttctattaaatacttctgaatccccagaccgatacaaatcagtagactcattggaagaaagagaatggtaatcattaatccactccatgatgccaagagttaaacctacttcatgaagcatgagacgttgttctaattgcttgcattcacataaaattgctgaagcagcatctttggtgacaggttgcatcccgaaaaggaatacatcagcagcataagaacgaaactccgagggtagataacgaaggcaatcaaggacaaaccttgaaagagcagatacagctacattcattttggtcaagttactttgtaacttgctatcagaattagtcgtcgtagcttcactagccattctcccttcactaaaaaggaagtttccacagctatttgactccacattttctaaagaattattccagattactttaaacgcatgttttgcatggcatttcaagagggaaaagggaacatgtttttcccctccaacgattgagaacagagataagaatttgactgctgtttggaaagatgatccgcttccaaaaatgaatcaacagtagctgaaggatcaattcgaaccaccttcccatctccagtcaccaggcacaacaattcatccgttttgacttcattcaataaccatggcacaagaggaccaagtgaaggagcaaataaaaggtcccaatgtgaccataaggttagatccgacaacattggtgcctttagtaagacttcgattgcatctttgttcgttacagagttgcaggttattacatcttggtcatcagaatttctcgtagaattactcttcaataagtcatttttgttcttggctgatgattctataacatttcttgtagataatgtgacagaaaatatgacagatttagaaattacacagcctttatctttcatttccatgcttagaaaatcttccaaagagccattagctacaactttgaaactaacaaatgggaactgcctcataagaagtgaagatacatcctgcttggttatgtttccattctcccacaaattattggaagcttgtgacagtaaaaaaaccaattgctggtgcatcatccgaacctccaaaggacttttttcacttacatcacccgttatcaacttgcacagctcttgtggtagcaaagacgcatatttttctagaaaaagtagaaaatccccataaccaagggatctaaactccttgacacaaaatcggtctgtaacccaacgctcacatttggaaaggtttatcaaaatgctataccttttctcaataattgaatcattatttctaggggtttcatgatcaagcttgacataagcagtgactttcttgataatatcttcaactgaaacacctgtagtagttgaaatcattacaagtctcaagaaggaaaaaagaatatgaatataaaattattccattagaatgaacatttccatttattttttgggactgcaatactttagtttctaccaaacatagggaatgaatgaatacagattcctgaagttggactcaaaaatattttcacaataccaatgtattcataatatgcaagccctgccaattttgaacttgtttcacatgaaaggttaaaggtttttttgcattttttgtaattataaaagcacaaactcaaaaattatgcatctgagttaatgagcatgaaagcacaatcaactaggggaaatatcacaaccataccaatgatgcatattactttttttgcatttgttgtaattataaaagcacaaccatgaagaataaaactagggaaaatatcatgcacctccttgagatttaatgagcattcatcttacccctatgttctcaaaaaagtaatatgcatctgagttaaaaacaaattggattaaaacaatcaactgtgtcatatttggccagaatttcagtatgataaccaattggtcaactagtagaaaaagccaataacaatcaaacagcgtgtataccaaacacaaaaacacactaaaacgccaccacttacggaaaataaaataaataaaatgc

SEQ ID NO: 258832 - DNA, 1091 bp, Cannabis indica
aaaactgattaaaaaaatattatcaaatgccaccatatttaagagttatatcgtttcagtacaagttacaataagacatggaatattaccattccaggataacctcccatgaagccctattgccttttttggctatattatgagccactgtattacaatttctttttacataacttaaagaaacataggggatataagaggagtcaacaacataatttataacatcacttaaagaggataagtctaaatgatcactataaatttaatcaactagcccctttgaatatgtttcaatgcaagtaacttggatattataagacctgcaccattcaatagcatacttttttttttttgtttgcaagcattcaatagcatccttgagagcaaaagtttcagccaatgttgagggataatcaccaggaaaagcatttatctagcaacaattcttccttttgaatctctaacaattggtcccacatctattttctgtcttttgaaatccacagtatcaacattgagctttaacattgaagttgatggttgtcatttgcaacaactacttcactctacattttccttcattctcttttcaccagttgcttggacttatttatgctcttgagggcttgtttggtattgatttgtattaatagtttgtttggtctgtggccaaatctaagttcgattctaaggttcgggtgggagtttgggtccagggtttagggttatgggtcggggccagggctaggtcggggttcggggtttgggatccaggtccagagccgggtcgggatctaggtcgaggtttgagtctagggtccagagtctgaggtcgggattcacgttcaagtttgggatcaagttcgggatttgggttcggggttcaggttcaggttcaggtccaagttcggggtccaggtttgggatccttaccccagaccctttgtaatattataatacaagttaataaaaattatttattatataataaataatacaattctcattgtattgaaattttaaggttataataattaatacaatacaatgttttatccaaacatagtattatttgttatttaatataatac

SEQ ID NO: 258833 - DNA, 772 bp, Cannabis indica
caggaactacttctgaaatgaatcccgagtttgacagtggattgtcaacgatcaattgctcatggggtggttatatgggtcaatgactgagagcatagccactgaagttatgggatgctcttcttctgctgatctgtggagtggtttagagtccttgtttggtgcacattcaaaggccaaaatggatgagtatagaactaaaattcagactgtgagaaagaactctatgaacatgacagaatacctcaagcaaaagaagcaatggggcaaatgtactagctcttgcaggtgatccttaccctgaatccctccttgtttctaacgtgctttctggtttagacatggaatacttgcccattgtgctgcagattgaagctagagaaaagacaacttggcaaactcttcaagatctactgctgagttttgacagcaagcttgatagactcagctccttctctggaaatagcaaacatggaaacaatggctctccctcagccaaccttgataacaaaggctctgctggtggtggaaattacaacccaggaaactcgagaggcagaggaggaaacaacaataacagcagcaatcgtggaaggtcaaatggaagaggaagaggtggtagaggtggtccaaaatgttggcaattattttaccaggatcttatatctactcacaagtatgttgattaacaccctaaatattaactttcgaaaacgatgtagcatagcattatcaatatctgaacctggatctctttctctaaatctttgat

SEQ ID NO: 258834 - DNA, 684 bp, Cannabis indica
tcatgcctgaagtttccaatgaagaatggggtagggtgtccgagaggaaaccagcagactgctcgggaatgttataaccttgtagtggccaaggctaagaaggaagtatcctccagccagagcacaaacatgggaaaaaatatttcaaagaagggagcttcccaagacggggatgaagatgttgatccttgacttgaggacccaagcagcaatgttagacctgtggaagaattagaagagtttgagatcgatctagatatcccgtccagaaaactaaagatcggaaaaggtttgttcctcgaagtaaaatcagcattgataaaatttttaagagcaaaccaagacatttttgcctgtttcaaaccattctctatctttactttttacttttttttggcattacaaacatcattctagttttaacattcttcttcagctgctgcagaagctcggctggttgctgagactctccattccagattagattatttctcctccttataaggtacacaagtgctgttatgcacgcagctttgatccccttcttgaacttagattgctttgctttccatatggtctttatcaaattcctcaaggtatctgcctgagtgtgccacttaagccattccttcaactgttgaaagcattgctgagagaacttacactgaaaaaacaggtgatcta

SEQ ID NO: 258835 - DNA, 932 bp, Cannabis indica
aacccaggtatacattcatctcaagttttgtgcggctactattcatatatattttttcgttttatacacagctacttactattttacttcttttactattattattttattttattacacaatcttttcttttttactcaacaacaccttctcatctccacatcaaaatccaacttctatgaatcttcttaaaatcttgatatgtttactaacttttaatgattgtgttactatttgtaaaagaattaatgacttcaatagacaaagctcagattttccacacacttaacacgataaattttgaattgtgaactgagaatggtttggtttgagaagtgtggttcggtcaaaactaattcccctactataatttgagtgaaaagaatttcattttcaaggaacccaaacacaatagttccaagaaagctatgaactaaattgttgatttcatcaaagaaagtgtcttatcttttgacatggtgagaatgtttctttagtctttctgttacagtttttttgtctatgttcatggcttctagtagttattcagtgaaagaaatagaagatctctatgataatatagagattgaagaagaagatgatgttgttacaacatttgattttgaggagcccaaaactgagattgcaaatgttgaactatgtattgttagtcgttttctcacatctagagcagtcgattatgacgtaatgcgccatatgatggcttctctttggcagccagggaaggggatgtatgtgaagcaactggagccaaatcgttttctattccaattttaccaagaacttgatctgaatcggattattgaaggaagtttgtggatattcaaccacatacaattcgtttttactagactaaaaccagcagatgacccacctatggttcgtggataagggcacaaccccgtcgtcaa

SEQ ID NO: 258836 - DNA, 928 bp, Cannabis indica
aatctgctgagtgtggcgatccgttcagtttagctttgcacttctttgggcttcctttcttccacggccaggatgacttcttcttgttcgtgctgtgttgtccgggcatatctctcccgagctttgcccgaatctccagaaatgtgcgggcctccaataatgacttgtaagtgtccatctattggtggaggtagcaaatcttggttgttttgaccttggttggtcttgacatacttctgcaagtgcggattgtttttccttattaggaattcaatttcccgcttcaagttgtaacattcgttagtgtcgtggtcgtagtctctgtggaaccgacaaaactttgtcatgtcccttttgttggtatctttcttcatgggcacgggcttcttgtacgggatcaacgactgagttgccatatatacactttctatatcttcagtcagaatagtgaatgcagtgtatttggcatgattctctcggggagtctgtcaggatttatcagtgaactttcctttcttcctgtttccttgcttgtggttgttgcttgaacgcttgccacttgagcttgaattattggaatagttgggaagttgggtggatgtcccagtggaaggagcctttgacttgcccgacttttgttcaccttccgctcgttgaatggcttctttgagcttgatgaagccttcgactcggtcaaggaaatcactcattgggtctaccggcccgttcttccttatatatctttccaaagttcacagaggacttcaatgccccccagtatcgcgaataactttctatccttggttacccgcgaaactttggtcgctttcgtcatgaatctgctgatgtatgcccggagtggctcgcctggtcgttgcttaacctcgaccaaatctcgcaaatgaaatgggagctggcgcgaggagga

SEQ ID NO: 258837 - DNA, 809 bp, Cannabis indica
tatatcactcggtgcatgtagaaggggcttttctttttgtcgtcctgttttgagtatcgatggcaccttcttgaagacgaagtacggcggtataatgttagttgctgtggcatacgatgcgaacaaccaattgttgccggttgcttatggtatcgttgacagtgagaataacgactcctggacgtatttcttacagaagttgagggtagcaattggcgtggttgagaacttagtgtttgtgtcagataggcatcaaagcattgatcatgctgttgaactcgtttttcccgaagcagtccactgtgcatgctatcaccacattgttatgaacgtgaacgccaaattcaagactgatgcttttcacaaccaaatatataatgttgcttacgcatggtcgaagactgaatgcgatagagagttcgagaagcttagaaagatgaatccggccattgctgcatatgtggagagtatagggtttgagaagtgggctcacccttattgtttgggcgatagatacaacatcatgacgagcaacgctgctgaaagcttcaatagtgtcacagaagagttcaggaaatatccaataactactttggttgaatttatcaggttcacactccaatcgtggttcgctgatcgcctcgaaaatgctgacaaatgtgccacccctttggccacgctcttcgaaaaaaacttggcaaaaattcatgaaaatgcaaggtacaggcgcgtccaacgaaatggagccaatttgtataacgttggtaggggacctaacggtgaaagaggtggtgatgtgaatctagttg

SEQ ID NO: 258838 - DNA, 597 bp, Cannabis indica
tctgggagtttctcagagtcgaggtaggctgctattggtgtcatccagtttggggacgtttcaatcattttgatgtctttcgtgccagtgatgctaggctattcaaggaactggatagggaccaagtttgccttgtcacttacattgctgcttgccaatcgagctaacgcatctacagttgtattttcttctcttggaatttgtttgcgattgtagctttttgaattgttcgagcagatcgtgtatttttctcagatatgctatcatcttttctccccaagtctcgtattcgccggatacatgatttaccactagctgtgaatcactacagatttcgatgtgttcggccttcatttcccgggctagttttagtccagcaattaaagcctcgtattcagcttcgttgttagatgcgttgaattcgaacttgaccgcagcttgcaggtgttgcccccagccgtgacgagggcaatccctacgccagatagttgtatctgtagccgacccgatccacactgtagtttccaggtcggtttgtcttcattgttacttggctgaggtgctggctacggggttcacgtttctggtatgctttct

SEQ ID NO: 258839 - DNA, 1493 bp, Cannabis indica
gtgtaaaagggaattgaaacttttatttttatgatctttttccttttccatcctaaggaaaagaccaaataatcacaaaccctaaaaaacctgtatcttccccttcccctctctctattgtttcttatatccatgctctgaagtttcgactcatagggtatggctactgagagtgcttctcgatcgagcttagcagtcgattcgtatatagggagcttgataagtttgacttccaagagtgagatcagatatggaggcattcttaatctcaaattcacactacctttgtctgtatagaatttaagatcttgcttaaatttcacacaacattcttattagtaagttgttgcaagtttttaagtctcataaaaagggacttttttgtttctccgtagagttttcttatatgtatatttttttctgtactcactttgtaatttgcttcattaatggcagtacgatccttagaacagaaggaaagaaaaaggatgatcacaaattccaccaagtgacaaagtctatgaatatatattattccctggaagtgaaatcaaggtattttatatattgtaacttaaatataagaatattggcttgaacctatccttagcggtatatgttagatagttccatagttaaagttaaataattctaggtattttttgtccttataattctaaacaggtccatggtattttgacatttctttttagacatgattaactttttgttgacacttgacaatatgttggtgagaattattaattccctaaattgttataccccattgcttttattttttcatgatcttattagtggaagttgatgatgttcagacaaagaaaatgtgtacttgtggaatatttgctgatttttccccactcttgagatgagccattgacattattattattattattattattattattattttacaggatttgcaggtcaaatcttctccacccactcaccctgcttaacctacaccaccaattaacaatgatccagctatcattcagataggggagattgggagtgctttagtaaatgtttagagtttggtattaaatttttactaattaaaattcattgcagccaacgattatcttctagaactgtgtgcaagctatcttgcaaaaaaatttgtatgtgccaaacttttatttgcttattacaagaactttatactactacacttgcattagtgtgtaattatttttgcacagtatatttggattggtatgggttatccttatcatttctatatgaaggaatgttttaatcttatttattatgtagggatttagttttggacatttttattctcatgtattgaattaatttctacatttgtaataatttattccctcaacttcacaagttcatgcatttttttcatgtttattattcatagctgattatcaggtttatcttattcatacttttttctcaactttacaagttcatgcctttttcttaatggtgttgct

SEQ ID NO: 258840 - DNA, 929 bp, Cannabis indica
tttgtaaattttttttgttttgtaactttttgtttatttcttgttgttgtaatttcgctgtctataatgtggctagatggactttcgcccaaaacatttcaggtcttgagccctcctcgataccctttgtaaggatcgaaaagtctaattttcctatttataaaacactttattttcaaaaaaattaatagctaaccctaacaacaagacaaaattattctttaatagaatcatatacaaaacataacttttatccaattaaaattattaaatgaattataaagtactctacatatcactcacatatgagtaatatgaaacaaaacacacacacaaatttttcattttttcgttgataaaaacttgaaaattcacttcaaattatgttccatttttcctctagcgactggcaaatcatatttgtacagcgtgcagcgctcaacgagtaattagaaactaaaaacaaataacaaaaacaaaattagttaaaagaaaaataatagaaagaaataataatttgtgtttaaaaaaagattaagacaaaattagagtttaattaattaccagatacaaaatcatcaatatggtaatctggttcaattttcccatgagccattacaccaacctgatcaaaatccatgcataataatatggaatcaaataacaatttttaataatatttatactaaaattaaattaaaaatatatatatatataatacattttataacataccacaaaaactatgtctctatcactttcaaagttatggacataatcattcatttttatcaacttgtttgagctagaagagaatcctgtcattcaaacataaaataaataggggttaattattatgattcttatagaattttgctcttcattttttctttccaaaaattctttataaatatttccttcacttacat

SEQ ID NO: 258841 - DNA, 698 bp, Cannabis indica
gtgtatatcacaagttcagtgggagtaaatacatatttctggttctatatgtcgatgacatattgcttgccactaatgatataggcttattgcacgaaaccaagagatttttatctaagcaatttgagatgaaagatcttggtgacgcctcttttgtattaggaattcaaatacgtcgagatcgttctcggggtattcttggattatcacaaaagagctatatcgataaagtactcaaaagatttggcatgcaagattgtagaccaggtgatacccctgttgctaaaggagacaaattcagtcttagacaatgccctaaaagcagccttgaaattcaggaaatgaaaaagattccctatgcatcagttgtagggagtctaatgtatcttcaggtatgtacgcgtccagatattgcgtacattgttgggatgttaggcagatatttaagcaaccctggtatggaccattggatagcagccaagagggttatgaggtatcttcagagaacaaaagattacatgctcacatacaggaaatcagatcatttggaggtcgtagggtattctgattctgatttcgctggatgccaagatagcagaaggtctacatcaggctacattttcttgttagctggaggagctatatcctggaaaagtgtcaaacagacacttgtagcttcttccactatggcagcaaaa

SEQ ID NO: 258842 - DNA, 1781 bp, Cannabis indica
tgtcatgcagtttgtataattttgtaaattttcaggacagtgttaattcttgttagtttgtgtctgtataggggaggcagagaggattaagcgtttcagaggacggatatttgcactaaaaaatgagcctgatgttgatcgcgtttggctacccaacagtaattcccctggtcttgctatggcccgggcttttggagatttttgtttaaaagattttggcttaatatcagtccctgatatttcttaccatcgtctcagtgagaaggatgagtttgtaattttggcaactgatggggtaagaaattttgttattgaagtggatgtggatctatgcatatttcagttgaattatcttataggagcatattccagttaaattattttctgggactttgattagctattcaccagtggtttatgcttttggggaattctctgcttcattaaagatcaataaacatgtgtagagagcacccaaaggctacatataatagctataggagaagctattatcttttctggggatggacttaatattggggcacttgatattatctacaactgaatgattagaagtatagaggactgctggtattggtgtcatttgtctctcaaaggcattaagtcctccatgcatacataattcctgatctctcattttgagttgataattcctgatctctcattttgagtcgatctacctatcttttcgtttgtgatttatgcaactatatgcatcttgcatttatgcatgtaaaatgaacaaagcagctatagcctttgttctcgaactggtatatgcttattatggcgttaatgtatacatgcatgcacttgttttatcatttcactcttctgaccctgataacatatgtttgttaggtatatatatattcttttctagcaattttctttcactactaagattgacaaatctgtgttcaacttgtacataagtatgtgtgaattttccttcccacagatctgggacgttctctcaaatgaagaagttgtcaatatagttgcatcatcccctcagtctactgcagctaaagtcgtagtggaaactgcagtgcgaacctggaggtataaattcccgttctcaaaagtagatgattgtgctgtggtttgtctcttcctcaattccgattcaaacaaaacgtcagttatttacactgccaacaacagtatagtgcctggtaacgataatggttgttgtctaatgaaattagattgagaatccactgctggaaagccccctgaggtttgagatcaaaattggaatcagggatttagtgaaagaagcagcagtatgagatgagtacagtaggcttgtttgatgcatgggatactctttttctttttcattgttgtctatatatcacatcatccattcttttatacacttggctttgcatattttctacaaagcttcggggctaaggttgaactttcatgggactacgttcggttattttctagatagacgtggaccctcgacctagtccacctatttttctttttaaatgtataaaatatatttatatatatatatatacatattgtgtggatttggagttttttcctgtaaatgttggatctttgaattttaattttttactagttaagataggaaggatacagttgtgtttgtgtattggtctattggacctggctcctagtcttggtctaagtctagtagagtaggttccttcttgtagttggatataattgttattttaggatgtaaaagatgcatatatggagtttttaaactggat

SEQ ID NO: 258843 - DNA, 625 bp, Cannabis indica
aatcgtcttgccgcattgtcaaaaaactgacccttctctttatcggttatacgattcattgctagaagctctgggtcgtaaaacttgaaaaaatttctcataccattgatgctctcccagatgtgtctgccaaaaaaattgttaataagtattagtgtcttataataatttaactagaatttcatatatatatatataagattaattaaattaaagaagagtatacatcattccaaacagtattccttggttgccaatgaagtcacacaatgcaacctgctgcaaatcctctctagcggtgctatgaatcccttaggcacaggaattgtgattatattacgtttatctttgaggttcaggaattcaacaaccatctttttagcgatttagggatcttgtccatgttgtttttcgagaataattcatcttcccgtgcacgactgccttgtggagaaagcatgggagctttcaccttcgacgcatcacgatcttgaaggcggttgagcgagtggaccctaaacaaaacagaacataatatatcaaatttgatccaatattaccgaaattttagcagcataacgactgtaattgaatgcccccaaaaattttaaacatgcatgtataa

SEQ ID NO: 258844 - DNA, 670 bp, Cannabis indica
aattttcctgagccttcttcttctatgatttttgaaccagcccttctctttctctcttcatatttttatattttcttaccttgagtgatagagtgagtgcccacacacatcaagtggtatctcaatcatagtgtgtaaggctgtgaagaatccaaaatcaagagaaggacattcgggctcagatcttggtgataccctgctacaaacaggatataagggttggagatctgagtcgaaggagccattaatattccgctgcacccactgtaaggtttttgaaacttcatatttaggatgttaaataacatacatggtagtaaatctagatcctggtaaaacttattccaacaagattaaccactagtgttactgcctgactaacacagatatagttgccaaatagtaaagaatccagtatcccaaaaggagtagacatatagggaggaatttcacaatatcaaagattttgtgattaaggagatgtaatggtggagaaaagattgtgttgaatacaacctgtcaaatcctattacaaagataatactacatattacacttgatttggacatcaaggtgttgagattaattaaaatgcgcttttaattttacattagtacaagtgaaagtctgttaaattttataccctaaataaaaccaatttcaatataat

SEQ ID NO: 258845 - DNA, 627 bp, Cannabis indica
tatttgtctctttttcttggaggtttcattcttttcttcttctaataattctgtaagctctatttcttcatggatcagaaaactgctacttgatatggttactgagcgcgacagcaagcaaactggaaatgtgcctctcccccttacagagtcatatgatttctgtgaaagaacgtatacaaataattctcattcatgtcttgctcaaacaatactaacttaagaaatgaggcaaattaatcctactatacattgtaatatggctatttaatatttttgtccacaaaattatgatctatgtatcatagtatatacctttaatttttcaggtcgttaaaagtagtctacaaactatttagagtattgtaaattgatcattttgtgaggttttattacacgtgacaaacagaatgatgatgtggttgtgtagacaattgtcacgtcagcaccacaaaataatttacatgtttttaatttttataatcattaattgtttttttagtttaataatcttctaaaaatacatttttgtgaaaaaaaaaaatgtaactcagatatgacaattatttaaacagatacgtcattatttaatgggatattgacagctaaatcatctgaactttacgt

SEQ ID NO: 258846 - DNA, 1701 bp, Cannabis indica
ggcgggattccgctggtattaatacaaacccgccggtaataataaatttaaaataatttttttttatttatttaatataatattaattatatagttattaccggcggatggttatttccgccggtaatacccctattaataccggcgggtgagttccgccggcaataaacccgccggtaataactatatttgttgtagtgagtatagtgtcataagtacagggggcgaaaaagataattattcttttctttattaagcatatatcattattcattttaattagaattttaacttttgtttaattatacacaaatttgtaagtttttttagttttatttttgtcttatttatattgtctatatataattaattgttgttagtgtaaaaactctataaatagaggtcattcatgttcatgtgagtgaaaactctataaatagaggtcatattattcacttgaaaaataagtagttgaaattatttgttgtggttagaaccttgtgaggatatgctcatctttagacactaggctgagtatatgaggcttgataaatccttaagagcatttctaaagtttccctaagtgtccatatgagggaggaaatgacttttaggaaaaaagtccttgagtcttggtcatgctttttgtgtgttattcttcttcttgttctctatatttcttgtaatcttgatgaaatacttttatttgtattttgagtattttgattgtaatcctcatgttctctcttgtaatgagaacttttccaacagaacctctacctcaagacccaaatcccaaccggtaagcatcccaaccccaagacccaacgagaaagatcctaacctcaagcctcgacaacaacaatctaaaccccaagccccaacgatctcaggtatcgctctcattctcctgtctcttctctatacacttagatctcatttttatatttcttctcttttctctcctctcttttctatatgccaatatttgtaaatgtttagatatttttttttgttctaggtttcgtcggcaggacacgggttcggggtgttggtagtagtggccagtgttgtggtacaagggtgttaatgtagttttctttttaatatttatagaaatataatatgtatttttgtatattgtaatttgatttgagatttgatccattgtttatatattttgggttttcatattcttgtttattttgatttgaaacggtgtgtgagatcagaaatggtggtggttacttatttcagttcaagtctaaaaattgtggatgagatctaatttatttatttttatatatatttttgggaaattctacaatgcacccccttaaaatggatatatttataacacacattctcttcaattgcatcaaactataattgacgctattgagtcccgactttatgttggtgacatagactttggtcctaggaatggacagtaaaagtataaatgtcagttaaaaatagacacttattcccttttttctagtagtgaattatgaaaattcaaatgtatgtagttacaaaaaaaaattatgtacgcagtattggaggggtaacaaaatattgagaaattttataatgcgtcctcttaaaatggatatattgatacatctttatctgttttagcgcccgaaataattttttagtcaaattttttctcatgatcatatacattatagttattta

SEQ ID NO: 258847 - DNA, 662 bp, Cannabis indica
caatttttacactctgatgtggcatcgcatgaatggtgacacgtggaatccacatggagtatctgctcggagggaatagtccgagcaggatgccttgctggcatgcccagagcaaagcaatcagcaatctgcgcagagcaaccaacgcttagcgaattcagctttcgcattgtgagtcatcaacgaaatccctataactcggggatcagattacaaggatacggcatacacacgatcccacaatcagtgtattcagcatgaatcccttgatctttgtactcagcattgatcccacgatctttttgtatatacacattgtaacgagaggggaaagacttcctctccaagcttactagccctataaatagtgatgcatgttcactgggtagagggtgtctttatattgctttattatatattgattgctacaaatcacttatcgcttactaaattcgactcgttgtcgttggctaaaagcgaggtcaacatttttgtgctttcatagagagaaggatcacgaatctctctttattcaacatctaaccacaaaaacgatggtgcagactcgtagaggcttgactgatccagcgaattcacaaccggtggatcctgcattgtagaacccaagaaacacaagggttccgccagctgttaatcttgga

SEQ ID NO: 258848 - DNA, 1263 bp, Cannabis indica
ttgattgctgacaatgcaccatgaagttgacatcataacagtttatgtatttatatattctggtttggttcaggtaactgtgagtggatacgccgcatcaggaggcggtcgtggcatcgaaagagtagatgtgtctttcgattgtgggaagagttgggtcgaggcctctagataccaaaagcctgggatcccttatgtttcagatgatgaaaggtgtgacaaatggggttgggtgctgtttgaagccacagctgatgtacataccaatacagagattgttgccaaagcggtatgtctcacattactattactattattattattattattattctaattgaattctctagaatgtgcattgcataatcatatgatatgttatcctaatcacaaagaaaatattattcttatatgactacacacaccataggaaatattaaacaatttctaagcagtgtacaccattattcaaaacaccaaatagtgagaaaaacagttggtctgtgaactcttcaactggaatgatggtgggattttggccgacatgggcaattattgcttaaaatactaataataataacactatacaaattgtaaagaagaagttggcaaatggttaaatcaaaaaacaaagatgtcactattattacagtcttacgcttacacagtcacacccattttctttttaacaaacaagtgtccaaaccacacgtcctcactctcaaatgcaatcttaatttatattttgtgtcatatgtcactatttatgaactcctaattatattatactttttaacattttaagatgtcaagatcagtgacacaaggaaccccccaccacccacatcaattttatccttatctggataaaggtgcatgcatcaaccaaccattttactacccttatggtatgtttggtttgcatttaaaggtgatgtaatgaaattataatgtaatcatgattacattatataataatggaatcctcattacattgaaaaagtatgtaatgacaattacatcacaaaatataaagtaaaattaaaattactttaatacttttttttttattataaatataaaaatgacaattttgtcaatttatcacttattataatattcatttcaataacaaactaaacattgtaatcaatttttattaccatttttattccattctattctctctttctttacatcaggctaagtctttccattttagcttcacagaagttgtttctcaaatagctgttaaagcaggtt

SEQ ID NO: 258849 - DNA, 1212 bp, Cannabis indica
aataattttataaatttaaattattcttttttaattttaaaataaattctgaaattttttataatttttaataattacattaaataggctaatataaatgtgtcacgtgtacatgatggtatacgtaggtagttcatatcagtagttaactgagataaatagatgatattttaaatttgactaataagtttttatagtttggagggtcatgcacccattgtaaatatgttattcattaatgggtacaatcattatcgtcattcaactttctataaatgatctgcatatgaatttagtcaaattactattttatctttgtattccatatccttaaaataatttagtaccttgtaaataatatttttgtaaacttaataaatgagcattgttaaaactttaaaaaaatcattgtttcacttctttattagaagctatgtaattttttttgtatttatgattgatattcctactcattatatttagctagaccgtagctagggtattaatgagtaaatcgaaggattcaaataacataatcagttaataatgtcgacgtgatctaataggtgccaaatcatttaaaaaaatacgcccctatcaacttaaatcatgtgtgatgtgtctactactactggtaacgaatgtccaatcttatatgaggagtgctactgtcaaccccctattacaatctcttagtcaatttctacgcccgaaaacatatgtcttttttcaattttttttttcacatgggtgttcgttatgcttacaacattatctctgtaaatttttgaaaaatttcgaatagtttaccgtccggaaaatatgtttgatgttttttgaacgcgtatggtaaattgaaatatcagaaactctgttttcggttctgtaaactattcggaaatttttaaaaatttacagtgatgatactgtaactatttcggcatatgatttcggacgtagaggttgattaagaggttgtaattagcgctcctcatcttatatacatttttaatattgttcataaaggttgtactatatatctcgatggtagataattaataaaattagtataaatttcgtgtactgatcgtattttaagaataaggtttatttgaacagacaatcatgattctaattaggatttttgtcttctcaattttgacatgtactaaatcatgccacttgagttttttcgaccgttaaaaaatttcc

SEQ ID NO: 258850 - DNA, 557 bp, Cannabis indica
atatttatgttatgattatgcttttcttactgagtctatcgactcacaaatattgtttgcatgtgtaggtaagggcaaggctaaggttgagcatccatgagagcgagtggatgaagattgtacatgtcagggcggttagatctagagcgtacgatcttcagacaataggctgcattttgattagtcgctaggcgacaagctttgtattagtatattgtattttggttataacttttgaaacacggtatccctacttgtaaagtttattttattttaagtaaaagtttaatttttaaaaagttttaatattgcacgatttttaataaatttgttgattagcaacaaactgcacaattaaaaaaatcacgataacacacctgagctagtagggtgttacaattttagcatcagagccgccaggttatcttccaaaaatcgttatgacatatttacaatcatcatcagcgataagctcgactctgttgggttttatgccctaaataaaactccatttcaatgtaattcattttattcaacatcaataaagaaacagaagt

SEQ ID NO: 258851 - DNA, 2819 bp, Cannabis indica
gttcaaataacctttatgtttgacattttaaccaacaaaaaaaactcataaaatttcattcacacatatacataccatgaagaagataaagcaaactcccatgaggaacatactcagacacaaccaatttctcctcttttcgataatggtaagccaaaggagtcaaaacattccaatgattaagcttccccaaccgcctaatctctgcatcaaactgatcttttcctttaacattcatttccctcattctcttaaccaccacagctatcccattagccatcacagccttgtaagacgatccaagccctccattccctagtacctcagccgtggctttcatcaaatccggcatcccaaacacccctttttcctcattcaccatcactatctccgccgctgcaggaacagcagccgcgccggcgcctccccggccacctctctggttagaatcagaccctcctttaagatttgaagaggggctcgattcagtctctggagaagaatccatttccttcttgtttagtgaagtagtaacatgcacctcaacaggggcattattgttattattattattactattattatgctctgtgctatcttcaccaagcttgtcaaaatcttcttttccctttacgtttcgtaacgaattatgataaaaatgattagagaaacaatcacagccacgaaagttacagcggtggcgataatcttctttgaatcttcctcataccttactaatcccaagatcgattttgtcttgactactacactccttattgctaagcattttcccacaaagattcgggttgtcggcaaaagaacttggttggaatctcgataagctttcagggatttcgccttctaattcgttgttagataaattgagttccaataaagaaggtatgtcgaaattaggaatggttccgctaaattgattgtgctccaaatgaagttcgataagttttgtgagattagataaggaaaagggtaaattgcccgtgaattcgttatttgaaagccataacttcttaagccaatccattcttgcaaaatactcagacggaatctcgccggagaatttattagtagaaaggtaaatggcttttaaatgactcaaattactcaaatcaggaatgggaccagaaaacgaattgttgctaaagcttatacttcgaagaccctttaaagcttcaagagcagagacatctattgcccctgataaaccaaacccttcgaggcgaagaccggtaacaatgccgtcgtaacatatcacacctttccactgtgttcttccgccgcaaggtgatgagcctggatcccaggaattaagagcgatggtgttcgtgaatgattttttgagtttaagcagagcatcatattcgctcatggaatttgtcatagaagacagcccaatcaaagtgaatgaaaacaataagtacggccggagaagaagccaatctacggccattacttaaccggaaatttacaatttttggtgccgtaaataattttgtctgtaactttttggttttaacacatttttggttttctgcttaattggatttgctctttgcatagtgagcattgatggtttcttttttggtccagagaggagacagcctcagaatgagaaatggcttaaaatttcttggccatagagataagagaaagagccgtttgcagaggtttgaatgagtcagattttaaaaaaccgttaagacagttagcatttattaacctgtttttgtgtattgatgacttggtggggtttcaattaagaagaagagaatcctaacttagtatatacataatttgtattggctttctagaataaaatatattttctaacaaaagttagtgtctatatttgtcccaacctggtaggattaatgattcggctttttatattttctttttatttttaaaattgtaggaaaaacaaaagaaacaatgttgtttagatttcacaatttaattgaaaattattagttgattattctgtcgaaattatctattgaagattgcattgtgattgaatcatgtccgatttaacaagtgttccctacttacaaatttggtgtcatttttctaaaagtagtttcatttttttttattaaaaaaacagaacttttattaatttgttaaatcagaaaagaaaaaaaaaggttgtacctcaacaagaacaacacttctgttacactagatttgtaaaaaaaaaaaaaataaataagatgctctaacaagactgttagcaattatgttagcaggtttcgacaattttctataataacctcaaaaaaaaaaaaaaatataagtaataaatttcaaatagcttagactgctacaaaacaatctctccagctctacttttcgctgtagttgagttttaatccaggttaacgctttttttatactaactacttcaaccaaatacagaacacttataccaacaaattacccgacttagccatcactaattcatcataaaaccgttttatatgattaaagcaatttcaatataaatctaaattaaattaaggattccattctctatatatatgtagctataaatctccaaagaattgtttattttttttgaaagagtattattttacttatcgatcatgattcatatcccaagtgtgtgatgatgcggcgtgctatgatttacattttatacatcatgcaagattacgttgtgattcaatcttattatgtgttcccttatgcaaaaatttggtgacatttttttctaaaaagtattttttgattctctataacccatatgagaatggagcccatggatcccaatccacatt

SEQ ID NO: 258852 - DNA, 617 bp, Cannabis indica
cttttcttatagctcttacaatagtatctctgaatatataattcttagatagccttagcttatagcgtttcggcgtatgatttctcctcccttgcccagtgaacattcctcactatttatagggcaggaaacttgaggaggaagagtttcctctctcgttacaaagcgcataaacacaaagatcgtgggatcattgctgaatgctaggatcgtgggattgaggccgtatacaccgatagtggaatcgtgtgtatgccatatccacgcaagttgatccctgagttatagggattgagctggtgactcacgaagtgcttggctgaatttgctaagtgttgctcattctgcacggctcgttgagtattccattatggacatgccagcgaggcatcctgctcggcatgttgatccgaccaggtgctctaagttgatgccacgtgtcaccattcttgtgatgccacgtcagagtgccaattttgggataacagtgatatattaaaatccctacaggtgtattaatattattagatatcacaatttttaaaaattttctgatcagggggagagaagcagttgggatagatgatatttttcgaaaaatgatccttgcacaaagt

SEQ ID NO: 258853 - DNA, 710 bp, Cannabis indica
  modified_base (25)..(25): a, c, t, g, unknown or other
aacattttttcgggtttagcttcangttatctttatttaatatcttgaagcattccgcgaagtcagtggtatgatccctactctttattgattttaccaacatatcatcgacgtaaacctccatgttccgtctgatttggttgcaaacatttcgtgatcaatctctgatatgttgccccagcattcttcaacccaaacggcatgactttataacaatagagtctcatgttggttacgaagcttgtatgctcttgatctgggacatgcatttttatctggttatatccagaatatgcatccatgaatgaaataagctcgtgcccagtagttgcaaccactaactggtcgatcctgggtagtggaaaacaatcttttgggaacgccttattcaaactagagaaatcaatacaagttctcgaaattacgttaggctttgggacaagaacatgactggctatccacgagggataaaacacctcgcatataaagtcattgaccaacaacatatccacttcctgttttagtgccccttgtctctcggaatccaagggtctccttttttatctttttgctaggtactttggatcaaaatttaaatgatggcagataatgctagggtcaatccctatcatatctccatggctccaggcaaattgatcttggtttgccattaggatacttattagaagctatttgagctactcgtctag

SEQ ID NO: 258854 - DNA, 628 bp, Cannabis indica
tcgaagatctcgagttcttcttctggattcctagggggaagcactcattcgccagacttatgcactcacttcaaacggacatattgaaatagaaggccaactacgagaagaagttgagtttggatgttcaccatgagtgcaaatacacagcttatggcttcgcacctgcagtacaatattgggcgtatgaggccattttagaggttgggaagaggtatgacacgaatcatgggattcggtttcccaggatgcttagctggacgagcaagggtgatatagggaagaaagacctcagtgcattattttctagacaggtatgagtttcacttatgtttagagtaattatttaacataaatgcttgtaataaatgctaaatcattttactcttatattttttgaaccttaaacagcatcttgaagtggtgaaggggctacttccacagacagaagaggaggcatatgtgaggaccatctcttacgatggtgtggaaaacctggttgatgatggtgtggatgacacagaggctgaggcagatactcaggtaccaatttttagaactttttttatgattgtataacttgattgtttctgttttctttgttatgtgatattaccgtatgattatc

SEQ ID NO: 258855 - DNA, 1914 bp, Cannabis indica
atccgcaaagattcaccatacaaggccttaatttggctttttcgagccccatttttcgtagagtctccttataaaggatatttatcgagctcccactgtctattaaaaccctcctaatacttttattgtcgagttgaatggtaatcaccaatggattgacgtgaggatagctcacgtttttctcgtcttcctccatgaatacaatgggaggttcctcggttttcaccttcttggaaggttctggggcaaatgccgactgctcgttcgttatctctttcacatatcttttctaggcattattgctttcccctacgatatgtggccctcccgaaataaccaagatgtcctctcctttaacaggaagaggttgtaacccctggttgtttgggttattgggcagactgggctggttgtatccatggccctgtcttttcacgtattgtttaaaatggcctcgagcgatgagacttcttatctcatctttcaattggcgacattagtcggtcgtatgcccaatatccttatggaatttataatacttgttaaggtctcttttgctcctcaaattcctcatgggctcgggcttgctgaaggcaaccttctgctcatgtgcgaggtaaatattctcccgagtttcattaagctcggtataaatagtatacactggcacatacttatcatgtttcttctgtttctttttatccttcgacggttccttggtaccgttctttctcttcgaatcagaagcccctgagttatcaattctcgtgaaaacagtacttgttgaaacattgctgggttttcttctcgagcttgttttcaataaattcatttcttttcgggcttcttcttttcgaacgaatacctaagccctttcattgaactcagtgatgcttcttactagacgaccttggaagtcatcccacaactcgccccttgcggtcaatggattagtaaagatctctgcctgaagggtctaagttatgtgttgtcatccaaattctttactctagccgcagccgtgctaaaacgacttaagtacgccttaagtgtcttaccgggctactgctttatattggttagcaaggccgcttcgggtcgtctatccctagctacctggaactgtttcttgaaatccctggacagctgccccaggaggttattgaatgatgagtaaacttgttaaaccagctactcgctgctccaccaagcgaggtggggaacaaaatacagcgtaaattgttcgtcacattactcgcttgcattattgtgttaaagtattcaaatgcaagaccggattagtggttccgtcatatgatgtgacatgcgggtttttaaatcccgaaggaaaatgggtattcattatatttggatgatatggctcaagctccttgtctgagtcgtattcagattgtttccctagttcccccacttgatatctcctgaacgtgtcctccagcttgtttatctacaattggatgggatcctcttgctttggaaaaagctattgacgaagatccggtttcttccaattcaagtgctcttggagattcggttggaagtaattgctcgcaaacctcgtcttactcatagatcccgtcctactcatagactttgtctttgagtgactcgtggatttactggttcccatactttctcgatcactagctcgttgagtactttctcctcttcaagttgatcaactgtgggttcttgaccgcctcgaggtcacactttgtaatatcccaataagcttaataattaataattagggtttatatttatattatgagttaaccaggtaataagtgggattataatcctactaatctagttcaacataaatttgctataagtggataaataatcataatttattaattatggagaattatatagcatatgtgaatgtaa

SEQ ID NO: 258856 - DNA, 673 bp, Cannabis indica
tttctgagaggacaaaatcttaaagattaaatttggaaacacaagcttaaaagttcgctttttacctctccaaaatgaaataatctgattcaaaatgcgagaggccaggtcgatggatgctcccgaggtgatacgaaagagaaatgaggccacatcttgagacacgacggtcttgtttgagttgggaagccaattgctaagagcaaacctcatgagagatgcatgagcataggtaagatgtgtaatgcgaagactctcccccgatttcaattcagcccgtgcaccagtgagttcagtgagcatcaagtggcgatccatagacattatggcatttggtacattttcaggcagctgcaatgtaaagactgcttagtttaatttgaaaattagcagttaattatgattaattatgaaaattatttatagatatttaaatatttttttatgctgttattattgaattctgaaatgcattttatgttatatagtgaatttcataattttgcatttccggtgcccggtaacatggaactcggtgtttggttcagtaaaatcacaacttagtatgttagtatatcaggacggtttattagacattggaaatgtcaggattggccgggaatttagaatttcccaaaatgccctttcataccccttttatattatttttggg

SEQ ID NO: 258857 - DNA, 515 bp, Cannabis indica
agatgactcgctagcactacaaccttcttctcgaatcaccgttcagggggaagcaactaaattccccaggagcgacagacctaactcgccatcctttttcccatttgatgccacgtgaccttaatacttcttccacataagatcctatggatctaaccttagactcgattagtttggcctcaaaggtgactgtagggtcttgaggggtctttgatttttgagcttttgaagtcatgattttgaaatctaagtcacctagtgaaaaagcaacagtgactggaggtaaaaaataaaggcctcgctaagggaatgacagataaatttttaggctcaggccaagcagcttctcgcaaaaagtggcgttcacccttaattatttcttgtaaaaatcacgtatattgacctgaggttttgtcttgactagttttaatgagatgatcccaaattttttcatcgtttagttcaagaatggttttgggtatttgtattttgggtttgaatttaatggtagaaat

SEQ ID NO: 258858 - DNA, 613 bp, Cannabis indica
ccttagaagtggttcatctcggttatgtgtaccgagtccaacctgattatgccttaagcacataatccttaaatttcatttcatttagcatggcatggtatttatacacatattccactagagtaataaccctaggctaacaaactgttcctattagggtaattacccaaattctggttacaataactcgcatatatcaaattcacataagcgccactgcgcatactctacatgcaaactactttcttacctgttgtccagcaatagaaagagattccgaatccccgggtgctcctgatcaggtgccggtaatcctagtcacacaaatctgggataatttacacttaggattaaccccttattttcaactcataaaaattcaagcatggcttttacaactcagataatcatacagagctcggaacgagctttccaacgatataaagaattcccaaatcggagttcggaatcaaaagttacgaactttcgaaaattcaactcgaaactgcccaaaaacacgagggcgggccgcggcatgcccagaccatgccgcggcacctgggacaaaacccaggttccaccaacaaggggtgggccgcggcatgctcagagc

SEQ ID NO: 258859 - DNA, 622 bp, Cannabis indica
gacctgaacccagtcccaaacccaaaagtagacccgaacccgtaccctgtgacccaaaatttgaaccaaaaccggaagttgaccgggactggaagtaggacttggacttggaatcataattgaaatttgacctagatccagaaactgtcacccgaccaggaccagaacccgaactccaaatcagacctagaaccaaacttggaccagcactcggaactagaacttggacctagacccgaacctaaacccagatcggggtccagacctggacagaaatacggacacagacccggacccaaacttaaacacccaaacctagaatcagacccaaagctagacccggaaccggacccaaactcgagcccagacgaagatcagatccaaggacttagacccaaaaatgaaaccagactcagatcgggattagaacttgggactcggacccaacctagacaaggacccaacatgcgaacccacacccggagcctgatttggacctagactgaaatccggacccgaacccaaactcagagcaggactcgaactctaaccgaactaaaacccaaactcgaactcagaattgcaaatggaacaagaaccgaactaggactatgaccaggac

SEQ ID NO: 258860 - DNA, 1528 bp, Cannabis indica
ggtaggcggagaccttgctagtaattcatcaggagaggtcatacctcatagttccaaccatgttaacggtgccattccacctgtcaaccaagcaaatcaatcactgagacagccaggcgcttctgtattcgataggttggggaccactcatgacctaaggagtgatctgaacagaaggagaggagtagacgatcagattgtcaccacgatcgtacagcccggagcccgtgctcaaatttcggctaagaaagatactgatgtgattcaaatcgaccaaaaatgtcgagcatgttagcccagctagacaaactgaaaaatatgttccaaggcatggccggaaatagaaagaatgatctcgagctggaccgagcacgtggaactcccttctctcccgagatcaatcttctggcgttgctccacaagtttaaaatgccaaaatggaaaatttacataggttgagaagatcctctttcccacctcaagtatttcaagatgcaaatggatttgttgcaggggatacgaggggatgtgtgttgcagaatctttcctgctacccttttggaagccgcccagcaatggtatttcaagttggcccctggaaagttcaactcatggaaagccttctcttcaaaattccatgcacgattctcctcctctcgccaacttgcgttgcatctgggagacctggtcgaggtcaagcaaagactaggagagcctctccaagcgtacatcagcagattcatgacggaggcgaccaaagtgtcacgggtaactgaagatggaaagttgtctgcaatactagggggcattgaagtcctcggtaaactttggaaagacataaggaagaacggccggtagactcaatgagtgacttcttgactgtgctgaaggcttcatcaagctcgaaaaagctattcaacgagtggaaggtgaggaaaaagcctgacaagtcaaaggctccttccactagaacatccgcccaactcccccattacccaaataattcaagctcaaatggtaaatgttccaacaacaacaacaacagtcaagggaatgggaagaagggaaagttcaccaactaaatcgagcaagctccccaagggaatcaagcaaagtacactgcatttaaaatcttgactgaagatatagaaagtgtttacatggccactcagtcgctagccccgtacaagaagcccgcgcccctgaagaaagatgtcagcaagagagacatgacaaagttttgtcgattccacggagactacggccacgacaataacgaatgcaacaacctgaagcggaaaattaaattcctgataaggaaaaataacccatacttacaaaagtatgtcaagaccgatcagagtcagaggaacgacaataaccaagacttgctacctccactggtagatggacatctgcaagtcatcgttggaggcccgcacatagctggagatttgggtaaagttcgggaaaggtatgcccgaacggctcagcacaaacaagaagaagttatcctggccatagaaga

SEQ ID NO: 258861 - DNA, 554 bp, Cannabis indica
ctctgcgagacaatcaagaaatcacagcgccctttctgagtttgtctctatcttctcttctcgcttggcaccagcaaccctgttgtacacatctcgaagttgacatggcattctctcgtaacctccactttgcaaagcaacttgaaacattatgttgggagttttaattcctacggagttcatcgacctaacttgggcaagcaacccatcgaacacaacttgatataatctcaaaaattgtgcctcactcggtgaagccagctcgtgattatgtccgatgagaacatcgtacatcgtcttgtcttgtgccgaaacccatccgttttgcgtacatttcgtagaatgcttcccatttttccagtttgtcgagactcttgcctagcacgtcatgtatttcaatctaattcactggttttgtgatgtttagctctgctgttatggtttcccattcataagtttgttcgtcattcatgttggcttgttattgatgtctaagaatttcagatgaagaataagggaaagagagtgctcaggggagtgaaattagattttat

SEQ ID NO: 258862 - DNA, 839 bp, Cannabis indica
tttgtgataaattagtagcttgtattatattaaccagaaacaaatttacaacctaagccattgttaaaaaacaaggctgaaactagatcttaattagagcagatggagcaacaaaccatttacaactcaactcaaaaggatctttaagaaaaaacaactcagcacaaaaggaactccaatatagaacagagcataatattaaaagacttgcatatacattaaattcatatcaaatatgaaaactttgataagtaaattcgtacctcataagatggcttataactgctcatgattctcttaagtaagatttcctttcaaccctgtgaaatttttaattgatgcccaaacaaataataacttataagtcaagctcaaatcatttaaagtactttaaaatcatcacatgagacatgggatatacatctcattatgaaaatcattataaaaaagatccatacctagtattgtgcttgctaccacacataaaatataagaactgacagttttccaataaaaactaaagaactaatgcacatgaaaggtatccaccttaatagctagaacgagaatgaacctatttcagagaggcttctaatatttccagcatataaatacattgccaatcagagtaatatacctgttattagatgatatcaataccacagtccagttttgatgcatatttttttactccaatccatggttcttgatcacccaaaatgaagataaaattcttacaaaattcagtgaccttttgaacttttattgttgttagaatattagttgtatattagttgtaaaaattagggtcacttgtattttgtagtttcctattttgt

SEQ ID NO: 258863 - DNA, 4827 bp, Cannabis indica
ttgtagcaataatctaagttcaactatacttttgctttgatggtgtatttgtaccctcaaatctcaagctagaattcctttcatagaatttggaaatggcgaaaaaggtttattataatgaagcttatgtgagggcaaggtttagaaagtagtctttagtattgatacgaattttagtttcattctgcatcaaggggcacaaatgagcttattgtagaggaaacatttttcttgagatattcagaattaggcttcggggtttcttcctatcactcttgtgtgtccttgcatttagtatttgatgcctttcaatcaaacattcaacatttaaaatttgatgaactgtctattacaccaacatgttgttgcatttgtttaggtttgtttttatacgttccatggcttatgaaattcattgacaaagttttagatggtgttgcttgactcattgagctcaacactatctttctactattaggttttagcggttagccaatgagtcgagtttgatctttgtatgattaatgcttttgtctaaataacatcagatgatgaatcttatttggggttgtgcatgtaggtggattatggacagccgtgatgaatacaaagaggagcgattggcatccataaatgacgagttcaagctctaccgatgccataccattttgaattgtgcccgagcctgtcccaagggcttaaaccctggaaagcagattcaaaatattaagaagcttcagcctagtttataatttgtgaagcttgataaacgtgcacattcatggattaagctggaatgttttattgaggatttgtcaattgtgtttgagctaataatacaaaagcagctattgtactttccatccttttagtactaaaggaagcattcaagcattaatattatctttgttttgaataagtgttaatagaagaactgtggtttcttatgcctcagactgtgcctgtaataatcttgtgttagctatctccatttgggttctaccattaccaaatttttgaaaaatcattgccttgttgtgtcttaaggctgactacttgcccatcttagagatttcaaaagttacatacttttcttggctctcatctgtatctttgtagtatatacaaaatcttgttacaataatttccttcatcgctttgttgtgatgattgttcaatatagattcttgtgtctacacaattatgggatgaatcttacataacattgtttttaggcaaagaaagaatgtatgttgagaatatctaaatgggttaggttctctcatctcctacacctcaactaactactataaaccacgtttatataaacatatggtaagaaaagtttaccacagttgatatagctataaaacatttgtttcattaggatgaagttggcatcatctagtgctactatacttctcatagtcattataatttggaccaatgctgttctatcaagtagccgcatttcatttacccccgaagatcccgaaccgtttccatatgtcactgtaacaggtttttgtattgaatttcaacttgtacagaagaaatttggcaaaaagttgaatgctgaactatctcttttttgtcttgtagggtgcaataacgattgtgatacagcttgttgcaattgtgacataaggaaagagcctccactttgtgttcaatgctgtcaagaatagccttgaccataaagcttacaggtacgttttgttataaacattgaaacaaacacaattttgtgagctcacgagttgtaacttgtaacttatctggacaggtaaagagaccagagctgaggatgattttggaaaatgagtgatacagttcaaagtagatatatactccaaaaagatgacatttttgatgtcatgaaagttacataccaagtccttaatctattgtttgtcatctacttaatagtctatgctttctaagttctagcaccatttggtgtctcttttgtgcattggaaaagcaagggcttattattaatttttattataagaacaaacacaattgagggagaaaactgaaaattcagatgtgaacaatacttgaataataacaggttaatagccattctcaaaattcaaatatcagatcaaattgaattaagtcaattgtacaatgattattggatcaattgatggacatcatctcatctattacagaaaaattccacaaaccgagcatgaaagcaaaagagttttactgatctacaacaaaatatattgagaaacttttcttaaggccaacagctcttatgatgataatttaatgaaaaattaactctgactaccaagtaagataatgaaaaaatatacagagattataccctccttgaaagagcaaggaatacagcagctgaggatatctgcaccttaagatcagcaaggtcaacatcatgaccaccttcaacaagaccccacttgtccacctgacacaaatatatgatgggtatataagaaaaatgatttcttgagtctgcatcagggttattatcacccattggtgatctaataactgatatagttttaattttatttgtgataaaagattattgaaatttcaaacagtctagcttgagaacttaggtaggtatgtatatgaaagcaaggaagataaacacaaataaaaagaacctgtaagtcttcttcgagtctgatcaattcaatagcttcctcaatctccaatttcccacgaaaaatcccgagggcaattactaaagagtgtcctgctgaagcaagagcatcaattgatgccaattcacagtcatctgtattctttaatacattttctatggcctttacaagaccatcctcctgctttccaccaaagaaactggagtacaccacgggcttataaccaaattctgatgccacccaatcaagtagaggatcaattttctccacttgcttatctacaaaagttttaaggccatcacaaattaatgagttagtcattgtaagatgatccccatcaaaattaaaaaccaaaggaaaagtccacattatcatattcatatagatgcttattgaatagaatacttcctctcaaatggggctactttctaattcaaatttgtaatttagaaactactcaaacgattcctagtctcctaaatatacataacagtgctcatatacttgaagaaaaacgcaaaaaaaaaaaatagtacagaaacaaagtaccatgaacgtatttcgttagattatcatcctccggagcacggcaaaagacaagatcttgactaaatttcttcatcaaatgctctataatctttgaccttgtaagaggaactctttctagagcagtacaagcaaacttcatgagaggcattgtaaatggtctgatcccatctgtaagctaaaagtgttttagaaaaaagaaacttcattaaacaacctccaagtagatgaaacattcggctaagtttcacaagcgaaaatattaactctccacaaaaccctctgatctaaattagcattaatgaagaaaatcacttaattttacaataaaacaattttcaattatgaagcacacccattggagtgcgtttatgaagcacacccattggagtgcgttatcaaacattaaagcccccaattttcaatatagaagaagacgcaattatacaccacacctggtattcccactcggcagctatggccttagcaagagataaagtaggaagcttgagcggcctctttgatggtgtctttaaagtccgataatcaagcatcacagtccaaccattcccatcatcagcctccctcgtggtgacctgcttgtaaaacctctttcccacaatagaaccagtcatgaacgacattggcatagtgaccgaggatccggagtccctccttgaattcgagcgcggtgccttaaggtgtatggcttcatcggtactggtggtattgtcatttcggtgttcgtgatcgtcagatgagaaggtgaaagatgggtcatccgattggggttgctcgacggtggcgacagagttaaagttccgaaccaatgaggagaacgatttgaagatattagggtttctgattgaatttaaggttctgtttatgagtggattggccattggtgttgattgaacgaagttttttccggcttggttatggagtttcgttctctgattttgctagggcttagcgacttcgagacagctattctaagcttaactctcttaagcactctcaaagtgaaatttggtgaaataataacatttccaaaataacataaataaataactgttttgtaaaaattattgataggacttttgttaaatgataaaataaattttatatgttttaaaataataaaagtaagattttgagcttaatttttgataattttttttttaatataactaacttgaagacaattcttaacacgaacagataaaaaaatgtaaatagttttgtcataacacccttagatcgaattattattaaatcttattttgacaaaaaaatcagttcaggttctatttgtactattttaaaaaatataatatctattttttcatttaacaaaacactgactccaaaataatatttatcctttaatttattggctttggtgacttcaaaattggcctttatttttaaaatagttaaatgttctttgaagaattaaaatctttcaaataaaataaaagttaatattttttcaaaaaaagttactttttaatatattttcatcttgttaattagtttactagccaaataataatacttttggctagttatttttaaattttttctttagtttatattttacttatttgaattaagtggtagaatctaa

SEQ ID NO: 258864 - DNA, 535 bp, Cannabis indica
tgaaatggccaattccattgctctacaccaagcaatgtaattttcctgtccagtgagcaattgggataccagaatatttccagggttgtctccatgatgcagaaaataaggatcggatggatcttcataaggatttctaggtctgtttatttgagtgttcaaacccgtacctggtgtttgaatccgattgtcaccattgtcgatttgagcagtggcttcattgtcttgttccattccttgatcgttggacatggctggacagaaagaagcttagagaggcgtctcaagaactcagagaaaacactgtgaaggaagaggaattgtcgattgaagaaacgaattcttcaactgcggacattgaacgtcgccggagaagaacagaaaacacggcgaggaagaggagaacgaatcaagatcgaaaggaagtatagcttccttgctctgataccatattgcggaagaaaagggaaaacattcaagagattttattgtattgaattgatatgtttacaaaaggaaataagccttaaatagg

SEQ ID NO: 258865 - DNA, 622 bp, Cannabis indica
gcggaggaaccgaagaagaaggaagaagaaaaggaagaacaagatcaattgaacgtttggacgtaagtgaataagatcaattgtatatatttcaattaatttctgagtaagaagcggaggcctcgtgttaatcttgatgtttaagctttcattgtttgctggcagccagagcaccaggatcgtggtcttggacctgttttggttgctgcaatccctactatctagggtaaattgacaagtgaatgttgagtcatgagtccgtacaatgcatttcttgatcatgtgacttctctaattgcaactattttactttgcaatagataattgttatctttaaagtctgctcttgtaattcttaatttacaatatttgaagctaatgtatttatagtttgagtagcaacgtagtcacatctatatatacaggtggatgtcggtgttcaaatttgaggtgatgataattgttattttgttcaaatttttcaaatttttatgtttgtgtttagcttgtttcaatggatgctccgtagatagaaggaaaagaattagagttaagtttttcagggaagataatataagagaatatcaaaatgtaggagggggaaatggagaatatcagccaa

SEQ ID NO: 258866 - DNA, 803 bp, Cannabis indica
aaatcagtaaaaaaaaatgtataattttaaaagaggaaaaaataaattttgggcccctgggctgggtgcgccctaggcacaggcctagcccgcctatgcccaggaccgggcctgagtagagcagtaggtaaactaagccatttcagccatggttttacattatatttctcgaaagggaaagcaataacagaaaaggatagtggtttcggaccttgatgctgagagaaatctcaatatacatgcatgagtcacactctcacactaacaaccataataaacctttcctaccactcacaattacaagaaaggtccctcaattcacttgacgagcaatataaatttaatcccctaagtatgtgaagcggataggaggcctaacacttacttgttttgttgaattgtaggggctataatattggcattcgcctggcctggcaaagtcaaatgtctccggttgtgttgacttcaaagaattttatattgttataataataattttttattgttatttatgtattataaatttattaaaagtaataaaaaattaccaaaaaataacaattattgtaaaaaaaaaatttgcgtcattattattcaaaacccatctatggaatttgtgtcattcaccatcgactctgacgtctcctccatctcaaaccatgacagtgatgatgaagctactgcttttcttaatttactaattacttttctcttttcatcttctatatatgtagtttttatatatatatcgcaattgtaggagattaagcatctttaaaattggcatcaaatgtaaaatttct

SEQ ID NO: 258867 - DNA, 838 bp, Cannabis indica
aaacattgctgaatctctaaatgcagcaaacttagcagctagagagctaccaatcacaacactgatggagtcattgagagctttgatacaacaatggacatacacaaacaggaaaaaggcacagaaaacaacaacatttttaacacctacagcagagaagaaattagtcaacaactttgtggactcattgacagaaaatgtaaaatctcttaaatttttaagttgcattacggtttcttaatagtttattgtccgtttctggaacataataacaatttcataaattgacttaattcgcaggtaaagccaataaacgagaccatgttcgaagtcgtagaactaaccagatcatgggtcatcaacctcaaggagaaaacatgcagttgcaaccaattccaacttgacgagttacaatgtgctcgcttgctgttataaaagagatgaacttgaatgtttacaactactgttcaggttattacacgacaacaacatggcttgaaacatacagcggctcaacatattcggtacacaatcacacagcatgggatgtaccataaaacataaaagatatcattgttctcccaccgaaccagaaaataagatctggaagaccaaggaaatgaaggtttttatctgaatgggatacaaaaaaaacataacaggtgcagcaaatgtggtcaacacgggcacaaccgaaagacatgcaacaatcaagcaataaaatagatacagatgaattatttgaattgtttaattctgtgtgagaattcaaacaggttgatatgttatattctacacacatgggattttattttttaaaaattttaaacagtttggt

SEQ ID NO: 258868 - DNA, 2256 bp, Cannabis indica
ttttcttcttcttcttagtgaattgctactggtttattttcttcttcttgcctagcgtcgacattgttctaaagtcatcggcgacaacccattccattttggattgtgttctagttttgacgtgctctaaagtgcgtgtctctttattattataatttttttttgcattattcttcttttttaatagctaaggtgaatagttggttttgttgtttttgtagctagttgagggttagttgattgatgattttgtttgaaccttttttgttttagggtgttggtattcatgagaagagttcttttattgtgtatatatatatgtatattattgtatttagtttctcttataaaaaaataagtgttataaagagagagaggaatcatgtaatggaaggagggcttataatgtttttttgattgctttcgaaagttctaatatctctaaaagctaagtaattgaacttaaatgcatattacgaagaattaagacaagaaagctaaatcaatgaacaccagaattacaagcctcctctacattagaaacacattcctaccaagtagtgcttgggtccctaagaaccgagtaaagtaacatccactataaaatcaattcaattacatacaccagttccaattttacaaatcaaactacataatctgaaatgactttacacgatgttacctaattcttgaacacaatcaagataactgatctaagcacacttagatccaagaaaataagctctccttgcttctaagttctaacaagctgaagatccttcagcagttcagtctgaactctcctcgaacaacgcagattcgaacttcttcttcaacctcttgaagattcactgaatttttcatttgcatataacacagaaacaccagagaaaaaaatttccctagcagagcaagaatcaaaatcgattctatcaaatatgagagttagttagaaaaggcaacaacagaatattgtatactcatttgaaaacaaaacggctcggctaactaaccaccccagctgaatccaactggaactgacttatacaagaaaggaatataaaaggtgaaagctgacatggaaaacaataaaaattaccaagacaaaacagatgaaattgatgataacttagatgaccaatgtaaaaagctaagacaacaaacatggaaagtcagaaaactgaacaaacaaggaaccacataacttgccatacacaaactattgcacttacaatctcccccttggcaaattatgatcaacgaccatgcacaaaatacagaaaaagacacaatagcaaaaacacacaaaaaccaacaaaagactaatccaacaaacaacaaggtaaagtttggcaaaagaagcacaaccaaccagtcaaaagtcgaagcacaaaatatggacaatgtgaacagtctttatacaaaaaataaagtacttaatctcccctcgatgaccataattattcgctgctggaataggcaacaagagaggcagcaaagctatgtaccatggtaacatcaccaacatgagcagaagattgagcagcattcgatgtctccccctagacattggctgttgtggaatcattctaaccacgtacactaagttgctcccccgaatagcagcagtagtagatccagtttgaccatgagcaacatcttgctccccctaaacatcagtagaaactgtcttttcttcagcaacaacactattagaaggaccatgatcatcacccacagaagatggctgaagtgtagatttaggaatgaagaaaacatggccagcagtacagatggatattaaataaattttatttttttagtgattttattatgaaatcatgagaattaggttggactaaactaatgtttattatgtatgttggattattaagttttaaattatattttttatatatatttttttctttttaatgaaatcaacttaaatggtagcttaaataaattggatggatccattttaattcaataaaaaactagtcaatgcatcgaatggttggaatcgatccaatccaatacatccattggatcggatgactcaattcgattggattggaccggatgacaaaatttaatatccaataaataattagattggatcggttgagtttaaatccattgaatatgattcaataaatacatctacacaaagaagaaggtgtagacattaattagaagaaaaagaaagctgataatgaaagatatatttttgaccaataattaattacttttgca

SEQ ID NO: 258869 - DNA, 3535 bp, Cannabis indica
taagttcccttattattaaggcacacactgaaacctagtgtatttaatttatttctatttaaattctcagtatatgcttataatttttgtttcttaaaatagtttattcatctttaatatgacatattttcgatagttaaaaatgattaatgcttggttctatattctatttaaaataatattttttgactttttgtatttaaattaaattatttcacatttaatgtttagaagttataattttaatgtgagggaaaaactattttttgttaaaaaattattagtttgattactaattaaagtatgagaatcaatataaatataaatatttttatacttaagtggattctgaagccttaaaaaatctctaaaatatctttcaacggtaaaaagattttattttattttgttacaaaaaatctcaccattttcagaactaggttagagttttaatatcttatattaaataagtatttttttttaatctctcgcaattttcatggttcgacctcgttcttcatgatgtttacactataataaagattcgtgcacttacgagttaattaatgcaaaacgtaccgttttggtcacaacaccttttaaaagaaagataaattatgaaaattaaaaaaaaaaaaaacaataccccataaaatgaagagaaagagttccatggacctacaaaaggggaaaaaagaagttagtataaaaagaaataaacaaagaaaaaaaaagggtttgcaaacgaaatagaaggagatatggttggttagtactccgttcatagagaagtaggtagagagattaatatatggacataaagagatcaatggatgattagagagtgagcacaactcgatttgccaatgagagtttatagggttgaaacttatttcacagggtttacagatttgaaactgaattttacgggttttgtaaaagggttacttcactttatgatgttattatatatttttgagtttaagtttcttttattattttatttttaggtttaaaactgttttcacacttatattttatttttagattattattgtgttattttgattatatttgtggttttttatattcttgggtgtatgtgttttttttttctcccatttagttgactgatgaaaccaatttcagttatgtttattgttgttgtacgacgaaattagttttttttttgtcttcatgatagttattgttgttgtatgatgaaattgatttcaatttattttttgtatttttgttcaaatggaatctgattcctccagtatgaatgcatggaagatgttcctaaaattcaagtgctgattgtgaaaaaacttcttccagttaaagttaaaattcataagaaggttattcacaaggaaaaaaaatctcatgcaagttctaagaatttatctttggtatgattttttttgtgaagtatattaatttgttttaatttatcttcttatagttttatatatttatttgtagtttttgaaactagttttttaagtgtcttatgtctattcaatttcttagtttgctgtattatataattagttttcgtgtctaattgttggtttgttgtttgcgtaattgaggtttaagtttcatttttattttgttattttaagaaaccgatttcactgtgttagatttttaattagttgataaatgtaattggtttctgtgagttagattccaatgcctaactctagtgacgactccaatgtcaaactccagcaacaacgacaactctgacaattttttcgataatgcaattgtcgacgatttttcagcactggcaacaactccgacaacttttcggacaccaatagtaactccggtgacttttcaatatacctatgtatagtaattttaattaagtattatttaataatttttctagcttgttgtggttgtctactaaccttatctcagttaaaaaggtaggcacgtgaatgtttctgttacttgtctcgtatgtaatgaaagggctgaatcaattcttcacattttggttgattgccaattaacaaaggcatgttggcagaaggttgatgaggctttatgaattttctcagcatctaatttcttaagttagtttcatcaagttttgggaagtttttctaagtcaatagtgtgtcatgttgccatgatttgttagttcctttggcgggctcataatgggctggtggggcatagtaaaagctctgttgcaaatggcgtggtgggtgtaacgttgttttactttaattaatagaaggatgctcatgaacggtcaactaacactttagcttctaccgctgtgttagtggagggcattggtcgactccgagtgttgatacgattaaagtcaatgtacgtagatgcctctgttatttctggagtgaaattttttgggattcgatggcttactcatgaccatcatagtattgtgttatttccattcttcgaagtagatgcttggccgagttcagctcgttgtggctgaggcaattggcttcaaggaagctaagttggatcaaacaacaaggattctcacgtgttgtggactatgaaaataagaattatgaaaattaattaatctaatatatgaagccaattttttgttttgccattcatactttgcttggttagtttaatcatgttgacaaatgaatgtctatccatctaaaaaatttggttgggaccaaattgaatgatgtgaatttgaagatgagaattagttgctttgttgactgttgttgaaaatcatacaggtgaaaaagaagtggattttcgttaaggaattaaacaattaattaatggcattagaagttcataacatatgaaacaaacttcacctttaatgagtactactcataaatatgtgagttagtaaagtttgtttgtttgtttgtataagcaattttattgaagattgtatttgtctttgatttttcctctctattagaatcctttgataatgtttgttgttgagtagaaatgagggttcaatttagagttgtagtttacacaatatcatactgattcattcgtagtgtttttttttttagaaagggattcattcattcaaagtttgttaaataagatttataattaaggtgtaattaattatttttttctcaacaaatcccaaagtgatttaagtacgtcagcatatgacatgatgactctaaccatatataacagaaataaatttctcttattcttgcaatgaatttagcatggaaaactcagaatattctcaatacatttccaaattaacgcgctaatgagtttcaggacaaacactttaagtacaacattctatatcttgatcatcgttataaggattatttggaagatttacaaaagttgatgacaatttggagttaagaaaccaaaaaagagaagaagaaaagtcaaagagagtttgattgagtggatgcaaagcttgatctatctaaaaaaagactacttttgaggcaatgaagaaagatgtgattgataatcttggcacaaaacaaacatatatattgttggaattatttta

SEQ ID NO: 258870 - DNA, 619 bp, Cannabis indica
aaaaaaaaaatatgtattttatttaatcatgtaaaaaaaaaaaattaattaaataaaaatttccaaccttaactaaattttcaattatttaatttcgaaaattataaataaaattcaaaattaaataaataattaaaatataataaaataaaatttgaaaaaatatctaatttaagttgttatagataaatctaaaatatccaacttaaatatttttcaaacaacatttaattaaatatcaaaattaagttgtaaccacctaatttaaaaaatattccattttaaattgatctttatttaaaaaaaaatcaatttaaaaaatatcttaagaattcctcaacttaattttgaaatttcaaaagatattcaaatttaagttgataaataaaatcagttagaaataactaattttcaacttaaataggaatatttaatgaaataattaaaatcagcttcagaaagaatctagttagttataattctatatttaattaaatacaagaaaaatacatatagtttatatagaaataatttcataaaacaaagtgtgtttttcttaaattaatttcaaaatatacgaatgaaaaataaattccatttattttgaaattaattatgt

SEQ ID NO: 258871 - DNA, 669 bp, Cannabis indica
gatcgtgatgataccattcttgagtctaaatctaaaagggaaatttgattaaatatgcataaaatactttaatatttttttcctaaatccatatgtattaaaattggccatatatgaccacattaccattttccccataatacccctcacatttgaaataccaatcagcctcctctctctccctctcgctcgaaccacgctcaaacccacggtgatggcgcagcaccccattcgacccacggcgaacccaatcgacgaccgaacccacgaccctatcgacgaggcaatcgatgactggatccacgacccatacggtgtacgccatccataacaatgtcgaaggtgtatttttattttctttttttttgggtccgaaagtgttaatcatttatgtcggatctgtgaaattggtaaaatattgaggaagaagaagaaggcccgatgggacgtccgatgctagtccgatatgggtccgatgggcccttcaattggtttaaatatgtgtaggtccgatgggtccgatgccagttcgatgggtctgatgcccagttcgatgggtctgatgcctagtccgatgggtccgattcccagtccgatgcccagtccgatggggtccgatttaaatcgggtgggaagaagaagaaagaatgggaagagagagggagttga

SEQ ID NO: 258872 - DNA, 738 bp, Cannabis indica
tatttctctaaagtattttctttgatggaaaagaaaatactttagagaaatagtgtatttttagactcatcttaaaatgagtttagggtatttataatttggcccctaacaaattataaattaatttatggtatctacacattattttcataacaatttaataccctttgatacccatagcataattagtcacttaaattgtatcgcactatataatagcatatacattatacatatatatgtgcccagagtaggatttttaatctaacaatctcccacttgggtaacatatgttaccttataaatgtataaccttatgagctcaaaatttgatattatgtaaaggtattcacaacaatctcatccatcaactatatatataggatcaaagtgttttttgtcatgttgtcgagtgaatttcgcaacaccaaaatgtattatttaattaatataaaagagaattttcagggaagtgacaagtgcgagtattcgacctagaatggcgagtactcgactgggaatgcaagaacaatcaacaaggctggaaaatatcaataagacaaagaattatagtggttcagtcagattgtgatctgcttagtccactgtagcaaaggattcgtaggtgccattttcatggtggatcacccctttatatacaaagtaggtgtccaatcggttacataaggatcacattcattgttaatccattatttacatattgaattgcaataatta

SEQ ID NO: 258873 - DNA, 525 bp, Cannabis indica
aagataatgtcgccatatcttcacagcaaaaatcacaacagcaacctctaaatcatgagttgggtagcgctgctcataatcctttagttgacgagaggcataagctatgactctgttagcttgcatcagaacacatcccgaaccctgtctggatgcatcacaataaacaaccaatttctcctgatctgatggcaaagctaacaccggagctgttatcaaatgttgcttcaactcctgaaaacatgcttcacatttgtctaaccacacgactcgctgactttttttagttaactcggtcagtggcatagagattttagagaatccctcgacaaaacgtcggtaatcaatgttaaataaaggaaacttcgaatttctatcactgattttggcctcggctagttctttacggactcgatcttgtttggatcaaccataatcccattctttccgacaatatgtcctagaaaagatacctcggacaaccaaaattcacactttttatactttgcatacaacttgtgatcc

SEQ ID NO: 258874 - DNA, 775 bp, Cannabis indica
tgtgagtaagtgattctttttcttctacatattatatgtatgctatataatattgtgttatctattcatctcttctactttcatatatatatatgcgatatatataatgtatatatatatgtgtgtattataacatatatttatttaatctctttgttgtccttgtattatttttacaattgagttttgtatatatcttgatttatctttcattgtaataaaatctttaacattttgtttagagaagaaaaaccccaaaagaaccagcctttcagaaaaacaattttgaagaaaggagggagaaaactttattaatcacatatctcatgcttatacaagattacgaaaaaaaaaaaaaaagttgggtagtccgcccaccaaatagttactaactaataccgaaatggtgtatttagctaaataatatgctacaccattgtaagatctataataataaataatagaaacttccctaaagcaagcaccaaccctaaagagctatcgaaaggaatatgattattgaatttaagtaaaatacacaaacaatcagacacaaagcaaatctttttgagaccaaacttgatgcattgaaccacaacgctacggagtgccatggcctccgcagccttagcactgaaagagtccaccaacacaacgccccctcactgtccatagcctcatcaacattaattttaaggaaatgttaaaatatttcaaactttattttatttataaacatgtatcttaaaaaatcaaatcaaaataaaaataattt

SEQ ID NO: 258875 - DNA, 733 bp, Cannabis indica
ccctgtggaatcgatctcactccaggtgagtctactacttaaaacagtacgtacacttgcgtgtgcagattatcgcaacacaaatcttcccaagctacgaaactcgggccactcgtctccacccctttccaaagaaaacttataaaaatagtcactacaagaaatgtcacttttgctagcacatttttgtgctggcaaaagttagtattgcgctggtaaaatagaatttacttctagagtttatgtattgaagaaacttccatgagctgtgaccaataaaaataaatagcaatttaggacagaatttaccagtattgcccgacccgcataaaacaagttccttgaaattcatactttgattctttgcactatattttctatcaaaatatcacatgatcagcaataggtaatttttttggacaaatcgggatgcaaggtatcagaaagacaacggacccttccaaaatccgaagcctccaccaccctttgaacttcactttcaaccatgtaacaacaaaaattttcaaattttgcctcacttggttgtagcccagatgtttgggagaagaccttgagtccttgaagcatacagtagatatatttgaaatctccatgaccaaaaaacaaaacatcattaaacaaagatgattcaactttaattactcacatcgtccgtggaatttaaattcttctttctcccctactttcattgtaatatctcaggattagtaaa

SEQ ID NO: 258876 - DNA, 769 bp, Cannabis indica
aaataaataaattaaaaataaataaaaagaataaaaaaataccctaaatcccctaaatttcttctcttcttctcgtgctcttctctcactgccctagccgtccaccaccattttgacccacaaaaactctggcgtctcccccatgtccgagatgaagggtttcggtgttgatgtgagggctcacacaatcgaaatatggaggaagtggttagaggaagctcgctggggcggagacgacgatgagctcgaactcgacatgtggaggtttctgtttccggagatgacgaccaaagctcgttggggcggtctttgttgacggcgagcacgtaagagatggcagtggagaggtttgctggggcagtctttgttgacggtgagcacggaggagatggcagtggagaggttcgctggggtggggcggtctttgttcacggtgagcacaaaggagatggtagtggagaggtttagggcgatggcactggaacgacaacagttcttgccccttcagtgacttctccactgttgcacctctctctctttcatttatttcttttgatagatttaattgttagatctaagattttttttctatggatttgaatggagtttgtttattttgtgggatttgaaactgagatcgtggtaggtgtttatgtttgtttgattgtgtttggatatgagttatggggttgtgtttgaatcaagatggaggtgatgatagtagtggtggtgagcagttgtggtttcgacggtggtgatggtgtgcatt

SEQ ID NO: 258877 - DNA, 957 bp, Cannabis indica
catatgtcactgacgcccgtacccttgcctattacgtcgccaggtatattgcatcacccaattaggtgagcccatatattgtgtccatagtatcattatattatcattgcctaatcagacaatcgataatttcagaacctgtcatgctatgtggtatattatacttttcttacctcaagttctggatcaggtatgttggccgacctacttggagaacgatcgataatctcaggccctatgtcataacaataataaatcaataagtgtttatcccaaaacaccacctaacactcacgtaagacaatctaggattttctatggtataaatacactaaaatgaaacttatattttggctctagaacatacaccatatcgtagagctcgtcgcaagcttcaaaatggtatgtagaacgtcataaacggacacccaagtgaaaagttatgataaaaatacgatttctgatctcgtatgaatttctaaaaactatgaaatacgaaaatctcaattttcgcactcactgaaacactaccaaaacttttccaaatcactccaaacttcacagagcacatatataccataaatactaccattcttacataacagaaattaaaatcagccccttaaatagaaaacgccattaacgctcaaacttagctttaaaaagtttcaaaatcgatttctaacccaaaatcacctcaatttcagcaagaaaacatcgaaactagtctcatgactacccgagaacaatcctataaggtaagaaccttcataactattctaattcacaaaacccctatacaaaacaaatgttattgaacttaaaacgatattaaaccttaccttaagcttccctactctgagaattcgctattctgctactaacagagctaagatcgctaggtttcggattgaaaataaaaaaaaaatagatataggaggagaaagttttatcgaa

SEQ ID NO: 258878 - DNA, 1024 bp, Cannabis indica
tgaaaatgatttgcaaactatttatttttcctttttagacaaagtgaagcaaacaagaggcaaatataatcgtttacctttcttttcaggtgccaaagattgtcatatgcccatttcaacgagatataaaacaactatttaaaccatccttagttttgctaggaatatcaagttaggtaccgacaatactctcacacactatttttttcaatatacatgacatccaaacaatatcgaataagtaaacttttccaatatggaagacaaaaaaagattgactttctttgaaaacaaccattttgtttttcttttttttttttttttttgttcgtctttccatacttaaaatctactagttctacttgttggagaatttgtttcttttagagtggcaaaggagccatatttctctcttcagtaccatcgaatgcgttcttcttctgtttatcgagatgattgttggcagtaccgtctatgacccatataaacatcttgtgcccattttccaagcgacgacccagtgttagtgcaacaaattagacaaccttttgaaccttttgtgcttaagcctaataaattactgtaagctggaaaattactaacagtccacaataacactgctttcagattaaagaattcttttttcaaaccatcataggcttgaaaaacattctcatacaattttattaaatcatcaatcaatggttccaaagatacattgatattatgtctgggttgttgcgggcatgatatcattaaagaaagcatattaaatttccttttcattactaaccagggaggaagattgtacataacaaagaagacagaccatgaactatgacgactacttaaagatctatgtggatttactccatccacagacagaccgagacgaatatgtcttggttctgatttaaattcaggactcatgtagtttactttttttccaagctttggaatctgtaggatgtctaagtttcccatccttacctctcttggtttcatgccaaatcaaattttcaga

SEQ ID NO: 258879 - DNA, 957 bp, Cannabis indica
gtatgtatgtgaatgttaaaatttatatgatttttttgtaaattaattatttaatttataaattgaattaaaaaataaaaaatgagaaattttgtcaattaattaggtaattaatatttataaattttgaataaaaaataaaatgagagaattaaagagagaacaaataaagcaaaacgtgatattttttttaaaaaaaaataatatttttaaaaatgttaatttaaaaaaaaaacaaaagccaaaaaaaaaaggcaaaacgtgatattttttagaataattattttaaaaattttaattaaaaaaaaagaaaaaattaaaggagaaaaattaaaaatttaatttaaaaaataggaacaaaaatgtgggtagttttttttattaagatgtttgtttttgaaaggtttttttattaattattgaataaattaatattttaatgtgattaaaaatatttaatgtgattaaaaaatgtgaaaaaaaggagaaaaatattagagtagaataaagctattttagaatgccccatcaccacctcatactatactagatgagagttacgagacgagtcacgtaaatattagttttatataagttctagtagtttttgtttaagaattcagtaactaatatataaacatataatatacacattgttattaaaatgttataatgggaatttcaacccattataatggtagatagatctatttaagtttttcatatttgtaaagattataaatctaaatttttaattttcttgatttaagattttgaattgttctaatttatttgtttatgaatttaatgaaatacttgaatatttatttgttctgattttgaattgttctgatttattcatactagaatatgtatattaatgattgttaatgaaattagtctgtagctttatgtttctaaaaaaaaaggtaatttttaatatagagtttaaatttt

SEQ ID NO: 258880 - DNA, 634 bp, Cannabis indica
tggttcagatttgaattcaggatttatgtagtttacttttttccaagcttgggaatctgcaggatgtttgagtttccatctttaactctcttggtctcatgccaaatcaaattttcaaaatattctgcactacatcatttcagtcgtggaatcaaaggcatgtaccacatcactttttcagggataagtttcctattctccatactcttgtttactttatggtgagataaaccacaagtcaggcaataatccatgtctgcatatttccttacgatataaaatgcaaccgtacggacatgcatgaattttttcatactcaatcctatggaatttaaagttttttttcacttcatatgtagattttagaaagcaattgtcaaatggtaagatatttttaaaagaaactaaaaatttagtaaaacatttattgctcactccattttctactttgatgttgtaaaactttaccattagtggtaatcttagttttttacaatcatcgaacaagagtttatctacttcacttagaaaattattgaattttttaggatcattaagaaattcctcctgtgctttgttaagcaagtccaatggataatcatcgaaatcattaccctccatatcatctaccccc

SEQ ID NO: 258881 - DNA, 612 bp, Cannabis indica
tgggagagaatattatattactaatcataacacataaaagggaaagccaaaaaaaaatggataaacatgatctaaaactccaaagcaactgcagataattaaaaatcatacccaaacaaaatttaacaaatattgacacaattatagccaaacaagtcaaagccacattatttctaacattcaatttcacaaaccaccatttctgactctcgattctgtcatgattttaaaaccctcatcaaaatccacatcaaataatcgatgctcaataaactaaaatcaataaacaaaatgaaataataaatggaacacagccccataagaattaagaaaatcaatgaagtcaaggtcataaaaatagagctggaaaaagagttttgagatttaacaatcctcaccaatttggcattgatgttcttgtttccactggtggccatgggagattacaactcaaagatcggaaatttctgaagaagtagacgccgaatttcgatcgaagcaaagggaaacaacgatccaaattaacaaaccttcctctttctctctcgttgaaagaaaaacttacacgaaagcaatatgttttccttgttgttttttatttattttattttt

SEQ ID NO: 258882 - DNA, 742 bp, Cannabis indica
agatgctcaggttagactatatatgatattatatatatatatatatatatatatacataactatatcattttatgcttcatttgtttaacatattattccttaaaacaattcttctgggaatacttttgggactttgtgtaaagggcctggcaatacaaaactccctaagtttaagtggactttatcactccctttccgtttgtatctgttgcaaattccgattttagaataaaattctctatattccatcgttcatacttattgttcatccatttatattatatggaattaaggaaaattagcttcaaaattacataattgttttgttattgtggttatgacaggactttttcgggagtcaaaatgaagagtgagtacagagaatttattgaagcaaataaataaataagaagagactgaaaagatatgctacattggctgaaagtttgctttctgtgattcaattttgttctctttgcaattttaaattagcttgtcctaataatcccttcaattttcacattggatctagttgtcattcattgatcaattacactgtaaattttactcgaagattttgccaaaatgcattaatgcggattctatgtttagatttcttgacacgaaatatatactggtcgtgttagggttgaccaattaaacatgtcaatttgcataacatgaatacgaatatgacacgataacacgaatcgacacccctaattttcaccatccaaatta

SEQ ID NO: 258883 - DNA, 655 bp, Cannabis indica
ttgtctcttttgttaatcgttctgcaaataaggctgcccattgtgttgctagggcctcttatttatcgtcagatcgaatgtttaatgagctgaatgctccttctttcttgtgtgacattgttcaggctgaggcctgattttattgaaactttttattcaaaaaaaaaaaaatatatatatatatatttaccatataaatatggtatgttttaattttatacacttaaatactacatattttattttgattgattaaataccttaagttacatttcggttacttctgtcactaatatttctgttaagtactggttgagcaattgagataccacatgtcaatatagtattggttcacatttatttaattttttaaaaaactccttacatgattaataaaaaataaaatgaaaattatgatacaacaactttattttaaaatattaaaaaaaattagaaaaaaatctaaaaatcaacgaacttgtttttcccttttaaaaaatattaaattttttattcaaaaaaaaggtaaatagttgcaaaacccccaaaacttttatgttagtttcacttaaccccaaaacccaaatttgtgcggtaaaacccccaatactcgtattctgttagcaatttaacatttccgtccattttaggtgtt

SEQ ID NO: 258884 - DNA, 563 bp, Cannabis indica
ttttacacatacagatgctaaatcactaataatatgagctaacacaataaaaaataatccaatcaactcaaattttaataaaatcaataaaaattaatgtaagcccaaataaaataaaagtttaacattggaaactttcccctcaatcatagtttcttctcgatctgaatctaaaagttattccatagttgcggctcataacaactcatccatggtttttgttttctttatgagatcagaagacgacggtccttatttcttcttagccgaagttttgttcatacatttcgcttaacttgatttttttctgccatagccacagccttacagaggtttttacttgatcccctcgctatttggaaatatttaactaactagaatgagcgggaaaaacaatagtgtgtcaatacaactatttttctttggtaatcttttgctggtgacatcccgaatagttcctttcccttctgtaacaagatcacttcatatattttatatatctattctatataaagtgtgcctatataactaaatttttgcgtttatgagaaattcatggataa

SEQ ID NO: 258885 - DNA, 770 bp, Cannabis indica
atttcgaatcaaaatcagttaacaaactcaaaaacagatctagcactacctcaaattcaaatctaacaaaacacaagagaatccacacaaaacgaaaacaatacctgatataagaccgaccatcgtggatcgaagacgggtcggactcgtcggcggcggcggaggtgagagaagcagcaatgccttcgctaccgccagagagaaggtaagaattgccaacttctctgaaggtttcgttgttgtagacgtgaattgaggcgtaagaagtaatggcggtgaatgagagcagaaagaagaagaagagtgcgtagccattgttgaaccgtcgggtgtggagcctgagctccatgtttgagcttggtgggaggttttagagagagaaaatgcgaatgagaaagagaggaggaagatcgggagaaatgaaggttgaagaagaagaagaagagttagttgaggagggagattgtggaagaagcaacgtagctctcagattcagtacaacaatggaggaggttaccctttacgcgcgctcttcgcacgtgctctacaagtacttacacatgtgaccgctaagctgttcttttcttatcattttttaattaattaattaagtaaataatatctttattatggaataattatcttcttctcaacataagactgaaaatctcgctatagaccaatgtcatgtataatagtcaactgtaatcgctggattcaattgtactctatataaaactaaacaaaaaataaataaataaaatagttag

SEQ ID NO: 258886 - DNA, 688 bp, Cannabis indica
accatagtcaatcatggcttcgtcatgtccgagctcgggggcatagacgaggccgtgaggatcctgcgggacctgtctgctaaaatgcaggcgatccaggagaaggctgagcgaagggaggcccttgctagggcgaagctcgaggaggaggctaagcagagggaagcccaggcggagtcgaagctccgagaggaggtccaacgaagggaggctgagctggaggcgaggcatcaggaagcgctgaaggcggagggtgaggccgtcgttagggccaggcgtgagcttcgggaggctaaggaggccatggatgaaatggccgccaaggtgaagtccctagaggagttacaccaggcagacttgcagtccaaggccaacttggccgtggagttgaaggagctgaaggactttagggaccaggccttgaagaaggctaaaagagatgagctcctgtcccctgtctcctacaagcgctgcgtcaagcgcttcgacgacggcgtctacatggcctggcagtccaatggccaaagtatcaagctcgacttctatcctaagcctgcggaggctattgccaaatttcaggagaagaagaagaaacttgatgctatgcttgaggcgcgtctaggccctcaccttcctcctcacattgactaggccgcagattccaccctatttcatcaagattatctct

SEQ ID NO: 258887 - DNA, 577 bp, Cannabis indica
gagtttgggattgggtaaaatttttgtggagcataaggttggaaggggtggacttagataagctattcctctatgcttctatcgtggtggacactatctggactacccgtaataacaaggtacataactctcttcagagtaatattgtaactgtcattgactctatctctcactgttatacagattatgcctcctgcttattccctccgacgactcctgcgacaactctggtttggacccctccacctgaggactggatcaaaatcaactgcgatgtcaaagttggtggagactccatgtgcatggcggccctggcgagagatcacactgggtcggtagtttgggccattatttccagactcaactttagagacccgttgattggtgaggcagcggtgtgtcttcttgctcttgattcggctcgcatcagaaagcacaactatgtcttggtggagagtgactcagaaactgttatcaaagcgctgaaagggtttcactatttttggaatattaataattatgtctctgtctgtaatcaactctcaaagtgttttttatcttgtaattttcttttatt

SEQ ID NO: 258888 - DNA, 2707 bp, Cannabis indica
aagaagggatcgctactctccgtgctcgataaagaagaaaatgttgacacatgaaaataagatcaaagaatacagatatctgcattgtatttattcatcaagaacaaatggattagaataatgataatattgctaagctaattcagatcagaaaatcgagcaacaattccataccaaggctagaagtatcttcccaatgtttccatgaaagttcacccaagaatctgaaagaaccaaaaacaatggtgtaaattaatcaacactcactaaagtatgttgtgtatcatatcatgtggaaaataagatttagttgaggaaagacacaaactttgatctatggactgtacagtcatctgagcataatttgcaactcctccagaaaaatcaaatagaataaattcaatactgaatccgtcggtgctctttcgcttgaagttcatgaatgcctgtaagttatttcaatcacacatcaaaaaccaatttggctaaaagttgtgtaacaccagacagtagaggctgctcaaacaatacagtaattaaaccaatcatctttcaaatttagcagagaaagcaatttttctatatattatagtaattgagaaaagcataatgattatatgaatagcaaacttatcccattgaaattcagcaggattgatcctagcttaaagatctctaaaccgaaaagaaattgaattatgagtgatttttctaacctgaggagtatatttgatggctgtcaaaaacactgcaatgaagctgaaatttgaatggattgaaaccaagtcagaatctaacaattaaaccatatattttgcacatgaaatttcaaatgttaatcaagctatcaaaatgagaacccacaaaagcatatcatgaatctaggcagaagaataatttttgacattagggaagtaggaattatcatctaaaatttgaaactgagaaaaccccaacagaaaaggaaatgatagatgtttaaagaatacaatcttacttaaagacagagatcaaccaaagccaggaatggtttggcaaagcatgaaaagtacaaactccagcaaccaaccacacaacagagagaatcaaaagactaatcttagagacagcctgacctcctctctgcataaacccatcaacaacaaatgatcataattcaatattctttactgcattttcacataacaaagtgactgagataaagtaagtttggagaattaaattagattaggcaggactgaattgttttcataatgtcattatgatattgaattagagatgacatggaaaaaattaaataaaccttagtatggggtaactcaatcacattgaaaagcttgacataactaattaaatgcatcttacattgctaatgtatggaaaaatttgtagcatacataagatccatgagctactcttctcataactaattaaatgcatcttacaattctaaaaaaaaagtacaactttgttttttggtcaaatgatcaactcattaattttactatgttttttttttttcctttttttttagttatatccaattctatataagccaatagacattgtaaaatatcacgggaacccaattcaaaaacaattgagaaaatgaatggaaaagctcttacttcatagattgctatttggaacaacataaatgctgttaaaagaacagcatgaactgaaaaagcaacatcatttgcagctacaggtatcatctgccaacacaaagggagggtatttctgaataaaaattataaacataatgggacaaataatatcaaaactttaaatagaaaagaaaaagacatatattaatacctgtccagagccatatttgaggagatattggttttggacagtggaactaaaataaagggcagcattgtaaacgagatatgaggaatgttttgttaagttgagtacgacgaaatcaaaattcaaccccactacgctacacaaaaccaaaaacccacaaacaatacatatgagaaagattactaaatcaacagggttgacaaaaaaaaacagattttaaggagaaagacaagacctttttcttcggaaattaagaatgatttgtgggtaaagagcaattgcccaagaagcaaatgcaatccaacccagaatttcgtatgctatttcgaggggaatccaattccatgatgccattccttccttgtgtttttctttctcttccagatccccatccagagccaagccaagggagggaaaggtttttcctaagtttctttttttagatcttagtttttgaaaataaatattaaatcattttatagtggggcctctattttagttaatattaagaaagaatttctattaattattaataacaagtattcatccaaaggaaagaaaatgaaatttgaaatatgtggtatattaaggcttgaagtaaatagaaatgtataagtacaccttcttacactcctacgtgttaatatcgctattagtccaactaaatatcggatcccatataatttaatataataagttttaagaagtatcgctagccaatcgcaacacgacatgccgagaaggtgctaagcaccactagtacttaataacaatgctctgcagtaaattgtaggcatttataataaaaatttcttattctttttctcttttatacaaaattcaatgtatcaatctgaccgagaaacaaaaaaatcaatgtatgaaaaga

SEQ ID NO: 258889 - DNA, 589 bp, Cannabis indica
ctttaacttcagatttgttgacatcatccacatgatgtgccaccccattttcacaaacttcagaggactcggtgccagtgttcgagttacttactaaagttctggactgttgcttagcattaggggctttagattgagcttctttcccattcatagttcttccaggattgccttggttaagtttaggttctttcttttcagttttattagtagagcgctttgtcctgttattattatttggagttctctttttgtcaacttccttcatggctaacaatatctagttctccaaccacaatcaaatgcagaagctataccataggaaagagactcaaatcaaaaatctagctatacattagacatatattatagccatgttaatacacatacctcatgaaattcttcctctggccgtttcttcagtgaccctggaacagcttacaaagcctgaaagcaaagtatcaaatgggtcatcagactcatcaccagaaatcttatttgagtgcacaaaaatccaaaatagcattccaacaggttgatgaccataaaccttgttttcataaaagtagaaagaatgtggagaagaaaa

SEQ ID NO: 258890 - DNA, 568 bp, Cannabis indica
acaccgtaatgtactccttaacaatgtacactataccaatacactttgtaccataaccgtacaagttttggaagtgtaacaaacatatgagcatgcatatacacttaacatatacatacattcgcatattcatattacacattatacaaagttcttacattctttcaagatttaagtgagttggccgacttgaacggaaagtctcgtgctggatggatgccctaatcatatattaaaactgggtaaatcacatgttcgaaactctaatccgagaaacccgagtctacgactcaaggttttgttatactctctagggactacactatatcaggaaacagggaaacacccaactaaggcactgaaatggacgagaattgagaaaactggtttttcggggaacctaccttaatcggttttacaggtactggtaaaccagttaaccggtttctaccagtcctccccaaaaaacctcctatttgctcaaaacttgtccaattgcctccaaactttccagagtacctaaatagtaggggtgttcatcaaaccgcccaaaccgcaaaaaaaaaaa

SEQ ID NO: 258891 - DNA, 767 bp, Cannabis indica
ttcacttcacgtttatgtctttattacacttttttcttgctccatctttttttcctaagaaagaataaaagaaaaacaatgcaaaattgctccaggttccccaaatttaaaaatttacaggaaatataatgtagtttctttacgaaaatttataatttcaattacttccatctataattaatgtaaaatttatatatttttctaaataactatattataattcggggaaaccttttttaacaaaaaaaaaaaaaatcagagggcaaatttatataagggtataggctatgttgaaggaaaaaaatcacatttatacagaattttatttaaattattgtataaaatatagattttacatataaccctaagtatctaccatacatctatcaaaaataaaaagtatataacttttttgtaaaaaaataataatactaattttctctacatttctatagactataaataaatttacagaaaaaaaaaagtatatgagtaatttgtggtgtaactactaaaatttaatttttatttttaagtaaatttttaaatattttacggtaataatacttaaaaattacatttttagtaatttctcgttattttttattggtatgtttaaattaattaaatgacctaaaaatcatagactatcatcacatggctattaacttgactcttaatggctaagtacttacaaaaattatgaaaaatattatataaatattattaccgttaaaaatataatttaaatatttattcataattga

SEQ ID NO: 258892 - DNA, 1923 bp, Cannabis indica
gtctccaaagacaaggtacttcagtttatgtttttttcttttattcttaattgttttgttgttgtttaatattttaagtgaaaatcttattgatgtttttccttttatgttttttcaattgctgttacgaaaattataaacagtacgcaatatacgtaatcaagtagtaactcacacaggtaaggtcgaactacatggaattggactgaataccactagattaaatctatgattctatttggcaaatcgacaattttatgattgtgataaaaataaaagctaacaagaaaataataactaagagtgattatttatggataagtaattaggacatgttagttcagtttctcaattgctaatgttaattataattctctccctactggtgatgacagattatcaatttaaccctaactcttctcagatcattaagatcctaaatcacatgtcatctactcgcatctctgcaatagaataacatacaacttgcattaagaacagaatctacaaatcacatgagctatgtaaatactctcgtcttacatcaacttatgtttgttctattagagcattcctgatattcacttcttagatttcatattaggatcataagtcacatttaagatgaccagtctaaaatatgtaattaaagcaaataagaacaaatcacacaatcagggaggaaaaataataataatattaactgaattagagaaaagtcatctaacaatcatcatatccctaaattaggaatttagttcatgttcaaatccatatcaatactaaagcagaatttaacataaaagaaataaaaggagaagaagaaagaaactgttggtggaatgaatccgggccgccactctgctccttctcccgttcttgaatgctttttaggtctaaaatttgcttcccccttctctttctcccagtttcctttatatttttcgtcccaaatttcaaaagacgaaattggcctccagctgtacggaaccttgccgcggccatgggttacctcgccgcggcgagtgttgctttggccgcggcggtggagtatctcgccgcgactactgggccagtctcgaaagctcctttctgccaaatcttggccgcgacagttaataaatctgttgcggctagaagtaaaccaaatcatgattttctaatttttcttggctcgactttgtcttttatcatacttatgaaaccccgacatccacaactatggggaacctgaaaacatagaaacacaagcgtaattctgtcctaaaacatcgaaaaacgactctatttgtgacccaaaacataggctaaaaatagcctaacaattatagctatctaatatgaaacccacttctactgagtttaaatccttaaaattgagcagtttcaagtttgacattgattacaattcttacaagaggttgcctgttcaggaataaccttttgtggttgagagtgacatatatgtcaaacttaatggtttttctgaaaaagtggatggtttgaagcttaagattgatttgctgcatacttcccagcagaagatttcatctgatttggttgagttgaaagagtttgtttctgcacagtttgtttcttttgctgcccaaatggctacaatgcaaacacaattttcatatgtgtttgctgattccattgctaaggtatgatagttttttatggttgttttcaaattttatttagttgcttatatatgcttttgtttacaattttttacaggacaaagctagtgactcttccaataatgacggtggtagtgataatgaagaagatattgattcagagggcaattaagaagcagatgataatgaataggaagatgctgaagatgaagatttggatgaaggtagtggtgatgaagaggagggtagtgacggagagcaaaaagatgaggatgataat

SEQ ID NO: 258893 - DNA, 693 bp, Cannabis indica
aaatataagtcaacttttatatctcatttctcccataggagatggtctaataatattcaaactttttgcatttttacattgctttagttaagtatgctttatctaatgttggtaatattgtgtggtggtcgatcatgattgattaatataattttcgcactccttttcttcctcagttgttttaattggattcactcttgaggttttaataagcccaattgttcttaaaaaatgttatttggaatatttacccattaaactatgatctatgtattattatacccctaatttttttagtttgttaaaaatgattctcaaactattcataatattgtaaagtggtcatttcgtcaagtttttttacactttgcaatgcatcagtgttgatatgtgtaatttgtaattgcaatcgcagcgcccaattaagactataaaaaagtgctttagtctccatttcattcgatcgaaagcatccttatattggcttggatatagcagcaactacattgccttgatggtctcttacaattgcatcgacccccaagatcttcagttcatgattgacagcagcatccacgttcatttttagtcctgaaatgttcggtggtgtccatggaacattgtttatgtcttgatgaatgggtgctgacacaagaacagaactggtttggttattgcaggttgcatactgct

SEQ ID NO: 258894 - DNA, 1045 bp, Cannabis indica
agaggaatttcacattatcaagagagtagatacttattctactaaagtttttactagggcatatccacactcaaaggccgtatgagagatcgactaatacagtaaagataaatgctacaaggaccaagataatgtcctcaaaaactaataattatcttgttttatagaagctcctcaatttgtgctgctataacttctggtgcatcttcaagtgtagctaacttcggatgctcagggttgtagccttcaactcctccagtatctctgacatttgggacataaccattcaaatcaaagttgatgtcatgaggagcaacctcatttgaatgttgttcacattggcctacaaagaatgcaaccttatcattaacaaagccttccagttaaagctaatagctcccccattggctgaccaagatttatagatggcattgaagaaatagccctcttaaagaccgacgtccccaacacactttgtctctagaactgccacttggtcctataggtgatgaacttgaccttccaattcaacaatacttgagttctttttctcaagaaacttatgaaaggactcttctacttctgaagtcttcctccttgaagctgagagcttcttcttcaagcttttttcatgatccttggcactatccatgacacctctcaaattcgagacactggtcttacgttcatcgacaatgttctccaagttagtgaccttggcctctacattagaggctctttgctcaaaaactgacaacgtctctgcaagctcaacaactctcttatgttcgtcttccatagtataagcaaagcccacacaaaagcattcttcttatgggtgggatctttttacatcacacaaaaggttgatcttaggagacgttgaaatgggccagtcttgtagattgtagaagatgaagaatgttgacaaaatctggtgaccatttagatacatctaatatgggcaaagcccgatgtaatcaacaatcgaaacaaaccatcagtgtagaaggaggaaggcacccacatgttgggttttatgccc

SEQ ID NO: 258895 - DNA, 941 bp, Cannabis indica
atattgttttgatttgtcttctagattaaactcagaatgttcaattgacactactgtactcacttacactcacaaattttatccataggatgatgaaccatcgtcaagtatcatatttctactcttaaggctcatatttatgatgttagtcttaatttattcaaaacatagaatttgaactcaaattgattatcaatcataatttcagaaaaatgccaactttatttgcaaaaatcagagaatagtggtatgagattttgtaagatattgttgtatcaactatgcactctttatgtttgatgaaagtcgaagtgggtgtttaggtatgtatttttggatgagcaagaattgccctttttctgaaacgtttagcttaactgtttgaattacttaatggcttgatgattatttgtagactttgaatatcattagaaaaaagtctgctatttatgaactagatttaactggttgctcattttggaatatgtgaatttcaatgatgtgaaataatttgtttgtatactttcaagcatttttttggtttgaaagtatgtctaattttaagaagtgaaatgataatgagatggtgttgcttgaatcttacattttgtattgagaaaaagtaatagtttagaaaccttaatataattgaagcctcttgaatagctgagataatctcagtctgcaatatttttccattttttacaaattgacgttcttatttttcttttccatgcaaaagtggtgaaaaacccaatatggctactctgctcaagtgctacaaacccttattatcaatccaattgtcttcaattcactactccactcggactattcaagttgcaactcaccgacctcacccctttttcaagtctagtagcattcgtagcctcaattcttcatctccaccattgattgctaagaaaactcaaggtgaatcc

SEQ ID NO: 258896 - DNA, 696 bp, Cannabis indica
ttttttttaatatataaattgattagaatcacaataagaattcatcatgtagcatcaatgattggccactaagataatttattgtctaatgaaaaagtattatagaataatttctccaaataaaaaatctccaaaagataatataattcctagaaagttgttaactcgcggaagtaggtcctggaaggttttcttgtccttccaaaaagagtcctcaagaaagctaccctttctcttaaaaagagttccagatggctagttgttactcctaaaaaggaatttcgataatcgactctagttggctcttttctattcgagaagctcctctcgtaagtgctttggttcgtgatttcggaagctctcatacacgttcccggaagcacctatacttacgctgacgtggacatcttgctcataacagagtttgttaagtttcttaagtcctaattaacttaacaacttaacttcttgcagccaccgactttaggatcttaatcctaaacctataaagactaccaacacttatcattttagaaacagcgatcatattgagttttgagatagaaagagaaaagattgagaggtagagagagaaaggtatagagaaaagagagagattgggtttttagttttgtatgaagaatcttctgtagattgtaaagtccttttttttgcaagttagatgccaaaatattt

SEQ ID NO: 258897 - DNA, 1611 bp, Cannabis indica
agatttgcacaattgaccattttactcataatattaaaacttaattgaaagtaaaagaaaatgtaataagaaaaagtttcagtagattgtggagaatgttggaaaaaggtatgatattataacatctgttgatatgataaatgtacatatgcttcaaaagctttgcctaaatttctaaactaattagcaaaacaaaactaaaagtcaataagtaggccaactgatctgatcaccaagaattgagatctcaaacctttatgatcaccaaaaagttgaaaatacctttaaccaagaggcttgatatctatctgagcttaattacaacttgggtactcttcaatttagctcatctcaactcaactaattaattcaatcagctagcataagccaggtgatggtgatgaactcagtcatgccagcaaaggagcaacacggtacacctccaaatgatgtaaagccttgctctctgttctctaatttgctttgaacaccttggccatgtcctgaccttggaactactacttgaacttcttgtgtttgagaaagcatttgcagctgccattttttctcagtataagaccaaagtaattaatgctgctgacttggaattatgggtttggatcagtgttttgtgtatagtttttggtgggtagagaacagaatttgatgatcagagtatattagtagtgatgatgatatggtttttgaaatcattgagatcatacacatgtatttatagcctagatttgaaaaatttgtggtgcatgggtgacaaagggttggccctgaggaccagagcagaccccactgttttggttacgtgacaaatcagacctattaagccttgtcccctttgacacacccctttgataaagacccaacagcaactttcccctttcaagggtcatcttgtcttccatttgctacattaatattatgcatgcatttgaaacaataaataacaatttttcattccaaattcgaaactaccatttggtagtggtaataatttaataagaggcacaattagataatttacagttatgatatttggaagggtgtgaaatgattacatatcaattttaacgtatgagcatgatttaataatggtaataataatttaagagaaatttaaaacaacatcagatagtggtaatagggtctgggtcaaaaatcatatctattcaatataaatgtatatgtattatgtatattcattgatgtatgttgtagattcatatgtcgtcctttttgttaatttaataatatttaagattaaaatagtgactaattggtagacatgaaaacatatgtatttttcttgatttaaagatgattgattacgttcatccatgcagataaggtgtatagaataagattggtgggaaggtatattattgatatattcgctatatatcagctatagctattagctataattaatttttgtattgagaatttaattaaataatactttttatacccacatcttgctttgtaggcacaagttgatacaataggaatctgtgcagctaagtgtttgagaattgattgtgactcctcaccattaaattttttggccagttaaatgttaaaaattactagtgtgta

SEQ ID NO: 258898 - DNA, 695 bp, Cannabis indica
gtttactaaggtaatttatagtcttctcagatttataaatctcaattacatgcaaattttctactcccgtgataaattaaacatgcaacaggcattaaacacagaaaccctataagctatctataccatacaagtactctcgtcctatatagaaattcagttttacttcagtatagcataattgacactcacttctcagatctcacatcaaaatcatagacagtgaattggtgatcaggcaattaaaagtaattaagtacgaatgaaatagaatacattgaaactgatggaaaataaatcatattaaaaccataaaacaatatcaaacaatctccatctaaatcctaattaagtgtttatctactcatattcattgtagcaaattcacacatattaattttttaaaaaagaagagaatagagaagaaaagaatgctgaaaacaccgttgaaaaagcctttgcgattgatttttatctctaattttcgtcctccttgattgtttgttaaaaactattgaagtccacttctcatatagccaaaaaatggtaaaaaaaagataaaaaacgctacaaaaacctattttgctttggattgaaaacttgtaaagagaaagttgtgaatcaattttagacatacacagttatatatactgtgcagtagtatacatggatgcctctttggtgctcttaggatg

SEQ ID NO: 258899 - DNA, 646 bp, Cannabis indica
acatcaaagaaggttcaagactttatagtgaagaacatcatatgccgatttggactaccgtacaaaatagtttcggacaacggcaaacagttcgacagtcaatctttcactgatttctgtgcgaaccatggcatcaccaaaagcttctccgcagtggcacatccccaagcaaacggtcaagttgaagcagtcaacaagaccttgaaggatacactaaagaagaaacttgaagatgccaaaggaaattggccggaagaacttcccgaagttctatggtcataccgtacaacggaaaaaatagcaaccggtcagacaccattttcaatggcgtacggttatgaagctatgctgcccgtcgaactcgaaccaccatcccacagaaggttgacgtacgatcaaggtaccaatcacatactccttgcagaatcacttgatgaaatcgaagaaaaatgagcaactgcaaacttaaagttggtagctcatcaacaaaaagtagctcggtatttcaacaaacaagtgaaagctcagaaattctttgtgggagatatggtcctaagaagggtattcctaaacaccaaagacagcacgtcaggcgtactaggacccaactgggaaggaccataccaggtggtcgaagttctcgact

SEQ ID NO: 258900 - DNA, 603 bp, Cannabis indica
actataaagtatactaaataaaattatttcatatctatgcttatttgttatactatatcaaaactaattagtttctagtataaacttaaggtaactaaaaatataactttaaaataattaatgagcaatttaaatgtttatcaattttactaataagttttgtgtgtgtatttttttttttttaattttattgtaactttttagtttattaaatagacttgaaagtaacaacaatattttttacaaaagtaaaataaaaaataagtaacgtaaaagtatttaaaataacaaattaatttaatataatttaaaaacaaacacataagtttcaaagtaacaaaaaggtatataaaataattggtaaacaaaaatagtaatttattatattatataaaaactcattagtttcaaaattaaactttaaggttacccaattatattttaaataataagatagcacaatttaacttagaattagctaattattaagatgtttacaaataaggttttagaggtaaccaaattgtatattaaattatataatttaaaaataatttttttacgtaaaagtagctaattaatttcttaccggcatcataagta

SEQ ID NO: 258901 - DNA, 575 bp, Cannabis indica
ttctccatctctgctgcaacttggcactctcggttgggacatttgtcaaataaaagattagatactcttaaagaaattctgcattgtaacactactgctttacataataaaccttgctatatttgtcctattgcaaaacagaaaagactcccttttcagaataaaaataatatggcaaatcacattttcgatctaatacactgtgatgtatggggaccttatcacatagcttcacacactaatcacaagtacttccttactcttgttgatgaccattcacgatttacttggctctatttaatgcagcacaaatctgatgtcaataccataattcctcagtttctatcctatgttcaaactcaatttcactgcatttttaagaatttcaggtctgataacgcacctgagttagagttcaaggagttatttgcaaaatatgggatcttgcatgactttacatgtgtcgagacacctgagcaaaatgctgttgctgaaagaaagcatcagcatttgctcaatgtggctcgagcattgtactttcaagcaaagtttcccattaaattctggagtgaatg

SEQ ID NO: 258902 - DNA, 1311 bp, Cannabis indica
gcttggtaattaacttttgcaattgaaattttatttttacagtctttgtggagacaatactcgttacttatcattgtattacttatttgtgactgcgtgcacttgcgtatatctaattttatcacaacaagtttttggcaccgttgtcggggactgtaaatatattttgttgtgattgtcaattagcttgcaatttagtctattattttgtactcatttttggtgactcttgtgcattgacaggtgaatatttttgttaacaaagattttcgttaaccaaatttgagcctcacgaatatgattcaacacagaaaaattatagaaaaagaaggaacactggatttttacgtggttttgcagttaaaattctgcatagtccacgagtcaatcttattcaaatttctgagtctgtgtttttttttcttgatcttatcgccactatttataattggatagtggcagttaattacaaaactgaccaaaatgcatttacgactattatccctaaaatcatgggatttgattacaaatcaagccaaataaatgaggtttttacacagctatgaatatcccgcccttattgggccgagatgagctcataattaaagacatacggtaagtcgtatttcatagggatgcctcgtcgaggagggagccaagatcaccttgatagcgagcagttgcttgtcattttagcttctcgagactagtattgtcttaaccctgatggttacaccttctggggtcaagaagatcttcctcgcatgtaaaaaatcttttaccaggataaatgcctcgctgtttgttatcttgactcgccatactatttgtactcaatttgtatatcgcagaatatatgctaagtatatttagtgttgtcactttctttttcatgcagtgaggttgaggcctcgtcatgagcgtatgcactcacatggtttctcgtcaatacataatttaggatttcgtatgtttctatctcgcagaaggctattcagccacccgagttataaacctaccctgggaattatatttccaacgagttgttctatgctaagcgtacttgttgtttgcgtgtttaagtttttcccaactcgacacgtgtcctcctcagatgtgcttaccgaacttcgggtataacaattgccctttgaaaagttcttttttatttaaaaagagcgttttaatgattaccaagggtattttcgtcacgctcctctgtctttgaaaagacgcatcccctcttattttggcggttgtgcagtttcgaggtacatcagaattaaatgaccatcttttccacttccactt

SEQ ID NO: 258903 - DNA, 1043 bp, Cannabis indica
atgtagatcgagtagttgggtgagccattgttgcaaaatgagtgtgtacagcgtctgataccgtatgagatatcgagagagagagaaaggaagagtttctcttattaatctgaacattgtcttgaataaatgttacaaaatgtattgaaagtctttatatagaaactagatacaactggataattagactaactaacccaaaaattatgttataactagccttaactaacacggacactaatagaaaggaatttaaaaataatttatcagattattggagtctacataatagctcatattaatttttaaaattggttcatgaagtacataaagaggtttaagcaaacttcaaacataccaatctttttcagtaataaaattcacccaggcaaagctaaacacagtattcaaaagaatagtttcagtaacagaatataagagctaaaattttataaatgaggtggtgaagtttaggcagtatagacaaggtcccgctcagagagttaaacaatggagagattgcaactggaacaaaccagaggaagggctacagagtcggagaagatggtactcatggtggagagaagctcaatacattttctcagttttctctctcattttccttagcaaacaaaagtggaaaataaaatcttagttttaaataaaagctttcgcctaattttttctatttaaaatatttccccacacattttcaaaactccaaacactataaatcattttttctcacattttttttcctttcccttttattttctagagtcgccttagagtttgtggagaaatcacaaattagaaaaataaaggaattatttcataaatacacaaaaataacaaaaaaaaattacaaaaatatagttttacggaattttaaactcttttacaatttttttgattttatttacagaaactacggtctttttatgttgtactcatgttaatttgttgttgttttgatgttatttggatgttatttttcatgttacttttatgtagtttttgttagagattttataacaatggaa

SEQ ID NO: 258904 - DNA, 588 bp, Cannabis indica
acctttctccagcaggcgagagcaatattgcagaaaatcaaagcatgggatgtggtttcgggttgagctttgcacacaggacacacagtcggcacttccacatgacgaaaaaccagattaacacaagtggggaggttgtttgttgcagctcgccacaagaaattcttgactttgggaggtatacacaacccccaaagcttatcccagaagctattgtcagtgttaatacgctgagtttgtttctgcttttggaggagaccgtaggcgcttttcacagagaaatcttcattattctcatacatccaagaccaggagtcacgtgtagcatttaagctgagtggaattcctagtattgcagcagcatccgaagcacagaacatgtccgtaacaacatcaatgtcccatgctctagaatctgttatgaagagcgagtcaacgtattgatttactaacccaggatgatgcacagatacatacggattcgccaaatttgggagccacggatgttgaagtatgttaacatttgtacccgtaccaatggttcttcgaatgccagagcgtaaaagatcttgagaactccaaatgctt

SEQ ID NO: 258905 - DNA, 900 bp, Cannabis indica
gtccacactaagtggccggtcacttaaggtgatttttgccagttattctttttttaatccatgtaatttaaatcctaaaccctagttgaaatattgaaaaaggaataagatgactctcattctcatccatctctaatctagttttcattctttgtcagacaactaaaaattgagagcctctttctatggtaatttcgaattccttcttcttcttcattcaattcgatctctagtgaagagtacatgcctactaatgtcaagtcaagtactcaatcatagtgtggaattgtgaagaatccaaccaaaatgaaggagagaagatccaagtttagatcttgataatgctctgctacagaaaggaatcaaaggctagagatttgaatggaatgagtcattattattctgctgccatcaatgtaagaatttcttaatctcttatgtgtttatttcattgtattagaaaattcatatttagggtgttagattatagacttataatcaatatacatgttagtaatctagatcttaataaaattaattccaacagttaaacacatagtcagttaatgacttccttgtattaatacaccatgcataatcacagtccacatagccattgataatatccaagtcttcactttgtttgttcatgccaaataccaatcatttgttaacacatccctttaagtatctcaagatccacttaagggactctcaatgctcatttttggggtttctcataaatttactcaccatgctaagtgtgtatgctatgtctggtctagtacaaatcatgacatacatgatagagccaacttcactagcatacggagcctttgacatctcatacctctcaatttcatctttaggcatcttggtaacactcagtttgaagtgttg

SEQ ID NO: 258906 - DNA, 662 bp, Cannabis indica
catccgatgttggaaaaccattaaacaatcctaaaatctaccgcagcctcattggtaaacttctttacttaactattacacggcctaatatctcttttgccgtaaataaactaagtcaatttttatcaaatccgagggttccccacctcactgctgctcacagaatattacaatatcttaagggcacatctggtcaaggactattcttttactcagcatcttccactaacctatttgcttatgctgaaactgatatgtcaaacatagactttcatctaaaaaaattcagatgctgattgggcctcatgcagtgacactggaaggtctgtttcaggttactgtgtctttcttggcagatctctcatctcttggaaataaaaaaagcagtcgacagtttctcgttcttccgctgaagcagaatatcgggctatggctcatgccacttgtgaaatcacctggcatccagcacaaagatcccgccatcctttattgtgacaaaaccgccgccattcacatctccgaaaatcccatattctatgaacgcaccaagcacatcgagattgactgccatgttgtccgagagaagatccaagaaggcatactaaagctaattcatgtcaccaccaaaaacacattgctgacatccttaccaagcctctttt

SEQ ID NO: 258907 - DNA, 1673 bp, Cannabis indica
atttttttttaaataataaaaaattaataacttagatcaatcaagaaatgtcacctaaaaatttacttaaccaactacctactaaattttttttatcaattgcacatatattattatcattgggaaagaggggaaaggacaaggacataacaaacaagcttccttttcaaagcatatgggaggaagtaatgcatactgcaaagtcctactttttaatgtcattcattagcttagaaccacatgcttttttcatgaagtatgcttattcatgaagtttaatcaaaagtgtagattatcatgcatttactaaaaccgtctttctgtttcttttcataaaaataactgatatcccaaacgaaaatgtaaaagtttggtgttcttatgagacccccactacctgtgtgtaaaagaaaaaaaaggtatgaattcatctttttcttgcttttagtgtaaagtgaagcttttgtttccgcactttctcctttaaagacacttttcatttgagcaacaactttttaaagtgtatttttatcatttctaagacattttgttccaagtatttatgttcttgtgaatattttgacatttcaatgtgtaaggataagagtaatagaaaagttgattttttagtttgattgatccttcttatggaattttagtgccgcacacgtgtcccaccttcatacatataatatataaaatattgtttaaagaaaaaagagaataagtgatgtaccttagtctttgaattattaatcattgtaatactaatcctaagtaccatggaagaattatagaagtttaactagctcctttcagtgtagagtcaaggttttttgcagccataaatttcagagaaatgctaaaatgttaagcccaacatactacagagtgttattgctacaaatgatatcatgtactacaaatttgaatttaaattgagatgtatgaattaatttgtcattaaattacacaaattatgatatgatatttcttatgatgttggacgtacacattctataacgtctccaatggagttccaaaattttgatatattgttagtaaaataaataaaaaaaaaactctaatagtatactacaaatgtattaaatttggcacacaataaaaaattgtgtaaaatttaatacaaattaaatataacattttattaaatttaatatacaataaatatttatttataatagtgccattaaatattaataagtgactatatatattttttaattataaaatgttattgtgtataggtgtacaatttcataaattatggtaaatatagcatttggtcatgttttctgacaaataaacactttctttagacagtgcacagtgcatttgagatagtcatgtagaaatgctcaaaacttttattacaactaatgttaaaaccacagccctaaaatgttgtagtgacattttggaccagttgccaaacaagaagactagcctaaaagaaaggtttttctaccacgacatcacacccttaattgaaaccaaatagtagtgcatttttttttttgaagataaatgaaaattttattaatttgtaaatccattatatgtaaataattctcatcgagcataataagtaaaatagacaaaccaagttgtttacaataagaacacaaattctaacagtatttttaactaat

SEQ ID NO: 258908 - DNA, 596 bp, Cannabis indica
atggatggctattttaatcacatgggtaagtttagaatctttttcttagggggatatttattagagaaaaatagaatccgggtttggacgggattattgtttttgaccattttacccttagaccttaaattgcctaagttgtaaacaaaagggtattttttgtcattttaagaggaggcttggtggctgcttaagggaatggcagctggccatttagattattttcagccaaataatgtttaattgattaatttggtgatttggaaaatacagaaaaataagaaaaaatagagaactcatcctcctttctctctctccttgttcggccaacccaatccagaaggaaaccaacctttttcttcatttttctagaattcagcaagggattcaagtgatcttgaagctaataaggtaaccttagaacttataatcttgtgtttttgaagctttattttggttaagtatgtaaattggtgatttaggggatgttagggtttgaattatgtgtggtttgaattttaagtttaatttgagttggaaatagcttcttgcagctagtttggttgttttggttgatggatgcacaagcttgagtt

SEQ ID NO: 258909 - DNA, 575 bp, Cannabis indica
cttaatgcttatttttatcaaaagaattgggacactgtgggtaatgatttagtgaatgctgtcctggactgtctaaataatggtgtagatttttctgaggttaattctactttgattgtccttattcctaaaaaaaagagggctagatctcttaaagactttagaccgattagtctttgctccactttctataagattatttctaaggtcttagcaaatagattgaaattggttcttcataaaattatctcccctttccagagtgcttttgtggctggtagagtcatttttgataatattttgattgctcaagaggtggtccatgctattaatggtagaaagaatggtaagagtggttgggcagccttgaagcttgatatggccaaggcttttgacagggttaactggcactatttgaaaagtgtaatgttgcattttaatttccctgtttcttttgtttcattgatcatgaaatgtattaccacttctaatctttcatttctgattaatggctcaatcactggatcggttaagccttcccgtggaataagacagggggatccgctttcacccta

SEQ ID NO: 258910 - DNA, 864 bp, Cannabis indica
ttctataacttgagggaacttccattgagacggagggctattgtctctgaacggggactttggtcgtgaaggactttctcttggagtagtgtttggtgattcttgttttggatgaagtgggtagtggggtatggacacctcggtgtagtcgagaatgtcatccatgataccctctaatttttctcttgaagtgttggcttcttgcatggcatgggctgaatggtagaggtgttccgccagtttgtatgactcctgcttggcctccgtggctcttaaatgtgccttccttataagtttttcgtgttcgtggagaacagtctcgagccttgcacagttaggacatcctgaaatggaggctgaacggagtcttggactccgtgacggtgtacctacgggtcttgtggaagaaaaaggatgcggtggggatttttgaggacttgtttcaaaagggttgaagttttggtaagggtccatttgatttaggtaatagtaaaacggggtttgaaaaaaatgctttgtttggataacctaacctttacttatatagtggtttggtgggttgatgtacacgtgattgggttcatgtaataataatggattttttttcccaatttaaccatttaatagttaataaattttcacaatggtaatatccacttacgacaatctgaaaaatcccaatttacccatttattagttaaccaattttaatacaaggagaaggtcaatcaaatcccacaaacaaaatctaagcaatatcgggaaagtactatgtgatgtgacatttttatattaaaaacaaatatacctacggttttatgatttaaataataatttccagaattaaagtaaaaataaaatgct

SEQ ID NO: 258911 - DNA, 642 bp, Cannabis indica
tctagatgtttttcccgaagaacttccgggtttaccacctcagcgggaaattactttgtgatagatttagcacccagaagtggaaccggtttccaaggctccttatagaatggctccagctgagcttaaataacttaaaattcagctccaagggttacttgacatagggtttattcggcctagtgtatcaccctggggagctctgatattatttgtcaagaagaaggatgggtctatgagaatgtgcatcgactatcgggagttaaacaagctaacagttaaaaatagatatccattacctaggatggaagatcttttcgatcaacttcaagggaagacggtcttctcaaagattgatctctgatcgggctatcatcagttgagaatccgagaggaggacattccgaagacaaccttccgtactaggtatggacattaagaattcttggttatgtcgtttggattaaccaatgctcctgcagcattcatggacttgatgaatagattattcaaggatttccttgatatctatgtaattgtatttatcgaagacatccttgtgtactctcaatcagaagaggagcatgaggtacatcttcgaatgcttctgcaacgactacgggaacagaagctttatgccaa

SEQ ID NO: 258912 - DNA, 619 bp, Cannabis indica
ataattactcaaaaaaaaaaaacgaaaaacataaaaccccaaattaatctcatattcgaatttaagagatgagatttagaagctaaatttaaaaatactaacaatatttcaataaaaactcagaaacaaacagagaacaagctccaacagctcaatccttagacattgaagataaaaagaattaaaaaaatatacaatgatagatttgataaagaactaatcttacatccacaccagccgaacataacatacaaatatatgagagagaaagagagagagatctatactagttcttctccaacaacgccacccatattgatcttattctccaccattgtcatcagctctggtgttcttccccgagaaacatggtggggttttcggagacacactaaaactaaaaagagaaagagaggcatgtattgtgggttcgccggagttagcattcggcacgtgcaacgccaaacaaaggagatatcttggggctttgaggactgaggagggagagagacaagcatgtcattggtcgtcgagaagaggagcagaggagcaacagctggtcaccgatgtagaggagcaacagctccgattgagaagagggagatagagaggcgagata

SEQ ID NO: 258913 - DNA, 347 bp, Cannabis indica
ttttccaataacctcgttgattagcaacgagctgcacagtaagtttaaaatcacgttagcacgcctatgcactcacatcgtcgcacgtgcaaaccccagccgttacatacaagatcaaaaagctgtaagttttcaaaaactgaattgttaccattacagggacagtggatagaacggttgatggcggtgattcacgatgacgattgaggctgaaaggcccaagaatttttcttccctgtgttattttttaagattaacttgtaggtagatttattaacttattaatacttagactaattttacaatgtttgtgtgatatttaattacttttatgaaatgaaattata

SEQ ID NO: 258914 - DNA, 778 bp, Cannabis indica
ggtccagatcaggctccgggtgtgggttcgcgtcctgggtcttggtctaggttgggtccgagtcccaagttccaatcccaatatgagtctggattctgttctgggtcttagtgctcggttatgatcctggtgtgggttcgagtttttgtccgggttcaggtctagctttgggtctgattctaggtgtgggtgtttgcgttcgggtccgagtctgtgtccgggtttgtgtgcaggtctggaccccgatctgggtctagcttcgggtctaggtccaagttcgggtcccgagtgcgggtccaagtttgggttagggtcaagatcttagtttcgatctgggtacacgaccgtgtccgggcccgagttcctgtctcagtttgggtctgaggctaggtctgtgttcgtttctaggtctaggtccggttcctggtcacggtcctagtcttcttctaggggcctggttcgacgattcttgttcaggttctaattttgggtcctaggtctaggtctgtgttcgggcttggttcttcgtttgggttctggtcctagtctgagtcccaaatctagacaccgactattggtctgttccaggcccgttaaaagaatccctagtcaagatctggatcagtgtcacgggtctcggtctggttctggttcaggtcccatgtcccatttctgagtttgggctcgggatcgagacttgggtgtgtttctaagtcccgaccctggttctgtgtccctagtagtctggttccatgtttgggtctgagttcaggttcgg

SEQ ID NO: 258915 - DNA, 498 bp, Cannabis indica
ttatatggattaaaagagaataaaaacgttggacaaaattcactctaagggctagccatacgaaggaccaatctctaattacaattttgccacttttttcaaccacttattcttctttcaataatactatattttccaattcaatcctataaatgcaaaaactatttatttaataattataattaattatcaaataaaatgtttatttatattatttattaataagaccatacaaagtctcttaattaataaattgaccctaaaatctcttttcttcacaattaagtccttacttagtgaaaatttttaagtaagacatagtctaattttagaattataattgattaattaaaactaattaactgagtctgcaaacaatattatctcaactagtgaggggaccatgagactatataaccgagctttcaataagtagatctagaattcaccaagtaaatttcctaacttattaattctggcttgcgccactatagattt

SEQ ID NO: 258916 - DNA, 4617 bp, Cannabis indica
ggataaaatacattgaacggtgtaacggtaattttgtccttactcaatgtaaatcatctatagaggatcattgattattaggattataacaatggataactcatagcgtatctctatcatggaacatatagaacattctatataattgagagtgcaattctaaatctatagtggtgcaaggaggaattaataagttaaagaatttacttggtgaattctagatctgcttattggaagctcggttatataggcccatggtcccatactagttgagacaaactgcttgtaagactcggttaattgattttaattaataaattatgattctaaaattagactatgtctagtttatgaatttttactaagatatggcttgattgtgaagaaataggattttacggtttatttgttaattaagtgactttgtagagtctaattagaaataatataaatgacaattttatttggtaattaatttaattattaaataaatagtttttccatttataggattgaaagtgcaaaaagtagtatttgtaaaaaaaatagataaatggttgagaaaaatgataaaaatctaactagtgttaggcccacttcatggctggccactaggtcctaattttgttccatttttatcatttttttattccaaataattcaatcctaaccctaagagaattagtataaaaagaaaaaaagatctcattatccaactaatgcaaatattaactcttgacctagttttcttcttgtcaaacaactagtgagtttgagacttcttcttcttattttccttctaattttcgaattgtatagccttcttcacaaaaccaattaagcatttagtgattgagtgcatgcccaccatagcaagttagttctcaatcatagtgtgtaagattgtgaagaatccaaacaactgaaggagttttgggctcagatcttggtgatactctacgacaaaaatgatacaagggttagagatctgagcagaaggagtcatttaattctgctgcaaccaatgtaaggtttctcataccttttctgtgtttattttcatcattttagagattcatatttaggatgttaaaaacatacttcttagtaaatctaggtcctggtaaaatatattctaacatatacatgtttagtgtacatgttagttgtggttagaataggtaaatctatagccaccagattagcatatcaaggcatcggtgagatgtacatagagttgcactgagatgccaatatatatatgctaggctatcaaatagtatgagttatctggtaccacgtcgatacgactagagtactgaatataggctggattcacagttagtcatactttatcaagaacgttcctacctcagttagggttatggttaggtgtaagggcgcctgattataatccgggttattgtaatattattatttatgatttttttactgactttgtcgactcatagttattgtttgtatgtgtaggtaagggcaagactaaggttgagcagccgtgagagcgagcagagggagattgtacatgtcaggacagttaggccgagagagtacggtctttgggacatcaaggcttattttgtatagtcactaggcgacaaacttttgtatatgcacagtaacacttctgtaaatacttttataaacgggatcccgacttaatataagtataatatttggtgtttataattagtaaagtaaaattttaattaatcacaattttcaataaactcattgattagcaacgagcttcacagttaagttaaaaatcacattaacacgcctaatctagtagggtgttacacaaaccgttcacaaaaattgatgtaaacttgccttacaaaccatgggaccagaaaaaagcctagggattgacggtatgtctgcgatgttcaacaaaaataattgggaagttgttggaaatatggtcacttcagtagtgttaagcgtcctaaataaaggtgatgatcctactcctcttaactcaactatcatcaccctcattccaaaaaccaagaagccgcaatacatgaaggactttagaacaattagcctatgcaatattttttccaaacttatcataaaagtgctagtggctcggttgaagcatgtccttccccatgtgatctcgaaaactcaaagtgcatttctcccaaataggcttattacaaacaatatattggttgcttttgagttaatacatagaattaaaacacaaaacatcaggtcgtaaaggtgtggcttctgtgaaacttgacatgagtaaggcatttgaccgtgtggaatggacctttatcaaggttgttatggagcgaatgggttttgcagatggttggacatctctcatcatgaattgtttgacaacaaatcgctccaccttcctcttaaatggtgagacaacaggttcaattataccaactagagggctttgggagggctgcatgttgtcactctgcttgttttttatttgttctgaaggactttcaagactgtgcagcatgaagagaacttgggacaacttcatggatattctctcactaggcgggctccccccttttctcatttgttttttttttttttacagatgacagcttactcttttgttatgctaatgagagttcatgccttactattaagcactctttggatacttaccatcgtacctcaggacaagttccaaaccccaataaattcgttatatatttttcaccaaatacgacattggcatctcaagtcttctttcatagactattatctatgcccatctgtgactgccatgagaaatatcttggtttaccagcgttttcagactgggataagcaacaaatgttcagtaatgtaaaagaaaaaatttggaggctcatgcgcacttggaatgataaaatcttctcaataggtggcaaagaaatcctcctcaaagttgatgtataatctattcctacatacacaatgagttattttcaattacaaattacggtttgtaatcaccttgagaccatgatgtcaaacttttagtggggatctaataaaaatggatctaaaattcattggcgcaattggaaactcttatgcaaaactaaatctgatggtggtatgggattctgctctttcgtgcatttcaactaagcactgtggctaagtaatcctggcgattattggataacccatcttcttttttgagtagaatgataaagagtcgttacttccccagcaattttttttcttgaagcacctcatggtcactccccttctttaacttggtaagggattctctttggaaaagaacttcttgctgctggcctgcggtggaaagttggtgagggcagaaacattaagtgtggtgctgaaccctagattcccagccatagtatctttgttcctacaaattataggggccctgatgatacagtagtgccaacctcatcactgaagagcgccaataggatatcaacacacttcgtgattacttctcagctttggatgtggatcggattttaactatacccctcagttatttctctatcagtgacaaactcatttggcctcaccatgcttctggtatatacactgtgcaatcgggataccattttgttgtttccttgaaagaaactgatctatcttcggcatcaacttcatcttcttccttgtagaaattcttttggtctctatagctgccacaaaaaattaaatttttgcgtggtgagttatccatgatgctattccggttgcaacatccctagttcatagaaaaattattacgatctgctcgattcgtcaagtttgggaatcggttggtcgtgcactctttggttgcaaatacgcccaggaggtatggcgttcattgaatcttcattttggctagaatgcttcttcttcaatgtacaaagtcgattatctaattcgcctatcaacgttgcatttgattagtgagagatggagtatatttttgtacactttagtgtatttggaccgaatggaatcgggtagttcaaagacaaaattccaaacctgccagccatttagcatcttttgcagataattatttgtcaaattatagatcagctcaaataaagtatcgtacacatctttcttctgcctctaagacttcaaactccccagccatttctacattgtggctgccacttgacttgggaaaactaaaaataaatattgatgcagctttggatactcaacgaaatataattggagtcagtgccgtggttcgtgataatggtggtcaagtaattgctgtcctctcaaagcctttcactgggaactttgtatctcataaaatgaaagccaaagcaatcttccacagttggttttggaaatatagttgggactacaaatttctcaagtggaaactgatgctctcatgattactaatgccttatatgcttgctccaactctattggcacttttaatgatcttattgttgacatttcttgttttctttcctttctcccgggtgtatcgattgtacatgtcaaatgaacgacgaatatgaccgctcatggtttggttagatatcctttaagattagatgaaacttgctattgagtggagtctgtccctccatctatttactctgttat

SEQ ID NO: 258917 - DNA, 610 bp, Cannabis indica
tacaaatttgactcttaatcagtgggtgttccaagaggaggctcaacaaagggaggcccttgcggaggcaaagtacggggaggaggccaagcaaagggaggctgaggcagaggcgaggcaccaggagaagttgaaggcggagggtgaggctacagccagggccaagcgtgagcttcgggaagccagggaggctatggacgaaatggctgccaagttgaagtccttagaggagttgcatcaggcggatttgcagtcgacggccaacctgactgtggaggtgaaggagctaagggattttaaagatcaggccttgaaagaggccaaaagagatgagctcctgaccctagtcgtctgcaagcactgcgtcaagcgctttgacgatggcgtctatatggcctggaagtcgaatggctagaacatcaaacttgacttctatcccaagcctgaggaagccctcgctaagttccgggagaagaagaggaggcttgatgctttgctcgaagaacgccggggccctcgtcttcctcctcgtattgaataggccgagcagtacaaccaatttcaccatgacaaccatatatttttttttcttttacatttacagtctctt

SEQ ID NO: 258918 - DNA, 1486 bp, Cannabis indica
tgagtcctcagggatcattgattcatcacatgaacaggctactagctccaggaaaacacagtattggggtcccaggcttgaaggacctaggataaacaacggttggtcccttcccaaccaggttgatgaggatggcgcctacgacccgaccagctacataccaatcgttgagttagaaaatccccatctaaggcgtccattggaggaagcaaaccagcgtaatgctgagttagaacgtgaaatagccgcagtaagggcagcgcaggagaatagttcccaaaatcaacctgaccttggaagcagagattcacgaggaaaaccgcacaactcgcataccaaggggtaggagacaatccagaggtattcccagaactctcaggagaggcaacctgaggaaattgaggaaagtctggggacgcagcctgggatatgcggaacatcagacggagatcgccaaccctctctccaagttcataagaaaggagctcatgctaacccccatagggggaacgaggtgattcaaaccttaagaggaagagaagaacgagaagaggcaaggggtaccacaaggcgtacaacatctcataatcgatccatgcgaggaggagagaacactcatcgcagggataattaaaaaggtataatgcagcatataggaagatacatcttactctcagagttctattcatcctttctgctaagccattatgttgtggattcttcacaacagtgttacgtattctaattcactcttttatatattagattttaaactcatcagaatagaatacaaggccattgtttattcttaacactttgatgcagtatccagtttgcttctctagcattgttctctaattaataaagttttgaaatgcatgatacttgttattgagaagaaacacccagacttttatggagtaatcatctattatgcccaggaaataatttgcaccacttattgtctgaattttggagggcccccatagatcacaatgaatgtaccctaacttttttgttgtggtgtgtacaccctttggaaattttaccttgcagcattttccatatacacatgattcacaaaattcgattttttctttaagaccacctttgaacacaacttgtttatcaagttttgctagtcctctttcactcacatgacctagtctcatatgctaaatctttatactatttccaagtgttttgtctataacaggtgtagcaaatccagatacaatatttctatcaagatagtaaataccatttctaagctccccttttttaatgacaagagaacttctagcaactttgagagcaccatcatctatcttaacagtgtaacattctttatcgaccgtcaagtgctcactgctgctgttgtatattcaaaagccccgagttggaagttggcttctcttctttcaaagttattttcttctctgaatttgctttgagttttggaatgttgtttggattccttgttccc

SEQ ID NO: 258919 - DNA, 903 bp, Cannabis indica
caccaattagacatcaacaatgattttcttcatggggatctccataaagaagtttacatgaaaattcttccagagctaattttctattatgaattctctgcatcattttacaaagaagggctgagcttatatagccctaaatgatcaagaattgttagttgcataactaacttacaactgaattggctccagtatttaacaaactgattaacataacaaacaatcctaacaaccctaactaacttaagcaagtggttcctaaaatgtttgaattgttaatcctaattggtttgtatgcaaattaaatctttcaaggttggtcaatttagtttatgtttaaagattgaatttgaatatgtatgtgtgaaactgagattgtgaattgtttgattgaatatataagttagtttggaccttgaacatttaaggagtgtgttgagttggtgcaagaattgagtttgtcgaatcccaacaatatatacatacttgttcaagattggatgtaataagattttgttttgagtattgttattggacaccagaggtgtctatagtacttctagacatattatcttacgattaactaacgatataccttaaaaaaatcatatacttaattaaagtagaagtagtattggtttaatagaattatttatgtttgtgcttaataattttattataaaaaggatcactaataaacaaaaaaaaatatatatataagtcttactattcttaagtattatgatataaatacacttttttgcagagcaaattaatattatatgtaatatgatagtattacatttgacaataatgcttcaaaaaaattaaaattatatttgacaaaaataatgttttatgaatcacacaacactataaaaaataattatttttagtgataat

SEQ ID NO: 258920 - DNA, 1141 bp, Cannabis indica
aaactagggatttaacaaatagggtagacttgaaaagtttaaacgatcccaaaaaaaaattgcctgtatcatatcttaaaattatgtgtaatttcttaatttcgcctcaaatgattatcaaacaagttctagagtagttgagactttaaattaaaaatcaaacatgcattcatcttttcagctgctcacttaccttaagaaccaaccggttcatgtaatgagcaagcatctctctacctttcttggcctctggaagcatcgacaaaggtggagtaggagcccgcacctgctcaggtccactcttggctagctcggatccgccctttgattgctcaggcctgtccgagcttcctcctcgagaatccttggacttcgcaacttttggagtggaagggtccgcaacaatcagctcttcagaaaggtcgataacctctccaactggtgccttttccttggaaggggtcgcctcaccgcttttagatttcttggttggtggagacgagcttgagcttcctccaactctcttcttcagggcatcaaacatcatctgagacatgtctgcacgaaataaaaacaacatggttagaggaaaaaggcatcagaagcataaagcatgatagtcaaagagtttaaaaataagacaaaatatcctgcaaagcaattgtccgaacaagactcgacagtccccatcacctgacaagtctttcgcctttgccaggacggctttccctcttcccagcacgggaggagatggccgagtaggtgaaatgggctccctaatgctaattacatgctcaaaaggcctggactgggtcggaagcttcttcttccttttgagcggagtcacctgctcttcctcagcctcatcttcaggattcaagggctcatgagcgtactatttggcccttgcacctcccttcaacttagcctcacgcttcagttgaatcagctcattctccttatgagctccctcagcccgaccagcaccagatttcctcttcctccccttcactggtttaggaaaatccttcgagtagagcccgtacttcacaaagttatcctcggaggtcgaactggatgatattccggtcatccccgaccagctgagcaagctcttgagctctatctctaagagcaagag

SEQ ID NO: 258921 - DNA, 719 bp, Cannabis indica
taattaatgtagggaaaatttactatgtaaaacaggatctgtttaagtttcactaatgacaatatatatactttatccgtaaattatttttttttctttttacaatccaatgactggcaaaaaccgtcgttgaaaaatacgaaatttataattagtattgaaaactttactataggcgacggtttaaatctgtgcttaaaacattatatgccacggttaaaaaccgtggcctatagtataggctacgatttaaaactgtggcttatactaaaggccacggtttttacctgtgcctacaacattataggctacggttaaaaaccgtggtctatagtataggccacggtttaaaaccgtcgcctatagtgtttactataggcgacggttttaaaccgtgacccatactattttctagacaattttcgaccgtcgttaattttacctagttttcgcgacgctcgtatagccgacgattttatgaactgtcgggaattctttggccaacagtgtaaaaccgacgggaatttgggattttgtagtagtgtattaggattgtaacattgaataatcataacgtatctataccgtggtacatatagagcattctatataattgagattgttattcaattctaaatcaatagtggtgcaaggcggaattaataagttagagaatttacttggtaaattctagatctacttattgaaagctcggttat

SEQ ID NO: 258922 - DNA, 517 bp, Cannabis indica
ttataggagaactcaattaaggaaagtacttactccatgaaccctaaaagtccatgacacaggctcgtagtaagtcttccagtatcagaattgttctttctgactaaccatcagtctgagggtgaaaggttgtgctaaacttcaacttgatacacgtaccctcttgaagactcacccaaaacttcgatgtaaactttggatccctgtctgacataatagatttaggggctcaatggagacaaactatctcctttacatacagttcagcgtactgatccactgaatatgtaaccttcactggcaggaagtgagctaattttgtgaatctgtccactatgacccatacagaatcataaattcctgtggttctaggtaatccagttacaaaatccattgtaatgtcctcccatttccactcaggaaggaccaaaggttgcaataaccatgccggcctttgatgtttggctttgatttgctggcaggttaagcatttggacacgtagtccaccacatctct

SEQ ID NO: 258923 - DNA, 565 bp, Cannabis indica
acgtctagctctgcgacgataaaaacagcgctaattgggaggcaacccaagttttctttatgttttagttgaattttgttacattttagtcgttctttctagtcttctttagaaaactgttaaaacaagttttgggttttcttattatttttgtactgtgtagtaatgaaaaatatatatatatatatttttgagacgaaccagtggccgcggccagatgtagtgtcgccgcggccaaaaggttcttacagaaggcctatttttcattgctatttggccgcggcgagggaatgtatggccgcggccaaaaggtctgggtagaaaggccaatttttagggtctatttggccgcggcgagcccatatctggccgcggcgagatgggtcacacgggattttaaaggccaaaattccaaacatttcaaaattcaatcttttctcaaccctaaccacctccacgccgaatacccctctcctacaccatttttcttcttcaaatcccattcaaaacccttttccatcaaatctaaccataaatcttcatcccaaatcatcataaaccatta

SEQ ID NO: 258924 - DNA, 626 bp, Cannabis indica
taaaataatttccaacactgaataccaagaacataagtaacttcgccaaaatctttcatttcaaactgaatgtcaagcaattccttgatgtcagtcattttcttgatattgttgccaataattaaaatgtcatcaacacaaaggaccacgaatactaccacttgattatccttgagttggtaaacacaaggttcatcttcatttcgttgaaagccgtaggtcttgattatttcattacaccttttgttccaagagtgagaagcttgcttaagtccatatggacctgttaagtttgcaaactttcttttcctgccctagaagaaatagccttctggttgcttcatatagatggtttcttcaataattccgttaaggaaagctgtcttgacatccatttgccaaatcgaaagtggaaattatggagagaagaattcagatggatttgagcatggcgaccagactaaaagtttcctcatagtccacaccttctctttgtgtataacccttagcgaccagcctagctttgaaagtttcgatttcacctccagcacctcttttcttctagtagacccacttacatcctattggacgataatcatcaggtgcgtctacatattcccagactt

SEQ ID NO: 258925 - DNA, 3308 bp, Cannabis indica
atgagcaccacattagccatactacacactgaatcaaactgcccattttcgaagaagcgttgaacatagctagtcacatcagctttaatcacatgccaacacttttggtagaaggctggagtcataccatccggtccaggactttaatctggatgcatttgaaacactgcttttcgcacctcctcttccgagaccaacgaattaaactcttcatttgcaagctcgggaaccaacctatcaacactatcgacaacctcctgacaagacacaccagaagccgaaaacaaagaggagaaatactcaaccataacctctcccaaaccgtgatcccagtcaacccaactgccatgatcatttttgagctttgagatggtattattcctctttcttttactagccataaggtgaaaatatttgctattgtggtcaccttccttgagccaaaattgtttggctctctgcttccaaaaggtctctctttggtcaaggatagataaaagttgatttttgacttcatagcgaaggaccgaagaagcatccctcagatttttcaaccgattaagctcttccttgcatcttttgattcttttcttaaaacacccagtaattcctttccccaactagcaaggttagtagcacacaaattcagcttatccatgatacccatattaccatctctaccccaacaatcttcaataatttgataacacataggttctttgagccacgcattttcaaatctaaaacgatgataaggaggaaacttactttgcacagtcggttccagccacaaaggacagtgatctgatgttgagtgctccaaattaattagagaggcattaggaaacagttgaaaccaagtgtctgttacaagggcacggtccagtctagcttcaatccaagaacttgtacccctgcttttttcccatgtaaaaggatagcccgtgagttccatatcagtgagtctacactcgttgagacaagcttgaaagccttcaattagccaccgtgggtatggatgtcccccttgtttatcctcctgagctaaaacgttgttgagatctcctataacacaccaagggagagtggaatttcgagcaatcatacgaagaaggtcccaggttttatgtctgttagcacggttcggatccccataaacacctgtaagtctccaagtttcattactctctcctttcacacacatgtcaatatgatttgtagaaaagcccaataaagttccatcatccttctctttccagaaaaaagctagcccaccactaagaccttgggcctcaaccacaaagaccccttcaaagcccaattggtttccaacccactccattctcactttattacatttagtttcacataaaaaaacaaatttgggtttcttctgagaaataatctctttaaggaattgaaaagcccgttggttcccaagcccgcggcaattccaactcaaaacattcataatgcccggcgggcctgagaaccagaacccgccccataggagtttttttggttaaccccatcattaaagcccatgtttacatcctcatcttcggccccactagcatccacaaccggcctatcacatggcccagtaaaatcatcaatttcctcctcaatataatccccttcaataattgttttccttcttttcaaatcaacaacctgaatactaggcaaaacattattctggattgattctgtggccaactcattgacatttgactttccatgtatatcaatattgcttccagtaaaatgattggtaggatacttaccatattcgatattcatgcttggattattggctggcaaaatcccaattccctgatttctctccacctcattactgtgttgtcccctctcaccaccgtaggagcttgaagccccagcctttgacgcgactccagatcggagccattgagcgcccatattgtaatgtcgtcgtctcggggttgcctttaactccaagccatacggcttattgatcaaatgaagaggagtttcaaacaatctgtcacagaagcgctccgaatggccaagcacaccacaaataaagcaaaatgttgggagatcctcatatttgaataagaccacacaaaaagccccactctttttttccaatcgcatcttctgttcgagaggtttatcaacccgaagtgtgacacgaaccctgagatagtccctccacacaccagcaaagttgtttggatcagactttacaaacttaccaatgtaattgccaacgtcacgaaccactctctcagatttaaagcccgaagttatgtcatgtaactgaacccaaaaatccagttgattcaactgaattgatcgcgggttaacacccggtgttaccctttcaaagatcaaaggggcccggtcaaaagtccaagggctcccatcaataaccctttcgatgtcaacttcgtgataaaattgaaagagaaaatgatttggactgagttctttgacatacatacctcgccccggctgccaaagggtagccattttatgttgcatcgcctggaaatccactccccgtttagtcaggaaacgtcctacaagacaccaacgatcgtcaatctccgatagatcttcatcctcatcatcatacattaatctgcccatctcttcctcctccattgcatcgttcatgaactcctccgccataccgtagaaaactagtaataatcacgtagatttgataacaaacaagtcaaaacactgctaaaatcgaacaagacaaattactacttttcaaagaatccaaccatgtcatgagacaagactatgttattgctttattaatttctttgtaacctcacctaaaaaaaatagattaaaaaatcaaaagaatgggaaaatagaaaattagcaattcttagaggagaggatgccacataacattgctttgcaacagaattatatatatatatatagatatagatatatagatagattgattctaatggataattaattaaatttgtttggtttattattattattattatagatgcagcatttatttgttgcaatatcactccctttctttggtgggcttctcagtaactttggaggctttgcctttgctcccacaacttactatataatcaattatttactaaataactagtatatatacacttgtgtttgtatgaaaatttatattgcttaattaattaatacactactaattaatttcctataatgtttacagtgttatattattttatataatataatatttagattaaataattaagttgtaaataattaagtgtgacaaagtataattt

SEQ ID NO: 258926 - DNA, 565 bp, Cannabis indica
gataagtgcgaggaggcattcaaaaaacaaactaaagaacacatggccaagcctcctatcctgtcaaaacccgttctcaaagaagacctattttttatattttagctgtctccgaatacgcggtcagcgctgccctagtccgggaagaggagaaaacttagcatcccgtgtactatgtcagtaagcgcatgataggagccgaaacgaggtaccccatcatcgaaaaactggtcttttgcctcctgatggtctcggggaaattgaggccatacttccaagaaaatccgatcaagatactaaccaaccacccgctccgtcaagtcctccaaaaacctgaagcatccggaaggctcctcaagtgggcaatggaactaagtcaatttgacttgcactacatgccccgaatttctataaaaggctaagccttggcggtacagccaatccccacatggagagtatttgtggacggagcctccaatgagaatggttccggagccggagtggtgatgatatcaccaaccgggctgcgactccaggcggccctacggttcgacttcacagcttc

SEQ ID NO: 258927 - DNA, 1295 bp, Cannabis indica
cacgtggcaagcatcaacattgaatatgactctgctgtcgattggccaaatttgaggtcaatagaaaccctgataggcaacaagaggtaaaaatctttaaactaatagtttgttttaagttatgtattagtgttgagatccggggttgtgactctaatatgaaccctaaaaaccaatacagatatctcttcacaaagtgagagattctctctctaaaactaactttatttctctctctacaacttgtgagtgagaactttgcttagctaaatttctgatacacaatttatgatcttataaataatagaaacttgaagtagacgtagctctattatcattacaatacgggaattgaactactagaaattgtagcgtctattttactttcttttctatcttattatctatgcactcctttaccaaattggtcaattttcaatatcttcagttagtcctggatcagtcttatgttaggaaattgtttgcaaaattaacggaatgcaatcaaaggaggaaatttgtaattttttttttttgaagaggaggaaatttgtaattattttgattgttcaagggattttttttttttttaattaagaaaacaataatttaagaggccgaaatccaataaactttcaagtaatattatttattgaaaagaaatatagatatcaattagatgaactgtttgaattggtttcacagctctgggattctacagtcaaggctgtcacgagattgtactatattattttatggaagaataagaacacagataagataagtatatataaaatataggagcctcctataaatataaatatacaataggtgaagtcttaaatagtacttatttgctttcattataatcgggcaccaccattcattcaaccagccaataactagtcatggcaagtaacgcaagtttgataactctatcaatgagggaattaaaacacaggccaaaaatacttaaacaaactctttcaattccaactactcattgggatagaagtaaaaaaaaaaacaaaaagtcaagacaaagaatgaatgtaaaacaaataattctacttacctcaggaacgtcacattgtgtctaattataattctgctttaattaaaaaaaaaaaaaaaaaaaaaaaaataagctgcgaaagggaagatcaactagccatgacacgaacaaccaggtcaacttcaatcatttccagtcaaactcgtacaaatataaggataaaacatctaaagcgaaattagtattggttaacaaaatacatattattagcttaatatat

SEQ ID NO: 258928 - DNA, 588 bp, Cannabis indica
atacatgcaacgataaactgatggtccagcaattctcgcctcataagctaagtgtatcaccaaatgaaccattatatcaaaaaatgacggagggaataatttttcaagattacaaagagtgactgatatttcttgttcaagttgcataaaatcttgtggtcgagcaactttcgaatacatcatgcgaaaataattacttaaagcagttatgtgtagacgaacacgtgaacttgatattcctctcaatgctagtggtagtaattgagtcataataatatgaaaatcatgacttttgagcccatgaattttttgttgttttacattaacacatctagaaatattggcagcatatccatctgggaccttaattgtctctaaaaattgacagaagacaattttttcatatttgcttaatgtaaaacaagcaggcggtatgacagttctcttatattcgctctcctttggatgaagttcagatttaatacccataaactttagatcaagacgcgcattcaaattgtctttgttttttatatctaaactcaataaagtcccaactaaactttcacatacatttttttcaatatg

SEQ ID NO: 258929 - DNA, 1158 bp, Cannabis indica
aatactggaatttgggttaacttttacaaaaatactatcacatggaaaagttttcaaaaatattgtgtttttataaaacacaagtagaacacaaaactgaacaactcaaaacaatagtagaacaactaaaaaataccagtagaacaccagtgaaaacttaacacagtatactgcaatatgaaacttatagaaaaacactaaaaaaaagtaaaaaataactgcctgacagtattttagtaaaaaaatagcaaaagttagtataccatgtaaatttttttatatgtatttatcccattagtgggccatgtttacatgcaaacccctaaatccttaaaaacaccagtagaacaccagtaaaaatttaacatagtatactgcaatatgaaacttataaaaaaacacagtaaaaaggtaaaaaaataccgcctggcagtatttttgtaaaaaaataacaaaaattagtataccatgtaaatttctctatatgtatttaccccattagtgaacaatatttacatgcaaaccctaataagtctcagtatatccatacccggatcctagcctataaatactacattatacattcatgcaaatggtaaaaaatttattactcaaacacgatagcagaaagctaaagttcttaagcttgtcaagaacattgatgtaatattttaaggttacttagcctaataccatttacttcatgtggattagggttcattaatacccgaaccacctaaaaatctttatctccatcttgtttatttaattcattttattagcttttattttattatattgtagtttttttttttttttagaaaatctcggtcaacatgttggtgctttcattgagagttgagaaaagatttgaagctacgttgtatctgcaacaatggtggctaccattctgtcacaaagcctactgctcatggtcaggacgctataatggatgacgttaacttgctatcccgcagtgcatgcctaaacagggaaacttccaaagttggcagctgtccagccaagaaattggttgcccaacaatgaagtcatcataacataaatcaacattcattactgcaaaaactgtatttttgcatcagtcaacacgtcgtcaatgccaaaaattgacacaaaaaaactacaataatatttttg

SEQ ID NO: 258930 - DNA, 541 bp, Cannabis indica
cataaactcaaaccttgctacaaccttccaaccacaataaaaaacaacccaaatccatctaaataacctcaagcaatctccagaattcaaatcaaaataacaattatattcacagctccataaatccaataacctctaccttaaaacctaacctaagcttaagaattactaaaaagagaagactagatcataataccttaaatacaagcttcaactcccttgattgctcctgaattcagctaggaaaaatctaaacttggatgagagtgagtgaggttcgaaggagagagagagatgaagagcaaaagcatttctaggtttttcctcttttattttccttttccttaatttattttcttttgaaataatactaacctactcaaataatatcagccccctcatcactacaagacaaataacctctaaagaaaagacctttttaccccttagacaaattaaaatgaataacaaccccccaagggcaaattggtcaatactaaacccgaaattcaatacctagcaaaacacccgaacaataacg

SEQ ID NO: 258931 - DNA, 422 bp, Cannabis indica
tctaggcctactatgaaactctataataattgtgttgaaattattcaaatccaagaccggatcagtggtcacatcatacaacgagacgtgagagtttttcaatccttgtggaaaaggagtattcatgatatctggacggtacggctcgagttcctcatttgagtcgtatccggattgttttcctaacttccccacttgataccttctgaacttatcctccaactcgtctattcacaattggataggatcctcttgcttttggaccaggttgttcgaaaataccaagttttttctggttcaagtgctctcgcagatccggttggttatagtcgttgggttttatgccctaaataaaactcacttcaatataatcagatttactaattaatatagatcagaaataaaatttaatgttgcatggt

SEQ ID NO: 258932 - DNA, 1010 bp, Cannabis indica
tttttacccttggaaggttctagggcaaatatcaaccgctcattctttatctctttcacatatctcttttgggcattgttgctttcccctattatatgcggccctcccgaaataagcaagatgtcctctccttcaacaggaggaggttgtaacccctgattgtttgggttgttgggtagactgggctggttgtgtctattgccctttctcttcacatactacttgaaatggccccgagcgatgagactctctacctcatctttcaactgacatcatttgtcgattgtgtgtcgaatatccttatgttatttgcaatacttgttaggatctcttttgtgcctttcatgcctcatgggctggggcttgccgaaggcaaccttctgctcatttgcgaggtaaatattttctcgagtttcattaagattggtataaatagtatacactggcacgtacttatcgtgcttcttttgtttcttttttttctttaacgattccttaaaatcgtcctttctttttgagccaaaggcgcctgagttatcaactctagtagagacaacacttgttgaaacattgctggtttcgcttcccaagcctattttcagcagattcatctattttcgagcctcctcttttggaacgaacacctgagcccttttgttgaactcagtgatgttctttattagacgaccctttaagtcgtcccacagttcaccccctacggttgagggatcagtagaaacccccgcctgaagggctgtaagttgtgtactatcatccagatttctaacccttgcagcagccatactaaaatgacttaagtatgccttatgtgtttttacgggttgttgctttatattggttagtgcggctgcctcaggtcgtctatcccttgcaggctggaactatttcttgaaatccctggacagatgttcccaggaagttatggaatagtgagtaaacttgttgaaatagctgcttgctgctcaaaactagcgaggtgggaaacaaaa

SEQ ID NO: 258933 - DNA, 609 bp, Cannabis indica
attttgtttagattcattgaacatggacacctataaaataatctaaaatatgtaagtgtaatatgtatatatataaatatttttaaagaacatctacaatgtaaaaaaatgtcttaaatttaacaaacaaaaataacaaatatatatattttttattactgtcatgaactttgaatcatgaatttattccattctatttcaatctatttttatacaatcgcaatgaaaaaattatatgtgacaagtcaacatgcgaccaggaaagatttcctgcaccacggtatattacaaaaaatatatgatgttattgaaattaagttaagataaaaaaagatactaacaatcttattatgtattttacatatttgctgtcatgttcgcagatattgtggaaaaaatattttcgtgtagtgctgcccaacgaatgaaatatactgcagtgctgtagttttaaaaatataaatagttttacatgcctttcataagtcgatttttttaattaaataaactatgcacaccatgtctaatcatcttaaatgaaaatacatcactgtttgcaggaacaccgccactttgccgacactaccatattcaatttatcaacgaaaa

SEQ ID NO: 258934 - DNA, 745 bp, Cannabis indica
atgttattggaactagttatttatatgcttatgaatatctttattttctagaaataattgcatcctaaaatgaaaccttgcatgtagaatcacgaggtactaaacgcaaattaaataaagaaaattcatcatcattatggcataagcacttaggtcatatattaaaaagtagaattaagcgtcttgtgtttgatgacattttagagtctcttgactttatagattttaatgtctgcgttgattgtatcaaggaaaaacatacaaaactaaaagattacgtgttgatagctttaaaagtcttagaatcgattcatacaaatatttgtcggtcatgccttacgatgttttggaatagtcaacactattttatatcactcatagatgattgcaaagccttcgcaagcttcaatatgataaataaaatgtctaaaacgggcatccaagtaaaaagttggtaaaatacaaaatttggcgtttctcaaaaactggccaaatagaatcccgattggtaccatccggaattctagttctgaacagtttgaaacacgaatttcttcaacttagaaccctccaaactaactccatacctagccaaatcattccaaacttcacagagcacttgtataacatccatacaacaattccaacgtaacaaaactcataatcatgccttaaatgagaaatgccattaaagctcaaacttgattcctacctcaaaataatattaaaactatcacaacagcat

SEQ ID NO: 258935 - DNA, 1525 bp, Cannabis indica
ccatgagtcaatcttattagaattctgatagtttttcagggccttttttgtgtgattttttcatcccttttttgatcttacttgccactatttataatcacatagtaggcagttaattacaaagttgtttgtaatctttacaacgttttcaccctgaaatcatggggtttgactacatatcacgtagtataaatgcggttattatttgaaaatcatacaactataattttcctgctttatctgggtcaaaatgatcgtgtatttaaacatgtctttaattgtagcattctatgatacctcgacaagaacttggttctagtgatcttgatagtgatctggagcctttttttcctatctctctgaggtcgataatatacgcctcgttgcttctttatttgaaagcttaacgcttcattgtgacaatcgcagtttttatcagcaaagagtttctcgaggctcatttgaatgtttagcttctgactcatcaagattgtaagtctcactaaaaagatgtttgaagttaaatggtggaagttacagggatgagccttcctatagggaaataggcacctcgcttactgagtccactcgactgttatacttggtttatgcattttacactaagtgttttcatagtagatatgcgttgttttcgtgttcccagatgtaacgaggttgatgcctcggtttatgcatatagtttctcgttaatacgctaaataacagtttgtatttcttttcctcgcgtaagacctgatagtcagggagttgcaagtatactctgttacttatgcaattaatgagttattccattagaagtgatttcatcaatccatattccctttatcttgatgagtgtcctccattgaaatggtagccgaattttgggtataacaattgccccttaaaaagttctttttagtaaaaagtgctttttaataattgcagagggcatttttgtcataatccctttttggaaaaatgcatcctttgattcttgcagttgtacggttttgagggtcattatgaattgtcttttcatcttctgccccactcccaaccgttagatttcccaacctttggccttcttgtcactggactttgagtataaaatggtggcttaagcttgccatattccataaacttctagtttttcggtgagattcatcttgagattggattgtcattctcttgctaagatgtcccatctgagttcagaaatttacccatctaaattcataacaccagaatgcaccaaccactttccttctctatatgttcccaagaacttcaaacctcaatttgaattagaaacgaaggattccaaggctgaggagcttccgatcaatccaaaccaagggaaccccattgatcgttatgggcgatcctcacaagtgattcttgagggtaagtattatccctcatgaatggtggtttgaactggattattatttttttttgctccattgatcttctatctctgtccccacaggattggatatagattctgttgggttttatgccc

SEQ ID NO: 258936 - DNA, 671 bp, Cannabis indica
tgaatttattcagtagtattttttgttttttgttgatcgaatcagtgtttgggtttcttttcattttttatttatttttctctgataatgaatggtatattttttagggtttttcttttttgtttttttttttgttaatgtttattgtttagtagttttttattaatgagattattttttgtttgaaataatgaatgtgtttatttttcttttaattttttttgtttgataaggattgtagatatgttagtgttttttataattattttttttttttgtaatggatgtggttttagcagtttattgttgtagtagtttggattttaacatattttattgtatatatgatgtagtagtttttttgtttagggatctagttgatatactaagtagtttatattgtattagtctttgttgtttttttcttttttttgttatttgttatttagagattagagtttattgtttagtttctaatacatcatcttgttactgttcttgtatgtgttcaaagaaagatattattgattttgaaattgatcaaaattgtgtagttgtgacttatcaaagtttactgttgtatttctttttatttttaagtttatgtttagagaatacagtttaccatttagtttcttgttgattgtcttagcttgttttaaaattttgtg

SEQ ID NO: 258937 - DNA, 515 bp, Cannabis indica
ggagagaaaatctctatataatcaatgttttgtttctgagtatagccttttactacaagtcataccttaaatctcaccaaattatcatattcatccctctttttaaatatccatttacaaccaatattgtttttacaccttttggtaatgggataacttcccaaaccttattgtcttgcatagacttattctcttcattcatggcatcatttcacttttgagagttagaacttttcatggcttgatgaaagttgattgaatcatcttccatcaatccaatttcatcttcatgttcttgaagaaatacaaaataatcatctgaaatagcatttcttctctctcttgtggacctctttaatggctttggtgctggagggtgttgaatttgttcttctggaacaataacctcatcttgatttgggtgttgttcaacattgtcttgttgaggttccagatttatttcttgatcaatgataggtgtggaagcctgaacattgtctaaaatgatagtagga

SEQ ID NO: 258938 - DNA, 692 bp, Cannabis indica
tctgtcattcacttcaagaaaaggatagcaattagacattaacaattaggtaaacatacaacatgattctcctccctattatctcatcttgatcaattttcacttatgttactaaagttttttgaattactttcattctttttcaatcataaaaagtattgatttgccaaatagaatcataagtataatttagtagtaattaatcgaattccctgtggttcgacctcacttgtgtgagtttactacttgattgcgtgcacttgcgtagcatttaataattttcgtaacaagtttttggcgccgttgctggggaattgtataaagattaatattacaaaaaaattatactaacttctgctttggttttttattttttattttttttgctatttgctattctatttcttgcaatattgtctctatccatttcaggaattttatgtgtatacgccgtcaaggacaaggagtcatattacccgttgatccttattagaactattattttttgtagtgacaaattatgtctagtagcattccagttgcgcctgggactcgtagtgttttgtctggggttcgttttgttagtgttagtccacgtcagtaaagatattttaagttttaattgttcagatggtaacagctgtctacttcgggtttcttggtttagctgggtataaatacgatttctgggt

SEQ ID NO: 258939 - DNA, 516 bp, Cannabis indica
cctaattaaatacaaaaaactcaaaacaaagcacaagcccccacctttaaaagggattttgttgcaaaagccagaattgctaccatcgatcgaatcaattgaatcttcactttcataattttccttgaacttctgtgtaaaagacattactctctaattataaattaaaaatgtcattatcaacttaatttgctaacaaaaattattgaaatattaaaattagcatagataaatctataaatgcatggtgtaaactttaaaaaataacacaaaaaaataatcagaatacatgggaaaaaatgggagaatattttttgaaactacctgaatcccaattctaaagtgacatgtgattacactcttagaacgagaaataatatataaaaacataagatctgtacattttccttgttagagctcattgcaatttctatgattttcaagcctaattcttctatgtttctaaaaattgttggttttttcataatgctgtttagtccaagtaaaacatgaaga

SEQ ID NO: 258940 - DNA, 5097 bp, Cannabis indica
tttggccccaatcgggtctccaggatcgccgaacttaaaaatatttttatttcccaaataactcattttatatccatgtattttaaataaatctctgtaattaacaaattacaattatttatccacttatcagatcttcaggatcgccggacctgaaaatattgttatcccacatatagctcatatttcattcgcacatgctatataaatctccataatttataaattacacttatttacttacttatagaaaaatttaaattttatgctgaaataaattagtaggatcataatcccacttattacctgattaacacataatataaatataaaccctaagtatttaccattaggcttattgggatattacaaaaccagaatcagttctttaagggaaaaccaggatcaaatcaccatcagttctttaagggaaaaccaggatcaaatcacctggagccataggggtatgatagggattgactctaaatatcaaaacccattttatcaaaaccagatgcttctggaagattgataaaatgatcgattgaactgagagggtctttgcgtgattgaaacggtagtaaagatcgggggttcacagattagctaggctaaagagatcctcgatagagaattactgaaatatggaaccattacgatcttactaccaataaattaatgattgtaactcagatcactgatatatttttttttcaaacttcagccgtgaataaagttaatcatttcttttttcaagttatgataaagcgtgaccctttaaaattactggaggggcatatgtgtatgattaaccgaaatttatctggaaatgatataatgcaaacccatcactttaaattttttttaaagtttgtgatcaaacctttttgatgagaaagggatcaaactattataactttctgctcaaatatttctaacgagaaagggatcaaactattataactttcttattaaaaaacttatctgatgagaaaggataatcaaaagttataaatgagatataactataacttccgtgtgaagctgaatactaatggctcgcactgtataggaaagtattaaacgagacatcaaggaatcttgaaaaaagtacttaaacctaacatatgaatagaagatctaactattcatgtaaacaataaaaaatatacaaagtgacaagatcattgaaagtatattcaagtttgcttgaaacagattataactgttattgcgaggaaggatcaataactgctcgaaaatcaagaacatggcagatgataaactgctctcgcatatagtagacaattaactacttaatgtcaaagggacatacgagcaatggaaattcctaaaatactttgtgtatgatcaaaatacgactgtttaaattgtgaataaaatgcaaacaaacaattgcgtattaaagttcaaacataaaagtacaaggcatttaacaaagataaaataaaaagcaaagttggccatccaacttcacaaatttgtctttacaaataagtgccataagaggcaaaccattgtctcggcttcagggccattttcctaaaaaaaaagagtaaaatcaagtctacattaatatggaggacttggtcggaccttcttgctctacttcaatctcctcttcctcgcttaattcttccttttgagttttctcgcaagcgccaagcatgtcttcagccttgtcgcctaaaaagttgaagtttaactcgggattgaatgaccaaatctgataaatagtgctccggccaatattatcgaccctctctttagtctcaacctccaactctttgagcttttggtcatgagcagcttgccttttagcaaggtcagcccggagggatttaagagactcctcaagttccttgatcttctgctagtcggcttgatgctgtttctttgcttcttctttttcctgtgaaacctcaacttcagaatcactccactttttgacaacaacatccctatgttcgctaactttgcgaagctcggtctcaagcatttcaatccactgggatggctgatgatgtgtggcgtgaacgagaaaagaagcctgagaagaaaagacaaactaaagttagtaaaaaggtaattaaaaaaaaaagttgtaaaaaaggagagaataaggaagggtagagacaaagaaattagtggcttaacctaatacagaagctcacaacatcttttggccaagtcttcagtactgcctcagatggcaagatcccagtcgctagattcaagtgtcaagaggtttcgccaacagttggtagcatgttgcaagcctagttgtgatcctttagttctgacttcaaggggaagagggtaagaaggctcgagaagaaccacctccggacgagaactaaagaatttcacctggtgcatcgacctagtaggttgttcctcgacattccagacagcaaggacctcaatccattcagcagggacctcattccttgcagcagggacttcattcactgcctcaaaagtctcatcggcttcgatcacaagctgtctctaaggtcttttcttgttggcctttgtcttggtcctcttgggtcccttagcagaatccaaggcctcgtcagcttgagtgaccctcttcctgggtatcttgtcggcagggggaaggcttttgaataggttctccaagtccacatccatatctgcaaagcaagaaaaagattgttaacattaagttaaaaggagtaggaatgtggaagaactcccactaaggagggttaccatattctttggaggatggcgaggaaggattatagtattcactaaactccctagatcctgtaatctagaatatatcaaagggcttgattggttctaaatcccagctcccatctatatgacctgccctatctgtcatggtgccatattgctcagctataccatagtacgactcattacagttaatctggacgtggaatttagggtaccaactattgaacctatgggagacacgatctacaagaagaggttccaaataaaaaagttaaaccaactatctcgaaaggagactaaagtgttacattcagccctaagcactgtgggcgaccacccacattgattacctcggggtcttccgtctaaccgaggatgaactctctcgagataatgtgcgtgagccacatagtcatcattttcctctccttctaagacggggaccttttgccacgaggtatacttgggtgctttataatcacaagtatatttgtccgaagcaaggaggcctacgttctttagattctgctcgttcagcaagaatttagcagatcgcagcccatatgccaggcttagtagggtttggtgacgctcgactatttttggggtaagaatgggtccccgaggaacctctgcaaatatattagaattcggtaagaaacattcaaaattacaagttaatacgagtgaattcataaagaaagggacttacgtatgattcagaaggcagtagtgtttattggagataaacccgtcgtctagaagaagtcatccctaaaatctgtcttgttgggtagaccaactatgagcttacggtcactggtataggctccgagataatagaagccccacgaggcattttttcttgcgggaataactttgacagagtaaaaccaagcaatctccaaaagagtggggcactcccaacctaagatgtagtacagaaccttaaggcttgcaaggatcctgtaggaagtgggaattagctggaaaggggaaactccgagatagttgcataatccttaaagtaatccctgaggggaagaatcgctccagccttgatatgctcaaggctccaagctcgaactcatgaggagttactagttctaggaccatcacactcctcgtgtattatcctttatggagggtaacaactgaattccccatgtgccaagacctgataatacaccctttctgttgtttaatgccgcaagaccggaggataccaccaatgtacgtcccaatagaactaaccttggactcgatgagttctgcctcgaatacaacattagggtcctcaggggtccttgatttgcgatgcttaggagacatgatttcaaactcatggtcaccaagttcaaaagcaacagtgacgttgggtaaaaacattggtcttacgagtggaatagaagataacacaagggttcaggccaggtagtgtctcgtaaaaagcgatgcttgccctaaaaaatctcttgcaaaaactgctataacgattggaagtatcttcttagttcgacttaatcaaatgatctctaatcctggcatcatttatttccaatttcgattggggttcaaagtttctaggtttatatggacaagctatatgggtggggcgttccggtattgcagattctagaggataaatttctgaaccagattgggacatctttacaaaagaaagacaaccccaattcctggatgaagtttatcaaatcagaggcttgaggaatatgataaacctaaaactatggctaaaccctaaagatcatccaggaaatacgaaccctaattgctaaaccaaatgaagtaataggatgtaagacaagccataactcaaataaaagcaagaggagaatgagaaacttattgttcgaagtcgaaaagtcggatgctgaagatttctgcaaatgaaggcgtgatggttgccaggataaatttttgaacaccgagattcgaaaagcaagcctgaataaattcgtaggaaaaatgtcaaagataaggatctcatgcacaattttagagagttcgaatgtaggtttcagaaagctcaagtttttggaggagatgaaaatggtagaaaatttgattttaaccgttttataccttgtacttttcaaccatcaaatcataatatggaagatctaatggatgagaatagaaaggaagtggaaaagatagcccattaatggtattgatgtgtatcgaaacaataaaatcgccaaaatcaaggacgtccattttttcaaaagaaattatgacaaaaataccctttgtaatcattaaaaagcacttttttattaaaaaagaacttttaaggggtaattgttatacccaaaattttgc

SEQ ID NO: 258941 - DNA, 917 bp, Cannabis indica
ataaaaatacatcaaaagaccttattttatgtaactaaatcacaaaaattgtaaaaatatttaaaattctatacaactgtatttttgtaattcttttattgtttttgtgtatttgtgaaataattgtacaatctaaccctatttggtacaatcatataggggtggattgggttgagttaggttcattgagttgtgatgaatatatagcctttaatatttatattagaaacatgatgaaatgatttaacctagaacatacaaaaaaaatgatgcatgtgaatatatatatatagtgctttaaaaacatttaaagtgatggtgatagtatcattttatgggtagcaaagttaataagaatgattgattctcatgttatattttttggcagaagtagtaggataactatggactacacgttagtgatgtgttttaattaattttcttgtgagaataataatgtaatttatttataaaatatatttgtatatattttgtgaatgtaaaatgtattttatgtataaaagttgtctcaaaaaatgggttgcattgggttatatagtgttagattgtgccaacccataaccaatgcataattatatggtgtatcactttttagcccgatgagccatgatctattcttaacataaccctttactacaaaaaatgagttggattggatgggttgaacggtttggttcatattttgtgaacatcaataaacaaagttagcaacttcgcataccgataaggtaaaagaacatgcaatcatcagcctaaacttgagaattgacacagttgcaaatatttttgaatttgagttttaatcttttgctgagttccactaatgggcgtgggcacacatattttttgtctactcgtagcaacctttttttttaggataaaaacttgttattata

SEQ ID NO: 258942 - DNA, 966 bp, Cannabis indica
tgcccttcaagtctcaaagagttggatttttggtcacaatggtgttgctccaattcagaatccttggaatcgtagatgaaactcttttacagaaagagttgaccctagcaggacaacattcataaaaccaaacagtttaaacccacgtatatcccgaagccctataccaaccatcatactggcctcccttctctgccttcttacttttcattattatcccatgctgaattctacctttgaatgaatcaatagtcaattcaaaggattccctaccccaacaatactcgtcccaccgaccgctatccacaacatctagatcaaacctagatacttctttatcaggagtattactaagaagaaaacattgaataaaatacaacacagccattgtcaatccaagggactcatcaaaaccccacctactacccaaaaaataatcctcaatagctttgtggtcaatggtttttacaccacgaaaaataaatttctaccaactgatttgattcttgtgaaaacaacaacttgttgccatcaccgaaataatcaattccaataatcaaataaaattcctcagcactaaaccgtatgcaacagccagcaaccttagcccaaaactctttaggattgggctggaaaactttcctcaataataaactatgaacaacttagggacggaaaacaatctcaggcatatctagaaaatgaccaaattgagtctcacgaaacatggacagtaaattaacagataaagttttcttaatattatcaatgacagaaaaaagactagtgcaaatacatttagatctgtaataatcaggtggactaaatttgtagtcccagacctgcaacataaccaaaatggccacagtaaattataaattgtgaataattcagtaaagcaactaaaataaaactataacaaaactaaaaaaaaaattaccaaacagatacaactatacaaatata

SEQ ID NO: 258943 - DNA, 953 bp, Cannabis indica
tcgagaattttgatgtgtttctagaggagttaccggggttaccaccaaaacgtgaaattgattttgagattgatctaataccgggggcagagcctgtatcgaaagctccctacaggatggcacctgcagagttgaaagagttaaaagtgcaattacaggggatgatggatttaaaattcactagacctagtacttcaccttggggtgcaccagttttgttcgtgaaaaagaaagatggaactttacgaatgtgcattgattaccaggagttaaacaagttgacagtgaagaataagtaccctttgccaaggatagatgatttatttgatcagctgcagggaaagaccgtcttctccaagatcgatcttcggtctggttatcaccagctgaggattcgggaagaggatattcccaaaatagctttccggacccggtatggccactatgaatttctagtaatgtcctttggattaacaaatgccccagcagcgtttatggacctgatgaaccgagtgttcaaagactttctggatgattttgttattgtctttattgatgatattctaatatattcagactcagaagaaactcacgaaagacatcttcgaatggtattgcaacgtctcagggagcataagttgtatgccaagtttaagaaatgtgaattttggttacctcaggtgagttttttgggacacgtggtaagtaaagatggtattttagtggatccagtgaagattgaagcagtacgagattggcctcgacctaagtcagcaaccgaagttagaagtttcctgggattggcagggtattatagaaggtttgttgagggctttgcaaagatttctacgcccttaacagagctgactcaaaagaactgcaagttcgttttgattgataagtgtgaaagtagtttccaagaactgtaataaaggttgattaccactcctgtg

SEQ ID NO: 258944 - DNA, 562 bp, Cannabis indica
gaacagcgatatcctactcatgatattgaattggcagcagttgtttttgcattgaaagtttggcgtcactatctttatggtgagaagtgtgagatttatactgatcacaaaagcctcaagtactttttcactcagaaggatttaaatatgaggcaacgacgatggttagaactggtcaaagattatgattgtgaaattctctaccaccctggtaaagcaaatgtggtagcggatgctctgagtcgaaaaggaccagggcaagtttgtgaactaaagaaaatttcagcagagctggctgaggatatgactagagcgggaattgaatttgtaattggaaaacttgccaacattaccctgcaatctgatttattggaaagaattagagtagctcaacaaagtgatcttgagctacaggggcataaggagaagttagaggccggattggcaaaagacttttcgtgtttatctgatgggttgttgcgatacaagaacagaatttgtgtaccggttgataaagaaatcagacaggagattcttgatgaatctcatactacaccgtact

SEQ ID NO: 258945 - DNA, 611 bp, Cannabis indica
ccagaaaagttgtcagagactcagaattgtcattttcatcagaaaaaatcaccaaaaaactggtttcttcatcaagaaactagaaaccagtttcttggtaatttttccagcaactatgccaattctgatgacttttccaaagtttactgtcagtgccggaaaagtagtcggagtagctgctagcgtcagaaaagtcgtcagaattggcattgtcaacggaaaaagtcaccaagaaaccggcgacaatgccaatttcgacaaattttctggcgccagcagcaactccgatgacttttccggcaccgaccgctactccggcgacttttccggcaccaacagcaaactccggtgactttttcggcatcaatgaaaaataaaactttctaaacaaataaaaacattaaatatgggatttgaaaacctaattacatatatatggcatatcaaataccataaaaagacctaaaacaaaaaaataccatataaattggtcaaacttaaatgtgccatatttatcataagaacttttaaaatctattgtaagtataatttcctctatatttttttctcttttggaagttttggactagtaggtagacacatcaaagata

SEQ ID NO: 258946 - DNA, 1084 bp, Cannabis indica
ttggtttgcatactacttacttagagagccaattgtcataaacgacgtcgtctcctcttcataagtctaatctatttattttgcctattgtttaacttaaccaaaaaaaaattgaagggataattacgtattattttttaaaaaaaattatatttttagaattttttttttatatatttttacgattttttataaaaattatataaaagtaatatgaaaataacatctaaataataagaaaaaaaataatatataaataacaaaaaattaacaagagtacaacataaacgtattttttttaataaaataaaaaaaaatataaaaatatttaaaattccataaaatcgtatttttgaaatttttttgatttgtggaatgcaaaaggccctactttcgggaacaaaatggttacatataaaggatttcacagctcggagggggaattctcaaaaaatcttcttttaaatttggaaaacttttttatttaaaaaaggagagcatcccttgtattaaattatcaaaattctatcatagaattaaaatttagtagctgctaaataataaaaatctcacaaataacattcatatgagccatgtacggcaaaatatgcataattttttcttctttgtgatagatttaaaataatattagtcatagtttgtttttcaaatgaacaaaaaatattgtaaaaattacacatatatgaaaaaattataaaaatttacttttttatagtatgaataaaaagtaatggattttttttttttttacatttatatgaatttttttatgctacatttttgtaaaaaatatggaaatttaatatttgtaaaacaataaataaatttgataaaacttataataataagttttgctgaaagagttatcggtgccaaaaaagttgttggtgccagaaaagtcaccgaaaaagttattgttgccgaaaaagtcgtcggaaaaattatcgtcactggaaaagtcgctagaaaaatcaccgtcgctataaaagtcaatggaaaagtcaccataagtaaaagtctgagatataaataaaaatagaaccggttctataacataaataaa

SEQ ID NO: 258947 - DNA, 586 bp, Cannabis indica
taatttgacaaatcatgtatgcttttggattataattagttaggatctcgttcttatcatacttttgaggttgagttaaaagattcatgttactttttatgtgtgattgggattacataatgttcttatacagagttgagcgtgtcttgtttcagttacttgtcaggccccttgctggaatagagctacccatactgaggtgtgaaagccatcttttgagtaagctggaactttgtaattaagagttatgaagaggatgcactaccatagaaaagggctaccttcagtatggtgtgatagcatccagttgcgggatcaaattgaaaaaggcgaaaaagaaaaatcttgccaaggacaatgatcctattttcactgcacacactaatgtctgacaagtgtgtacaagtttgtaagtctcctctactaaaatgaataaaaaatcctggttcacattttttgtaacatgcatatcctttttctcaacatctactaagtatggtttgttcttgagatactaattagttattctcttaaaaagcattaacttgtatttttgtcagttattatgaaatttgattagctgctt

SEQ ID NO: 258948 - DNA, 728 bp, Cannabis indica
acataccatggttcgggagcttgttgtatctccttttgacataaattctgcacgtggtaatttggacaggatcttaatgcactacatcatcagccgccaaactagagtaccattacccaaaaggcacgattacttctattcttttgtcaatggcttaaatgctaacttttgaattttgaccgtgtggtgggtgcgtattctgtgggatgctcaaaactacagtgattggatttgtgcttccttctcattcactgtgtgccctttacaatgcatgtaatgatgggagctgactgttgggaagggtgatatcccttcaactcctcgttcatccaaccgttagacacctcttgggcgagcaagttgaatcatctaccttttgtagaaggtgccttttctaggtacccaataaatacctttagtaactgatccacttttcactttcgttgcctgtcaagctagagctctatgagttttaaatcttctcctattgcggaagacttcatcactattacaatcagacacggtctcctccactgtggatgttgcaccaaaaccgtcaacccccagattcttgtcaactggtaaattttctttgtttatttgttgtagaattttgaggggattgttaagattcctttgattttagaacattggtaccacatcgatggtcttcaaaggttttaggatcacgctgtgcgctgacctgtgttgttgttgtgtcgacttct

SEQ ID NO: 258949 - DNA, 508 bp, Cannabis indica
cactttttccaatgaattgaagggcgattaggggaagagccccaccaaaatttagacaccatcgattcaagctatttacagattttggtaggaatacgaaaacaagccatagcataagagggaatagcttgaaggacagacttgaccaaaatttcctttccagccttagaaaaccatttatgattccaagattgaagaacagacaagaccttatccttaagaaaagcaaaagattgatatttagctcgagaaaagcattgaggaagtccgagatacttagagataaaaggcttatccaccagtctgaaagtatgcataaacatatctcgaacattagcttgagtgttgggagagaacaaaatggatgatttatcaaaattaattaattgacccgaagcttgagaataagtatgaagggctaaattcagagcttcacaagaagacggtgtagccatacaaaaaagaagactatcatccgcaaacagcagatgagtgagagaaggggcag

SEQ ID NO: 258950 - DNA, 725 bp, Cannabis indica
tcccaggaagcgtgcgagtgaggacaaagcatgctggaaacactcctgtttgtgtgtagggccagtcgtaattccatgaagcagcaagagtgacgtactcgtgtataagagccattatttcgtgggtgtaaaggcccaatggaggcttgaagcggggacgttacaattcacttaagagcaaatgttcttttattacctgaaaaatctctttcgcattcctttgtccattaaaattgcttatttcctctcaagatgtttatgaatgggacccacttgtctgttgatttggaaacaaatttgctgagtgcggtaatccgactagtcaaactttgaacttccttagtttttgttggcgatttcatatccaggagggcttgaatcttctttggattggcttcaattccttgagcattgacgataaagcctagatacttaccagagctgactctaaaggagcactttaggggattgagtttcatgttgtattttttgaggactttgaagcactcgtccaagtcacctatatgccccccaaccttcttgggtttgatgagcatgtcatccacgtacacttccatatttcgttcgatctggtctttgaacatcttgtttactaatctttggtatgtagctccgtcattcttgaggccaaatggcatggccttatagtagtacaaacctatatctgttcggaaacttgtatgttcttggtcaggtggatgcat

SEQ ID NO: 258951 - DNA, 514 bp, Cannabis indica
tgtaagggtattttgggtacaatacataaaaaaagatgtatatctcaaataaatataaaattagaggtaaatttgattaattgatgaataaaagaggcatttttcaacttacccaaatataatatccaatttattattttggtattctcgtacttgtcgacactactgtcggtaaattaattactaattataatcatgcatagactttttcacaaacaaccaaaaaaaaaaaaaaaaactaagtgtcttccaaaatcctaagcacccatggaagatatatatcccgaaagactttttccgattgtgtccttttaaaaataaataaattaaattactttgttgactttttattcagataaatgaaattttatgttaaatttggacctaaaaaaataagtatgtgttatatttactctattatttacaattcttattatattaatagttagttaatattttattgaaaaaatatataaaattattttttttattatttaaataataataatatggt

SEQ ID NO: 258952 - DNA, 1247 bp, Cannabis indica
aaaaaattgataaaaaaattattaaattctttctttccaccaaaatagaatagtcattccacattccattagaatgaaatttcaatactttaatatgcaaccaaacaaatgaatggaaagaagattgttatcattccatttcattacctctaaccaaacgccacctaagggtcgtactcaagttttcctttttgttgtgtacacaaatatattctcaaacatggctttcacttgtgtaggttgttgccatcaccgtattctgcttgttagtggttgcattctatgctttcttcgctcctttccttggaggccgcatctgggagtatgttttgatcgggatctactctccagtggtatgtgagttagttaatactaaaaaaatgactatgtaagaatttttttttatgatgttaaaatgtagctggaaaacgtctctggagaactttcatcaacttctgtttacagaatttgatatgttccctctaaagcattcattttggtgtataaccttaacctatcattccgttaagatcatgttcttgaacccagagataaaattaaagcaggcatgtttgatctttcatttgtatgtaattattctaatgtgattgtcattgcaggcactccttgttttcattctttatgttcggtgtacggcaataaaccctgcagaccctagcattatgtctaattgggacagtagaacaaaaaataaactgaacacggatcatgggctatcagcgaaagacatgcctaggaaatttgatggaattgccattggggagcattcttccccatcaatggcttctcgaagttctatgggaggggataattccagtaagaaaggttcatttggagaactaggaagtgtagataatcaagtggaacctacaaagagaacgtcctgttgtatcggcggtgaagttctctgtgcagtgtttgttcatgaagattgccgaaaacaatatgcggctactgagcagcaagggggtgaagaagctttgttctgcacactctgcaatgctcaggtattacagtgtcttgaccggtatgttggatacatcatcaatacagatatcctataatcattggagattttttgtacgtgtatatatgatatataacctacttcaatatgtggcacatttttgaaaaatgcatgaagctatatccatcttgttcttccttcaagtgaaagtttttcttcgctttatcagggtttttttttggggggggggtgggggggg

SEQ ID NO: 258953 - DNA, 751 bp, Cannabis indica
tttttagtttctttactattttatttaagttgcatttatgttgaatgaatcagggaaagtcatctgatgagttagtaacacaagattctgatgatgatgatgatgctgaggatgatgagaaggaactgcctgatcctgaaaatattaaatccgactccaatgaatgtgatgagttggttaaagatggtggtgatactgatggagatgataaggttgttaatgatgttcttcctgctgatgtgaatcaatctgaggttgtttcaggcagtgatgagagggctaaggatgttgagaaccttaaggccaatgagtccagtttaaagggggatgatttttttgatggtttaagccaacttgaaattgatgatgatcaagttgtgttggcttgtttagaggctgttcgtaaaatcaatgttagtgtatcataatttgtttgcaagaaaattatgttttattttagttgcttgactgtttaatgtttgttttgcaattgtttattttctgactttgtttttttaggtcccagaacccaatccaggtgttgttggtgaaaaggcagctgccaatcctactgatgaagaagctgagtacactgttttcgatactcctcttttggataagagaaagcgtgcaccggcattaaaatcgccttttgttgattttgggtcggctaatgtgaggagcactccaatggaggtaatgtccccaggttctcaatcaggagggaatgagagggattttaagatggtta

SEQ ID NO: 258954 - DNA, 1673 bp, Cannabis indica
taaaataatttccaacagtctgcatctggaaattttacaggtggtgaagaacagatatctgaagatgtgtctggacagaaggacctggtgtcaagtttgtctagttctcaatgtcaaaaactgatggccttgcttgctcaaaaagttgttgaccactcttcaccatattcttcaaatgatcaacctatagtgtcacatttttctggtaagaactcttttgttcatagttctaattatatcatcaatacaggagccacacatcatgtgtgtcctgatctttctttatttcaatatacccataatgatccctaaccttaaaacagttctcttacctaatggtatccacattaaaattgattgcatggggacaattagattgacccctgattttattcttgaaattgtattatatgttcctacctttaaatgcaatctgtaatctagtaattctttaacagccacaattgattgcacatttttgttttctcatgaaaaatgtgtgattcaggatactttgaagaataaggtgattgggatgggtagaaagtgtggtgatctctattacttgaattgtaatctgtcaaataatgctcattttgtttttgtttcatcttctattttagattctaaaatctttaatgaaattgtttggcactataaattgggcaatccatattgtgtaagaattcatcccttgaataaagctttaaaggttcattcagattctaattctttgtttcattgcttaatttttcattatgcaaaataaagaaaatttcctttcatctccaaccataatattgttaaaaactttttgatctcatacatactaacatatgggaaccttttacaccatgacagttgagggatataagtttttcatcactattgttgatgattgttcaagatatacttggatcaatctcactatacataaatctgatgctcaagttatcattccccaatttatagaacttgtttaaaaccagtttactaaaaccattaagagagttaagtctgataatgcaaaggaactaaaatttaatactttgtttggtgagcatagaattacacatcatcattcttgtgtgcaaagggctcaacaacattcatgttgagagaaaacatcaacacttgcttaatgtggttagagctctcttattttaatcttttgtcccattagattattagggagagtgtttgtcaactacaacctatcttatcaatatgacacctacacctaacctaaagaacaaaacacctttttatatcctacactctaagccacctacatatgagcatttaaaggcctttgggtgtttagtttatgcttttacctttagtcaatctagatccaagttcattccaagatctaccccttatatatttcttggataccctattggtatgaaggcatacaagcttcttgatttaaataccaaaaaaattgtcaactctagagatgtctatttttatgaacaaatctttccctttgttaactcagaaggcttacctacagcttatgagaattttttttctcacaatcgaaattcagtagactctcaagcttcacaaggtgtgtcacgtgtgtcaactacaattgattgcaatcaagtttcacaaggtgtgtcacctatgtcaactacgggcgttcatcaaaccgcccaaaccgc

SEQ ID NO: 258955 - DNA, 584 bp, Cannabis indica
agtagaataggcgcatgtttttaacttccaaataagcgacattcgtaagttctcgtcgatcatgatttgaccatgctagctcttggttacgcaggttgttcagactagatggacgccaggcaaaataccaggagtcagggcaactcggtcaggtcaaatgaaggtcagtgagctcagtttccccaaatgctggggccgaggtagaggtccaggggcagggcacgtggtcggggtgatgctaacctgccacaggctgcctaggctgcccaagctactcaggaagcccagaattgggaaaattgatttgtagaaatgcaaactaaaattaatgaacaagaggaggtaattcggcatctaaggtagcagggtgctcctgcaatgcttgttccaaaaattccagtggcacctgaccccgttgtctaggacgaacctatagttgcagtgaatcggatggaacctctgtatgaaaggttccgtaagcagacacctctagttttcctgggaggtctcgatgttatgaaagccgagcagtggctgactgtgatcaccaagatattaaatttcatgggcgtcaccgggaatga

SEQ ID NO: 258956 - DNA, 910 bp, Cannabis indica
tgacaattttatttgatagttattttaattattaaattattagttttggcatttaaatggttagaattggaaaaatggcatttttgagaaaataaaggaaagattattaaaagtggaaaaattccaaagtggggcccattagtatggccgaccactgggttggtaatttacacttaatttttctattattttaatgtctaataaatcctaacctaaacctaggtggttgcctataaatagatagtgagggctcacacttaaagttgatgaaatttccctttcagaaaaaatttcctgagccttcctcttctatagaatttgaaccagcccctctcttcttcttttcataatttcataccttgagtggtagagtgagtgcccacacacatcaagtggtatctcaatcatagtgtgtaaggctgtgaagaatcctgaatcaagagaaggacattcgggctcagatcttggtgatactttgctacaaataggatacaagggttagaaatctgagtggaaggagccattagatcctggtaaaacatattccagcaataatctctttaactcctattcttgttttcttgaattttaagaaaatggtattttgcatgaattagagttttgtgttctgtagtggctgttattgtttgtgttagttttctggagtttaaatgtttagaaatgttgtttggagcatgaattaagggttgttagtgagtataaccaagttttgagtttagaactcaaacttggagctttaatggtgaatattgattctgagctttgattgttgttctatcacttggaaaatgtttattagggtgtattatgcaggtctgtaaagtttggttgggtttggaaacaatttggttagggtttgcagctttttggtttttctgggtaaaactgg

SEQ ID NO: 258957 - DNA, 647 bp, Cannabis indica
agggttctttttcgaaaatctttttttggagtgcgaatttattctcaccgcccactcaacagtgttgcccagcagccgatctacgaaaccccgaagtccggtcgccgaattcccccgcgcgggggctcacgcgcctcctgaagtttctgcacgtcttcccacgcgctggcgtgtggaggcgcgtgtgacggtgtctttgacggcgttcttttgccggttctttcctttgttcttctaagtccactcgcatctatttaaggttgtaattcggtattttcttgccttcttcgtgtttgggtgttcattctttggtgtttgttttgttctttttctctgtcaattgtgtttgcttttgagattatggcagagataaaatcaaattcaaaatcagttgttgtttctgatgtggttcccgtgatgtcgaaaatcacagaccataagttgattggttcgaattatttggaatcgagtaagacaattcgactgtatttgaggagtattgacaaagatgatcacttgttgacggtcctcccacagaaacagacgattcaaggaaaatatggctccgtaaggatgctcgcttgttccttcaaattcgaaattctatcgataatgaggtaattggtttgattaatcattgtgaattg

SEQ ID NO: 258958 - DNA, 523 bp, Cannabis indica
ttcaggtcccaaatctagacaccgaccacgactcgggtccaagccctaggtctagatcccaatcatagtctcgggtcccactctagttccattttgggtatcaggtcttggtctgggtcctaagttcgagtatgggtcccccatccaggaccagaacttaggtttggtccaagtctaagttcgagctcgggtgctaggtcctggtctgagtccagttcctagtttggttcgggtcggggtccaagtccccacctaagtccgagtccgcttctagttttggttctagtctcgggtcatgggatacaggttcaggtatgggtctaggttcgagtctggtcttggtccaggtctgggtccaggtgcaggtccgggtttaggtctagctctgggtcctaaatctaaacactaactacgagtcaggtccaagccaggggtctaggacccagatcgtggtctcaagtcttcatcccagttttggggcccaagtcactgtcccagatctaaggcttggctcctgggttta

SEQ ID NO: 258959 - DNA, 998 bp, Cannabis indica
cattgatattgacttagaaagatataacggtaagtttaggatatcttatctaagattaatattggtcccttccaatgtatactccatacatccgatactggtaaactttgctaatgtcctggaaaggacataacacttgtccaatgtgtaagtatacctatcgctggttatcatgccagtctaaatccaatgaacagaaaaattagggaattacacttttgaacatataatcatgattatattccactgtactgaaaacactataatcatgaacaaatacatatgctctcgacttaatagaatttatacattaaatataatcatgaaataaatcatgtgaaccatgcaacataaaatgcaatttctgatctttattaattagtaaatctgattatattgaaatggattttatttagggcacaaaacccaataatgtgaatatctaattaaaataaaataaacattaatccatttcttttataagaattgatcacattaaaacacataaaaaatgagtaacataatggtacaaaataatttttacggagattgaacaaattcaaaagtagatcccaatattaaaaaaacaaatcctacaaatttgtgattacaaaagaacaaaaattaaaattacaaaacaaaatccatttaactctcaattttatgttcattgtttctttactttacttattttattgtaaaaaaatagcagatcgtggacatcagaaaaaaaaaacccaggttgcgactccaagcccctggtgctgtcatcttctgccttcactccactattgttgatcaactttaccaacgttaagccgagttcctcacagagcaccacacgcgcggttccttcattaacctcccttccagcttcacgaagcccaactccggtgacttgtttgtcctcaagcattaacaccatctacccgtcttaaatcgcacctctaatggtccgcttatatatatttccctgcagagagaaagagagagagaga

SEQ ID NO: 258960 - DNA, 1127 bp, Cannabis indica
gcataaaacccaacatgtacttcaagttagctctggggaagttcaattcgtaaaattctttcacatcagagtttcatacacagttttcctcttttcattaactccgatcttgcttagaagacctagtagaagtgaagcaaataccaagacaacccctaagagcttacattagtaggttcattgctgctataatcttaggaggtattgaaccactagaagaattggggaaagacataaaaagattgattgtagggaaatggcagaattcttggacctaataggttgatttataaagctcgaagaagtagttcgacgtgtagacacagttggactaaaagaactaacaacacaccaccgcagccaatacatctgtccagcaagaccaaaattcaagaaatcacaacagctcaaaccatggtggaaataaatcaaataatggcaacaagtagggtaatagaaataaaagtagctttagttgaaactacggtaacattttcaagagaatgcctaaaatttcattgtattaactgtaacatccctgaaacgtaattatgaataattaggatttattacatattatggtttaattacgtagtaatgagaaggattatgatctagctaacctaatttagcataaattataaattttacaataagtagataaataagtttaatttgttaatcacaaagttttgtttttaaaaatatgaatataatatgagttatttgtgaaataaaaatatttttaggatcggcaaccttggagacccaattggaagccaaaaatatcaaaatgattttagttagtaatattgatgggattattgagataagttgattctaaaaataccagggtattttggggtactcgaagttgaccaaatatcctagaattaaagatttcttattgactaagaaataataaaataaatattaataataaaatttttattaatattattattaatatcatattattattattatactattttttttaataaatcaagaagttgtattgctcaaaacaatttttacacactaacagcacccctatttcggaacttcaactttaactatacaatttctctatgtatatacatccttacaatgtatggaaccaatct

SEQ ID NO: 258961 - DNA, 623 bp, Cannabis indica
tcaggagatatcaagtggggaaactagggagataatctcgatacgactcagacgaggagctcgagccatatcacccagatatcatgaatactttttttcctttgggattcaaaaacccgcatgtctcgtcgtatgacggaaccactgatctggtctcgcatttgaacaactttaatacaataatgcgagttagtaatgtgacgaagaatttacgttgtatcttgttccccacctcgcttgttggagcagcaagcagttggtttaacaaatttactcaccattcaataacttcctaggagcagctgtccagggatttcaagaaatagttccaggctgctagggatagacgacccgaagcggcctcgctaaccaatataaagtaacaggctggcgaaaaatttaaggcatacttaagtcattttagcacggctgctgctagggttaggaatttggatgatagtttacaacttaaagcccttcaggcggggatctctactgatccatcaaccgttgggggcgagctgtgggaagacttacagggtcatccagtaagaaacatcactaagttcaacgaaagtcaggtattcgttcggaaagaaaaagtccgaaaggaaatgaatttg

SEQ ID NO: 258962 - DNA, 697 bp, Cannabis indica
tcacacaaggggatcttgtgtctaatcaagggtcttggttggtataggtatagattcactgtattttgtaaaagagtgtattgtttacaatattgttggcttttgtaagatacatctttgaatatagtgaaagttattaccctggttcggggaacccaggcactagctgtctagattgagtttctagggcaggtgaagcttgtaaaattttggtgttgaatctttgattttgttctttttatattcaaacttaaattaagataaaatcaatctaaatatgaaaaagataggttagacaagaacttggagtttacatatttaaaagtcaagatgggacttcaatatgtggtccattgatgaggaaaaatatcaagataagtgagctgaattagagttagtgagctaagttagttaagttgttagttagacagttacaaacttacagtagcaattagttagttagtcccctactctgtattttgtataaatactgccttgtatattattcatgattgatcaatttacatctatatctttcttcaattatttctttgtaataattcatgtcactacagaaaatgtcacttttaccagcacagttcgctattgcgctggtaaaaagtacttttaccagcgcattttgcaaactgagctggcaaagaggtcaaagttttaccagcgtacatttgcagtggct

SEQ ID NO: 258963 - DNA, 1185 bp, Cannabis indica
ggattgctggacatgacattcttctctttcctccttgacttctttagaggagtcgaagaagtcacacgagctgcctatgcaatctctcgattgggaggatcttcagtcttggtcactggattcttcctcttagcacaagaaaccatggcagcgaggaagctcatcttgtctgtaaaaagaacaaatggttagtacgtaagacaaataagaaagtaagtaaacaagtaaaagatgactttggtgcatcagcaacctattgattctccaactccctcagacacactagcctcagtgtgacctaaaagttcaatatcttttcctcaataccacctcctgaaatttcatcaaagccaatgacaataccatcctacccagtctcctcatcctcaagaggcattgtccaagaattatcagcaaagcgagcatcaacatacacaagctgacaagtcattattaggctcacacgacggaggttgtcatcaatgaaaaatatttctccatccctttccagtaagctaatatcagtcaacatagaatctgctatatgcatcatgtcaatggagcaaaccttttgaagtgaaaagccttttgaaagtaacatgtctttaaaggatgtcaggattatagaaatactcttcgtggtagaggctgcaattgttttcagtgatgttgtcaatatacactttaaactgatcacataagccattcttcttttgagtaagacttctttttagatcacataagaagttgatctcatgaggagttagcatgagccaattgtgtagacgatagaagatgaagaatgtcgataaaatccagtaaccatttggatttatctgatatgtgcaggctttaaagtaatcaactatcaacacgaactacaaatgaagaggcaagaatgcacctgcgctcataggaaaccttgaccaagcactacaacaaaggttttgagagccacttgggaaccctctgcttggttttctaataacagtgtcaggaagcgagtacttattgttgggttttatgccccaaataaaactcatttcaatataatcagatttacttattaatatagatcagaaaaaacatttaatgttgcatggttctcatgatttatttcatgattatatgtacataatatataaattcatctgaaaccctttccacatacttgatcctgtttat

SEQ ID NO: 258964 - DNA, 554 bp, Cannabis indica
gacaggagcaaaattggtacaatatttaaaaaaagaggtaaaaataatagattttaaaaaagaaggtaaaaataaaataagacaatataaaaatggtatagagtgtaatttcctctttttctttggactaccaacgggccgtctcaagctaaatggaagccatttaacttaataagatattaaatgtaatattttaaaaaataaataataattaaaacacaaaatataaaatatattatttttcaaaaataaatttgagattttttgttgaaggggtttttagacttgggcgtgagctcctactgacccacccttgaaccgacttgacaactagcatagaatcttgatcaagtacagctagtgatgtttaaaaatctcaaaaatcaaaatcacatgttatacatctttgaaacgtttgcttcaatgacaaataactcaaaagttgaaaatatagaactagatgtgttatacatagtataacttaatttataagccaattattttctatggaaacagaaagccaatattaatgatataaaatatttttttaaaaa

SEQ ID NO: 258965 - DNA, 641 bp, Cannabis indica
taaaaacacaaaatctccgtcggacaggaagagccccatccccgggcggagtaaaaaataaataagcttgaaagcaggcggtaagcttgtggaataagttggtatggcgcaaggccgacaaatacaaagaaattaatgaaataatcttgaaggggaagcatagcccccgtcataaagtgcgtctggctccaagctccgaatcctccgtaattgtggttgggcgtctccgcatcacggggcagccggtggtacgtcccggacgtcgcgggtttgataccggccacctccacgatgttctccagttggtgagggcaagtcaaagtggagtgaagctcagccgcttcccatcctgtggcacgaggtctatacccctcctgggcaacgggacccaccataacttcgtccaaagtggccagacgctttcctcccttcttggaagattttggaaccggatgcagacattttggttctgaaaaagagttaaaattccagcaattaggccccatatcaaaccctaaatcaaaaaagggattgggggtcccctaaccgctggaaagaggccccctccggacggttgtcaataagaaagccttagaaggatttcctggactaaagtcgggtgcaagaatctcacagatagt

SEQ ID NO: 258966 - DNA, 750 bp, Cannabis indica
gaacaaagagtaaaggagatattaaatcaccttgtttcaaaccctgttctcctttaaaagcaccctgtaaccttccattcataactaaagtataggaagtgtttctcacacaaagcatgatccaagttatgaatttagaaggaaaacaataaaaattcagcaacttctcaagaaaatcccagttaaccgtatcataggccttacttatatcaatcttaaccgtgcacctaggggagcaattcttcctcttatagttcttcaaaagatcctggagaatgaggatgttgtaagctattgaacgaccttttacaaaagcaccttggttctgattaactaaattaggaagcactttagctaatcgagaacacaataatttggagatgcatttgtaaagggtcgtgcaacaagctataggtctataatcaacagctcttgaagggttttccacttttggaactaaagagagggctgtattatgaaggtcagcagggaattgatttgtttcaaagaaatgaataatagccctgtgtatctccttccccacttctggccacacagatttaaagaaccccgaaccaaatccatcaggcccaggagatttagtacttggaatactaaacatcgcagacctgacttctttaagagaaaaaggtttcaatagatgtacctgttggtccaaagtgagaattgagcccatgtcaatgcaatcctgttgaatcggccttgatgttggattctctttgcccataa

SEQ ID NO: 258967 - DNA, 534 bp, Cannabis indica
ccaaaatattgacgcaaaaatctagacacagatctctgagccacaccagctcgctagattggcaagaataaattataagttaagtatatatgagagacacaaggaatttatagtagttcactccgtgtatcgcgacagtaataaagctacgtctatttcgagttttatttctcacgagatggattacagaaaaatggctaagtctgaatacactaatttctagagagatatgctctgaccttatgactacttttcttaacttaaaaatgagctagtggacctctcattttataggtgaaggaggtcctactagatgggaataaaataatccaaaaaatatgaaaaaaaatatatatttaggttatttttgaccgtagatgataatctaatggtaaaaattaactttggaagttgattatcaattttcgaagcttgagtcgcgccagcgggacctactctgggtaagttgcatcttaaatttgtaactcccttgagatgaaatttagagttaataactttagaattacgattgaa

SEQ ID NO: 258968 - DNA, 2091 bp, Cannabis indica
ttatatattagaatcatgcataaattggcactcgaacagtgccccaccacacacaccctcaagaaaattcatgcttcataatttatacataaatgcattatggggtcacagccgcaggtcaggtataataatggaccttaaggcgtcaccgaagttactatgatgtggagagaaatagtaatagaggggtaaaaataaaaatatatgccatgatggaaagggtaatatgccttctatgagtctgacaactatacatctttccaatacgtcgtcgaccactttaattactttaattgtttatattaatgaattttggtcctttgctatattggtaattaagtactacaatacatatatcgctccttatgtgttataataacactcatattagttaaacatatacagtacgtacgccagtatatatgtgtaggagctatagagagacgttatgagaagatggcttaattaaatgagtcagtgactggcgtacagttgttgggaaatgattgagagagttacacattagataatctaaatcaaccggtaaagagagtgtattcaaattgaagtagtgggggtctcaatacgtaattatgtatatgatctctctgcatgcatgcatagcttgtgtttggcaatatttggccccggcccatatgtatatataatatatatatatatatatgtgtttcatgaattgcctgtccccacttttccactttctcatgcatcgatcgatccacatcgtaagtacatataagctctgttctctcgtttcactctattatattaatatatacgttaaaaaaaaaccaactcaccccacccaaaagaaccatagccaaaaagtgaaggaaagacgacaaaagccgctgacatgggattgatcagttaactttctttgacacacagagccgacagtagtttgtacgtacaagttacatcatctatcataaatattatattatattatgcgatcatccctaggtaggtccatatatttagttggattacccctgcttgtagttgtagcctctataaatacgcactatatatagacaaattaatcagagtacgtactagttaagtgtgaagatatatccagagaaaaacaaaattaatggattggaatggcaatacaagacacactagtgtttctcgaactgaatcttcctacggcaaccctttccacaatgactacgactcctattatcatggtaagaaattaaatacacttttctttgtgatctcactatcagtttagatatcattagcaaagcatcgatcgttttaaaaatataaccttgtgtacataaacttttttcattttgtaaaggtggaatggaggtgaagcatgatcaggcaatactgtcagctgagacagcacaagggttaaatagtggtcggccttctattgaaagggacatgatcagccgtagtagctttcaggagaagaagaagagaacattaactaacaatcagttggagttattggagaggagctttcaggagggaattaagctggaaccagataggaaaatgaagctgtcaagagagcttgggctggagcctcgccaaattgctgtatggttccaaaacaggcgagctcgctggaaagctaggcaaatcgaacgctcttatgaggcccttaaacatgactttgatcacatgtcaaaagaaaaacagaagcttcaggaggaggtgcatatatatatataattattataaagtttctttcatacaatatgtacagtatacatgatatacatattaatgttattttggagggcaggtcataaaactgaaacgcattctacgagagaatgggtcgaataagcaagtggtaggaggaaatattacttctatgataatctccgggggaagagatggctgaaagcagtactggggaggcccttattattcgcagttcaaacataagtcacaaggaactaataataattaccatcatcgtcatcaacagaatcatgttatggcttatcatcattgcaaccatgtattcaatatagacgaatacagcactgtttctccaccttactggggattctttccttgatatatatatatatatat

SEQ ID NO: 258969 - DNA, 1065 bp, Cannabis indica
ggccccctccggacacttgtcaacaagaaagccttataaggatttcctggacaaaagtcgggtgcaagaatctcacagatagtgacattgcacataagcgaagaaaggaaaagaaagagaaagggcagaaatcaagaaagacaaagtcttctctgtgcccttgaaggccatcacgcaaagagcaagtgggcctttacaaaaaataatgtgctaaataagagtgacccaaacaccagagaagagaaatctaaacgtattacgcaaaaactcaaggcgaaaaaattcccagaaaacttcgaacgatgaacccagaaaaacaaatgaacagtaaaggatgccatgaacacaaacaataaagtgaggaatgcgaaaaatttacataaagtgttagaactgggagttgctgttgatcgacgaggaaatgtagactgacagtaacgaacaagggaaatctgtaagtgtttggaggttttctggtctaagggtttctttctctctggaaaatttgaagaaatttggtaaaaagatgaaagtaaccaaatgaaggaaaggtggtggcttttataggccaaggtgcatgtggaacatgcacaatcacccaccaatcgaacgactggggaggcgcacgattcgaattgccaagatccaacagctagattgatttgtaattaaggcggtggaaacgtttgagtatccgtctggcatccattaatgtgccgtatcaatcaatgggcatgaaacgaatcaacgcctgcaaaaagtgaatcactgcaataatggtgatcattaaatacgccttcacgcgcccgaagcacgtgccaggaaactgaggagtcaaccggaggcatctgaacaagccttgttcattcttttataaacaaggcttgggggtaaatgttgcccctgattttgcgcaatatacgtggactaaccaaacagggacacgtggaccaaaaggccttaacactcaaattaattgttaagcctttatgaagaaaggcagcatccgggacgtgcctcccggagaaggcatacgaagtcccctatgctcctggaggcctaagt

SEQ ID NO: 258970 - DNA, 618 bp, Cannabis indica
tagaaatatttatttgcacaccctacatgtcttacttcactttatgcgagtaaacttgcctggactgcatcataatattttggccaaaaacaaaatgtatgtcgatgattctcgacaaatctaataccatgatccttgctatctcatgttagtttattgcatatgcaaacattcaacatctatattgtcgacaaaaatttcattatatgataatttcctcccatattgacataacttatagagatctctttaaattacatatttttcaaatatgtttatcatttataggtacctatatagaatcacttcagggattcaattatgatcaaatgtgttatgtctaacttctcttgggagtctcttctagagtaccgttttcatcacggttatcatttttaaatcatcaatactttataacattaaggtatctccatgagtacctctagatttaacaacttcaggataaatcaaatgaacatttattaataatttctacattgttcatttacgcttcaggcgttttcaactcattctatctcaactttgaataatattgatttgcagttggtatatatcattttgaactatatcgttcttatatactttgtgcaaggatca

SEQ ID NO: 258971 - DNA, 563 bp, Cannabis indica
taaaagtaaaaatctcttttgaaacttgaggcgggcttttcctcttgctttgaccgatactaactcgccatttccaactttaagcttcaactcttctgggtgcagattctcccaagtttcaagcagctgcaatgaagaacaaacatggttagtagatccagaatcaacaatccatatggatttgtcattctcttaaacacatgattcaaagacaaaagcaaccttcatttgaattgtttagaagccgaggacatcattcttcaagatgtcccttttcattacaattcgaacattgaagattatgactaataattgtacttgaagaagcagctttactttgttaaaagcttcatgcttaatctttttcctctgattaaagtttgcaaaaccaggaggtcgcattgcaatcagattccgttcatgagctcgtaattctgcttcgagcttatccatgtcggaagagttaaaattgttgatcatgtaagatacaacaaatgcattatactctggaggaagactattaagtatgaattgaacccattgttcctttgataattcaattc

SEQ ID NO: 258972 - DNA, 1051 bp, Cannabis indica
tctgggcttggtctagtttatggccgggagagtatgttgtgttagggtttatgtcttgaaaagtttataaagacatttctatttataaatataagttgacattattatgcttgaatgttaaattactgatatttaatattgaataatttgtatataaatatcaaaaaattctttatccatacataaggtgtgatttgtattgtacagggaatcaagatcacttagccatgaataaaacaatcaacaacatatttaagttatagaatctttaatcaacgaatgctagtgcaattcactgatgtccattattcagtgcaagcaatctcgattcgaattgttgatgtattatgacatctaagtaaatgtattacagatgatagagattatatctgaaaaagaccgttgtttaatatagagatctaatacatatcataaaaatgatcaatagtagatcgtcttgaatcttgagtaatcatgaactcttgttcatgttattagtttctttgattcacttgttaaagtttctcagacaagatgattcttacaacttctattttgggaatctaatattgtggatggctgggatgatctacaattatggaatcatgattttctaactcagtgaatgttagtttcctttaagtgttaattcttgaactaaagagttgtgcacaaatttaaattggatctaaattttactttcagtagtgaattaattgtactaaataataaaaaagtaattagataggtaaaatgataatttgaccaaaactaattatgaattgacacaaagagggctaatcaatggaattgattatatcaatagacactgcagtaaactcagtaaatataattctataattacttagagttcaattgtatatttatagtggagtaataacaaaattaataaatacgattatttggttgatgagattcaatgaataatctagttaattagagcatagaattataggttggtccccggataatcaccttgaaacactgtcaaggataggaatagaatttgtatgtggaagttcgaaaaaaa

SEQ ID NO: 258973 - DNA, 709 bp, Cannabis indica
atatgtggcctgtttaaaaaaaaaaaatagagcttgtgctgacgaaattagagaaaaattatagttttacaaacattgggtacttatgccgctaaaaataaacattgagattatgccacttacaaacttaaaactttgagtacttatgtcactacttaccctttcttttatatcaaaaatatgtatcgaatacttcgtatttacatttgagttagtctcatttaattaaatttttacttaaagtattataagtataaattttaattttttttaactctttgtataacaattatataaatatatattttttttaatgaaaagtactttttaaagtatttgaatatcattaaaaaagatcttttatgagtaaattagaaatgatgtaaaaatttttaattttaaaaatagtttctcgaaaattctttcaggagaaaccacaaattctaacttcttataaaaaaaatgaaaaaaaaaaaaagaactttttcatttttatccaaacacccttagaaagacttttataattaaaaactaaaaaagagtttatagaagaagctaagccaaacaagacaatatcaggtgtaaaataaatctgcttcttattcctacgagcaaaattgttccattattactaaactaaaaaatattcttactaaaataatagaacaaatatgaattctttcctcgagataatccactaaaatagaaa

SEQ ID NO: 258974 - DNA, 636 bp, Cannabis indica
  modified_base (622)..(622): a, c, t, g, unknown or other
tcaaattttgtttttgaaaacactttttaggtggacccaccattttaattttttctgaaaccaccattaatattgtcaatactactacctttgcagctaccaccacgacagcccaatttagatctaaaattaacatataattctcaaaatctaaatctaaaagacaaaatttcaaccatctaatattttaaatacattaataatgaggcttcagatctgaaactagaagaaaaagctagagattttgaatagaaagcccttattctcttattcttgttcgtcggctttaatggcggatcgagaacctctgcctcattgtcaatctagaaaatgaacgtccaaccacgtcgaagctacatctttgttcgctggctttaatggcgaatctaagatggaagagttagagctagcgtgttataaggcttcgacgtcagcggaggaggaggaggttggggttcaacggtggttgtggaggaggacgtcggggacagaagaagaagaagaagaggaagagatgggcagtggtcggagagacgccgaggtggcctgtgctggtgctctgctcgggactaagatcgagaaagaaaagagagatttacgtgaacaaaaagaaagaggaaanaaaagaaaaagaaa

SEQ ID NO: 258975 - DNA, 652 bp, Cannabis indica
aatgaaatatcgacgtgacaaattttaggtcatataaggctggtcgacccaacatgacattaaaggatgatggaacgtcccatatcaaatattgtgccattatagttatgctcttcggagcttgcccaatagtgaggggtaggcaaatttgccctagaggtgcatcactctggccggagaaaccatacatgggctgaagatagggggttaagtctttgagttggagccccatcatttcatatggtgtttaaaacaagatatttgcataggctccattatctatcatagttcgggccaccattttgttggctatttggaacggatcgttgtattggaaattaatcttgacagcatcttcatcattaaacattatggggggctcccatgcccgtggtatttttggcttcctttcttcgatgaccaagacatcttcctcttgttcgtgctgtagtgttcgggcatacctctcctgggctttgcctaaatctccaggacaacttcttacttgtatatgcccatccattagtggcggcagtaaatcttgattattatctgtctgagcgaccctctgattttgattggtctcaacatgtttttgcacgtgtgggttattctttctaattaaaaaatcgatttcctgcttcaaattgtt

SEQ ID NO: 258976 - DNA, 587 bp, Cannabis indica
ggcctagtttcaggtccaagtgccttatctaggtcttgatccttggtccagatgtgggtccaggttcgcgtttggggcccaggtcccccatctaggtctggatcctaggtccaggtcaaggtccaagtttggctcccaagtttgggtccgagtctaggtcccagtatgggttcaagtttgattctgggtccgggtctcgatctgagtccaagtccctattcaggtccgggtcggggacacgaccaggtcccactcaaggtctagatctgagaccaggttctggtctcagttcggtccgagttaaggtcctaagtttggtctaggtttgggtttggatccgggtctgggtctgggtcttgggttccaatctcggtattggtattggtctaggctcgtgtccaggttagggtttagggtttagggttttgggtttagtatttagggatttagggtttaggatttagggcttaggtcttaggggtaactgtaaagagtttagggtttagggtttaaggtttcgggtttagggttttaatggtgcgcttccagtttcggttccaatttcgggtcacaaggtacgatttaag

SEQ ID NO: 258977 - DNA, 956 bp, Cannabis indica
aaaatcacacacttggtgtccctatgggatagggcgttacaacttcgtattagatcagccatggttttaaaggtcttgaagactagtctaatatgtagattttatgtgaagaaaggtcgactcatggtatagtaagtgtttatattatttattattggattacctacctagactattataaagtatgttgggaaaagtagtatagtgatgattattataagaatatgtgtatggtatatgtatattgatatttatatctgtctgagttctaaatgcttggaagatgcagactaaatgtgtgataagttatgcggtaagtgtaagggcaatcaaatagtttgattagcgagctgtctgggctcagggcaaatggtaaggaagagaatcctttattgccacatcactgggaacatgtaaattctaccatgtaggatataattagacaacaaggggaaacatattggagagaataacaagctcgtcttgggtctattgatgtaccaccgacacttcttgttgtaccactaaatgtcgtgaaactcatggaaccaacttacgagcagattagaaggaaaaaattgaatgaaccaccaatcgtgggatagaataaaaggttctagggtgaccaggatagcggtcaaggtgagaacaagaaataacgaccttatcctgagtgtttaacatgcaaaagatgccatttgggctcatgtcgagctagatcttatttttattatggaatagtgggtcatctgaaaagaacctacccgtaattaacaaagaatgatgttaaaggagaatagtatatggtttctgcccaagtgtcggtaatgacttaagaggactcaagtatcgttccttcgagcgactcaggttagaaatttatgggcaatattgtatttgctatttcgattgatattgatgttaaacattgtattttcaattagagacatcaaaaa

SEQ ID NO: 258978 - DNA, 1040 bp, Cannabis indica
ctagaaggttataagcttctcgaacaggactagaaagtttgcaaacttaatagatccatttatggacttaagaatgcttctcactcttggaacaaaaggtttgttgaaataataaaaacctgcagctttcactagaacgatgatgaaccttgtgtttaccaactcaaagataatcaagtggtagcattcctggtcctttatgttgatgacagtttaattattggcaacaagatcaagaaaatgattgacatcaaggaatggcttgacactcaattcaaaattaaagatttttgtaaagctgcttatgttcttggtattcagattattagaaactggaagaagagatccattgctctctctccaacaacttacatcgataaggtgttagagagattcaccttgacaaataccaaaggggcagtgatgccttctagacctggtatccgtctatctaaggaacggtgtctcactgatcctcaaaagatagaggacatgagaagggttccttatgcttcagcagttggaagtttaatgtatgtaatgttatgcactatacctgacatatggtacgaggtaggaattgtgagcaggtatcagataaacgcaggagaggaacattggactacagttaagcatattttgaaatatttgaaaagtactaggcattatgtgttagtctactagggtagtgctttaaatcccgtaggctataccgactcagatttttaggcttatcttgatgataggaagtctacatttgggatggtgtttactcagctaagcaaatcgcaatattagactctaccatggaggccgagtacatagctgccattgaggcttctaagaaactggtctggctaagaaagttcttctcagtacttggtgttgttcctaggatggaaaaaccactagttttactttgtgacaacattgatgcaataggcaacagtaaagagcatcgaagccacaagagaagcaaacacatagagaggaaatgccacatcattagggaatatatggaaagaggggatgtactggtg

SEQ ID NO: 258979 - DNA, 501 bp, Cannabis indica
ataaaaatatattgaagtaattttcttaaattttttatggaattaatttattttaaatttttacatatataagtatgcatctttgagcacttaaagcaactcttaactaacttattgctaattcctagcaatttaagtgaatacaaagtattactaatttaaaatattaaattaaattgtattaaatgggtacatgttaatgtacaattcttttgctattgtgattcaatttccttaacttgacgtaatatgttgatgcctaattaatttttatattaaaattaaattgctatcgtgttgtttattcgttgttattaagttgtttagccaagagaaaaatagcatatgtttatttatttattttttttttggtacaattggtatacaagttttttgtaattgcttttaaattatatgttatagattactggtattttttttttctttcttggagtttttttccatgcctatttaatttgcatattagaatgaagttcttat

SEQ ID NO: 258980 - DNA, 696 bp, Cannabis indica
ttttttaactggttattgtttttgtttattgtgtgcagcatctgaatgtggcactttactatcttaggaagagcatcttatatgatgccagtgttaataagagagtgacgacgacatgctcgtattttgatgcaactattaagggagtgtatgctgattttataaaggcgaaacgtgatccgagtgtcatcaggtacgacaacatggtcaccgattacattctggggcaatatacttttgcttccagccttggatcggtgttgacgatgttgtcggtccgtgtcatgtcggtgttcaacgccattggatatttcttcacttcaacattttaaggaggaagatcttcgtattcaattccatgaagaatacaaagacgaatcaaaagaagatcttgcctgatctcctagcgtactgtgagttactgccatacttccttgatttcttaaatttttatgatggtaggaacgacattagtttggagtcaggcccttatgctgtgccgaaggatactcctattgcatatgagtttgtggacaagctccccactcaaagcaacaggtaaataactggttatttttagtcctatgacttctgtgattctttatttgtttattttttctgcttaataactggttatgtattgttatttattttggttttgtttttcagtgactgtggtgtatttgtgattaagta

SEQ ID NO: 258981 - DNA, 648 bp, Cannabis indica
gacccttgcgccgagtttactcggcaattccccccctcctacgctcgcggacagtatgcaaactttcaatttttcaggctattttatggaattaatttctgattttttgtgtagttttgtattttaatttttttttcatatttcaaatctaattatcataaataaattaatttgttttttaaaattaattttagatattagtgtaacaggtaaaaatcaattttttgcttacctcttttcttatttttttaattttgattattttatcttattttaaatctaaggtcagctattaaactctttttataaaatattctattttaagtaatttgaccttatttagatttaaataagattactataatcatgatattttaaaaagggaaataagataattttgctaaaatttaaatttttgttaattttacttaaattaaattataaagcagaaaagggtaagtatttatcttttttttattattattttattgaatatttaatttataaaataacatgaaatttaaaaggtagttagcaaatttttttttgaaatgatatttaggttagttgatacctaatttttcaaaaattgtaagtttattttttttactattttcgaatttttttttattttaaattaaataaatc

SEQ ID NO: 258982 - DNA, 795 bp, Cannabis indica
aagctctcttttgcaattcgaagcatctttcttgcgcttttaaactcacaaatctatctttttcataattagactttgacgccggtgttggcggtttcgacgatgaagcacccgattgccccgttctagtacgcttggaacccataacacacttcaaagttaccacacaaaaatttttgggaaaaattcggcagcacttccccttaatttcttcacttcccaaaaatcacaaaagttccacaataatccacaacaataatatttcacaaatattcaacaatttctccaaaataaatccacaaatccccaaatactctagataattattcaaactttcggaaaactcacttaactaatcaaagttttgacaagaaagagacttactaagcgagaatgccgttcatccaccaccattgttgcacatccatggagaactcaaggttgaagatgatgaatagtagaaaattcggatttgggtgaaaaagggtgatttgtggtgtgatttttgaagaaaagagaagatttatgagagaaatttgtgtttttggtgatttggatggaagatttgaagagaatgagaagaaatttgaggattaatggtggaatgaggttgtgagggctgagaaaagggagagaagtcgggttgtatggtgtttgattgatttttagggttatgtgcgatttgggatttaaaaggctgaaaaatcgtgtctcgtcgcgacgggctatgtgtcccgtcgcgacgggagttggcagaaatagttgaaaattcgtttagccttccccgtcgcgacg

SEQ ID NO: 258983 - DNA, 553 bp, Cannabis indica
taacagggtgagttccttgaaaccctcccactaaaataaggtaccgtgactatctgtctaagagcacttaagagcacttatggtattgtcctctttggttgtgtcaagacaacagaggtagtgggaccatcttatgcaaaataagatgatagaacacttttggaatcaagaaaaaaatatctcctctactttgctacttttttttttcagacttagtcattttcttggaaaagtagtatttgttaaaacaaacactttcttatcttaacgaacataggatggtccacccctaatcatttagaatatctatcaaaaatgcaaccttagttaacagttctagcttttcttaaggtcacgattaggacatccataaatctagtaatggtttacattaagtatacatccatttcatcattctgaaattttctatcactagggtatatccctagaaggacttaggcaactgctagtaactaatcataaaccttatatcatcatcaatatgcaaattgaatttttggagaggtaagtttgaatacaattcgaagttcaa

SEQ ID NO: 258984 - DNA, 517 bp, Cannabis indica
tatatagcatgtgtgaatgtaatatgagatatatgtagaataaaaatattttcaggttcggggacctgaagactcgataagtggatatataagtgtagattgttaattttgagatttatttaaaatgcgtggatataatatgagttatttgtgaaataaaaatattttcatgttcggcgacccttgagatccgattagaggtcaaaaatgtcacaacagttttagttagaaatattgataggattattaggataatttgatttttagaaatatcagagtattttagggtactcgaagttggccaaataccctagaaatagagatttcttagtggctaaaaactaataagaaaactattaataataaaatttttattaatattattattaataatattattattatatatataataacgaaacttctgtttccttttgtttcaaaaatatatatatatatatatatatatattaagttttaagttataacagtacagaacgaacgaaggaacgaaacc

SEQ ID NO: 258985 - DNA, 5280 bp, Cannabis indica
tatcttcctaactcgtgttgtgtgagaaccaatccatatttccagcactacctacaaacacaaattgctaccgctagtcaaaggtcaattcttattatagctttggctttacccatttcctagtttaaaagcttttaccaaatccaaaagctaaattcaatttcttccaatagaaaaataaaatttaaagaaaaatgttatattatcttaactattaaaactagcataattataattatgggcgtcgtcagaatttatatactaaaaacacttggccttttttaacctgtagcatgatcttgtttggtggatcttttgataaaaatgaacaccacagacttcaccatgtgatagtaataataatatcacagtaacatgacataattattttaataagatggataatacaacactttcatggcatgtggttgatgagtcggatgactaaggacaaaactaggagaaagaggacccaactatccaagtctcttgatattttatttgcaatattttacacctgaaaacatgatattgtttataaaattgtgaacctaaactaaacaaggatggagaattttgttgtatgtgcacatcacatcctgcgtttctttgattataataaatatctttcaatttctctaacagttttccctaaaatattcttgtatttataatttatctgcacattatccctgaaaacaaaatccactccatatgtcataaatatacgagtactggcattgccttcaaataattgattcagtttaaatatgttttaagaccatttaagttcttatgaaaacttattctcttactttatatgttattgaaagaaaaaagtcacaaattttaaataagaaattgtggtccttctcattcaagccccccatgaatgatagtattatgaatattaaagatatattggggaaaaagaaatgatgacaaagaagagttgatttcatgttgctggccttgctgtatatattagtcatcatttgttttctagtgtatttttttacagaaaatgttgttgtcggcaaagtaatctctttagatattggttttattcttcatttatttctattcttcaaaagagagaaaaataaagaaatgcacaattgacaatccatctctatcgtccaaaagaccaaactactttaactggttgtttatgactaatgcgtgccgaatcagcacttttgacataattttttttacgaagtacaagaaaagaatgttttctcaagttaaaacactatataattaagcaagacaagagataagggaaaaagtggtgaaagcaaacagatgtggaatatgagcactatattcatccatgctaaagaaaaatcgtagcatttgtttagtggacaagggggaaaagaaaaataaggctaatcttagatttttcaaacatttgatattccgtattttggagtaaaagcctatttaagatcataaggttgattcaaattcaacatcagcatccggtaaccaatcaggaccttggataaatgatcccacagagaatctggcagcctcatcttctgtcaaagcgggcttataaccagcccactggactcttccagccacgtttgcaccaggcccagagttttggtactcaccataaaatattgttgttggggggtcaacgttgttgacccattctttccagcccaattggtgcaaaaacgacccaatatctgactgcatgataactgttgttgagaactccttccatggcctcccaaggtatgttagagcagtgagattactatcctttgaagtaatactgcacttttggattgaaatgccagtgttctgattagggtctttctttccttgagctgtgatggtgttaaattggttgcggagaggctggcggggctgaatgttgcacttttggaagacaacagcagcattgccaaagatgaagtctattgtgcctgtgacatcacaatcccggtagaattggcggtttgagtgtggatagagagtgtcttggaatgcatcaaacgagcatcggtagtagacagagaagtctgactgtgatcgaaatgccacagcctggtgcttttgtggccctgctgtgttgatgaagcccatgtcttttgctatgaaacctttacccgcaacagctggttttccacatttcaacaagtcaatgttatgttgagaacaatgaaagcaaatacaatcatactagtaagtgaaagcaaagtcagttatacgatcaaattcttatgcatagtgatgaagtgatataacaagaagtttcaactgcaagtcattggtctagtgaataagattttaacatctgtagacctgttttacttaatgagtagagacataaaaagtgtttatggagtggaggggaaaaggacatcaagtcgttaaagcattgaagaatgaaagagagactaaacacaaattaggccactaattttgcattttgaagtgtgttgtaggccatagcatatattgctgtctaataaaggtggaacatgctttcacatgccttgtctcaaaggcattctagcatgtcaaaatgcctctatagttcagcaaagataaaactgctatgcaaggatgtagaaggaccaaagtaagccccacaatgtggacagctaatacggatgatttctctcaacaacaagcaagtgcaccaaattagaaatgggaaagaaacctataaaaatatgtagctgcaccaaatcaaagtctattcaaactatacaaaacctaaggcctatatacatatccacaaatggggccaatgcatatggaagttgagatattgtctaaatcataattcagacgcgcacatggtaggtatccactatgtagacagaacccaaatctaatttctaaaagttactcctaaatatcttgtaggactcatactacatgagaaaaaaacagtaaaagggcatataatttgtggttatagctgcaatcaaattcacatggtggcgcataaaccatgtggttcagcttattgactcagtcaagagatgccaaatcaaaaggggcttcatatggaacatggttttacaaaattagagtcagtaaggtggttcataataaatctgttcatgagtaagacattgtaaatgaatattaacatgaatgagttcctcatacacttagaatgcatctaagttaactataattgtaatttataataagaaaacatatgaagcaaaatcaagcattaagagaagaataataaattaaaaaaagggaaaaggaataaggaataagtaccgaaagtggctgtggcgaaggtaggagtgccatccacaaaattcttgctaccagaaacaatagtcttatctttaccatctccaatcatcatcacattccacttgtgcttatccattaccacattctccaaataagtaccttgcttcacttttatgatgaatttggtcagactcttcttcggcaccctttccaccgcctcgccaatcgtcttcacatcccctgttccgtcttgggccaccgtgatatgtacagtcatattgctcccgtcttgaagcagcctccggtcaccggcgcttacccaatccggaaattcgtcgttactcaatagcctccggtgaatcggaacgtggagcttggccaacacgctcaagattttggccacaatggccaaactgttactcgcaaactctgtcgaactctgcatttgggccttgaatttcggggccaaagtcgagttcagttcatcgagcgcatctaaacaagtctcctgatcagtaatggtggcactgagccaggtcttgatgtcgtcgatcttagacgaagacaagactctttcctcctttcctaactccatggacgagacagagtcgttgagccggtccaccgcgtcttctaaaacctccgtacatatattcaaagcagtcaccacacgggtgtcgtttacctgagaaatcagttcttttgggtacttcgataacttgatgagctcacccatggcgaccccaagagatagcttgaaaaggacttccgggtcagatgtattggaggatttaagcgaagataaacacgagctcgggtactgagtcacgctacagagagtgttaagtgaagcggcaggagtcaactcggcgccgggaaccggattaggtgacttcgttgaagaactattccggcgatgtataactgttccggcaacggcgccgacgacgatggctagtagaactacaatggagacgataataatgataatacgtttacgcgtctttctccggaatgcttgctcttcgagctcatctactttaccataacccttaaaggacttcattgaatccatagtttatttctctttttctctcttttgggtatctcaagatttggtattttgataaggtttttggttcttgttctgaattagatgaattgaagtagtaatacagagacgagtgaaggtgagttttgagtttggatttgggttttgaaatacgagaccaagtgttgggtgatgtgagtgtgatctcttaataaagcgatggccaaacatagattctctctcttcgatgcttctatggtattctttaaatactctcaataaattaatattctattctattatccaatcaataaacaacttgcatattccttttcgtaaatttcctaaaatttcaactactacatataaaaaattaacaaaacaacatacactcacacatacatacctgtctagtttacaaaccaaatgcttattattctttaatgtaataaataatactaaatattcttacatttataaaatatataaagaatatataaacagtaattactcttttttttgctaagaaacagtaattactctttttttgggttaagaaacagcaattactcttaaattaattaattttaaaattgaacaaataaggaaaagaaaattgtatataaataaaaaattcctaaataaatgcaaataattcacaatcatacgaatacaatatttcttgaattagacataatatgattattgattaatgaaataatttataaaataaatttgtaaaataattaataagataactattacattaaatgatgataaaaattgaatttaataataacttactataatcttctcaaaaaaaaaataaataatatcttactaatcggaaaaggtaatagcatatatgatgagctgaaatattaaaaagctaattagtaattttttttctgaattttgacatataccaaatcatgtccctgaattttcttggtcgttaaaaattcccttgaactattgagatt

SEQ ID NO: 258986 - DNA, 979 bp, Cannabis indica
aaccactacctcccctgctaaagcctgatgcaggaggggtaggagccccgccactcactggagtcctaactgactccgacatacatccaactgcgcccttagctcgcagtgctttttccaccatctcagcataggtggtcttgtcgtctgtagtgatcattagatcatgcttgatcttgacattaagtccatcaagatatttttccttcttactgaaatcggttagcacaattcccgaggccaacctcgccaaccgatcaaacggagttgtgtattctttcacactcatattttccttctaggtcaggtgggtgaactctttcctcttggcacttctaacggcctcattgtagtatttcgcattaaagagttcctggaacctttcccaggtcatagtggtgatatcgtgaatttgggacaccatgtcccaccagactaaagcgtcctcttgaaactggaaggtagcacacaccaccctgtcattcccggtgacacccataaagttcaatatccttgtaatcaccgttagccactgctcaggtttcatgacgtccggacctcccaaaaaagtcggaggtgcctgcttccggaacctttcatacaggggttccattctattcgtcgctactacttggcctgagcaacaggggcaggtgccactggaacttctggcacaggcactacaggagcaccctgctgtctctatctctgaatctcatcatcttgctcctctattctggcttgcatttcagcaagcctagtttcccaattctgggcttcctgattggcttgggcagcctgggcagcctgtggcaggttaacatcaccccgaccacgagccctgcccctgggacctctaccacggtccctaacattcggggaaaactgagctccttgaccttgatttgacccgactgagttgccctgactcctggtatttcgcctagcgtccatctagtttgaacagcttgcgaaacca

SEQ ID NO: 258987 - DNA, 624 bp, Cannabis indica
ccacttgcatcagttgggaaacaaatttccccttcaacgattcactgacagtatgcacaaacgggtcctcttcatcaggcagccaaggatcttgcagaatatcaattgtagatccagaccccacccttagagcagcaccctttttaatcaaaggaagagcttccatcatactccgccaaataaaacttggattccctcctatctcagcagccaagaaagagcaattagggaagtacctagccttgtatatttgactcacaagagaattaggatacgataataaccgccaagcttgttttcccaaaagagccacattgaagtcataaaggctacgaaacccaagtcctccatgagatttgggcttacacattctctcccaactcatccaatgaatactcttatcttttttagtgttggactgccaccagaacttgcacatgatacgctccatttccttgcttgtttcggctggtagcaaaaaaacactcattgcatagttcggtagagcttgtgcaaccgtcttcaaaagcacctccttaccagctttggataatagttttccttcccaactttgcacccgtttctgaacacgttctttcaagtatccgaggatagcagttttct

SEQ ID NO: 258988 - DNA, 973 bp, Cannabis indica
acacactaggccggataaaccctatgtcaagtaacccttgaagctgaatctttaattctttaagctcagctggagccattctatacagagccttggaaaccggttccactcctggtgcaaaatctataacgaaatcaatttcctgctgaggtggtaacccgggaagttcttcgggaaaaacatctagaaattcccgaaccaccctaatatcctctggccgaatagtatctggccgagtggtgtccatcaccatggccagaaaccctaaacaaccgccatgcagtaactccctagctaacatggccacaatttccgaaatctgagattcccgaaccgaaccgacaaaaacaaacggttcttcattttccggttgaaagatcaccatcttcctcttgcaattaatactggctgagtatttagataggaaatccattcccagaataatattgaaatctactaggctcatttctatcaagtcagcacttaactccctaccgtctattctgatcggcatagacctaatccaccttttggagataactaactctctgccaggtaatagggttccaaaccctgattcataactatcacacggtctatccaatttactaaagattctggctgccacataagaatgtgtggccccagaatcaaacagcactgagtaaaatgagttattaactgagagctgacctgttacaactgaggggctggcttctgcatcagcctgcgtaatggcgaacaccctagctggagtgggtctcgccggagcccttggtgcctctgatctgatctggggacaatccctcttgtaatgtccaggcatgccacactgaaagcatccctgacctctgcactcacccagatggtgccttttacaactggggcactctgggtacgaaaaccgggtctcagcaccaccttgacggctgcctctactctggttcccccggaacctcttgctctgccccga

SEQ ID NO: 258989 - DNA, 694 bp, Cannabis indica
aaacctgaacccaaaccaagactttggacccaaaattagaacctcaacaagaatcgccaaaccaggatcctagaacaagactaggaccgtgaccaggacccggacccaaacgtagcaccgagcacagacctagcctcagaccgaaactgagactaaaacttgggcctggacacggtcgtgtaccaagaccggaactgagacccggacgtggacctaaatctaggaccggatcccaaacacataattggaccgagatagggaattgcataagaacctggacgtggaccaagatccagactgggatcgaaatgctggacctaaatctgggccgaggtcctgacccagacccaaacttggacccgcactcgggccgcgatcttggagctagacccgaacctagacccagatcggggtccacacctggacacaaacccagacacagactcggacccgaactcaaacccacacctagaatcaaacccaaagctagacccagacccggacccaaactcgaacccagagcaggattagaacaaaggacttagacccaaaattgaatccaaactccaatcggtattggaacttgggactcggaccgaaccaagaccaagacccacaaggggaacccacacccgaagcctgatttgggcctaggcaaaaatccagacccgaacccaaactcataccagtactc

SEQ ID NO: 258990 - DNA, 949 bp, Cannabis indica
gaccctagaacaagactaggaccgtgagcaggacctagacccagacctcgaaccgaacacagatctagcctcagacccaaactcagaccaggactcgaactcttacccgaagacaaacctaaactcgaacttagaatcgcaaatggaactagaactgaacaaggactagtaccaggaccaggacctaaatccaaacccgaaccaagatcaaaacccggacaaagacctaaacctgaaccgaggctaggactcgaacccgaacctagaccgggacccaaaaacacacaataaacagaacctggacctagaatattgatagggacctgggaaacagaactaggaccgcgacctagtacctgacccagacccgaacttgaacctaggaccgcgacctaggacccttgaacttgaacccgagattgggatctggaccttgacctagggcttggacaaaacccgtagtcagttctggatttgggaccaagcccgggacccaaaccctgacaaggagccgaacccacacccagacctgaacccaatcccacacccaaaagtggactcgaacccataccctatgacccaaaattggaaccaaaaccagaagttgaccgcgactggaactagggtttggacttggaatcataactgaaattggacatagatccaaaactataactggaccaggacccggactccaaatcagacctagaccggaattgggagccggacccgaatcccaaccaaaacctgaactcgggacccaaacccgaacatgaactcagacccaaacatggaaccagactagggacacagaaccagggtcgggacctagaacagctccccagtcttgatcccgaacccaaactcagaaatgggaccagggacctgaactagaactagacagagacccgtgacagtgatccagatcttgacttgagattcgggtaac

SEQ ID NO: 258991 - DNA, 1148 bp, Cannabis indica
ttcagtgtatccttcaaggttttgttgactgcttcaacttgaccgtttgcttgaggatgtgccactgcggagaaacttttgatgataccatggttcgcatagaaatcagtaaatgattggctgtcgaactacttgccattgtctgagacttttttgtacagtagtctgaaccgacatattatgttcttcacaataaagtcttgaactttctttgatgtaatggttgcaagtggttcggcttcagtccactaagtaatgtaatcaaccgctaccactgcatactgcactccgcctttacctttaggtagttgtctgatgaggtcaattccccaaatggcaaagggccacggactttgcatatgtgttaactcgttgggcggagctcttggtatctttgaaaatctctggcatttgtcgcactttttaacataggctttcgaatcttcaatcatcgttggccagaagtaaccttgtcttagaattttcttggataagctctgtccggcggcatgttttccacagaatccgtcgtgaacttcaaataaaagtcgtacagcttcgtcttgagtgacacatctaagcaagggcatcgagaatcctcttttgtacatgactccctctactatgatgtaccgcacaactttccttctcattttctgagcttcatttcagttatctgggagttccctagagttgaggtaggctgctattggcgtcatctagtttggggatgtatcaatcatttcgatttcttccgtgccagtgatgctaggctcttcgagcaactggataggaaccaagtttgccttgtcacttacattgctgcttgccaatcgagctaacgcatctgcagttgtattttcttctcttggaatttgtctaagaccatagcttttgaattgtgcaaggagctcatgtatttttcttagatatgctatcatcttttctccatgagcctcgtattctccggatacatgatttaccaacagctgtgaatcactggagatttcaatgcgttcggccttcatctcccgagctagctttagcccagtgattagagattcgtactcggcttcattattagatgccttgaatccgaacatgactgcagcgtgcaagtgctgccccctaggcgtgacaagggcaat

SEQ ID NO: 258992 - DNA, 602 bp, Cannabis indica
attgtggtaagctcctaatccttccttactttgaatttaatttctggtgtttaaagttttaaaaacttgttcatgacgttcttaagagttgtgatgcatgatgttgtgattttggaggtttagtgataattttggtttatttgaacttaaggatgtgtgatatttgcatcttgattgttttatatgttttagttgagtttagggtttgaatttctaggattatgctctgattttctgggtatttttagttggtttgaaactttgtgttcaagcatgtgtaattgagaatttgtattgatttttggaacatgctttaatatatgagcttatattttgtggttctaatgcctgaaaataccttggtttagcatggtttttgcttgtgtatgacttaggtgaagttaggtttgtgtttgggctttttaggccttaaaaatgggatttttgggtgttttggacccagttttcgtgatcgaattattggtcgccgtgaatagggttggcagtgggcatgcctatttttctcgattttgttttggccataacttttgattcggaactccgttttaaacattctttatatcgttggaaagctcattttg

SEQ ID NO: 258993 - DNA, 752 bp, Cannabis indica
gtaaaataatttccaacaggcattgtgtatcaaacttcttgtactgatacaactgaatgtggctgaaagaaagcataaacacattgttgaaactgctcgttctcttttattgtcatcttatgttcctagtcaattttaggaggaggtagttctaactatagttcactgaattaatatgatttcatcttctgtaattttgagtttgtctccttttgagaaactatatggttgtattcatgactacttttatttaagagtctttggttctacttgttttgtgcttcgtcctagtgtagagcgtacaaagttatcgtcacgctctgctctttgtgtgtttctcgattatggggaagggaaaaaggattaccattattttgaaccagtttctcaaatattatatatatctcgtcatgtaatttatattactgggtaatgatttttttctttaagaaaaatgtacatttaattatcttattatctttacatttaatcatcttattatattagaaaacttacaaaaatactggaatttgagttaagttttacaaaaatactgtcacacgaaatttttttcaaaaatattatgtttttataaaacactagtagaacacaaaacggaacaactcaaaacaacaatagaagaactaaaaaacactagtagaacaccagtgaaaacttaacacagtatactgcagtataaaacttataaaaaaatacagtaaaaaagtaaaaaatattgcctgacagtattt

SEQ ID NO: 258994 - DNA, 431 bp, Cannabis indica
gttttgtagtttgcttttctccttattgtttctttctgtagattcttacttgcattatttttagcttgctactgaagccggccgtctctccaagaatataatcaaccatggcttcgtcctgtccgattttggggacatggacgaagtaaggaagattcttcaggatcttactgctgagaggcgactttatcaggaggctgccgagcgccaggaggccgctgccaaagctaatgaagaagaggctaagcggagggaagcgcaggcggaggcaatgatctgggaggaggccctgcggagagataggttggaggccaggcatcaggaggagctgaggacggaaggtgaagccactgcaaaggctaggcgggagcttcgggaggccagggaagccttggatgagatggctgccaaggtgaggtccttagaggaaa

SEQ ID NO: 258995 - DNA, 840 bp, Cannabis indica
ttttatttaaccaaatacaagtaaaagtttaactttaacgtacttaactacaatccttatgggatcgacctcactcttggtgaatttactacttgtcacgatacgtgcacttgcgtgtacaaaatattacaacagtaatggtttggaaacatcaattgccactcgaatccttaaaaaaaggacctcaaccttcattaaaagacttttcatgaacatcaatgaaagttccaatgagatttccaataacacgagcaagggtttcagatttacttaggaaaagtaatctgaaaacttgaatccaaaaggtggtaatggtgtaggattccattggagcattctgtagaacacttggagagcaaagaatcatatgttggttatgaaaatgccatggttctttagaaaatactctcctaagatctccttcatagccaaatgtgaccacatacgattcaaattcatagttcgaaatagatacagcaaaccttcctttccagtttgtagtgatgaaattgtgcaattgctttgggttatatcctctacgtgagaagattttgtagataagctgatgagtggttggacgtggtggaggcacatcaatgtaggatagatttattatttctttttctcgaatagagagtgccttggaaatgtctggatggaaagaatctatgagaaaatacaaaggcaaaaaccagagaaaacacacagtgagattaccgtaagaataaggaaagggtcactagctagaagagaaaaacaaagggggaggaaggggtggataatgagttagcagcaaaagaggaggcgggagtagtttttggtggaagaagtggaaataaa

SEQ ID NO: 258996 - DNA, 871 bp, Cannabis indica
atttcttcagctgctgcaagtgcaaaagcaatgcagtcaacataacctagtctttctggtggtcttcctaactctatctcggacaagttgataatcttgtagctcagaggacacttgttcttgttcttgctcttcatctgaactatgttctttgtgtgttgcagaagtatccacctgatctgcaatttctgcattctcctggtctgtctgaagctcaacactttgctttccatgattgttctctgtattggtaattttcattgccatttcatgctccttaaacaccacatctcggctaatgatacacttcttgtatccatcttctaggcaccacaatttataacccttgacaccatcagggtaacccaaaaacaagcatttgatagctctaggctccaatttatcttgtttaatgtgagcaaaagctgtgcagccaaagactttaagatgatcatatcttggtacttcacctgtccaaaactcttgaggagttttaaatcttagtgttgttgaagggcatctattaatgagatagtatgcagtttgcagtgcctctccccaaaatttcttgtctaaaccaggaccctttagcatgcatctcaccttctcaagtaatgtcctgttcaatctctctgcaatcccatttcgttgtggtgttttcacaattgctttgtgtcttgcaataccattgtcttgacagaatttttacaaactggtcagagcaatactctaatccattatctgttcttagtttcttaatcttccttccagactgattttctatcagtttcttccagttaacaaaagtttgaaatgcttcatccttagacttgagtagaaaaacccaaactctcctagtgtagtcatcaat

SEQ ID NO: 258997 - DNA, 786 bp, Cannabis indica
cttctcacggagtgagttaggattcccccgcttctacgcactgctcctacccagctgtttctccaacatgccaagactttctccacttatgacaaaaaaggtcttaacgtgggggacttggtcacgacggaaaactgcaggagggccaagcttatctccgggagccagtcggtggatgactttaaccttttgaaggttctctgccctaacattcgtaccccgcccgcagagaaagcgctctaggtggacatcatagcctcggcagaggaccggtattagaagtacctttttaggagggaacatgagttggcttacatcaaagctcaggctatcgccgggaggacccttcgtttggaggcgggcacagatcggatgccttctaggcctaaatctttggtcctggttcccaatactggggctcccgatgccagcacattcggctctggtaagtctcctttaacggtccatcatgttccttcagtccaagagtattcccggtacaggcctatagagttcgacgagcgtcttcttaagtttaggatgcccccagtcggtgaggggatcatgccaaggccttttacttttcccatttacgtcatttcttaggccggtctcggatgggtttcggacctcctgcacccatccctctagatcactcagcttatttgtcttctagcttgtttctcccctcggacagctttcttggggatgatgaagctagcattgtagttcaagactttgctagggctgagttagatagtcggggtaggactagctttattgttt

SEQ ID NO: 258998 - DNA, 701 bp, Cannabis indica
tgtgcaatcacaaatatgtttcttattacatgtatttttttagtatgtgttaccttatttttatactctatatttagttaattattttatattccttttatgaattgtttttcttctaatattccttttatgtattgatacatataagcaattttcattaatttattagcttcgtaagtttctttgtactgatatttagtaaaccttatttattattattgtttttagagaataattgaaaaccaaatcaaggttttttaattgttgatttaaaaatctagactagacttctaaattacacctgtttgctaaattgatgataatgaaaaaataattaagtaataagagagatacaacaaatttatattagttcactcctttatcgggacattaatggagctacgtttacttcaaatttttattttttacaagatggtattatagaaaaaggttaagtgattgcactgagaatgattatggtaaatctcttgagaatcgccggagactcattagccacattctggaagctcttccaggagcttaactcacattttgctgctcagggaatcaagagctggataaaatatacaagtccggtcgctaggtcctggacctgagtcagtgtggatgcattaaatgcaacatggagaaaacatcgcaagtggtcttaaaaagacatgtcaaaggctttaaactcatta

SEQ ID NO: 258999 - DNA, 728 bp, Cannabis indica
ttcatggcaggtaatggcctgccgtcactgggtcgagtaaagttaactgatttagtacctgacgaaggccttccatctgattcttacaagctatcagtttcaacgttatctcagtcactagctcaatattctgctgccattattcagtttccaatgagtgatggagctcttctgagagccgctttagactctgctcgtctatacttccatcaaaaaccgtcgtacccatctgcagatatgattcatacgaatgaccctcgtgattggtgcaagacatccggttattatgcagatccttcactttggcaagaaacctatgattatagacctggagttactcctccagattctaacaatgggatggaattttctccagcaggcttaccagatatatttgccctgcttggaaaggttgctagggttatactagatgccattagcttttttctgaacttcgaagctcgtcctctcaaaatacttgataatgttcccttgagacctcgtgaaatatcgtcatcagtgctatctgtctgctgtcatgcaaggccatcattccagggagctcaacaccataattttgcaacccaagaggatggccaactggtaatgttttctgaccacgagcatcaagttgacaaaagcttgatatctctagtaaagtcagataaggctggtttacaccataaaagattgtcaaggtcattggaatctcgtgagtgtaagtcttt

SEQ ID NO: 259000 - DNA, 860 bp, Cannabis indica
ccgctgatagtttcacctccgcctcctccgccgcctccgccggttgcgagaaggacagggatagttgatgagaatggggcaatgtcggaggagtttgaggttggagagtttgatccgaatttgattgaggatatgaggaattctagtggtggagatgagagaatagatgatggagttaaggagaaagttagggttgagaagttcaaggtctgtgatcagagtatggtggactatattccttgtttggataatgtggaggagatcaagaagttgaattcaactgaaagaggggagaaattcgaaaggcattgccctggccaagataaagctttggattgcgtggtgccgaggcctaaaggctaccagaatcggattccatggccgcaaagtagagacgaggtaaattgaaacccgaagcatctgcattgtcacactttcttttggaattgtacttgtgttcttggtcttaaggttctttcatgcttttctttgaaaaaatagtcgttatgaaaaaaatttattagcaaaataatcatgtttggtagcacgagcgaccaaaaattatactatgcaaccataaaacgaccataagaccataaatttacaatgtggttattttgctaattaacatttccatgttcttagtttggcaaagcttgatatgattaagattgaattttgcaggtatggttcagtaatgttcctcatacacgtctggttgcagataaaggtggtcagaattggataactgtaaagaaagataaatttgtttttcctggaggtgggacacagtttattcatggtgctgataaatacttggaccagattattgaggttgggaactttcactattctttgtt

SEQ ID NO: 259001 - DNA, 644 bp, Cannabis indica
attcaactaatgttatctttgactctcgcctaccgggacactttatttcttaaggtggaaaaccttggaaaataataaatatgtttagttttttgtatttttacaaacgtatttgctttacttgttattttctgaacttgtgtatgaatttattgaaccaataatttatttatgtttgttgatatttgtagtgtcaaaatgtacaacccacacccccaatcctcatctagaatatgcctttaggaattaacttcaaagtgtgaagatgactcttggtcagagtatcacttcacacttgctcatgatgaacatgaaattataaaagcagctatgctgggaattgttttatctagagagcaaagagttcattttattctcaacagcttatcacctgagtttaaccaatttgtgattaacaactggaactcgtccgacatagacaaactggacactgaactgcgtgcttatgaacggacattgtcacttacatggagatgcttctccattaatacagataagggcaaaaggaaagatgaagatattgagaatgattcctccgacaatcctactacttcaggctcagttgagaagaatagagaaagtgattccacttcctcagattatctttcacaacagattgaacc

SEQ ID NO: 259002 - DNA, 619 bp, Cannabis indica
tttattgaatttctaaatcacatttcatttaactaagagaacaaaattggaatttctgaaatcggataatcgagtagagagttatgggcgttttagtgcgaaaaattagaatttttcccactacctggatttaggttaaccggtttcaaagaggttaaccggttctccaaaaaccggtgaactggtttacctagtgggagtctcgtttttcatgtccaacaactataaacgagtatttttcacctcaatattatgtaaactcgattttcactcaaagaatcaagttggctgagcatttatgtctaatacctaacctatctaactgagattaatgagcttccaagcttaaaatccagcaaacacttttcacacattttgagacaaaatttttgtttattcatcttgagtgggcttgcttatcactctaggtttctattgtcttctcataattttagagtgatttttcttgtaatatcaaacacattttcatattgtgattgaggtgatgttggtacccgtattgttaacaaccaggttatagtgagattggcacttcaacaatccgagaaataggttaatagtcctcgggggtgtgaaactattgtaagaggtttggaaa

SEQ ID NO: 259003 - DNA, 736 bp, Cannabis indica
ctctcaacttacctacactcacggcaacaaccatccccaacccgcagcagacgtcgtcgctcaactcacggccgtccacggtgaacccaggaccgtcgacgctcaaccccgaccgtcaacgctcaaccggcgaccactccgaggcgacccgaagcgaaaatgggattcagatctgtccgtgaatggagaagaggcgtttcggatctggggaagaaaatggtgaaggtctgatggtccgacttaggggtccgatggtgtccgtccaatgttatgacttaatggtccgatgcattggtccgatgtacactatcaatcggaccatcggacccccaaaaattgatttgtaatttgtccaaatcacctggttcatctgtttggggaactttggcaaaccttacacaaatctttgggaatactaagaaagggacaaaatcatctgctgctacaaataataacaataatattcgtttcaaggtaagttctgttatgactgccaatggttgtgaagaggaaaaattacttaatccattaacaatgaacaaatctaaaccattaaaactatataattatggtattagtttatcaagtgagaatcttattttatcagctactgctactgtttttgctgagacattccaagttgaaagtggtacaaaagttgaaataccaagttctcttgttggttctaataatggggaccaagattttcctttgtgtaatgcttgggtgcgttgtg

SEQ ID NO: 259004 - DNA, 838 bp, Cannabis indica
gaagaggacctgccgcagagaagtcctctcatcctgaagacgatcaacttcagcagataaggtctcgatggtttcctcaaagcgatcagcagcctcgaggtcctttgtcagtatggtgaccttcttctgggcagcaaaaagcttcttgttggcctcacccaactcatggcgaacagttgcagtctccgccctggcctcctcagcttccttcttggccaagtccgcctccgccctcaaggtgtcggatagagtcgtactcttggaagtagtagattttgcccgggagtaggtataagccaacttcaaactggcctacataaaggaaaaagtcagtttatgaagctaagaatgaaaagcgaaaagggaaatgtcgaaaagataagactaacccttgtaagctccttcaagactccgcccaccaacacatccagagatgagtcgtcagcaccagccagctgctcaccgacctcaagagccagctggttcatgtgatgagccatcacctccctgcccttctacacctcaggcagcacgggcatgggtggagtttgtgcctgcacccgttcaggaatcctcctgaccagttcgaacccagatgttggtggcccagactccttagacttggcatatatggcagtggaaggatttgcaatagtcagctcctcagaaagatcaatgacctctccagaaggcctcttctctgtagaccccctctccgcccttagacttcttggccggagggaggcgctagagcttctactcatcctcttccttaaggcgtccatcattctgccgagacatgtctccacagagcaaaaacaggtgtagcaaaaaacca

SEQ ID NO: 259005 - DNA, 2310 bp, Cannabis indica
tagcgcctccctctggccaagaagtctaagggtggtgaggggtcctctactaaggaaaagaggcctacttgggaggtcatcgatctttctgaggagctgactgctgcaaacccctctaccccaaaagctgctaagtccaaggagtttggaccactgaaggttgggtctgaactggtcaggagtgatcccgaatgggtgtgggcgcctaccccacctttgccggtgcttccagaggccaaaaagggcaaggagatcctggcccattacatgaactggctggttcctgaggtcagtgaacaacgggttggtgctgacaatgattcttctttggaattgctggtgggtggagttttgaaggagttcaccagggtaagtctttcttaatactttcatttaatcttccatacttagctcaaatgctaaagttttttccttgtgcaggccggtttgaagtcggtccacacttactcctgagctaagtctgctgcttccaagaacacggctctgttcgacaccctgagggcggaggcagacttggccaggaaggatgctgaagaagccagggcgaaagtcggagttgtttggttggaatagggtgaagccaataagaagttgtttgccgcttagaagaaaatcactgtgctgactaaggatctcgaggttgctgaccgttttgaggagaccatcgagaccttatatgctgaggtaaatagtgttcaggacgagaggacttcccttcgagcagttcttcatcggatgaaggaggaaaaggaagccaaggaggaggagctttcggctgaggttgacaggttgaaggagaaggtcaatgccttggagacagctggtctcgagctcttctttgatttttggaaggctaatcctcaggccaatttcaactacttgggcgatgctaaggacatttatttgagttctgtgcgtcccaagtggcctatggtgaaactgggggggctgcttcaaccttcggtcagactactgatgcacctcctgttcaaacaacagatcctcttgctccagttggctcagaaaaaccaaaccaagagcctggactccatctgctaaacacttctccttttatctctttattttatatatcttattcggcctcagggccttttctaagacatcatcaccggccaagcggtctttaaacttggaattatttttcatttttcagacaacagctgaccaggcaacttttaatcccagtattacgtgcttttgttatccttaatgaatttcattctctgtttataattgtcgtgcaatcgtgattgttttatttttaccaaatgctttgtacaggtataggcgtccccaagtgaccgagcagacgtatgactcttggtcacttatcttttacaaatatattgtttatctgtttggtgttttgggtttgacaaaaccttttgtacgcattgtatggtaaattagaaacatgctgatgatttcgaatcaattgaattttgaaataactatctttattcatttattgatcgaaaagtgtatttgttaccgtagtaacttacatcagagctatttgatctaatatgatcttttagctttaacatgaaataaaacaaattgcagacataagaaactgtactttaaagtggtcacccgacctgagtacattgcttcttttatcgaaacctttgagcatagtccgctcaaaaggccattcacttaaaagaaaattttcatttagtacttaaagtggtcatccgacctggtactttattggtatattttcttaaatgttctccattccagtaccggggtactagaatgagttgcatttttccgtcatacttacctaatttgtatgctccggggtcgagaacttcgaccacttgatatggtccttcccagttaggtccaagtacacctgtcgtactgtctttggtgtttaggaatacccttctcatgaccatatctcccacaaagaatttccgagccttcacttgtttgttgaaataccgagctactttttgttaatgggccatcaactttaagtttacagtcgcttatttttcttcgattttgtcaagtgattctgcaaggagtatgtgattggtaccttgattgtacgtcaatcttctatgggaaggtggcttgagttcgacgggcagcatagcttcataaccgtacgccattgcgaatggtgtttttccggttgccgtctttttagttgtacggtatgaccataggacttcaggaagctcttctggccagtttcctttggcatcttcaagttttttctttagtgtatccttcaaggtttttttgact

SEQ ID NO: 259006 - DNA, 735 bp, Cannabis indica
aatcaaagctacactaagtaaggtgaatccggatttggtattacaagaagtgaagaaggcatccgttgacagaaaattcattggtagtatttggagatcccggtttaaagcatggattctgttgccggccataggaagatcaggaggtacgttgttgatatgggatactagaagtatcaatgttttggaatcattggccggtgaattttccatctcagttttaattgaagcagaaggtcgacgaccgtggtggttctctggagtatatggtccatgttcgtataaagacagggtagctttttgggatgagttggctgggctaagtactatctgtggtgatatgtggtgtctaggaggggattttaatgtggttaggagggtgcaagagaaactaaatagtaattcttgcactaagagtatgaagatgtttgatcaattggtgcgagaattgaagctaatggacccaaagctggataatggaaaatttacttggtcgaactttcgaaataagcctatttgttgcaaattggacagatttttcttcaccaacaattggagtaatgcgttcacttttgtgaggcaagagatgatggtcaggattgtttcggatcacagtccagttgtacttgattcgaatcccccatcctggggacctagcccttttcgttttgataatcagtggttggagcacaacacattctctaagagtttcgagagttggtggcagaaggctga

SEQ ID NO: 259007 - DNA, 1788 bp, Cannabis indica
aaaaaaaaaaaaaaaaacttaatcaacttaaaatttttagtactatatatttttatttaacatgaggagctactcaccctaactctacgcggtagggctattcatacactttagaatctttgattccaacctctaatcaattagaatttagaatcaaaccctatttgagattgaaccaaataatgaatctagtgttaacaattttatgattttttgttcagtcataattttaaaaatctcactagcaattcaaacattacttatttttcttttatgtataaatatatattcaatatgtttttgagtacataattcatatttgaaaataattaatcttaatcaactatatttttaagagtaaatagcagtataagtacttaatgttttgaatttgtaaacgacataagctcaataattttttagcggcatgagtacccaatgttagtaaagtgtaatttttattcagtttcgttagtacaaactccattaatgtcttaaacataacacatttaaagaccataatctaaatcattaagtctggacagaaacatgtaatatgagttacttttcaatattctcttaatatattcaaaacaacatttctaatgataaaattagatgaaaattataattttactaacattaggtatttatgttgctaaaaatattattgagattatgctatttgcaaactcaaaattttaagaattcatgctgtaatttttaattattatttatgaattgtgaaaaatacaaaattttagtaaaaaaaaaaagaataattacttaaaaaaaagttaaaaataattatgaaaaatatttcaaactaaaccattcaattcttaagtatatagcttgttttgagcatttaccaaaccaatttgtaaggagcggatctaccataaatacatatgtatagaggaatcatttctaaaatttatattccttcatgtagttaacaattcatataaatatatgattgaattaaaattgatgaggtaggaattcaaactaaagtttccaaaattccattaattaatatatatatccacgttacaaatgtgcatgctaatatatatatatatatatatctatatatatgtatacacatatactaatgtactaagaaaataagaggtagccctccaatttggacctaaatttatagtaaaactaaaactaaatacataatatataatatttaatttacaaagcagacatgtttcacattctgtgtttcacgcgtttgattatttattttttttaaaaaaaatatatcaaaacaaaaggaagaagacgaagacgatctactttactttaaattttaattcattacactacacactattgattaaatttcaaaagcaaatttattttatttatttttatgtggattccataccactcagtcactccacagagagacaaaacattgaatttaacaaaagtttttgtcccatgacttccaacacttagagtggctatgggccagtctgatgtgaactctctaagataagatgggccagcccaattattattattattattattattattattattattattatttatattttctgatgggttcctcacaaatacatacatatttgtgataaattattagatttagtgttttacatatgctcatcatttttacatataggattggaacactatactttgttagtacattggacattaacacctatgtgaaatatatgtaaataagcaacgacacaataaaattataattatattaagtaagtacaaattagacttaagcaa

SEQ ID NO: 259008 - DNA, 2192 bp, Cannabis indica
caagatcctatttcataccattaccatcttcagcagcagaagaagagaaacgaaaaaaaaacaagtattccgaacaccgaaattgcatttgcatacctgtctagtagattttttgcactcccttaatatgaagaaggaaatgatcacctcctttacctgacaattagtatgaaaaaatgttaggggaacattctaaaagagttgttatggtacaccctttatctgtttcgacattcaaaagagtttcttagtctttttttctttctcatgattgtgtaagaggtccttttagagggtgtactatagattattccaaaaaatgaagtttgagtctttttgaggggtctttttttttgtcactacatgtgtaaacttggtatattcttttctttcttgattgcttaagcttgccaatttcaaatgactaactgtaataactgctaaaacttttgtggtaaatacttacttcttgttgaatgacctcatcacacaagtgaagaagagtacctcttccactatccaattgtttctcatagactgattgtgtgattaagctctgatatgcaaccaagttactctgaaacctatgaacttgaaaaaacattagtcatgtcaggagcaacaatgtcatcatacatatgccatcaaagaagaagaagaagaagaagacggttacgcattacgagaaatatgttttgatgcagtaaccaatcactgcagaaagaacagcatagataacccggatatcagctgtaggcatgctaagagaactaacaacagttacctggtgcaaaagaaaaaagaaaacactaaaaattgtgttcaatctagaaaagaattcggctttttcgccttgttgccccgtaaatttatcaaaattagtaaagtaatccttgaatttttctcttaactattaatatatgatatcaatggtgttaattgctgaaaaaaaaatattcaagaactacttttgccaatcatgagaattgacaatgaataagttaaaccaaaagaaatatgtataataatacattgatagagtaactacattactaaccaatcctatagcagcagaaataaggaatttgacccagtccattggagttaaactaggatttttcttttctggctgtcaaaaagggaaagggaaaaattccattatttgaaacaagataagccatttttcatggtgttttatagagagaaattaacaaacaaacttacaagtactatttccaaatcagccattggaatgttcttgaaatgcttcacatgtatacccctttcattttgatgtctggttttctttctcctgcattataatattatattagacaagtttaactcttttattagccatttaacatgtatttaatatatttatgacttatttaactaacttaacatagtttataactttatataataaaaataaatttgtatgtcattttcgagttggacatgttaattcaaaaatgacttgaatcaatttaaagaaaactgaaacccatttattttgggtagatttcgaatcatgttatagtgtctgacttattttaacgtctcaaaataaatatttattttttaaagaatgtatttatgtcaaaataacaccaaaatcaatcattacctgtacacaacaattattctatcaaatgtaggctcttggatagtgactttgcccagtagtttagctatactgaagatttgaaaaagaaaaaaaaacaagaatttaacatagaaaagggaaggtgattaacattattgacaaaaaccatattatgattagagtctaaacaagtgttattatatcaagctacttaaacctgagatttattttctcaattcgaattctctcaacatataaactgtcctgctcatcttcaatgctaatctctactggttgagatgaatcattttgacagtgtttcctagattttccatagagaagtctctttagcctatcacacacacacaaacaaagagattgtgttaaacataataattaataaagatgttcgcagtataactacctaaaattttatgttttgatctaattaggtggtgacatgtgatttcttaatcaccatttaatggaagttaacggttcagagtgacagaattacagctttagtaacattaggtagttttgccactagaaaaaattattggatctttgccggttacaaaga

SEQ ID NO: 259009 - DNA, 616 bp, Cannabis indica
gtcccccttctcttttcttcctcactgtactttctgcaattaataccttcaaaaactgcagctgccctcatgtgtagaaggaggtattgtacttagtctcttttagttgttgggcaaatagggtacaaaatgacaccctaaaaatagaagcccaatccttttgcactttggcccactaggtttagtcctcctctctatatcatccagctggcttaatttttagtgacaaacacgctcatgctgatgtggacagctaacaattaggcacgttatcctagttgatttggaaaccctaatcccctaatctaggattactagaatggtaagcgtaggaaattatacttttatgtaaaatagaatgaaaattaaacatgtaataattgtaaactttacaatcaaaagctacatatttcgggacccttaaaatcttttacaaagtattacaagtcttttcactagccgacctaagtgaaaaatttagagttacaaaagtacaacactggtagaccccaacccgcttggtctagtgtgacccgaacatgtacaagcattgccagactcttgcacttatggctgatcacagactgatttaccctttcctgcacagtagagcacc

SEQ ID NO: 259010 - DNA, 1601 bp, Cannabis indica
ccattacatcaaagaaagttcaagactttattgtgaagaacataatctgccgattcggactaccttacaagatagtttcagataatggcaagcagttcgacaaccaatccttgaatgatttctgtgcgaaccatggtatcatcaaaagtttctccgcagtggcacatcctcaagcaaatggtcaagttaaagcagtcaaccaaaccttgaaggatccactgaagaaaaaacttgaagatgccaaagaaattggccagaagaacttcctgaagttctatggtcatatcgtacaaccgagaaacggcaaccgaacagaaaccattcgcaatggcgtacggatatgaagttatgctgcccgtcgaactcgagccaccttcccacagaagattgacgtacgatcaaggtaccaatcacatactcctagcagaatcacttgatgaaatcgaagaaaaatgagccactgcaaacttaaagttgatagcccatcaacaaaaagtagctcgatatttcaacaaacaagtaaaggctcagaaattcttcgtgggggatatggtcctgaaaagggtattcctaaacactaaagacagtacggcaggtgtacttggacctaactgggaaggaccatatcaagtggtcgaagttctcgactccggagcttacaaattaggtaagtatgacgaaaaaatgcaactcgttctagtaccacagtattggaatggggaatatttaagaaaatactaccaataaagtaccaggtcggatgaccacattaagtacagaatgaacatttgcttttaagtgaatgtcttattgggcagactatgctcaaaggtttcgataaaagaaacaaagtactcaggtcaggtgaccaccatttaaagtacacttttcgatcaataaatgaatacagatagttatttcaaaattcaaattgagtcaaaattattagcatgtttcttatttaccatccagtgcgtacaaaaggtttggtgaaacccaaaatactgaacagataagcaatatatttgtaaaagacaagtgctaagagtcatacgtctactcggtcacttggggggcacctatacctttacaaagcatttggtaaaagtaaaataatcaaaattgcacgaaaattataaacagagaatgaaattcattaaggataacaaaagcatgtaataccgggattaaaagctgcccggtcagcgtgttgtccaaaaaatgaataataattccaagtttaaagaccgcttggctggtcatcatgtctagaaaaagccttgtggcagaataagatatataaaaaaataaagagatataaggagaggtgtttaaacagctggagttctatgctcttggttcggttcttctgggccagttggagctggaggatttgttgtttgaatgggaggtacatcaacaatctggccgaaggttgaagcagctgcctcagtttcaccataggccacttgggacgcgcagaactcaaggtacatgtccttagcatcacctaagtagtcaaagttggcctgaggattagccttccaaaagtcgaagaagagctcaagaccgactgtctctagagcattaaccttctcttt

SEQ ID NO: 259011 - DNA, 817 bp, Cannabis indica
aattagaatccaacttttagcatccaatccaatccaattgtaattggatatccaactttttgtaattggattggattggatcggttcggttcaattggattggattggatgatgcccacccctatgcttaaggcccacctaactcaggagccaaaaaaatatcttttaaattttaaacagatttttttgaaaaaatataccacatttttttaaaataagggccaaaaatattttttcttatgacccactaaattttaggaccggccctgcctgcgattggaccctagccctaatcctagccccaaaccccaaccttgacccgactctagccctcagaccttggacttagccctggcccctaaattagaacccgaacccaaactcacctccgaaccttagatcccactcctcggactcgacaccgaacttggcctcagacccgacacccgacattggacccaaaacttgacccctgaatcccgtacttggaccctagaccctatacccttggctcccggacccaaactcgacccttgaaccccaaaccttggactcaatacccgacttggccctgaacccaaaacccgaccctagacctgaactcacaccccagacctcagcccttagcctcgacccactttctctcacttgagttctcattccttacttaaataaaaaaaataataaagaaaataaaaattcatgaaacacactttattttttgtttctaaaatttaaaagcaaaaatagttataaaacacacatttctattttcatttttatgatttaaaaattttaataataaaatattactata

SEQ ID NO: 259012 - DNA, 977 bp, Cannabis indica
tttttttaagaaacttagaaaaaataaaaggtttaacccatattttgaattgcaaagttaaaggatatttcttcgagacacatggataatgctcatcaattgatcattcctcctcttaaaaggaaatgaaaaggaatacaagagcacattcaaaaaggataaatgaaataaatcaagaattcattttattctttattctctcttttttatttatttatttattttaagaaagtccgtaagaagttttgttggcttttgataggagaataattggttgaatctatacgatagggttagggtgggataaaagagagattaagttgatgttagcgttttcccattttttttgttaatcataatcaaattttattcttttctttactttatgtttatgattgttataattctttattaattgtttcagcactgtgaatgaattaaaaatgcaatgaaaaaaggttttcatttttattatttgatcatgcaaaaatctaatggtcgatgtcgtggacattttcaatttgaattgcttgaattggattgtatgtatatgtaacatcaaacatggtttggcttaattgatacattaataaagtatggaagtattattacttaatcaatactcatattaataatgttcagaatctttaataagttggtagaatactggagttgagctgaccaataccgaattttatatattttgataattttgtgaaagacatggcatggccttaaagcaattaatggacaaaaaatatacatattatttggatctttcttttatgttcttttattatgttttctcggaaactttttccttttttttttctttttttttttttctttttctttttcttcttcttttccttttcaaagtaggagaaatcaagaattgtttctctttacttttaccttttcttttcgtttgaaataaaagagaaataaaaagtgaacaaaagtaaatttcataaagc

SEQ ID NO: 259013 - DNA, 749 bp, Cannabis indica
ttcgagtctgggtcgggtactaggtcacggtcctagttctgtttcccaagttcctatccttattctgggtccaggtcccaattaatatgtgggtttgggtcctggtctaggtttgggttcgagtcctagtctcagtttgggtttaggtctgtgactaggttttgatctgggtttggttttgggcttaggtacttgtccgggtcgtagtcctagatcggttctagttccatttgcaattctgagttcgagtttgggttttagttcggttagagttcgagtcctggtctgagtttgggttcgggtccggatttcagtctaggtccaaatcaggctccgggtgtgggttcgcatgttgggtccttgtctaggttgggtccgagtcccaagttccaatcccgagtgcgggtccaagttttggtcagggtcaggatctcgctcgagatctaggtccagtatttcgatcctagtctgggtcttagttcgggtccaagttcgtatccagatccctatctaggtccaagtctgtgtttaggatcaggtccttgatttaggtccaggttcgggtctcggtttcggtttgggtacacgactgtgtctgggcccgagttgtcgtcttagtttgggtctgaggctaggtctctgttcggttctaggtatgggttcgggtcctggtcacggtactagtcttgttctagggtcttggttcgacgattcttgttcaggttctaattttgggtcccaggtctagg

SEQ ID NO: 259014 - DNA, 957 bp, Cannabis indica
tacttgttttcaatgatcttgctcggtaaaagcgataaaatatatacttcccacatattaaaatgtaagttgatatggtacaatttttgagtccaaataattaataatgtggctgaaaaagttttttaaaatttgagaaaaaaaaaaagaaagaaagaggaagagagagaatgtgtgcataaatgggcgttcaataaagaaaaaaagaaagaagtgattgatctcacggtacttcactggaggattaatagattattataaaatgatcgtcattttctataattaaatgctaccggtcatttgtataacaaatttttgattttcattagtgggcgtaaatttccatatgtaataaactgatgttgattatggtgggcttctctcatcattttcaagtgagcagatcaacatataaggcccaattacacattaatactttgaacccatttgagatgcatatggtcttagcctattctcttggactttgaattgtacttttaacacattcttttttttttaatcacttatcacttgattatttatactttaaacctgaagaataacataaaatcaaaataaataaaatattttcaattaaaataattttacaattcaaatcatgaaaatacttaattaaattaattttatgaacacaattaaacttttaaaatgtacgaatttaaactttaatcagtttccaataaattgatatcagtgtcccatttaggcaagagtcaaagatatcattcattgaagagagctgtctgtgatagtcagtagtcccgtgatccgtaaggaaaaatactgggtaagatgtgggaaggtaaagagggatgactctaagactgtgtaggtatgagactacacagttgaagatgacttaaatggattgattggtactacctatatcaataaggcggatcttatttttcgctagcctatcatgaaagaactcca

SEQ ID NO: 259015 - DNA, 615 bp, Cannabis indica
aaaaccacacaaaacacaaaaaaacaaaaaacaagaaaacccaaaaacaaaaaattgatatttcgtcgacatatacagataatcagttttgagattacacagtagtataggatttttaattatttttaagtttttacactctgtgctatgtcgatatatataaatatcaacatttggtcaatacattatattttttttcttaactttggtcaatatattctgtgtctagatcgtttaatcatgcacgacaaattaattttaaattaataaaaatttaattaattttttttttggattacacatttctagaaagtccgtgcaatatattaaaagtgagaatatcatgattagctgtccagttcttttttttttgatttaagcgtttatatattacaacatgttttacttgggactcgaacccaggacctccaacactcacacacccacctatggccacttgagctagccccaagtggttgattagctgtccagttctatacatatataataagcttggaagaaaaaataaaataaaagataaaagacttccttaaaggaccgcccacgtgtacatttccattgtcaactttgttttttacttacaaaaaaaaaaaa

SEQ ID NO: 259016 - DNA, 1198 bp, Cannabis indica
gaccaggagagcctctctgagcctacatcagcagattcatgacagaggcaactaaggttgcacgggtaaccgaagacgaaaagttgttttcgataattgggggaattgaagtccttggcaaactttggaaggctgtaaggaagaacggaccagtagactcgaggagtgattttcttgaccgtgtagaaggttttatcaaacttgaagaagccattcagtgagcagagggtgaacaaaaacctagccagtcaaaagctccttctactgggacatccgtccagctcccccattacagaagcaattcaagctcaagtggtaaacggtccagcaacaataatagacaagggaatgggaaaaagggaaagttcactggaaaacccgaacaagcttcccgggagaatcttgccaagtatactgcatttaccgtcctgacggaagacatggaaagtgtttatatggctactcagtcattagccccgtacaagaagcccgcacccatgaaaaaagatgtcagcaagagagacattaccaagttttgtcgttttcatggggattacggccatgacaccaatgaatgcaacaatctgaagcgggaaatcgaattcctgataaggaaaaataatcggcacgtacagaagtatgtcaaggtcgatcagaatcagaggggcgataacaaccaagacgtgctaccaccaccagtagatggacatctgcaagtcattattggaggttcgcacatagctagagattcaggcgaagcccgggagaggtatgcccgaacagtacagcacgagcaagaagaagtagtcctggccgtagaagggaggaagccgaagatcccacgagcgggggaacccaccataacaaatgatgaagatactatcaagatcagatttccgcacaacgacccgttggtggtggaagtccagatagccaacaagatggtagccagaaccatgatagataatcgagcctcttccaacatcttatcaagaccacatatgaaaagatgaggctccaactcaaagatttaaaccctgtctttagcccgtgtatggtttcgtcggccaaggagtcgcacatctagggcaaattcgcctacccctctctgttggacaagctccaacaagcataactataatggcccaattttttgtattggacattccctcagtctttaacgtcatattaggtcgac

SEQ ID NO: 259017 - DNA, 758 bp, Cannabis indica
gataaatcaacatacttgtgagtagatctaagatcctggtaaaattaattccaacagaaagaagatcttccaatgtataaaccgcaaattctttatcctcaatgatttatgaagaagaaacttgatgaggagtttgctaagtccttggaaattttaaaagaaatcaacatcaacattcctttcattgatgcattagagcagatgccaattatgttaagtttatgaaggaggtgttgacaatgaagaagaaattttgggattatgaaactgtgagcttaactgagaaatttagtgccataactcagaagaagttgcctcaaaagcttaaagatcctggtagcttttcaattccttgtgagattagtggtttaaaatttgagaagtctttatgtaatctttgggcagtataaatttaatgccactttctgtatttaaaaagttggatactggtgaagtaaagcctacaataatttcattacaattggcggatcgatcattcacttatcgaaggggaataatagaagacgttataattaaagtgggtaagttagtatttccagtggattttgtggtactagacatggaagaagacaaggatatgccattgatccttgggcgccctttcttagcaactggtggtgcacttatagatgttcgaagaggccacctaactttgagtgctaatgatgaagaaatcaagttcgatatttataagtcttctagtcaagctgatattgagaatacatgcaatatggttg

SEQ ID NO: 259018 - DNA, 523 bp, Cannabis indica
gtccaatgaacctcgggctatgcctcacttgtcctatgaacagcttcaggacccaagaactttctttcacccacttcatcccagtgaataggtgatctgcatttccttccatataaaagatcataaggggccatcacgattgctgcctgatagctgttattataagagaactcgatcaggggaaggtactttacccatgatccttcaaagtcaagcacacatgctcgtagcatgtcctctaagatctgaatagtgctctcggattgcccatccgtttgaggatgaaatgttgtgctgaactttaactgagtacttatagctcgatgtagactctcccagaatcttgatgtaaattttggatctccattcgaaacagtggactttgggacaccatgaagacgaacaatttctttgacatataactcagcatacttatcaatggagaaattcgtccgaacaggtaagaagtgcgctgactttgtaaacctatccactatgacccacacagagtcaaattgtcccg

SEQ ID NO: 259019 - DNA, 1276 bp, Cannabis indica
tacttgtgccgacattgggtggtggtggttcggtcgagatgggttcgattttcttagtcgtggtgttcggtcgtgtgcggtcagttttcgtggtgttcctcgtcgatcggcagtgggtgtagatgatggtcgtcgtgggtaggggcggtgggtagaggcggtggttgtagacgatcaccatgcagtgcggtgcagcggaggatgacgttgtgggtaggggcagtgggtggtgggcggtggacgttgtggttgcttgtgggtttagggtggatttgagagagaaaggaggtagagagagagagagggttgagaaaagtgggaggagtattttggggtttagggaaaactatacctatttggccaattttagtatacttaggtttaatattttaatttgggtataaataatgcatagaaaatcaatttttccttatgaaaatctactactttgatttgctataattgttttgttgggttttagagctgttttctgaaatttttttgtggtttctcataattattttatcaaaacttgcaaggccatcattagcctacactaacactacccaataatggtgaatcatcaaggcacatgtaataaaagtcttcaagtgattggaaaaaaatattagataaataggaaaattttaatattttggaaaacataagcaaaagcattcaatggactacatgggaagagattgatatatcacacatttcgaacaaacataggaaaaaagaaaaattaatccaccaaagaaaaataaaaccctcaaataaaaatataaataaaattatcattaacaaacatgatttttatagaaaaaaagattctaaagatttagagatgagttatattagtaaatatatcttacaaaatcttgaagagagataattggagcccaaaaaattagatttctttactcaaactaatatttttcaaccagtattcaccgatagatcctccaaaacataaaactataacatattgttttgtggtggtggtggtgaaagaaattatcaaggaaagatgatgatggacaggttagaggggatatgggatagagaacaaaatgtttctaattttcgccatgcttacaaaaaatatatcaagcaaaatatttattagtaaacaatataccaatatacttttgacacatattcatacataaaagaaattaattaaatctattgatacataaaaagaattaaatgttggtatgaaataagagagtgacacataatggaaaaaaatatatgtatgtacatatatttt

SEQ ID NO: 259020 - DNA, 540 bp, Cannabis indica
aaactctttaagttaactatgtcttcctctcttgtgacttctatcaatactcgtccaaagtgccattgtggcacagattcggtgtgccgaacttcaaggagtgaagagaaccctggtagaagattttgggggtgtggaaactatgtaagttttccttacacttattttttttaaaaataaatatatatataaaatagattttcttgacaagtttaagctatgggttatcatcatgtttttgtttttctaaattttttattttaggatcgagattcttgtaaggtatgtcattttttcgagtgggtggatccagatgttctggttggagctaatgtagtattgcagaggttggaaagaaaaattgaggaccaaagtaaagagatcaagttacttaagaaatttgtgttattcctaatttgtgttgaactaataaaattattgttgtattgaaaatgtataactaatccatgatatgagtgtttttcttattaaacttatgtaatcagtagtttgagttaatatgttgtaatgtataattaa

SEQ ID NO: 259021 - DNA, 591 bp, Cannabis indica
tgccccatttgtctaacaaacccgaaagacatggcttttcaatgtggccatacggtaagtgatcttcagtaaatttattgctcattaattagttgcttcaactacacagtattgtgtatgcttattcatttttcatctcaccgttgagctcaaaacctatattgaatacattttggttctaataagtgctgagtgtagattccagtgtatgaaattgaggatgggacttctcttttcaaatgtgttagtttgaacttaaccctttgatatttctgtgttgctgaagacatgcaaggattgtgggataacgctctcaacatgcccgttgtgtagagataccataacaacccgactcagactcttcaattaaaatgacaacactgctttctttgttgatgcatttcttcagaaaatgaacttgttaataacattaaaatccatgttttctcatcatccccattaaagtagtctgtcttaccaaacatgcccgactgcttaagctgtaaaaaaattatttcatttgctcttgctctcttgttttcagtttcacctctaaaccaatgaacaaaacaaaaaatgatatcactttat

SEQ ID NO: 259022 - DNA, 1151 bp, Cannabis indica
tagcagtcacagagcatgctgtgagtgctatcctcaaaggagaagaagacggtgtacatctccctaaatactacatcaacaaaacgctaatcgacgctgaaagtcggtacccactcatggagaagctgacttatagcctgctcttggagtccaaaaagttgagaccgtacttctaggcacaccccataaagttgtacaccaatcaaccatagcaacatgttttgaagaaacttgaagcatcaggccgactactcaagtgggccattgagcttggttagttcgagaacacatacaaaccaagaatagccataaagtgtcatctcttgaaatctctcaagactcaagagaaaagcaagagctagagaagaagcgagagcaataggagctgcgaaatcctaaagaactaacttggaaactccatgttgacggaagttgcattgctcaattgtccagtctaggcatttcccttataacgtctggaaggcagcaattgtccagtctaggcatttcccttaaacccttgaacaatgaggctgagtacgaatcattaatagttggcctcaagctgacgcacgaagtacgggcttaccatctggacatattcaacaattctcaactagttgtgaattaagtcttgggtgaatacacaactcaatgtgaaaaaatgatggcctacttgagaaaatcaaggacttactaagttagctcaaaggctacacaatcatgcaaatccccaaatagcaaaatgcaatagcagatgcactttcccatctagcaagtaccaccattgccaacaacgcaaattcggtgcccatacagttcctagaggaacctagcattaccagcccagaagaagtcagcatgtggatgacactccaacatggatgacacctatcatagcttacctctaaaccggggcctttccagaaggcaagaatgaagcaagcaagctaagaagaaaagttgtttggtatctaatcttagacgaagtaatgtatagatagagcagctaatgatagaagtgcatgaaggcttctacggcaaccacatcgggggtcaaagcctatcaaaaaagatactctgacagggatacttttggccaataatgaacaacgactcaatggattgtgtcaaaaaatgtgacaagtgcc

SEQ ID NO: 259023 - DNA, 792 bp, Cannabis indica
gtcagtagtctcgtgattcgtaaagaaaaatcccgggtaagctatgcaatctcacatcgcctggggaagatcaagtgtgatgattctgagactgtgtatttataagactacacagttgaagagggcttaaatggattgattggtactacatatattaacaaggtgcatcttgtttttcggtaacccattcgaaagaactccacggttaagcgtgcttgacttgggataatttcaagatgggtgacctcttgtaaagttttaccaagaagcgtgcgagtgaagataaaatacactgaaaacactcgtgtttatttgcagggtcagttgtcatttcatgaagcagccagagtgacatactcgtgtataagagcaataattttgtgagcgtaaaggccttcaacttgttattcccaaccacatacaacaatttgatgacaagctatcaatgaacaaataagaaccaacacgaaataaaataaaataaaaccatgtcacacaaacaagactaaaacacttaaaactatgtcacaaaaataagacgaaaatgctcaaaactatgtcacatagacaagactaaatcactcaaaactatgttagaagaacaacacaactttctatagttatagatttaacaatgataaactcaaattttttcttctattatcaaaccttagagtttagatactcatctacagtatttaattaaggctatgtttgttaggaaagatggagaataggaaggatggagagttaattgaggatgtagaataagagggagggagaggagagtag

SEQ ID NO: 259024 - DNA, 755 bp, Cannabis indica
aagtgttttgtcctatctcgagaacataacaaacaagttaaattgcaacagaagtcgggggaagttaagaaaaaggttgtccaaagggctaaggaggctcgggctaagttaaaattcatccgagaaagctcatgaagaatcccaaaaataaattatcaagccacagaagtgaataactatatgttctagatttaatagaatttatacattaaacatataatcatgaaagtaatcatgtgaactatgcatcataaaatgatttctgaaattaattagtaaatcagattatattaaaatgggttttatttagggcataaaattctaacactgatccccaacccaagcacatcctaactccaacaaccattcctagccaaccccaaccaccccaccctacatttggccaccaaaaacccacccctttttattttctattttattaaaaaaattattttaaaacaaaatagaaactctaacttttatcaagttacactgtacccctctctctctcatctgcattttcaaaattatatacgtaaaacacattttcaaagctaatcatcaaaagggtactaataaaaaattgtaaagattaatgaaacccaaaagaaaaattaaaactttaattatttttatatgagtaattcttgggtagtgttttagagccagaaaatacaatatctctttgtcgttaatgataagagccttattatcatagctaacattgctctatgttagctcaaagcttagaaaaa

SEQ ID NO: 259025 - DNA, 3503 bp, Cannabis indica
gtgttgaagggatgtcgatgagttgatttcatgttcgatgcagttcattgagtcttctttgaccatgcactactacaaaaattaacttttctcatcagtttatagctaccttttataatatttccaatcggttcctaaaatcattgacaatgtgggtataaaaataatgcgagactttgaatgatgattataattgttggaaaaagtcactacggtttataactgttagaaaaaagttaaatcaaataacaatttacatgttagaaaaaatctttttaaatgtctgtttataactattggaaagacctttgtcagatagtaactagcgagaaacgtcactttaaatgatggtttataactagttaaaaaaagttgttcagaatgaagagagaaatgataaaaatatgatttcattacacatggaaaggagcaacaactcattacaaagtacaatcagttagaattaacaaaagctatcgataaatacaactgtacaaagataacgaaatcctaactaacatgtacagtaagcttaactaacaccccccataatctgagttgggacaaagagaccaaactcagtttggatcaaagcagttgaaatcgaggtgtagacagagctttagtaagaatatctgcaacttggtcttgagctagagtatgtttgacaagaagttggttatggagaatcctttcttgaataaaatacaagtcaagctttatgtgcatggttctattgtgaagaactggattgggtgacatcaaaataatgctttgattgtcacaccagattgtagggataggttgttgagaaagtccaactttagcgagcaaagattgtagccaaatgatttcagtacaagactacgatactcaacttcagtgctcgatctggaaacatatttttgcttcttagaactccaggagaccaaattcaagccaaggaacacacagaagcctgaggttgaccttcgatcatctgggtccgaggcccaatcagcatcacaaaagcttgtcaatgttaaagaagaacaaggcttgagatgtagtccatgatcaagtgtgcccttgagatatctcaaattttttttgacaactttaaggtgagactcaagagggttgtgcatgaactgagagaatttgttcactgcataagaaatctcaagtcttgttatgacatgatattgtagagcacctacaatactcctataacgatgtggattagcaacatagtcacttccaaagcttgacaatttttccagtcataggatttggaagtgagttggccaattctatctttgctcgacaaaagagatccataatatattttctttgatagagataagtccatcatccaaatgtttcacttgtatgccaatgaaatagtctagggtccaagatctttgagggaaaataaggcacttagattggtgataatgagagaaacctcagtagaagagctgccagtgatgattatatcatctacataaaccaagataaaggttgtatgagatgaagtaatcctaaggaaagagactaatcagatttgccagagacaaaaccaaaacttttaagggtaattcttagtttcccaaactaggccccgagagcttgctttagaccatataatgcctttttaagttgacaatcataggtagatttttatccacaaaactaggagctaggttgagtcatgaatacttcctcagttaattaaatcaccatttagaaaggtattgttgacatctaattgccttatttaccattttttgataaagcaattgtcaatatgacttttattgttgttggcttgatgtctgggctaaaggtttcagtaaaatcatatccatactgctgcaagaaaccttttagcaacaagcctaactttgtattttaagatagagccatctttttcctccttaactctataaacccattagtacccaataggttttctaccagctggaaaaggcacaagaacataagtgttatttctcttaagtgcaatgatttcaccattcattgcattgttccagtgaggggactttaagagcagcaacaagtgttaggggttccttgggagaccataaacactttttggtttataagtatacaaaccttagctcttctaaccatgtgatgattgttgacataagcttgaagtgggacaacaataatattagctaatgaagtagttatttcagttgaaggagctggtgtatcatgagcactaggctgttgtgggactgggctgtgacagcttggaggaggcactggatgcatcagttgaggaggaagatgagtgagtagttgatattttttcagaggagttggtggtctcagatgtggcttggccagtattgggaatgagagaggaagtttcagcagaagcacaatgacaagggacaaattggttagtggaaacagttcaaagggaaaagtaaattcatcaaacaattcatccccttgaaatatatattctaccagaaattccaagacatttatagcctttctgtttcaaactgtagccaagaaatgtgcacttttcagagttgaattctaatttgtgtttattataaggcctggtatttggaaaacaagcacattcgaagacttttaaagtggagtaatcaggctatttgttaaagagtttatgaagacgggtatcattggcaatcacaggagttggaagcctgtttattatatagcaggaggctcaaacaacctcatcccaataggatagaggcattgaagcctgagcaagtaaagttaaagcagactaaattaggtgtcgtgtttcctttcagctacaccattttgttggtgagtagctggacaggaaacacgatgagtgatataagataggcttttagagcttgaatttcacccctaatcagattgaacagagatagtgggcttattatactctttttctacttgtgttctaataggcctgtacttctcttgagtggagcagaccatggatatcgaacatgatgctcttcgatctcaacacactcggggttttggttccatcccccctcaggttgtaaaattattgattgtaaataggtgtattgcctcaaacttaaagttgatggttctgtgaatcgatataaagcttgtcttgcaaaaagcttttatcacggacctggtttggattttcatgaaacttttagtccaattattaagcctaccaccattcgtttggtcttgtctttagttgttttctttcactcgcctattcaataacttgatattcagaatgcatttttttatagacttaacccagattgtcaatttatgaccaacctcaagggtttgtcgactcaacatgccctcccatgtttgcaagctctccaaatctctctatgtttaaaatatatgttcactaatctaatttaagctataaaaaacactaaaataaaatattaccaaaaaacatacaaatttgtgatcaaaaatttcacattaatattttcatattttttcataaccacaat

SEQ ID NO: 259026 - DNA, 343 bp, Cannabis indica
agataaaatagtgacattttattagcaaattgcatcaaccaatacaatattcaaaagatcctccgtggcattactctcggtgaacatacgaactaaatgaaaacaagagctacgagccatataatgggtagccttgttagcagatcaacgtttaacaaattgaatctgaacaaattttaaataagcaagcaactccttacactcttgaattaccacgccaaagggagaacgcaatagaaccgaagaatgtaaggcttggacagtaagaaggcaatcggtttccagttgcacatcattccactgcttatcttcgatccaactaagagcctccttaatgcctatc

SEQ ID NO: 259027 - DNA, 963 bp, Cannabis indica
ttttgtaagtttccctttatattgtgaacaatgtagataaattaataaaaaaacccataaactctaattctagttaggtgctccctttaatattttgcacaaagcaaaccatgtgcccactttttttttttttgataagtaccctctgcccacttcaaataacctaactaccccctaataacttaacatcaaaatttgaaagactttaatattattatttattacttgatggctttctggaggctaggcgattgtgggtaagggtgtacagaaagtcattcaatccaattacaactgacctatccgatcacaaccgattcaatagaatcgaatatctaattataattagatcggatcggatgtaaattttgaaaagccaataggattggatcgactgttggatgggacatccgatccaatggacaaccgaccaaaccagtccaattagcatccaatggtcatccaattatatttatatatttttaaaatacatttataattatatatttaatatattttatttaaaaaatatattactttatttaatatacatttaacatgagattaaagaaaaaaaattagatatgaaatattaattctcatcttccttatcgctaataaaattatcaatgcatataaaataagttttatttttttggtagatttattatgagatcataagaattatgttggattaaactaatgtttattatgtatgttgaattattaggttttaagttatattttaaatatatatatatatttttaataaaatcaacttaaatagtagctaaaatggattggatggatccaatccaatccagtaaaaaactagtcaatgcatcaaatggttggaaccgatccagtccaatacattcattgaatcagatcgaattggatgactcaatttgatcggatgcaaaaatttaatatccaataaataattggattggattggttggg

SEQ ID NO: 259028 - DNA, 679 bp, Cannabis indica
tatagtgatcgtcggaattgtcacaggtgcctggagtttgctgtcgacgctgggaaggtcgccagagttgctgtcggcgccgaaaaagtcatcagattggcattatcgccagaaaaatcaccagtttcttagtgattttttcggtaattttttcgacgtctgccaattccgacgaatttttcagagtttgctgttggtaccgaaaaagtcgcctgagtagctgccagtatcagaaaagtcgtcggagttgctgtcgatgccataaaagtcatcaaaattggcattgtcgatagaaaaattaccgaaaaaattactaagaaactggtgaagaaactagtttcttcatcaacaaattggtttcttcatcaagaaaatagtttcttaatgaaaaaactgatttcttggtaatttttgtggtgactatgccaattttgatgacttttacgaagtttgctgtccggtacaaaaaaaaatcgccagagtagctgccagtatcagaaaattcgtcagaattaacattgtcaccaaaaaaatcactgagaaagtagtttcttcatcaagaaaccagtttcttggtaattttttcggcgacaatgccaattgcaattaattttccggcgtctacagcaactcttccggcaccgacagttactctagtgattttttcggcaccaacaac

SEQ ID NO: 259029 - DNA, 761 bp, Cannabis indica
gtggaagaagttaagaagtaatatttgtagttcaacggtcttttatatctatttaactctagattatattcataattcgacaagatctctataacacttaggggtggaaaaatctattcacatatgtagtccattttgaactctagactatactcaatacaccacagtatctctatggcacacatattttgattagacatggatgtaatctaatgaacaaattagaaaattattagaacttattcttgatcctgtaattgttccaattaatatgttactgtagtaatagaaattgataccaataaagttcttggacatagtatcacagtacattatttgagtgggagaattttaaaattctaagcccatctttatttggacgacacttgtgaaagcttactatgttatgatcatgatatgaactttagaatataactgagaaagtaaatctaaccattcatatggatagaaataagaatttaaggataggataggcgaatttcgcatagtctattcgaatgacttaggaaaaatacctaatcctcatgaaatgttttatggtatctctaatgattacttaatcttaagcaagtattttacattaatgataatactagaatgctatgttgatgacctagtctagaaggaacttatagtttcagacttagataatatgtcacaacaagatgttcttgagtaccaatagtaagaggttaaatgtactcctatgtacgaatttaaccagactcctactgttgagt

SEQ ID NO: 259030 - DNA, 742 bp, Cannabis indica
ttttatttattataaaataagaaaagaaaatgtgagagagaggttgtctttacctttgccacctacaaaagtaggtcatgcttctcatggcacgtggttgatatgcctattcaaattgttttacttaacaaacaagcttcattggtttgttttattttttatttttttattttactttcataaaaacaaaatgttattacttgtactttctatatcagtgaaatagatacaactttttattttacttttcgtttacagtgttgtccagaaatttaaactgtacacttatattttttttgtaaatatttattcgggtgttaatccgaacccgaccgtagcaaacccgtcatacccaacccgaaacccgtgggacccgatcgcccgaaaattgggttcggttacacattttaaacacccgaagtccgaaaacccgaacccgactattcgaaaacccaaaaatctgacccgtgtgaagccctaaaatattgtatatattatggtgtgatttgagcctaaattaaccttcttatttacttttcaccctagtcttacattattagcctataaagtcctattaatctctagattgtgtgtaattgcattagtggagaatggtttgataattaagcttatggagtggatttttgttgaaatacacatttatttagagatgagtattgattgttagcatgtatgaattaatttgaatgtcagtaatatgatgagttgattgaacacacac

SEQ ID NO: 259031 - DNA, 1435 bp, Cannabis indica
tcaccgatggtgtttcaagtggataaccttgtgaccaaaaatgaactctgggaagtggggctcatcgccccacattaggatgtgactcatctttctgtgaaggatgcagtctaggatgctctatgggcgaattcgcacgaggttaaggaggccatcgtagatattactgctaaagaggcacttaaagtattgaaggccgatgagcaatgactagcagattggagaagacaattcccagaaggactaagtgaggctgaagaattgaccatacacttcaaggaggtggtgcgtacgaggttgcttcaagagcgagaacttccggtagtggtgagacacccttccatataattagggctcccactatgtctgattttgagactgtcaatcaatatggatttgatccatatttcttgaatttagatcatcataagtattcatatagtaggtgtatagacagagtagattgtatcgtccggagtcccaaccatttcatttcacttttgcaccatgatgttagagtggatgcatttagtgaaatttacttcccagacttcctccaatatgaaactaatttaggtcaagtggacatcgctctttttgctaggggaaaagtcaattacactagaattaatggtttggaccttcttaatgtcttgcatgatgatgtattgtaaaaaatcatatcttttattaaaatcttgtttgataaatattttgtttgctttgtgtagatcaatcagccactctggaaatggggctactgaacaaattcttgggcagcattaaaactcgattcgacgagatttaggagatcgcccaaggaggcaaagatggcagaaagaagaacaaagcttttgaaagaggatctcaggagccaacacctcaagccttaaattcagaagctgctccaaaggcttcaggcacagaagctgcgtctactgccatcatagacctaaccaagcctgccttatttgtggagcctttgaattaggttcctatggagagctccagaggggatagctcggactatgacagactcgtggtgatcaacaagaagcgggtcgattcatctgatggtggtgctagtaaaaaggaaagggtggagaccaaggagaaagtcatacaggtagctgcttcaaggaggcaggcaatagatactcagtcccgaaaggggtctaacgctcttgatggtagaagaccacctaggcaaagcacctggacatcaaaggataatcatgatcctcctatgccacccccagcatctaaagttattcctgccacctctacccaactgtctagggaaaggactgaactgcctctggcacccttcactcttcctgtcatgccttttcgattgacaaaaagggataaagctcgtctgaaagctgtggatcaattctaccagaagaggcatggtagtgaatttgaggagatg

SEQ ID NO: 259032 - DNA, 563 bp, Cannabis indica
cgggatagctcatcgtctaattaaagagcatgctttgctaaaccatgcatgagttacaaaattcttatcgcgagccacataaactgtttctgaaaatttagacaaaaaaactatagcatcctcaaatagcacctcgagctcattaaaaacatcattcctttgttaatagttgttgcgagagaaagcaaatctaaataaacctctctaattgggttgaaaaaatagcattaaaaaaatttaaaaaataacatttggcttgaaaaaataaaacttatctttgaagcttcttgaaaaaatagtgtcacccttaatttatcgaaaataaaccattgagtctaacttttgaatctctcttttaaagcagagaaatttaaacaatgaaaccgcctttgatggttctatgacctactaacttccaatccctaaatccactcttgccaaaatgtaataagtacattctattaattgagaaaaattcaataaataaataaataaattatattacaaaaaacttttaaattaaatttttaaagaaagacttatctgataaattctatgtgatt

SEQ ID NO: 259033 - DNA, 509 bp, Cannabis indica
atacgtccaggagttgttattctcactgtcaacgataccataagcaaccggcaacaattggatgtttgcatcgcatgccacagcaactaacattataccgacgtacttcgtcttcaagaatgtgccatcgatactcaaaacaggacgacaaaaagaaaagcccattctacatggaccgagtgatataaaacagtacttgaaccgctcatcctctaaatacaagtcagtaatggtacctggattcttctgttccagcatgtacaagtatccaggaagcttcatgtatgaaaactcaggcgtacccctagcatacgtaagtcccatctccctgcacctccacgccttcacataactcatctggataccatagttgtcaaacatgtccctctgtatgtctttagccttgtacttagttccatcttgggtgtacttccccttaataaggtggccaaccacccatggtgctgcttgacggtgatctgaacgtctcgcattcaagttacatgtgt

SEQ ID NO: 259034 - DNA, 965 bp, Cannabis indica
agacttgcatgtctaggtcctataatctcgtcatgcgatgtccacaaaaggcgactatctaaggacgcagacatcctaaacataatgctgaacctgcgaagttaacatcagaacgtgaacaagtcaactcgcagatttggaagacgcatacgttgatgaacttagtaactgctgttcatttattaatgttaacgttgcttagtttaattattgtaattcaatgtgttaaaacggattgacaatgaatgcaatcctggtataactgatcggacacctgctttctatataaaggggtgatccaccgtgaaatggcacctatgaaactcttgctacagtggactaagcagaccgtgatctgactgaaccactataatcctttgtctcattgttgtttttcagctttctgttaatcatttctcattcccagtttgagtactcgccactctaggttgaatactcgcacttgttcttcatatagatctttttctgctattaataatatcatataattggtgttgcgaaattcactcgacaacatttggcgccgtctgtgggaaccaagaattaaaatattattcatttcaagcaagaataccatcatggcgggaaaccaaacaaacggaggtgctaacaacgggtccatcaacatcggaatgatgaacgtaccgttatctggagctagaacaccacctgtggacgtcgttaatggtggagtagggaggagcaacatcagacctctcaacctgttccctgaaacaactgaccctcaactcgaggacacgtccacactgccagcaaccatgcactttccccttgtcactccgacggtggtatctgagggaatcatctagctcaccactgattaatatactgcaatccaggaccaaatgcgtgcaataaaggccgaagtggatggacagaaccgggcccgacgccccctcgagtccctactactcgcacggaca

SEQ ID NO: 259035 - DNA, 573 bp, Cannabis indica
aaggtagaggatcttgaaagtaaggtttcgaaagacaaattgaaaagaatccataataagataaatgagcattagagtaattgtattgatcaatattttgaccaagaaagtaatgatggtgatagctctcattatgtttttgacaagtggattttcttttctcaagtgttgactgatgggatttaggaaatatagagtcaatatgatccaaaattatggtaactttgttcgtctttagttaattaagaaatttctttatcattgtaatgtttttgtgaagatttatcaataatagaaaagaaagattgaataatatattattattattattactattcaattatttatttattttaggtttcaaataaaattaaaatgaagataagtataatttttattaaacagcctttagttaattatttaaacataagatactaagaaaaaatctattaagacataataaaggatgtttaattttatatttaaattacatcaaaattagtaatttagaaattcacacatttcaaaattttaatcaaataaaaatacatatcacttagttgagtattatta

SEQ ID NO: 259036 - DNA, 741 bp, Cannabis indica
aaaaaaaaaaatactttaaaagtaaaaatgtaaaaaaatttacaaaaaataggatattatgtaatgagtccttttaaaatcttaccaatatatatatataaatatctattattgggcgattctacaatgcaccttagaaagggaaggggtgcactgatacactcttacctatttcgacattcagacgaattttttagtctattttttttatattcatttatgttatagttatttaagacatcttacaaaattttaagaaattcagaataatttacaatatagaaagtagtgttcaatgtatttcacacgcgtataaaataaaatagttacgcgtgcaatacattttttgaaccttattttcgacgtgttaaatttttctaaattttttaaaattttacaggatgtcttaaatagctataacgtgtatgaccatgagaaaatatttgactaaaaaattattttggatgctaaaacagataggggtacatcaatatatctattttaaaaaggtgcattgtagaatttccttcaaaaaaatccaaattattattattgagaaattctacaatgcacccccttaaaactaggatacattgatgcacccttatctgttttagttacctgaaataatttttaagttcaaatttttacttcttagttcatgtacgttataattatttaagtacatcctgcaaatttaaagtaaatactagaaaaatttaaactaacgccgaaaactaa

SEQ ID NO: 259037 - DNA, 798 bp, Cannabis indica
tagctttttattttattttattttacaaaaaaaattacaaagttaaagaaaattggaaaactctttctctctcaaagttctctctctatttcggccataggagcagctgggttttgctcctccttctttgtgatttcatctctctttaaggttcaattcaagctaggttagctcctcatcttttcttctttaagattgttgaattttgatgaaaatagtgtaatgcatgcatgataaattgaggttgttgctgctgtgtttttgttgttgatttctgagattttaacatgtttattagaggttaattaagctacttgtggtgcttgatagttaggttgtttaaagttatgaatttttccatgctaaagtttgatttttcaaagaaatgtcttgaatctgtagtatacttgctgttgatgtttgctgatattttcagaggttattttatgcttgattaagtagatttgagctagtatggttgcatgttatttaggtttaatcaagtttgagtttaaaactcaaagcttgagctttaatggtgattttagattctgtgagttctgggtggatttgatgctttagaaatgttctaggggatgtatagaacaggtctggaagttttggtttggtttggagttgatttgagcattgtgtgaatttttgaagttctgcctgcgaggaaccggaattccggttgtgcatccggaattccggatggggttctgaaatttcccagaaccggaattccggttgggcaaccggtctaccggttggggaaaattcaggaaccctagtttt

SEQ ID NO: 259038 - DNA, 588 bp, Cannabis indica
taataattaataaataataataacaataatacttttaataaattaaaaaaaaaatgaatcaaaaacataatattatgatgattattagttaataatcagaaaccaaagagcatcccaaataatatccatatccaaagaaggcattctacttagttgaacagcttcaacatcaccaactactaattcattattattattagaagaagaagaagaatccataatcacttccttatgatcatgataataatcttttgaacttttcaatgacacattcttcttaatcttctttggtgatgatgatattgatgatgatgatgatgatgatgataattcattattggtattattagaaataacactagcatttgaaatggcttgaagtttagcttcaagaagagtaacaattgctccattaagagaattagccttgagttgatttttcatgtgaggaaaattcaaatgagcaaaatcccctctcaacatgtaagctgcagtgtcataagccatggcggcttcatccgccgtctcgaatgttccaagccatacccttgttctgtttcttggtaatctaatctcagctacccattt

SEQ ID NO: 259039 - DNA, 582 bp, Cannabis indica
ctcagttccggtctgggtacacgaccgtgtcaatgcccgagttccagtctcagttctggtctgaggctaggtctgtgttcggttctaggtctgggtccgggtcctggtcacggttgtagtcttattctagtgtcctcgttcggcgattcttgttcaggttctaattttggatcccaggtctaggtctgggttcaggtttggttcttcgtatgggttttggtcctagtctgagtccccgatttggacaccgactactggtctgttccaggccccgttacctgaatcccgagtcaagatctggatcactatcacgggtctgggtctggttctggttcaggtcccaggtcccatttttgtgttttggttcgggatcgagactgggtgcggttctaggtcccgacccttgttttttgtccctagtctggttccatgtttgggtctgagcttaggttcgtttttgggccccgagtccaagtttgggtaaggatccaagttcggctcccaactcgagtttaggtctaatttggaatctgggtcctggtcaacttccggctttggttccaattttaggtcacagggtac

SEQ ID NO: 259040 - DNA, 1311 bp, Cannabis indica
gatgcgaacccacactcggagcctgatctggacgtagactgaaatccggacccgaacccaaactcagaccagtacttgaactcaatcccgaactcaaaagtggactataacccgtacgctgtgacccgaaattggaacaaaaactggaagttgaccgagactggaactaagacttggacttggaatcataactaaaattggacatagatccagaatcgtaaccggaccaggacccgaattccaaatcagacctagacccaaattgggagccggacccagatcccagcccaaacctggactcgggacccgaacttgaacctgaactcagtcccaaacacggaaatagactagcgacacagacacagggttgggatctacaaccgcaccccagtctcgattccgaacccaaactcagaaatcagacctgggacctgaaccagaatcagaccgagacccgtcacaatgatccagatctttacttgggattcgagtaatggggcctcaaacagaccagtagtcggtgtctagatctggggctcagactaggaccggaacccagacgaagaacaaaacccgaacccagaactagatctgggacccaaaattagaacataaacaagaatcgtcgaaccaggaccatagaacaagactaggaccgtgaccaggacccggacccagacctagaaccaaagacagacttagcctcaaacccaaactgagattggaactcgggcccggacacggtcgtgtacccagaccggaactgagacccggacctggacataattctaggacccgatcccaaacactgacttggacctagatagggatccggatacgaacatggactcagactaagaccctgacacggatggaaatgatggacctagatttggacgagaacccaaactaagaccaggactcgaactccgacccgaactaaaaaccaaactcgaaatcagaatcacaaatggaactaaaatcgaacaaggactgggaccaggacaaggacctaaacccaaacccgaacctagacaaggacctaaacccaaactgagactaggactcaaacccgaacatagaccgggacccaaaccaacacaataaccggaacctagacccagaataaggatatggacctgggaaacagaacaaggaccgggacttagtacccgaccaagaagcgaacttgaacctaggacccagctcgtgacccagcaccagaaatggaaccagagtgggacccgagattggcatccagatctaaaaacagggcttggacaaaacgcgtagtctgtgtctggatttggg

SEQ ID NO: 259041 - DNA, 1451 bp, Cannabis indica
tctaattttagtaaaaaaaaattgtaacggatgaaaatttaaggggcatgattttagtacatagtaaagtttgagggacatgatttggtagatatcaaagtttgggaacatggtttattacataaacaatcactgaaacaataaaatttgagaaatttttaatggtcataaattttagaggctatgatttactatatgtcaaagttcgagaaaaaaattactaattagcttaaaaataaactaaacaactctcccaatttcctaaatataggagggtacactacaaattattttttctctccttgaattttaaaacaatctgcatgcatgtgtatatataaagactcattcaccattttcacaatcgaacaaacaaaacttaacttaaaaatggcttctcaacctccagcatttccaataaaaatgtaaattagtgaactgttgttaaaatatagttcatgttgtaaaagtttactctattagtgtatcaaaagttattaaaatttgtactataagttaaagttattagctaccaattaatctggataatatgaaaagttacacataaatactaatcataatttttttatcatttaattacaagtttgattgatattaatgatggataacgttctttttattatcgtgatccgatttatttctgtttctgactcataaacttcagtttgacactcgtcgataccaattatcaactcaattgatatatttaaaagaaaaaaaaagtgaataagtaataaaattggtttcaaaatgctctccgtacaagtggtgtccgtacctagggttttcgtgcaaacctccttttaaatagagccttgtctctctgtggtgatccttactgagtgatctagggctgtttcctgctgcccttgtgttcttgtgtaacaccttctttcaagctggttggtgtgtggttgttctctggaaaggagtatggcgtctgataaagggaaagaagtcttggagactgttgagtgtatttcgagggaaactatgatgttatctctggagaagcctggcgaagactcagaagttggtctggattttgtggagaaatcggtggtgggaaggatgttatccaatagacgtgtgtttaaaggactgctccggtcggttctcgctcagaattggaggatcccctcgggttggaatatgacggaagtggcccctgatactttcacactgagattccaaaaaaagagtgaggcggagttcgtggtggaccgtagcccctgggctgtgtgtgggggtcatatggttttgtatccgatggctgctgatggacgctggggatcagtggacctggattcgatgccgatttgggtgagggtttatgacgttccacccagatactttactaagaagaatgctactgctattgctaacagaataggtggagttatcagcatagacaggatgtggcgtaatgg

SEQ ID NO: 259042 - DNA, 813 bp, Cannabis indica
caactgaattatagcactctacttcataaccttcttaaagtcaccatcctttactaagatcatatcatctaaaataaattttagtatgtaatttagtaaaaaacaatgaacctaaatcctactatatatatataatgaaactataatttgatccatttctatttatatcaattatagaagttgactgccatatttgaaaaagatcttccaaaaacaaccttggaaaatctaagctttttgattgacatttccaacaggataaaactattatttgactctattggaattaactactttttaaataaattataatatactactagtagtattaagatagatagatgtcaatgaaaaaataatgtatatctaatactttcctaatactatatatagctattttttattattatctttcaatacaataaaataaaactcaaacttattaagcttaattgtccatttatttcagcatcttataggataaaacaaaattttccaattcattattaatgtcccctctctcttattgatgacgaaatccccacatttataatttatacaataaaattatattattttatatatctatttatggtaaaaatcatatttatagacaatataaacaaattaaaattaactaatataatcacaaatcaattcagcttaattattcttatttattatctataaagatgggttggaataccaccatcataaccaatactaaaccttctaattattttagccattcgatttactagaaattatttatattcgtatctatctgaacaacaaaaaataataaaatcaata

SEQ ID NO: 259043 - DNA, 556 bp, Cannabis indica
acctaattacatatatatggcatatcaaataccatgaaaagacctaaaaacaaaaaaataccatataaattagttaaacttaaatatgccatatttatcataagaacatttaaaatctcatagtaagtgtaatttcctctaataatagtaatatggtaacatatttatatgatccactaaaatatatgtgcatttatcattaatcagtgcaactatatgtgaatttactgatggtttatctttttttcttccaaaaattcagtaatttttaaattttctattttctgatttttgtgtcgttaattaactaaatcaacaagtatatttttttaggagcacgattttgtccggtgatgtactttcacggaatgtatcctgtgatgtacgacagctattagatgggggagttatttgatctgaggactgaggttgatctaggagtaattagggttaaaaaatggtaacgtatcctaagacctatttaatgtatcccgagacccatctaatgtaccacggaatacattccgtgaaagtacatcacgggacaaaatcgtat

SEQ ID NO: 259044 - DNA, 663 bp, Cannabis indica
ggtggtggagagctgacaccagggtaccccttaaagagcattatgagcttttagccttctaccaggaacatagatgatttttgctctgtagacatatgggaagaaccatataccaaatcacctagtttcgtccaaccgattggaccattctatttttagacccaaataaatggcgaataccaagtcccgtcccgttccggacaacattgaagatatttacaaaaatgtcactgcatacaaactaagcatcagcatgccaccagcatgcaccacaacatgcgccaccacttgaccaccacttggccaacttgtgggcatcacttagcttgtaacgtgccatcttggactgcacgtaacatcagtcgctgcctcaagtatcaaatggtggacgacaaatctgtggaaggctaatctcacgagcttcaaaaaaattgcacatgagattatctcagaatgtatgactttagatgaacagtttcaagtttctttattaattgataagttacccccttcctggaaggatttgaaaagcactgtcatgaataagaccaaggaattttccttagaaagcttgatcacccaccttcgtatagaagagaaaacgagaaaataagaccaaaaagatgaagtgcttgttgtttcaaacaacaacactaagaagtc

SEQ ID NO: 259045 - DNA, 2430 bp, Cannabis indica
ttggcatcatgtaatgaaaaagaggccacaaatattgcttacaaaaaccatggtaatatttcttctgaacatcagaaggaaggaaagtaggagcacaattaaactcctcaagaagtttctgagaaacaacttcttgttcgctaatatcgatttcaactttgagagatcctacaaaaacaacctttgtaccaggtgggaaaccatctgtaagttgtaatgagagtgaatcctcatcaagactaaagcaccactttcctgaattcacatctttctgagcatttataggcagaaaattagccacaactatatcttttcgcagcaatcaggagaggaggagactgtaatcctccattgccttctatctcgggcataattcctcgaacggtagtcatcagtctcggaagatttctaggagttggtggaaaattcaacatgtcccctgaggccaattccaacaaactaatgcaagatctcgaaaacattattgcaaatataatctcttcttatgagttctctccttggtaatgtgaatgcttcttgtaagtgctaagcaaaagtgtagtttcaaaaacctgtagaaagtgatgtgaaaggaaaatactcaatgctctattcctaaacataatcaaatcaatacaataaaaggtaataattgatcacataacatacagttgttactgctaatccttaaaacataatcaaagggttacaatactaagcatatctatagatagaaagaaataataaacaaaagtaatggacctgcaaaacatacctactttttgattaagcttggaggaaggtaagaaactttgctcctaatacttaaaaaaattctctttatcttttaagatggaagctccactgagaatattctagttttctcacagataaagaaccaaaggcaaaattgatagagacagttgatctgtaaggaattcagaaaaaacacaattttctcatgcatcattttacataatttagttccaaaacaaagaaaaaaaaaaactttataatcaccacaccttatctggcttgtaagtcatgaatacagatagccaataaggataaaccatattctcaaattaggccaaatatagtttatttgacttgtgtccataaattaaattaaataaaataagaaagtctttgtattcctttaaaactaaacaattacaaaaacaaaaatccacaagcctccatcttttgagcagattttaaattcttgatagaagaatcgattctatatcagcttaatccaaattctgtacaaaaatacaaaataatgactataaggaataaatttcaattaatgtgatggtactatattattcaaccaatcaaccttatctactataaattattgacattcacactcaaaagactattcaaagttttttatttatttttttaaaaaaatattaattaaacagatgaaaacaattacttgtcacgcaactgagtcatttttttttttaacttttccaaatttcgataagagatctttgtttttctattcatgatttagcttgtaccgatccatatttagtatgaaaaaaaaattcaataaactctctgtaatctttatgtgcaaacagaatgagtaaggcttaaggccaaaaagaaaatctgaaaactcagagagagagagagagaattaacctgaaatatgggaatctgggatcactgattcagctagacaaagcttctaggactacttatgtcagaacagcaagaaaagaatctctgtgcaaaatgattatataaaaaacaaaaaatcaaacaacaatagacaaagtacagaatagtgtttggcttctaagaaaacacaagaaaatgtttatagaataaagagaggaagcaggtagaccatcgcgaaagctaactcattcccaataacccagaaaattccaagtgcccattttctcatataactttcccggaaaagaaatggacagattacaacgagaaaaaaagaatagagagaaatttctgagaagggtgtcagagaaaacttacatagagagggagagagagagtcttatccaatccaataaagattaatgttagcatatatcatatgtaaggttttattttaaaatatattaaatacaagatattgaagagggtatgagttgtatgagaaacagagtatgtattgtataaatatatatgtatatatatgtgtgtgtgttaggttcgaaaccggtgagatttgtgaaagcttttattaatggtttcgaaacgtaccaatttaaatatcttacattacatacccaaacaaaaataacatatttatttctttagcaaaaaaataaatagtatattggtacagaaaggaaaagaaaatgaagaagaatttcatgaaggtttttgttaaacggtggaataagattttaacgtagaaagtcaagaaaaaaaaaaaaaaaa

SEQ ID NO: 259046 - DNA, 981 bp, Cannabis indica
gagtttacttttttattgacataaataaataatactataaggttatgagttgttttttttttttttcattttagatgggctttttatgtcatatttttggtgaaaaaagatgaaaatctcatatttgtaaaacaataataagtttcaccagaaaagtcactggaaaagttattaccgctggaaaagtcactggaaaagttattaccgctggaaaagtcaccggaaaagtcatcgaaaaagtcacagtcgccgaaaaagttaccgtcaccggaaaagtcactagaaaggttaccaaaagtagatgtctcagatataaataaaaatagaagcggtttcgtaacataatgaataaaaataaataacatataataactcaaaccgattataactgaaatataactacttcaataacataatgaataaaaacaaataacacaaaataactcaaaccaggtatattttaaatagaaccggttctataacaatgttacaataaataaaaacaaataacacgaaataactcaaaccgattataattaaaatagaaccggttatataacatagtgaatgagtatttttggagtagatatggtatgagtgtaattatttggtaggttagagcatgttaaatggatgtttttgtttgagttattttatttaactggtttttgtatgtaagtttttatcttagttactttacgaaaccagtttttttgtctcaaatctttaactagttgataaatattatcagtttctttatattataattgaattattatgtgttattatttgcgtttctttattttattatggaatcagttatttttatatttatgcctcaatattttttggaattaatccccattttttttttaaaaaaaactataactggctttatgaggtattttgttgtggaactagttttatttttcatttatgtttcagtgttttaggaactgattttctctctttttttttttt

SEQ ID NO: 259047 - DNA, 680 bp, Cannabis indica
catcacctttgttgaagaagatgctgctcatgtcaggttccctcataatgaccctctagtcataaccacacaaataaggaatatgatggtagcacgctgcatggtgaatgatagggcctcctccaacatcatcttcaagactgtgtacgaaaagatgggacttcatctgaaagacctgacaccctgtacacaacacatgtacgagttcttaggccgaggattacaagattcacaatataattgcgcgcctactctaccctcttcgtcactttacttcaattagtttctgaaacttttgtaatttaaaacctgttgttgctacgatttcatggcaaaaaaaaatatttgcctacgtatttgggtgagttcagagcagttattactaattgtgggtgatttgagatccatttcccataatctcattcaaaactagaggtcttgatttttacttgttgtatttgtaattagttttagtttttttcttactaaatctgaaaatcatagtgtatttctttttttgatgttgctattgttgttgttttttctctgatttgaaagttaatttcttactatttattgaatgaattagatctattgaactttgttgaccgaggttttcggcaaccaataaaatgttataagattagagaactgtaagaaattaagagaaggatttttac

SEQ ID NO: 259048 - DNA, 704 bp, Cannabis indica
tttcattttgaactctggactatattcaatacaccacagtactctttgtcacacatattttaaacatggaagtaatataatgaattagcaattatcagaataaattcttgatcttgatttatgttccagtttatatttactgttgtaatagaaattgataccaataaagttctttgacaatgtatcacactaccttatttgagtgggagaattttaaaattctttacccatcttcatttggttgacacttgtgataggaacttaagaacactactgagaaagtaaatctaaccattcatatggatagaaataacttatcagaattatgagaataagatagtagaattcttgcatagtctattcgaatgacttgggcaaagattcctaatcctcataaaattttatggtatcttaatttgattacttaatctctagcaagtattttatacttcatttaaaatactagattgctatgttgatgacttagtctagaagtttcagaccaagataatatgccacaattagatatccctcaaaacaatagtaagaggctaaatgtacttttatgtataatttaaccagacatctaatattgagtgggagccatctgagatgtaatcaaagaagggacattaaggcacagtcaagaaagatttatgaaagtgacctatgttggttactctgggggtggaggagttattcta

SEQ ID NO: 259049 - DNA, 795 bp, Cannabis indica
actcagtaagaaaagcatataacattaatcatattactaactcgtatttaggtacccatacacctatctacaaggcttaacaaatgatcaagaacgttcttaataaaagtacgacctctataccatatgcactaagtactcgtcccgtactagtgttggtagggctgaaccgtacctcaagtactattgagtgttgtaccacatgcactacgtaatcgtcccatactagtgttggtaacatcggatcgtatcttttgaacatcatatactgtaccaatgcactccgcaccgctatcgtactagtgctggtagtatacgaatcacatacacaacatgcaatttacatacatacacatattcatatacatattttatatgttggaaattattttaccaggatcttagatctactcacaagtatgttgtttaacaccctaaatatgaactttctaaaacgataaaataaacacatataaagttaagaaaaccttacattgatgcagcggaattaatgtctccttccactcagatctctaacccttgtatcctttctgtcgcagagtataatcaagatctgagcccgaatgtccttcttctttgagtttgatccttcacagtcttccaatctatgattgagttactgcttgctgtgtgtgggcacttactctttcactagggttcgaaatttatgaagagaaaagagagagagggatttcggcctatagaagagaatagggaaggctcagtttttctgaagagagaaatttctgtcagaaaagcttatgaaacttatgt

SEQ ID NO: 259050 - DNA, 600 bp, Cannabis indica
ttactgaaatgagatctcaatcatttatctctatcaagccaagctcaaaggaaatcatcatttcacttctaaatgcttatagaagctatagattccatatctatgattaacactcccacttaattgaactaccatgttcccaagatgtaagtattcgccaaaaccaaaagttagcttctacaaacaactctaagaacaaaaataatacaactaagctaaacctaaccatatcaggattaagatccatagacctaagatcaaccattgatattgacttagaaagatatagcagtaagtttatgatatcttatctaaaatcaatatcggtcccttccaatgtatactccatatatccgatactggtaaactttactaatacccttgaaaggacataacacttatccaatgtgtaagtatatcttatcgttgattatcatgccggtttaaatccagtgaaatgacaaattctgggaattaaacttttgaacatataatcatgattatattacactgtactgatgacactataatcatgaacaaataaatacatatttatatatgttctagactttatagaatttatacattaaacataatcat

SEQ ID NO: 259051 - DNA, 522 bp, Cannabis indica
gaacataaccatgtcaggattaatttttattcaagatcaaacagtgatattaacttagaatgatacaatggtaagattataatatcttcaccaagatcaatatcagtccagtccaatgtatactccataagtctgatactagcatactttgtcaatgtccaggaaagaacataatacttatccacggtgtaagtaagctttatcgctgactatcacatcagtgtaagtaagctttatcgctgacttctaatcttctattgataacaaatcaaattatattgaattgggttttatatagggcataaaatctaaacaagaacaacacaaagattgtttttctgttttttgttagagcatgacaaggtggaggtaagaacattcgtcgaccaacaacttgtgggtgtaaatattcgctcgaatccctaactctttcaaatctaggcgggattttattctatctttgctttccccaggaatattgaataaggtataaagcaagtcgtctaacatatttttctcaat

SEQ ID NO: 259052 - DNA, 714 bp, Cannabis indica
attttacaattgtttgtcttactgccattatcttgcattgcgtctttttgccactttttttttgtcgtttcctactttagatttggtttttttttttttgtctaatattatatatattcttttgaagaattttattttgcagaattttattgaagatttatttaaaatttcagttggtaaatattatttattcaataaaatatgaatgataagaattgctagaataattataaaatgtgaaattactatacatattgtataagtattaattaaaacaacgtgggacccaccttgtacaacagaaaggggataaaattagtttcctaatatctatatagtaatattaacactacactagcttatgtattgtactattatcaaaataatttaacatcggagattattggtataatagtgtttcacactgctcctatatagatataaatatatatatatcctctatcttctcatttccaataataatagtatccactcatttccaataatagtagactaacttttttcatatgattttctagagtgagagacaaagccgcataataaaatatcaatttatatatatatatatatatatatatagtgctgcataagttcacatagattcttttctatgtctatatattggatacgagcattgttattaagcacgagtgatgctcagtacctttataatatgtcgcgttgcgattagtt

SEQ ID NO: 259053 - DNA, 553 bp, Cannabis indica
atctaatatatttttttggcattataggaattgaataaggtgcaaagtgaacgttcctcgaaaatccaatccaaacatcgaagtggtcagagtggaatggtgaacgtacgagaagctggtaagtaatgcttgaattctaataatgtgctttaaaatgtaagttgtactcatttaattgttataaaataatgtggaaaaaggatctcaacgttcaagatcccccgcgccaccatgttttgatcaaatctcggaccaagagaataaaactttttactgattacgacaaggaaattgccgagaagatagtaagtatatattaatccttaattgagttctactaatgagttattatatagaatccacatactaattggtttaatatatgcgtgtatttggttcaattagaggagcagcttactcagggataaatttaagtccagggccaaaacgatatcctaacgcaggtgctcagaaaaccagagcatcctggacgagtcagggctattgggtatgctagtacttgaaatgttgtttgtttagttgtacaaaaaaa

SEQ ID NO: 259054 - DNA, 820 bp, Cannabis indica
caagacccgtaaaaaaccctatgttcatattttatttttctatagcttttactttttctgagttgaattatcatcgtgaggctcaaatttggttaacgaaaatgtgcgttaacagtttggtgatttcattgatagcctcagtgaaaaagctcagaaaaagccatcccttcttttaaagaaaaaccttctcctttatggctgaaaatccagagaatattaacaccccacatgagaaaactaaccatcgttctggaaaagagcccatgggctctagaagatctaccaatccgcagtccagaaggacaacctgttccaagagggcccaacctgaggatggccccagtgctcagaccacacttcccccgagaactcagcccgacgttggtcttagtatgtgaacaatgcgctcgaggagaactcagcgtaggaatcgttcgaatcctgggacgagggatgaagagctcaattatggaggtgcccaatctgtgggagaaagaacttatgaaacagaaagtcgccgcctgagacgccgtctagaagaggcataggtcgaaacactaagttagaacgtgaggcagcctcgtccagggcggttgttaggttatatttaccctgtgtatcgggtctaatagttaagcattttctcggttattggtgtcttttggagcggttttacgcttgattttccttgtttcaagttcccggggcattagagttcaaattcagtcaactgacgaaaagacgggacaaactggtgaaaaatcggccaaagctgcgcaatgggagttagtagtcatgaccagtgtggagcctagtcgcg

SEQ ID NO: 259055 - DNA, 1560 bp, Cannabis indica
ttctctctgttctcttctacttttctcttgttcacagctcattcgagctgttatggtatcagagcaggttgttgtgttcctgctattcttcatcttgtttgttctttgatctgtgttctcttgtgctgtgtgaatatggttcgaggaggtggagctcaaggtcgtggcaatggagtccatactcgaacgaatcgagaagttgaaaacaattctttgaactcgaacactttctcagttcttggagaaaattcgagatcgacaaatgctaatgatttgtcgaatccttactttctttcaaatggcgataatccaggtgccgtgcttgtccctaaaattctcaaaggcagtgagaattacagcacctggagaagatctatgctgattgctttggttgctaggaacaaagtcaaattcgtcaatggaagattaccacagcctgatgaagatgacgatgactacgatagctggtgtcgatgtaatagcaccgtgatttcatggattttgcacgctatttctgatgaaattgcagacagtattgtctatcacgataatgcagcagaaatctgggctgagctgcatgaacgattcaatgaaagaaacgcacctcggatctttgaagcaaagaagatgatgcaaagtcttgttcaaggatctaatactgtcacaacatactacactcgactgaaatctctttgggatcagataagagaacttcgcccaccacctgtttgttcctgtggcgcagtgaaagtgatacaagagtatcaagaagaggacagattgcttgagtttttggttggattaaatgattcctacagccttgttaggtctcagatcttgatgcgtgatcctcttccaagtgttaacaaggcttatgctgttgttatacaagaggaaagacagagaaatttgacaaataattacagcaatgctactgatcaggacaaaggtagcaatggacaggttactggttcaggaaataatggtcagtttgctggtgctgttcaaccattcagatctaagtacaattgtactcattgtggtatgaatggacattcaattgagagatgctacaaactgaatggatatcctcctggacataaataccatggaaaatttcctaatcgagatgctaagggaaatcctggaaaaccagcaggtgttaatttttctggtgctgatgaaggcaaggccgaggagcctacaatggaaagagatctcatctcaagcttgtcaagtgttcaatgccagaagctgatggctattcttgctcaaaaggccactgagaacaacactcaaaatgtctctgaagatcagcctgatgtgtctcatttttctagtatgaaaatttatactcctagctcttattggattattgatacaggtgcaacacatcatgtgtaacgcactgaataaataggcacgctacacaaaatacttatgaaaccctaatcccctaaacgggattactaatcaaaatagcgcagaatttaaacttttatattaaacaaaatgaaaataaacttgtaatatattaaacttttaaaatagttgggatcc

SEQ ID NO: 259056 - DNA, 849 bp, Cannabis indica
attcattgatagataaattagataaaatttcatatatagctcaaaaagcaaaatcataaaatttaggccaatcaaatttggtttgggaccattattacagtatgtaatcctcagaagtatccttgttttcttccactcttaatgaaagtactaaaatatttatcgaatttattaaaaatcaataatttaaacgtaatagccaaagaataataatttagaaatgaaagaaataaaaacactctggatttgtacatgattgggacattaattagtcttagtccacgagttaatattattaagtcaagctagaaaagccttaagaattacaagaagtatgagtactctctcttttgcttggggatgtgagtaaagaaatttgaactatttgcatgtagggtttgttgagtatttatagtacttagaggtcatattagtaactctatctctctaatagagagtttacaaataaaatattaaatttgggcttacttagtgaagcccgacccatggagcgccctgtgtatgctgatgtgggtgccacatcacaatattggttatcaaatctatgtcctatctttgtgggaattaatgaccgcattcattacttgattgtcaattattatcttttgttatttagaaagatacgatattctgtttgagattattggaaggtaatccatcatcttacgtgatttggtaataaataggaaaatatactaagcttctggatatttgctagagatttcttccaggtacatgattttatctcttccaaacgctcatattggatgggatatcgcctggacaagttatttattcttcatccgaaagaactaataatttatggat

SEQ ID NO: 259057 - DNA, 1095 bp, Cannabis indica
caaggtgacaagtaaactacattaaagattatcctatcatttaaacattgtcgtactaataaatcataggaatacatttaatcacataatcttgatttactttccactgtgttggtgaacacaaataaataagaataatcaaaggtaataaggattttggatgaatttataaaatcaaaataaacatataaatgatcacatgaaccaccaaatgaaacataactaaataagtaatgaaaataaatctgtttctttattgataattgaatagaaaatataacattgaaatagagttttatttagggcacaaagcccaacatgatgttcctgttcagaaggtcacggctcctcgttgtattgggatggtttctacaaaaccagcttgtaatggcttggatggtgaaatcaatatggtcattggtgatggtattgataacaatccattaacctataaataggcaatgacaagtccagaacggaaataagggtcagtcagcatggatccaaaaattgattttatgaaaagaaataaagtctgggaatatgtagatgcacctgatgattatcatccaattggatgtaaatggttctacaagaagaaaagaggtgctggtggagaaatcgaaacttttaaagctagacttgtcgcaaatggttatacccaaagagaaggtgtatactatgaggatacttttagtccagtcaccatgctaaaatccattagaatacttctctccatagttgccgctttcgattatgaaatttggcaaatggatgttgttgactccgcttttagccagcgacaatgagtctattttataagcgataaacgatatgtagtaacagatatgtaataaagcaataataagacacgggaatttttagaggttcagccccgagcagttcggtaatagcctaatcctcgttatttgtattgacttaagatcaaggaagaagattccttttcttatagctcttacaacaatatctctgaatatataattcttagataataatatagtcttagcttagctgcgtttcgactcccctttgcccagtgaatatgcatcactatttatagggctgggaaacttg

SEQ ID NO: 259058 - DNA, 798 bp, Cannabis indica
gtgcaagattggacaccttgtagtcgtcttctcagtccctgctctcggacaaggtctttatttggaggtaggttatgataggtgtcatccatgttggagtgtcatccagcatgtcgacctcctctgggacaacaatgctgggttcttctatgagctaaatgggcaccaggtttgctttgtcagttatggtactactcgctaggcaggcaagtgcatctactgtggcattatgttctttttgaaaccgaacttagttccttaaagaactagataggtaccaagttttccttggtagtcaaggcgtagctagctagttaaacaagtgtgtcgactgttgtgccatctttgggggcttgccttctagtatagcctttgagctgtcttaacagctttggtaggccatcatcttcttgtattgagttgtatattcacataggacataacctgtgactagctgagagtagtggtgcatgtctaggtagttagcctgtgctttgtgtgctagcctagggctagcgttcggggcttcatgttcagcctcatcgttagaagctttgaaactgaccttgtagcctcgtgcttcagttgcccccagatgccttgggggccatgcttgcatcgggcaagcggtcaatgcacctcttggattcttgctctcacttcttctctggctcctgattttctcctgaactctaagagatatggggagatatgcttctatgataagccatgaagctggtgagagcttgacctttggtggccatgctgttgggtttggtgccctaaataaaactcatt

SEQ ID NO: 259059 - DNA, 891 bp, Cannabis indica
tgctgaactggtattcccagtctcttgcacaccaggcgcgatttcatccacatgagtcgttaaaccatgacctgcgttcgacggctgttcaggattaataggtggcagaacccttgtgtttcctgggttctgtaatgcaggatccaccgcctatggatttgccgaatcaaccaggcccttacgagtttgtaccaccatcgtacttgtggttagatttagaatgaagagcgattcttgattttgctctcaatgaaagcaccaaaatattgacctcgcttttagccaatgacactgagtctaatttagtaagcgacaagtagtttgtaacgattaaaatataataaagcaatataaagacgtaggaattttattgaggttcagccccgagcagttcggtaatagcctaatcctcgttatttgtattaaatcaagaacaaggagaaagattcctttccttatagctcttacaacaatatttctgaatatgaattcttagataatatctctccagtaaaatctttcgaccctttgcccagtgaatatgcatcactatttatagggctatgagcttggagaggaagtattttccttgtcgatacaatggatataagcagaaagattgcatagtaaatacaaaatacactgatcgtgggatttggatagcttgccatatctctgcaatctgatccccaagttatagggatatctttgatgactaacaatgcgaaagctgaattcgctaagtgttggtcgcgctgggcggattgttgattgctgattgctttgcctcgagcatggatatgaggtatcctgttcagattatatcctgcaagtagatactcggagtcgactccatgtgtcaccatcgtgtgatgccacgtcagagtgtaa

SEQ ID NO: 259060 - DNA, 1138 bp, Cannabis indica
tacagtgatgtcaacacagtagaaggtaaatgtaattatatgcttcaaaagataatgtcccttgattcatcagtgcacttgatttacaatgatgttatagtcagcgataaagcttacacctagggttagtgttatgttctttcccgaacattagaaaagtatgctagtatcgattgtatggagtatacattggactgggaccgatattgatcttggtaaagatattataatcttaccgttgtatctttctatgtcaatatcattggttgatctaagatcaaaagatcttaatcctgacatggttaggttcaatctcaatagtgttatttgtgttctttgagttgttagttaaagcctacaatttggtttgggtcgaacgtacaatttgggaacatgataatacaattgagtggaatcgctaaacatagatatggaatctatagcttctatctggacatagaagtgaaatgatgatttccttcaagcttggcttaatagagataaatggaagagctcttatttcagtgattatattattttagtgaaatatcatttgtaggaagctaattgttttaaggataaaatacattgaggggtaaaacggtaaatttgtacctactcgatgtaaatcatctatagaagatctttgattattgggattagaacgatggttgaattttcatagcgtatctatatcgtggaacatatagagtgttctatataattgagagtgcaattccaaatcagtagtggtgctaggaggaattaataagttagggaatttacttggtaaattctagatttgcttatttgaagctcggttatataggcccatggtccccatacaagttgagacaatactgcttgtaggactcagttaattgattttaattaatgaattataattctaaatttagactatgtgttatttataaattttcactaaaatatggcttgattgtggagaaataaaattttagagtttatttgttaattaagagactttattaagtctaataaataaataatataaatgacaagtgatggacccacataaggggctggccacttaaccctatttttggtccattgttatcatttttttattccaaataaatcaatcctaaccctatgtgaa

SEQ ID NO: 259061 - DNA, 1664 bp, Cannabis indica
ctatttaagtttatatgtaagttttttaaaaaatttgtataatttataatatcaaaaataaaatttaaatatttatttccaataaaaaaaaaagcaatcgtacactataaaatatttaaattttagttttaatattataaattatttaattttttaaaaaatttacaaataattttaactattttttttaaataccaaaattttgaaagtactaaacataagatacccaaaaatagagaaataataaatattaaataaactctaataaaaaacaaagtagaataatatatatatatatatagtaattaatggatgaaattgggtgggtttcataatttttccacggtcaaacttatatgtgttttataataattaaagaagatttttataaagcaaaagaaagaagaagaagtgaagtgggttattttcttttgtatgaattgagtgaaaaagaatcattcctcacgttcactaccaattttaatattattacttcatcatcaactctcacatgaccttctcttttaataatgttatcttattaattaattctactatttctcattttaattttattttattttattttatttgtcatgattatattgtttttttgattaatattatatttggtacattctgtgtgtgagtttataaaatttcaaatcatttgaaacatgtgtctctttatgtagacatgtgggtcctatatatatatatatttatatatatatatatttctatatatatgagattgatgtaattctcttagccatatgaatatgattgattaaacttttgttttcatgggaccctacctaccttcaatattaattattttgaatcaaaattattgttctctttgttgagtttctctatttcttttaaaaaataaatatttagagttgaaaattaaaatttattagttactcaatgagcaaccaaagtatttttaaagtacatttagaaagttataatataatttaatttgtatataatgagacatgtttatcaaattatgtaattacattatatctgtataattacattgtccatttttcataatcctgtgaaaatttacactgtataattatttttattttaaatactaactataaaaatattttttttttctctaattactaatcttatatatataatttgattaagtaagaaacaatttatatagctagatcagatatattgtggtccacagtatagaagttgctccactgcgaataggacaaaaaaaatagtgataaataatgaagaatattatagagtgattaagaagtaaataaataaataataataataataagtgagatactttgtgttaaaaataaaataatgaatgagcttgagaagaccacacgtgccatggcattgttcacgtgcgtcacaacttctgccgtgaaatgagattcaccacacaaattaattatatacactacaagtctacaatattctttataacttaatattattgtgcttaggaatctcaatcaggccgggccggtattactttgacccgacccgaaataatatgtatcgggctgagctgggccgggccgtgagcctgataaaagccctaatcattcgggtcaaagtcgtcctgttgggctcccgagggccaaacctggcccgcaaaaataatccaaatt

SEQ ID NO: 259062 - DNA, 1298 bp, Cannabis indica
ggttggagtcttggtcatggtccaggtcctgtcatgggctgcgtcctatgaatgtgtttgggtccaggttcggggttgtgtccttgtagtcaggtcttcggctttgggtacaaggttgtgtcccgtgtctcgagtctggggtcgagttttgggtctcggtcccgcttctagggcccagtttcgggtctaagtcccccatctaggtccagatccgtagtccaagtttggttccaggttcgagtttggggcctaggtcccccatgtaggtctggatcctaggtcacagtctatgtccaagtttaagttcgggtttggatctcgagtttgggtccgagtcgaggtcctagtatgggttcaggttttagtctgggtccgggtcctggtttgagtcttagtcccttttcaatatcgagtctggatcctgatctgggtcctaatcaaagtctaggtcccagaccaggttctggtctgggtttaggtccttcgtctaggtctaggttcgggtctgtatctgggtctgggtttggggcctgggatccaatctcggtatgggtatgggtctatacccctgtccaggttagggtgtaggatttagggttttgggtttagtttttagggatttagggtttaaggtttaggggtacatgtaaaaattttaggatttatggtttacggtttagggtttagggtttaagggaccgcttcaagtctcagcttcaatttcgggtcacatgatatgatttcaggcttgggagtgggtctgggtgcgagtccttatctgggtctaggtccgtgtttgggttcaggtccgagtcttggtcacaaatccaaaaacccacctcatgtttagtctagttttagttctggtacggatttgggttttggtccgggtttgggtcctggtccaggttcaattccctgatttagacacctcttaagggtcaggtccaagcctcgtttcttgtgtcctgggtcacgggccaaaattaagatcctagtccatttctagctcatgtcttgggtcatggttcgagtttcaggtggaggtttgcgtctaggtttgggtcttgggtcgtgagtcatgggtccaggtccccgattcaagtcagggtctaaggtcccagtctgggttagggtcccagtctgagtacaggtcccggttcgtgttcggtactagtccttgtcttgggtcttggcttggtctaggtttgggtcacaattcggttgtcaggtctaaggtctaagtatcgggtcctgggtcccggatcccagtcccggtctcggtcccggtcccggtc

SEQ ID NO: 259063 - DNA, 864 bp, Cannabis indica
tatgtgatcataaaaattaagttggagtaatgtttattatatatatgttggatttgtgttttatcagaactgattccactaatttttaaaatttattttctcttttggtttattaaacaaacttttgttatattatttactagtcaaatgtaagactaatttaattttcttttattatgtatatttaaatttcaaatatattagtaaccaatatatatatatcatcataaataataaaaaataaagtttcactgtatattctttattcacacggtatcagtagaataatttcacttgtttcttcatgtcggataataatcaaacctccattctgatagttctgcaacagtctttgttacacttcttttaacaagggataattatggatcatagagtcgcacagtcaaaatggcacttcttgcaaaaagtaaactaggttttgtggtggattcttttctggtgatttttccggtaacttttccgacgatactaattttttcagtaatttttccgatattggtgacttttctgacgaaatttattattgttttaaaaaatataggatttccatctttttttacaaaaatatagtataaaaaatctcatataaaatgttaaaaaaaaaaaaaaaaatcaataacctcatgatattatttatttataccataaatattgtataatttctacaaatatatattacaataattagctgaagtggaagaaaagaaaattgtgaattgtgttgagccaatctggtgggcctggaatcttaggtggacattaggcatgtgcttcatgttggtgctccataacaaaatcagagagtgactgcccataacgaaaattttgataaataaggctgat

SEQ ID NO: 259064 - DNA, 674 bp, Cannabis indica
tatccatggtacggatttttacccaagtccaattatcgtcaacagcggggcttggaaaaagtgtcggatttacttttaccagacggaaattgggacacactaaagcttcgcaacctttttgaccaggaaactgtgagtaacatcttaagaggcggtaatccgagtggccagggaagggatagatgggtctggacaaaagaatcaaatggtctgttttcaaccaagtctgcctatcttattcaagcccttgctcgggctcctttgtgcaacattgctccggcactatggaacaaactttggaactcaaagattttggagcgacataaggttcattggtggagtatcctttccaatgctcttcccttaagagcccctcttgctaagagaatgggatttgaggaggtctcctgccctatttgtggggaggctgaggagaccacagagcacttgttcctgtattgcgactttgcctttcacttgtggcgatcctctccttggggggttatgcctgttccggattcgggagcccggatgtgggactgggttacctttctatggaaccttaaatccagaggagttgatactgataagttgttcctctatgcctcgattgtggtagatacgatttggagggcacgcaacgacaaggtgcataataaatcaatgggtaacat

SEQ ID NO: 259065 - DNA, 782 bp, Cannabis indica
agctatcgcagggattgaagctcaaagatcaatggctagaggtattttgatctttcgttgcatatacatttcgatatgtttatagtatttttcgcattacatatcgtttatatatgttgtattttcatattatatattatagtctaacagtttcatccatttctcaagaccatctcttggttcaaacgaagtcatagaaacttcattagaatcccgggcaatacaccttttttaaagcgtgacagctactaccattttgatttgttgaactgaagcatgtttttgcttccaaactagggcattttgacttctctaaattgactaacatagcatggaaacttcagcgcatttcttcttgacatatctttgaaaaagatcatgtaaccaagccctaaaactagaattatagtgtccacctgacaacaccacactagaattactccaaaacctcttacacaaaagcacactcaactaacacataattagtagtttcaggtgctataagacaccgtggacaataaatgccaactttcaagttttttaactatagctcaactaacacatgactataaaaacccttttagaacaaatggtgctgaagtatttcttaaaggctttttttaaaataaaattttcgtaaaagtttttttaaagctttttttggatgaaattcatcttcattaatcttgagctaatcactcaaaaggatattgtttacaccaaaagtagccctgatgatgtggacatctatgtttgacacgtggtaagaaagatgacatctc

SEQ ID NO: 259066 - DNA, 934 bp, Cannabis indica
aaaaatgtagactgtgcatttgtagatccgactggaatagaagatctaaaagtcaaagacatgtttgaaaataaagaacagttaaacacaactttaggtttgatctcaattaagaaaaaatttcagtatgtgactgttaaatctagccaaagtagattggttgtaaaatgcatggtctcctcttgtgaatggtacatgagagcttctaagtacggtaatggagatttttggatggtggggaaaaatatgtcaaggaccattcttgtccaattgatattgtgttaaacgatcatcagcaagctagtagcagactaattagttcttgtgtaattaacttattaagagatgatgtttcaacacgtcctaagaaaattatggctcgtatgttgagagaatatggagttcatattagctattataaagcatgaatggccaaggagaaagctttggtaaaattacaaggatcatttgaggagtcatattctttaataccatcatatctccatgctctaaagtcttcaaatcctggtatgtttttttttagccttttagttttttcctccatttatctatctatatatatttctctactagtcctgctgtatatatttcataaagtaacaaatatttttattttatgcttactaattattttccatttgtagtattttaatttttctttttagtatatactttttctttcttacagaatgtgttccctacgcacaaagcatacaaaagttcattttaatgtacaaattgttttcatgatatgttatatcatattattttgcaggctcaatagttgattatcaaattgataatgaagaaaatttcatgtatttgttcatggcatttggtatcatcaattgaagaatggaaatattgtagactagttatatttgttgatgggacattttaactacaaattatg

SEQ ID NO: 259067 - DNA, 1258 bp, Cannabis indica
tgaatcttagaacaaaacaaatatataaattaattatgcctaaatgaatatgattactttgacaatgcctaaatctactatttctaggattgatgttactcccacaaagaaacatgaatatggtaataataaaaaaaggaaaacgagagtgaccttgaggaatataattgtatagactgctctcgactggtcttctctctcgattggtattttcttccctcggcaacgaagggctgccggagttccggcttggtgatcgataacccccgctatggacgaactactttcaaagaccaatcagcttcatgtcttggatgaagatgattgggaggtggatcagagtctttcctcaactattgccaagaacacattaagaggacgactgtgttcaaatatagatcatagcaggggttttttgaagaaggttctggggagaatttggaggctcaaagagacggattggaatgtcaagattcaggacaaatacgaatcaggtgtgttcttaacattctattttgtctctgaacaagatcagtcaagaattttatcaaagatgccatggtatttatctaatggggttttgattttggggaaaatgattaatactaatgaatcatggaggaatgatcttactacctttcctatttggggaagaattctaggagtcccaattgattatctaaccgaaaaaaataccttgagattggcttcaatggcagggacagtcatcacagttcagaacacagatgtagcgaaaatagtgatcaatggattttacaggttccatatttggatgagtatcaataaaccagtgttacctgggttcttactaccgtgtgggggtaccaagaaatggatagcctgcaagtatgaggagctcccgttcatgtgcttccgatgtggaaaaatcggacatagccaaaaagattgttcttcggagttcaaagaaattacaagggagggaggaagacaagctaaggcttatggaacatggctgaaagtggacaatgcaatcagggatggatttcatgaggaaggacataatacaataaaggaattggaggcaacggaaacacaaggaaacttgcaaccgaaacagggactgaaaacttcaaattcctttgctctacttgtcgaaaagaatgggcaggagatggaggatcggaatgtggtaaaaggaggaatgcatcaagaacaaattccaatggtggcaatggaaagggaagcaactgaaaaagggatccgtgaggaaactgag

SEQ ID NO: 259068 - DNA, 532 bp, Cannabis indica
tgttaagacaatatttgttgagagaaaaattgttaggataaaagacaccatccttgtcttaattcagacaaggtaggtgcctatcttcctatgggttttcactttttggattatttatctaattaattaattaaaccagataaatatttgaatttaaaaagtggttaaagatatttcaaagtagttgaaatattctcttaagtagttgagagattccatcataaatatcactaaccgaatttggttacacatatttatttatttaaataattaaatatgatttaattaatagagatttaactactataaatagaagcctaatttggaaatcagaagatgctttttcaacatataatttttgaaattatcggagaaaagaaaattattttctctctcaaatagttcttgctcatgtattgagaattaaataagaacaaattatacactttatcctaatagcccacactatttcttgtgtgtggtgggtcgatttggaagacactggtatgagttaaatttgcatcatcctcat

SEQ ID NO: 259069 - DNA, 728 bp, Cannabis indica
atatttaaataaatatatttaaccaaaggagaaaatatttcaaccatttagagaaaatatctcaactactgaaagagggaatatctcaattactttgagaaaatattttaaccactttgagagaatatctcaatgaaatatcttaattacttttaaaaatatctcaaccactaagagggaatatcttaaccactttgagagaatatctggtaggatattttttgaatattattttggttatttttagagttaattttcttatttattatcattttttaatagaattatatttggtttctttgatttcagatttaaacacttgaatgtataaattggtcaaattttagaaaaatttaatctgtaaaatagagaaaattgcacaaaaaaataaaactaaaacttcaagcctgaattcgactatgtttatattagattttggaaaaagtcaaaacataaaagttctagatctctctttatctttctggaacattttaaatcatataattatgtgcaatatcgagagagttatggccaaaattcgattagtcgatatagcagaaaactcactttccatataaaggggggtcatgcctaggcattgaaatctcatgtcgtggctcgctctttctaaccctaagcagaataagtttttttcagcgttttttatcatttttttggctataaaagaagtggacttcaatagttttcaataagcaatcaaggaggac

SEQ ID NO: 259070 - DNA, 1185 bp, Cannabis indica
cccctccccaacaatcatctcctccccctgaccattcgacctgatcgatcgaattacacaatttggcgatctctggttcttgctgcggttagagcctatgatcttgatggctatgttcttggtcatctccctcaaccaccagaatttcttgcaggtaacaatctcaatcttgcttttcaaaattggatgcgttttgaccatttcttaatgcattggctcatgaattctgtcactgaacatatgcttggtcatgtaatcaactgcaacacatcccatgagatctggaccaccttcgctcagctttttgcaaccagatctcgcgccagattactgcaattacgaaatctgctacaaacaaccaagaaaggctctctctccattaaagaattcattctgaaaatgaagcagttgcagatcaacttgcagcagcaggacaaccaatttctgatgatgatctagtgttatacattcttggtggattaggatccgaatatgaagctgtagttgtcaacttaacttcaagaatcgaacctctgtctcttcaggaagtgcaattcatgcttcaaagtcaagaaatgcgaatttagcagcataccacagattctttgcataatgttcaagcaaatctggccagtaccagaggttcatatcccaatcgtggcttcagaggtgcaaatcgaggaggtcggttcaacaccagtaacataggtggccgtggcaccagacctgtttgccaactctgtgggcgtgctggtcatattgcaatcaagtgttaccaccgttttgacattacatacacaggtgccaaaaatagttcctcctcacaccctcccaacactgagaacccccaagcccttgtctttgaatccaataacaacaatgacaactcaacaacttggtacttggtttcgggtgccacacatcacatgacaaatgatgctgatcatctcaccaatgctacagattacaaaggcaagtctaaagtgattgtaggtaatggctcctctatccctatccatcaaattggttctagttcagtgtgtacaaaatttcctaatcatcctttagttttgcaagatattcttcatgtgcctagtgtcaccaaaaatctacttagcattttccaattcaccaaacataatcatgtcattcttgaatttgatgaattgtcttgtctcataaagg

SEQ ID NO: 259071 - DNA, 702 bp, Cannabis indica
atgaggagaggcagaagttgcaataggaaggtttatttttagatgaatttattgatgatcgtggtactactaagcaaatattcaagagtggttcatcttcaaagaaatcagattcagaggacatagaaatgttaaaatctaagttggaattggtcatttccaatcaagaatccttggccgaagattttatatctttgcggtgttttgttgatcttaatttcaagtctgtcatgattgtgatttaggatactcaagaaaaagttaatgtcatttatgatcgaccttctattgaggtattcattttcacagttttgtttcatattttttctactgttattgttagttgttttcctgatttatttcagttgcaatactgtttttgaaccaggttaaatcatctgatgaatttgtcacccaaaattttgatgatgatgatgttgatgatgatgatgaggatgatgacacaggattacttgatccaaagaatattgatactgattccgatgatggcgatgagttgggtaaagatggtggtgatgcttctggagtcgataaggttgttggtaatgttcctgttgttgatgtgattcaaattgaggttgttgcaggcagtgaagaaaggatcaaggatgttgaaaatgttaagaccaaagagtctggtgtaaagggagatgattttttcaatggtttaagccagcttga

SEQ ID NO: 259072 - DNA, 690 bp, Cannabis indica
tgcgaggtgatcagatgctggcttgcggttgctatcgcacagagctacaacagaggaaagccggtcatcagctgatagcagtcttgatagaagaaggatgaactactgaaaccaggataagttcacctggagccatggggatatggaatggattgacccttcatatcaaaacccattttatcaaaaccagatgcttctggaaaattgaaaaatgatcaattgaactgggaagttccttacgtgattgaaatgatagttaagattggcggttaaggagattgctgataaagaattactggaatatggaattacgatcttacttccagtaaattaatgattgtaactcacatcactgatgtaatattttgaacttcagttgtgaataaagttaatcatttctttaagtaattataaagcgttaccctttaaaatttcttaaggggaatatgtgtatgattaactacaatttatctagaaatacatgatataatgcaaatcaccactttaaaattttttgaaaatttttgaagtttaatgatcaaacctttttgacgagaaacggatcaaactgttataactttctgattaaaaacctaatctgtacgagaaaggaaaatagaaaacgtacataatagatatataactcgtaaataagcgtgtgaagctgaatactaacactgacatggaaat

SEQ ID NO: 259073 - DNA, 497 bp, Cannabis indica
gtggaaaaagcactgcgagctgagggcgcagttggatgtatgttggagtcagtttggactccagtgagtggcggggctcctacccctcctgcatcaagctttaaaaggggaggtagtggtttagccagggacaagaagaggaaagcatccattgcaaccggtggctcggggcagaacaagaggtttcgggggaactagaattgaggcggtcgttaaggtagtgctgagacccgcttttcgtacccagagtgccccagttgtaaaaggcaccatctgggtgagtgcagaggtcaggggtgctttcagtgttgcatgcccagacactagaagagggattttccccagctcacaaaagaagcaccaagggctccggcgagacctactcaagctagggtgttcgccattacgtaggctgatgcagaagccaggccttcagtggtgacaggtcagctcttagttaacaactcattttactcagtattgtttgattctggggc

SEQ ID NO: 259074 - DNA, 653 bp, Cannabis indica
tgacatgtctaagtaaaaagttcaagcattttgcactaagacggacctgaaaattgaaaccctagcctgggatgtccacttgagtgttaggtgaaaccctaagcgtctgtgttgacttttgggatgccacatcgacatctttcagtgcccaagctttaagtgtggcgtcttcttaacttggtggttcagaatattgaaggatcattacttggaaacaatttggcgagatccaaatacccatttttgagctctcagagtcaacctgggcgtacaactagtgccccttcctagagttaactgctacaacctggggctcttaactcgatgaatgctttccttcttgtcacgtatcaaacattgatgtctactttatcagggttatttttttggtaaaatgagcaaagtacgacacaaaaatacccagtctaccttttgaaaatattgacacgatacgacatgactcatatttagggcatgacacgcataacccatattatgaaaaacacgaaaaagaatcgtgctagcacgacacacacaaatttacatcactatatgtaaatatgaatatgtgatcattaaactttaaacttgtttgaattgagaatataaagctacaggccctaaacataaaaactcttagaacattttttgta

SEQ ID NO: 259075 - DNA, 1399 bp, Cannabis indica
attaagtctttgactttaaatttcgattccaaattgaaattttaaatttcagttccaagaatgcattaaacattacattacaactttcacaagtttaatatctattttccgtcaatggatccaaaatgtatgtttatgtatggaatatgagatctgtattttgtgaccaaaatccacttggactattctaagaactctttgctgtaactagacctaagtcatcaaaagaccacaaccacagtttaagtatctattgcatttacatcttgttcatagtggttttaacaagattattctctgcaaagagaaaatatgcctttttccacttgaaagtaggatcatctgtattccacatatggatgcacatttatgggtgaatatgagttatctttaaatttttagacaattctagattttaccttatgcaaagaattttgaaatatttcagaaattttatgaatttctagcaatggtgcaaaaccattaacgtaagtggttacggatcttgcgaagtgatagggtggagaaatatttggtggatatccagttcaaagatcattaagttaaacttcgaattgtatccaaacttaccttcccaaaaatttagattgcatattgatgaaaataaaaggtctatgattagttattagcagttgcttaagtccttctagggaaataccctagtgatcgaaaaatttcaaaatgatggaatggttatgtacttagtgtacaccattactagattcagggatgtcctgatcatgaacttaagaaaagctaaaactgttaacttaggtttgcatgtttgatagctattctaaagtgattaggggtggaccatcctatggtcattaagataagaaagtatttatttcaacaaatactacttttctaagaatttgactaaatctgaaaagaaagtagcaaagtagaggatcgaatcttaattctaaagtgttctatcatcttattgtatataagatggtcccattgcctctgttgtcttaatacaaccgatgaggacaataccactaatgttcctagaaagaaagtcaccgtagcttgtcgtagtgggagagtttcgaggaacacacccttttatgacttgggagacacttgtgataaaatccattgtcagtttaaaaaagtaatggatagtcataataaggaactaaaaagcaaagccaagagaactatggttaaaaaccattcatatggagtaaccaaaagattttctattacaaggacaagaaatgaaatttttaataataagtctattcaatggacttaacaaaacttcctgatcctagtattaaaggtttgagtttatctaaacctatagcttgtggtatgcctggtgatttaataactctagtgcaagcaacttattttagtaaga

SEQ ID NO: 259076 - DNA, 636 bp, Cannabis indica
ctgagaaccacaaaccatagaaattgtgcataaactaatacaatagcttcccccacccctaaataaaaaatacatgggttgcaataaaaaatcaaaatgggaacattcatgttaattacagataaaaacccaatgctcccatggatcattttaatcgtaccaaggattttacgtgaacatttgaacacaaatttcgcccatagttgtagtgccatgtgaatgaagcgaagaaaggttaaagatgagaaaatagttatggctgaaaggaaaatggaagttaaaagggaagagagagattaccttggttcggttcatgtaaaggtgttgttgaggcttcagcattctcgccattgatcgactgatgagatgaaagagcaaccaggaggttgaagaagaagaagaagaagcagactaatgcttaatgactgataacactatgttttagggcttcgtggctaaatatcacattttgtggggggcttcttcacgttacatgagttgaaaaaataaaaaaataaaaaagagtatattcaaaaagtttcttaactatttttttttcccccgaactttgacatgtactaaattataccccctgaactttttaaccgttaaaaattccccctgaactattaagat

SEQ ID NO: 259077 - DNA, 619 bp, Cannabis indica
aaggtttcaagttttttaaggtgcgttgttcagaaacagttttttaaggtgtgaaaaaaaaaaaaaataaaagcagaacagtacgtacagaaaacagcagtaagattattttatttatatattatatttatttatttaagggggtaaaaagagaaaaaagaaaaaggaaaatgagatgagatgaatagtgaataatggggtagggtttagaggtgggacccaaattgtatatggccagatagtcggtggaggtggcaccagatcaaccacgtgaatgtgaaaaacacgctacttccaaaagggctgaggaggagacttcaattgtccttttttgaatattcgcaattattgaaggtgaaccaccattgcttattacacttatacttacttactcactgtcactgtactatcatactacgtcgttttgtatcctctaagtctaccaccacaacaactaccgcgatctataaatctactactcctacttatctataattttcattacgtaatttcctttcttttttccaactgtacggcgtttatataattacattgcataaactcaagacctccaacacatacgcacccttctatggctacttgagcgctagcctcaagt

SEQ ID NO: 259078 - DNA, 958 bp, Cannabis indica
ttcaagagatttgtttatctcaacatcttcctcaaaattttcagcctcttcattagggccatcttgatcatttgctactttttttttaggatttttatctttcaaactgactggtctaccatgtttgaagcgtgctttaaaatcattagctaatttctcttctgcgacttcaatttgaactggagcattttcagcttgaatatgtgatcttgtaatttttttggtcagtgaatgcatctagtaattgatttgcaatattttgcaaataaattattctttgaacttcaagttcacattgatttgtacgaggatcaaattaagataataattgtccattccatattatttctttttccaactgtttctttttccctccccctaaagttgggaaaaatgtctcatcaaaataataatcagcaaaacgttctataaatatatctccagttgtggattggagatatttaatgatagatggagattcatacccaacatatattctcagcctcctttgaggacccatctttgtttgttgtggtggagcaatcagaacatatattgtacaactaaggattcttagataggaaatattggttcctgaccaaaagctaattgtaaggggagaattcgtgatgggatgttggcataatgcgtacatgtgccgcagcatgtaaaatagcatgtccctaagctaaaattgggagttttattctcataagtaatgagcttgcgattaactggagacgtttaataaacgattccgctagagcattttgtgtatgtacatgagaaacaagatgttctatatttatccatattgacatacaatatttattaagcctgtgatgtaaattcaccaacattatcaagacagattatcttgattgtatagtcttggaattatgctcgtaatcggattatttgagcaagcaatcttgaaattgctacattacgagtagat

SEQ ID NO: 259079 - DNA, 1356 bp, Cannabis indica
gggagccttctctacttttgttacttcggcattaaaacgtttaaaatagtcttgtagagactcaccgggttcttgcttaatattacccagagtggtatagggtggcctataggccatcggggcttgaaaatgtgtgaggaaaaggtcgacaaaggtttcccatgttgagatggatgcttcgggcaattggctaaaccaatcgtgggcattgtcctccagagttaccacaagaatgcgacacttcgcaagttggggtacctaatccacttccataatagtattaaatttttctaagtaatctatgggattagtggtacctttatattttagggattcgaataacccgaatcccttgggcaatcgagcttgtcgcacttccacggtgaaaggagaagtcccatgtaacttgtatatgggctttctctgctgctcgatcatctttaaagcctgtaggagcataccttgattgatactcccagttaagggagtattgccctgtgtcattgcaggcgttgttatcatcgcgacgatgtttgctgggatattgactccagtagtcgcacctggtgcggtaggcgggttggtatgattgtttacgccttgatcgcccacctggggatcacgaggctcttcgatgttccgaggcgtctaggagtgcgccctgaaaacagcgttaagatgatcgcagagatcaccccaatgcacctagtatcgccctcctcgcggtgtttccaccgagcatgatctggtgtatctgttgggcatccgaccataagaggatgaggaggcagattcattatcgttgtcttcgtctcgcggttggggtctgctgtgaggattacgtcgctcatgatcttcctctgtttgtgcctcctgattgaggtgcctcgcagactggtccctcgatgtcggttggttcaaattgagtccttcttgattggccctcggttccctgcgagtacggttattacgacatctagaattggttacctgagggttttcgagccctgtttcgtccatcgaccttggcctgcagagcacgtagctgatcttgaattgtagtgtactgatcaatagttagctggatgatacctttagataccactgccggtgtgataggtggagaatgtcccgttgtggctgccggtgtagacgtttccccagcgtgaggggttgtagtctcagggaatagattaagagtcatcacattgccccgtcctaccccgccattgataagatctacgggaggcactctgcctcttgacagtgggacgttcatcatcccgatgttgataaattcgttgttaagacccccgtttgcttggtttccagccattgtgattctccttctaaatc

SEQ ID NO: 259080 - DNA, 556 bp, Cannabis indica
caaaataattaagagcttctcatcagtatcaaggcctcaagcgaatggacaagtagaagctgttaataaaaccatgaaggatactatcaagaagaagttagatgctgccaaaggcagatcggaagacgagctaccccaagaattttgggctcacataactactgagaaaacagcaacgggacacactcccttctcgctagcattcagctcggaagtaatgttacttgtggaagtgaacatatcgactcatagacgagaggtttctgattaagaagaaaactaagaagtcctaaaattatctttggatctgcttgatgaaaaaaaacgaaccgagtcgcaagtccctaatgcagcgtatcaacaccaacttacaggatactttaacaaaagagtcaagaagaggctattcaacgttggagacttggtgctaaggcgagtattttcaaatacgagagatgcgtctacgagagtattcaacccgaactgggaaggtccttatgtgattgaagacgatagtaggaactggggcttagaaattggctcagccaaatggctc

SEQ ID NO: 259081 - DNA, 897 bp, Cannabis indica
tccaatacatgatgagaaaaaatataataattttttgatcaattttttttatgcattttaaattttattcaattcctatattccgattccgatttccattctcatttctattcctatattttcattcctcccaaccaacgccaccttagttctattttattcgtaatcaatcaagaaaatgatccataaaaattaatttattttggtgtagtttttcttttattgtatcattttttaaataaaataagacacatttagcataaaacttagtatacgtgcctcgcacgtagcattatactagtatatatatatatatggatatagtagtgggtcatatttttatttttggatggcacgttaggttttattttttttaattaatatatataaatatttttattcactactacaatgttagcctttagagactgctttttcaccctatttataaaaagagatgctaaagggtgtaaaaatacccgttttgttcgaaattgacatttagaggcggtttttttgataaaaaccgtaggtataaaattgtattataccatttagaggcggttgggaattaattattatttttttttctgcttgaccctatggcgtcggttcctttataggaaccgacggcatatagggtacacggtttgctgacacgtgtgtcatatgccgtcggttcctataaaggaaccgacgccatagggtcgtccagggtatatatatgttagcttcgtcttcttccttcccacttcactcaacaaacccagcaaaaccaaagagaaaaacccaaaaaaaccctcgccgaacccacctccactcaaccatatctcccccatttctcaaccatttgagcccattttttttaaaaattatcttccatttttgatacttaat

SEQ ID NO: 259082 - DNA, 1238 bp, Cannabis indica
caaaatagtatttaccctttaagaaacccttgtaaaactaaaaagattaattactttgtgagaattataattattaatagaactaaagtcttccaaatccatatgtaaaaaaaaataaaaaatcttccaagtacatgctttattcttctaataagacgttcagtaatactttttttttaattaattttttaatcacaaaaataaaaataaaaaataacaacgtgttatgtaaatattattattttttttttatttttatttaagtcgagtctatatttaggatatatcgtggtttggatccaaatttggggttcagggtctgagtctgagttcataatcggggttagctagggtctagggcagaggtccgagtctaactctggcctcgaggtccggaattcgggatcttgcgtccaagtttgggagggttggaatattagtggcaaaactacttgaactttactttttttaacatttaatcatataaaccaaaattttgacggcaaaacctattgaactctcattccgttttgttctttacacttttgtcaaaaaatctcagttaagtgccacagtgaatttcccacatgtatacaagtgtacacgtagcaaatttttattggtacacataatataaattatgaaataaacaacttaaaatatttaagaatttaaaatcagaaaaaaaaatatttttaaaataataaaatagtaacaaatcattatattagaaaccaaatgatttcttttctaaaaatagtaaaaatatatatgttttccactaattaaaatgttcatattgaagagtagattacaataataatttttaaatttaaattgagtaatgctatagccaaaaattattctaaacttagagagaagagagagaaagaagaaagaaaaaaagtgagtcctcgaagggaaaaaggaaaaaaattgatgaagatattaaaaaaatgtgtgtgatatgtaaaactcctaatgtttttgtgggatatttcaataaaatataaataaagataatcatataaggtattactttttgtaaataaattatatttttactattaaagaattttttatttttcactgaaacaatacaaaaataataagaaaaatatataaaagtaatatgaaaataacatttaaataacattaaaataacaaaaaaaaaaaacaatacagataataaaaaattaacaactaattaacaacagtacaacataaaaagatcgtat

SEQ ID NO: 259083 - DNA, 933 bp, Cannabis indica
aaatagtttgttaattttttagtgtattttatttttaaataacaattccatttataaattttttatttctatcaatagttttatctattttaggaatatagtgaatacaaaataggaaatattaattttttaatatttaattaatgattataaatatcaaccattagatatttgatccaatggtcaagaataaaatacccatacacgggtaatacccattaagagcatacccatatataaatatatatcatatatgtaagtgacctaaatagaatatcaagaacaaaagagttatagattttgctttcattctcgacaaagtgaactgtaggtttgaacgatggaaaaccggagttagcagctcggattgtctttattaaatcgactgttcatgccattctacatttgaataaattatatagtttaagtgataataaaactagtacttcatttttggaagagcaaaaattaagtaattgttctgtaactcttcatcacaatttagaagagtgtaatttaaaaaattgttatacaaattaatataggatcaaagttatcatattgatattagtgttaggttgtcaggcctaaataaaactcattttaatataatcagatttactaattaataaaaaaatcagaaatcattttatgttgcataattcacatgatttatttcatgattatgttttatgtataaattctattaagtctagaacatatgtaaatatataaatttgttcatgagtatagtatatatcgtcagcacagtgaaatataatcatgattatatattcaaaaatttaattcccatgatttttctgttcactggaattagactgacatgataatcgacgataaggtatacttacaccttggataagtgttatgtcctttctagggcattggcaaaatttactaatatcagatgta

SEQ ID NO: 259084 - DNA, 680 bp, Cannabis indica
ggcataaaacccaacacgtacttgtttagtattttaaataaatgtgaatgtgaaagcatgttaggaagcatattagatttaaattaaatattttctttataaaagaaaagaaagtgtgttgcctttaagttattaagagcggtgttaattttgatcgctgtctaacctgcctggcttatggattcgcaggctaagtcctattaaatggacgccccgcgaaatacaagaagtcagggtggcatggttgagaccggaggcggtcaggggaatcctcaaaatcctcgtggtcgcggccgtggccgtggcagagctcagggtggtcgccctgtaaatccacctcaagctcctcctgattgggagcaaagatttgcggagatgcaagatagaatccgccagcaagatgaagagatccaaaggttgaggcagcagggtcctcctgccgtgcctcctcaagaagttcaggccgttgcagttccagcggtgccagcagaacaacctgttgttggcaaccgtatggagccgttttatgaaagattccggtagcaagcacctccagtgtttctgggaggtcctgatgtaatgaaggccgagcagtggctttcagtgatcgagcgtatcctcaacttgatgggtgtggttggtaatgatcgggtgacctgcgccactttccagtttcagga

SEQ ID NO: 259085 - DNA, 510 bp, Cannabis indica
aaacctatacactaaaaaagttaagtttttccacctattttactgtaaccgaccctgttcaaaaaatttggtgctataactccgccctccaattttagtggagaaaaagttgaatctcaacgtccattaagatataaatatgatttctgttcattttattaatgtacattgcttgatttttgttctttgtaatttttttgggattttttcattttattaatgttatgttgttgtgtgtgcatggtaaccgaatttttgtccttattggtcactggattgcgcgtgtaacgtaaatatttattaacttgatatataatatatatatatgtaaatattttgtgttttattaaatatgtgtatatatatgtattgtgtatattatttatgtaaattgtattgtatatattctaagtaaaatatatatgtaggcacacgatttggtcccgtgatgtactttcacggaatgtattccgtgatgtacatcagccgttagatgaggagttatttgat

SEQ ID NO: 259086 - DNA, 503 bp, Cannabis indica
ctacaaataattgagaggaagagaataatataataaaaatattctttgtaaaggatttgatattagagcttttttctctctggtactctctagtaagtatgcgaacccgttcttctcctagtgtgagtctggtccctgtaatgagggttttggtccatccagattgtctctgtggtggctttctctttgatttcatgtctaatcgaggttatcctctaataaatgagaccattaattgctctaagtattatactcctctttccaatctcgtttgtcctactctgagcatttattgcatttcaattcgtcttcttcttctaattaatccaacctgtcatttctcttccacttcttcaaatctttgcattaaaaaccatcccttcaccttctcttttgcccttgaaagtcgtaagatggaggcagaggaaggattttttgaagctcattagatttttttatcattggggctactccgactaagtttagggttatgattaagggat

SEQ ID NO: 259087 - DNA, 819 bp, Cannabis indica
taactaactaacactcctaacacatactccctttccatgagtagattgtgttgaaatgaaaattatatgataaattattaagaatcattaacatgttttgtactatatatataattgagttaacaagtaatgaattaaaaaaaaaaattgatcattggtagtaaattttgtaattggcggctttgtacaagaagcctacgatatatttgtgattaagaataagattaatagttctgtcaaaaaaaaaaaaaaagcaaaaaaaaaaaaataaaagattaatagacatatataaagtgaaaactgatgccatgcaatgatcttattattattattattattattattattatgaccaatggatccaccaaactgattagaggtagaggaccacacattattttgtcaaagcaattcatgaaagaaggaccacataatttttaaaaggcactatagcatatctatatatacatttaaatttgatattattatcagagtcaacaattaccaattatataattatagtgatagagaaattggtgcatataatatgttattaccatccataatttttcaaataatatatattttatctctatactctgcttttatttttcgtacactgtatcagtgtatcagtataaaatctctcttgtttggtaaattgaatatacctgtcttgctttttggtcttttcttttttctttgtcttttttgtactaggccgtcattaattaaaagaaagtaaaaaaaaataattcctaaaacttctcgactaactgagtacatggaaaagaaagctgatcgatttaagctgcaggg

SEQ ID NO: 259088 - DNA, 527 bp, Cannabis indica
cgattaggagccttcatccacaacccatacggcttcactatctcatccgcaggtgtatcgtagagcttagagcagaaattttcggagtgtccaagcaatccacaaataaagcaaaatgtgggaaccttctcgtatttaaaattggcataaaagaacgaatcattccccctgcgtctaaatttcatcctccgtttcaacggaatggtaatgttgatccgcactcgaactctaaagtattctctccagacgccagtgaagttgttcggatcagcctctaaatactcgccaatgaatcgccctgcctcgaggatagctttctccgttcgaaatccagattgcaaatcatggatttgcacccacatatctagtgtattcagcattacattctttggattaccacctggtttcaggcgttcgattattagttgtttcctgtcataagtccatggactgccattgatcactcttctaatatcaatttcgtggtaaaattagaaaaggaatcggttctgctctagtatcttcac

SEQ ID NO: 259089 - DNA, 717 bp, Cannabis indica
tgataaggttagaaagagtaagtcaaataagtgcacagatgtattggagcttattcacactgacttttgtgggtcctttgttccacctgctatgggcggctataaatacttcattaccttcattgatgattttttcccgatatggtcatattgagctcattcgtgagaagtctgaatctttaaatgccttaagattttcaagacgaatgttgagcttcaaaagggaaagaagattaaagttgtcaattctgatagaggtgaagagtattatgggcgttatgatgaaactagaaggaaccccaggccgtttgccagatacttgcacgaacgtggcattgatgcaagatatatataatgccaggtacaccccagcagaatgaaattgctgaaagaagaaatcacacacttcttgatatggtacgttgtatgttaattcattctagcttaccagagtttttatggggtgaggcattaaggactgctgcttatatcttgaatcaagtgcctagcaagtcggttccaaagacgccatacgagttgtggtctggcaagaaatcgattttgcgttatttttcacgtttggggatgcaaagctgaggtaaggccttataaccctaaatctaagaagctggatccgaatacaatcagtgggagttttgtaggctacactattggttcaagaggttctaagttctattgtccctctcacaccaccag

SEQ ID NO: 259090 - DNA, 694 bp, Cannabis indica
tttgccccccaagtttatcataactttataatgttatggacttgtagaaaaaataatccccgcgttcttggacttcacacccgcatataccggtactgctgagtgtagacatgtagaagaccaccaatatttttaagcatctttggacacaaacaaaagaagtgaaataataagaataataataataaaaaaaattaattaacccttatagcctttaaataggtcctctcctctcttcacaacccatccattctactcttcactctatatcaaaaataatagcttttctaaaaaccctctcaaatagctccaagaaccatttcaaaggaatgctcaaagtggaaactagagattattggaagggattcaagcttgggcatcactattgagtaagtttctctcatccattcactatttaattctattttccatgttaaaattcatagaaaatatgaacatcatagtattctttgaactttttcacaaaaccctctttttacatatttgatttttcctaatgttgtgaaatttggcttgaaatttttggaatctatgaatgaaactttgcaatgtaggctatgggttatcttaatccactctttattttagaaatgagtgagatttatgcatttggtatgatttgagtgaactttttggaaaaaatgaagaacatgatgatgataatgatgaacat

SEQ ID NO: 259091 - DNA, 732 bp, Cannabis indica
tttaacatgctaaaaataaagtaagttcaaacagctgtcagttgtaagcgtgacttttttattatatacacgtataaaatagaaataatgttttctatattgtaaattattctaaaatacttgaaattttgtaaaatgttttaaaaaactataacatacacgattatgagaaaaattaaactaattttttttaaatgccgaaatatatatttaagagggcacattctaaaagcacccaataattataacacattattagccttcataaatatgtcctacccaaaatattttttgaccgttgattgcatatcaaaagaaaaatagggagtaatttttagttcatttaaatatctatatcaattaatgtttaagaaaatatctgtatcaattattgttttaaaaaatatctatatcaatttcttttaataataatatattaagggtaatttaattttttatgcttacatttagttaaaaaaaaatttcctaaacaaataataattaatatttgtaggatatgacaattttatgatattcctaaaatatcctccatttacatcatccccatttacacaatcggaccccatcggaccccacatcgtacacaatcagaccccaccatcggactcatcggaccatatttgctaccaattttttttttaattgtttttattacataaaaaataagcatcaggtgaccatcggaccaccactcggaccccgactcggacc

SEQ ID NO: 259092 - DNA, 864 bp, Cannabis indica
tcaagaaggaagaacttcattaatcaactgaacaaatacaaccaccaataaacaaaacagtacccaaacacaaactccttacaaggagcaacagacccaactacactagcactaactactttgcaactttaacatatatcttttctcaagagtagttagctttctagtgttcacaatttgtaatctatattttactgtattctttacatcattcactacaccaccaacagatttagagaagccattaaagatacatctgtttctattgagccaaacattataaaccacagctgccaaaatagaagcattgatcctgtgcagagagcctttccctctcaaagctaaccaaatacaccaccctgcatagtcagtcggccagcctttataacccatccaattgaaaatcaaatcaagaaccctgttcgacaactcacaagaaaagaaaagatgctcatgggtttccaaggcaacttcacacatggggcacaaggcagaacttagctcaatctgaaaacgagctaacttgtcccttgtgagcagatgagagttaaccacttgccaaaggataaatctgtgttttggcacaatggttgaactccaaatagctttatggtaattgacctgttttcgaactagactggtattgtataaccagttagtcttgaaccgaccctttgctcctgctttaaggatatcagcttccttaaatttctccctcaaatggcataatttgcgccagtaccagcttgtgtcagacttgagatcataatcccaaaacctccctgatttcagatagatattatcaatccatttaacccataagagatcctccttagttgaaatcgcccaaacatacttggccaa

SEQ ID NO: 259093 - DNA, 1412 bp, Cannabis indica
ccacccacaacctaccaacttttgattacattcataaaatacaaatttttactgcaatatttagaacaaagaaatataacccagaaatagacagaaccaacaaaaacctaaaacaaatcagatccatggcaagcttcaaacaaaccacaagccgagatccatagcgtgattcaaatgaaccccgactgagatccatggcgagcttcaaacgctgtcaccacgaactgagatcgctgcacacaaaaataaacactgtcaccgcgagagagagagagagacgcacaaaaaaaaatagaacaaaacctatctaccttgggcgatctcaaaactttggctgatgggaaataatggcggcctgggggaggttcgtgcgcgaaggagaatgagagagggcgactaagtgagctgaggatatttgcgattgagagaactggggaggagaagggtggtcgacggtgatcagagccccatcgtgctgggaagagagaaggtgcgattgagagagaaggtgcagctgagaagtgagaagaagaaggggtgcggatgagaagtgagaagaagaaggggtgcgagaagaagaagggtgcgtgcggctgactgggctgagtattatgtgtttagaaaatttaaggttttttatttataaggaaagagaaataatgagagattaaatgagaaatagagagagaataattaaaactcagcaaatatatatatttttaatgtaatttagtattttttttaaaaaaaataataatttaaggttattgtaaaccttaatattgtattttatatgtgctttttttttttccaatgtataagtgtattttttaaaaaaaaattataaaaaattaataatatatgtattttttttaattatggttgagcatatagtgacacgccaggcatgtggggacacgctttcccagtctctcctggcgtgactctattagtcaatattttttataaaaaaatataaatagaaaaattatggatattactctttagtgacactttatgtttttagtgacacacattacatgaggctaacattgaaagtttagagtctaattgtgtgtgtcactaaaaatccttcctagcctttagtgacaagcacttttgtgcatgtcactaaagagtgtcactaaaagctcaaattgtagtagtatactatgttcccaaaatgtacgtatcacccagaccaaaaggtaggcttaactaacaaatcaaagaacacaaataatacccttgagatcgaacctaaccatgtcaggattaagatcatttgatctaagatcaactgggtgatattgaattgaatagacattacggtaaatttatcatatctaatccaagttcaatatcggtcccttccaatgcatactctccatgcatccaacccaaacgcttta

SEQ ID NO: 259094 - DNA, 807 bp, Cannabis indica
gggcacaaaacccaacacacctatgtatgattgatgtgatttaggagcctgtaattcaccgagcagttgttccactcaggttggccggcacacctgaattcggaattgaggtaagattagtataatgttatgcatatgcttatacatgtttagcgtacatgttagtttccgttagaatagcatattagatatatgttaggaaaattttatatagccatcagattagcatatcagggcaacagtgaggtgtacatagagttgcaccgagatgccatcagatatatgctaggctatcagacagtatgaattaactgctaccacatcagtacgattagagtactgagtataggctggattcgcggttaatcatactttgtcaagaacgttcctgatttagttagggttatggttaggtgtatgggcgcctgattatgacccgggatttagtatgtttattatgttatgcttagcttactgagtctgtccactcacagtgatattgctatgtgtaggtaagggcaaggctaaagctgaggagccgtgacagcgagcaggtgaagattgtacatgtcgaggcggttaggcctggagcgtacgatcctctggacatcaaggcttctgttctttagtcgctgggcgacaaatcttttgtaaatgaatagcaaacttttgtaattgtattttgtaaacgggatcccagaatattttaagtatattatgctatgttttaattaaaaagcaaaattttaattattcacgttttttcaataacctcgttgattagcaacgagctgcacagtacgttaa

SEQ ID NO: 259095 - DNA, 1072 bp, Cannabis indica
ttattatataaagggtttatctaggagtacatcccttactccctaaggggggtattctaggggtatatctctacccctgcaccctcacggtccaagtaataacacattccacctacataagacatgattgatatagtgcatcttcataacgttaagactacacacaacatcgaagatcaagtggaaggagcctcgggggtaccaccccgaggtgacgactatcacccccttcagagtgggtctcgggggtggcaccccaaagtaggggctataaccccaaagaaagttaaacggtcataacttactctgagggaccttcatcgccagtaactagttcaaatatttaaattccataaaaagttcaatagtggttgtgaacccacgaaaatatcagaatattatcacaagagtcggattacaaccacattcgaaaactaaggagacagttgagatatctccgcaataaccgcgtctcttgaagcaagaagcactaacctttctcttatataaagggtcacccattacctgggaatggatccgaaaatttgagtacttagagaaaaaaaaactatgttattgttatcttttgcattagagagcatgttattaattttgcaatactgattaataaaatataaagggagtagactattaccgatattttcggtcgaacctctttaaattttgatattattatttacatttattgatcattttttatttaaatcttatttattacaaattcaatctgtgtcattatgtaactattaaaaaaattaaaatttgtaggtaattttagaactacaatatacctttagaagttgtattaaaatagtcttttcttcttttaattttagagaaaggggaattcgaatttggaagtttttccttatgaagaaaaatataaaaccactaaattgtaattagcgtcgaaaaggatttgtagtaaagtgtattataaatttttttagtcattttaatgaaaaaagaagggaaaaagttgtaatgagttattattatcaatagaattaatgaggcacctgttttgatttttagaaaaaataaaaataaa

SEQ ID NO: 259096 - DNA, 720 bp, Cannabis indica
aaattgagaaaatgaaggcccggggaaccctgccaaaaccggctagccagttttcatggccctgcaaacctgctagcccgtttgcaccaggtttcccaaaacctttcatttgtttctcaactctccaccaattgccatgaaaccttccagagctcctatagaatgcctaagcaacaaaatccaggtagtatttcacagagcaaacctttcaaaatcaattttccattaaagctcaaagctttgaactcaatgttcaaagttgcataaaaccaaccaataacctcaaaaccagctgctataggctaaactcaactcaacctaaccctagaattcgaaccaaaccaacatcaaactccaacagctcctataacacaatttcaccatttcaaactaaggaaaaacttaaaaaactaaagaggggtttcactagggattaccttaacttgaatctctcaaggtttccttgcttaaatcaccaagaatcagcagcccttccccttgtccttgctggtttcgaagagagagagagaagaaaggaagcttttcctttgaattttgtatgttccttctaatttactaaatgggataaatgggataaattaaattaagggaaatccatttcccttggctgaaaataagtggccacgtgccacatttctaggcagccacccaaccccaaataaattaccactttgccctttaagttaacaacttaggtgt

SEQ ID NO: 259097 - DNA, 712 bp, Cannabis indica
gtgcctaatagcaatgctcaaattaatactataactttttattcacaacataaattttaagaataaaatataacttttactcacaacaaaagttacttgtgactaaaatataatatttagatataagttttactaatttagttttagtcataacaagtgctgtgactaaaaacacatttagtcacaacaaattatcatttttttaactaatacgttttagttataaactttaaatcacaacataaaaatgataatttataattagtcacaattattttatttatattaatcacaacaaaataagattttttttatagtgaaagtactgtgctgcactaataccaataataatgatctaagaacatctccaataaagatgcaaataagtgatgcaaatacaaaatatagctcattttttgttcaacatctactctaataatgtgtcaaattacgatgcaaatatgtcacataacaaaaagtgatccaaatttatatcataatatagcataaagtaaaatttatattacaataaatgttatgttttatatttactatcatgctatttttaatattttattattaaatttgaatagacaagttcatttacattaaataatttatattgttattatattaaatttttttaatctttatatattaaaagtgtctatctaacggcatttcttggtttaacattcttggtttaacagaa

SEQ ID NO: 259098 - DNA, 543 bp, Cannabis indica
catatactccaatttatgacaatcagattttaagatgcctaaggttgatgagtttcccaatatctttagaaagttctttcagcattgagcatttattgagtttcagtgtttgcaaatttaacaaatcatttattgaatctggaagtgataatagactttcattccaagaaagatccaagtatctcaattttgtcaacttacctagtccacttggcaaaaaattcaaactacaacaatgagaaagttcaagatgtcttaagttgatgagtttctcaaattctctaggtagttctttgagatttaagcaattattcagcttcaacgtttgcaaattcaccaaattcgtaattgaattgggaagtgacttgagataataattccgtgaaaggtctaaatatctcaagtgtttcaacttgccaatagaatttgatattatcttccaacttgaattgttcaaatccaaacaacgtataaccatacaatttgatgttatggcatcgcaaaataactcctccttaaagtttgaaatactaagaaatgttc

SEQ ID NO: 259099 - DNA, 866 bp, Cannabis indica
aaaatagattatagaaaacattagtcttattcataaagaactccattttcaggtacatatttcacttcttcataatttgttaaaatatatcctcttatttaaacattttatatagtaaaattctatcactacacttttatataaatctctcattttttttatcttaagaaataaataatgttgcgtaacatcttttacaattgtcctcttatattcaattttgtagaataggcatttcaatcacacctcaaaacaaaatatctaaactttcataaatagcatttaaattgttttttttgttataaatattaataattatgtggatgtccaaattttttatttattaccattaattgtaatcaacattcattttttcttagttttcctttttcttagtttcttaatatttgactcttgtatttgtataaataggggtcaccccattggaataaacaactgagaaattctcattcactttctctttctctcttcatcttcttcttctttcttctcatctattctatattattttataacacgttatcagcacgagtctctgcccaagcttcaagcacgagtctctgcccaaaccccaatgtaagtattttgttaaagttcttgaattgtttcaaagtcatgatacactaaatatatatttatatatatcagggctggccctgaaatttagttggccataaggaaaaaaaatatttttgggccctcatttagaaaaaaatatggtatttttcaaaattgataaaaaaaaagtgtaattttaaaagggaacaaattttttttgggcccctgagctaggtgggccctaggcacaagcctagcccgcctatgctcagggttgctcctgatat

SEQ ID NO: 259100 - DNA, 888 bp, Cannabis indica
tataggttgtaaatccttctcctataactccatttgcttaaaagctttgcagtttagaaggttgattgaactcccattttcctctaagattcggtgaacattatctcctccaatattagcgacgattacgagtgcgtctacgtgtgggtgatgaacccacctggcgtcactctccatgaaagtgatgtcgttattctttcttgaaatccttttaggtcgctcacttagatagttcacgttggtgagcggtttctctttttcttccttggtgtatcgttcttgcaacttcttggaatctccaccgatattgcaaggggttcgtgaaccactcgcattggttgtattgtcgttatcatccgcttggggatgattttcaccatgtttcttgtacttgccgaattttccctgtctaatcaattcctcgatctcatcatgtaggaaccaacattcaagggtagtatggtcgatgttcttgtgatacttgcagaacttcttcggatctcttttgtcgcgattgcctctattcgggggaggctttttgaagactccattcttttcctcaatcgcgtaaatatgatcgcgagggactgccagttcagtatagttgacgaagcacggtcctcctttcctttttgtagatgtttccttctttaagggggacttggctagcttcggacttcgctgcctttgagggctgcgtcttctcgggcttcttcctcaagaattctttcctctaggacttcgagatcatgaccgtggtacgggtgactcgcgtttatccttccctctttctagcttagccagagaatttttgattctcttatgtggctcagccatagcaaaaaattgtaccagcaattctggtcttcgagcttgcaactctttcca

SEQ ID NO: 259101 - DNA, 797 bp, Cannabis indica
gttttcaaaatattcacacaaactggtttaatagtgtttttacaacataaactttgtactcccaaaatactttcaaaatagagcatcctgattactgggccgaaacactgcggctgatatgtacattgctgctatgaccccgaactcatggctgctcaacctttgctttccccttacctgcaccataaagcacccgtgagtcacagagactcagcaagaaaaagtgaacaaacaataactgaaaaatgattatcaatttaatctcatgtcatcatgtttacacattacataatatcataaagtacccctttacacattacatattacacaatcttggtactttataaagtacccctttaccactcgttaaccacgagctgtatatgtcactatcgttgcccgatgaagcaaacgataagtaagaaacctaaccgcggtttcaagagtaattactcgtaacggtattaaccgtttctaacctttagtcataaccgaggctcaacaaatatttaatcagaatctcatttataatcgaggctataaccatacaaccattaacatttaataataaacggtgcataccacttttcttacctgtatatcctaatgagtgtgctaaccgatccgagcagaatataatttggcgtataatagtccaaaagttaactatccaagtaaaatgattcttttatagccttagtgtagctttcatcaaaacctcagtagcccttactcttagtcataattcccagtttatattcaaaacatgctataattattaaaacccgtagatatac

SEQ ID NO: 259102 - DNA, 600 bp, Cannabis indica
tattcctaagcttgctttgaagggttaagcttttaatacatgaaaagagagaaaagaataaagtggcagagatagagaggagcacgcccaaatgtagtgtgagatatcctttatataagttttctatgaagcttataaacttaagcttgaactagattaatcaccaaaatggcatgcttagtggcttctagttctacgtgtcaaagtcttaagtgatgaatgacttaagttttaagtttacaccatgtaaataaaataataaaataaggagaaagataatattaactttgactagccaaaacttgttgagtaaggtggccattcgtgtcattcaaagaaatggtgctagaattatctattaagcttagtcactttgttagtgtggttagtcaccacaaatagcttagtcatcacttatgtttcttatctaataagttatcaataataatatagatgggtaaatatcaaactatacccaataaataattcgtttaatcttaaaatttctagacattacaaagaaaatatttggtactttaagaatacccactaataccaccaaaatattgctggccaatccatcgaattcctactattgtt

SEQ ID NO: 259103 - DNA, 770 bp, Cannabis indica
aacaaataacaaaaaagactaactaaaaacgaaaaaaaaactgaaccaaaaaaactaaaaattttaagtctctccccccaaactaaatatgcacattgtccccaatgtgttaaaataaaattgcggtgagagaaacttacctgagccccatcagaaggggttgggtggacccttttcatccaaaagagccctcgtactaaatgaagaaaatttaccaccaatagtgttgatttcagagttttgcacaagagtaagctcaccttcagaactaccacacatcaatcttttccaacgacgctgaatcgttcgaagtcgctctttaggctttgctttcttcttatcagctttaacaaaagaacccttcaccatctcaatcttgcaacaggtaggaatgtcagttggggcaaaaacattaaaattgacctcttcatcttgcactcgcaactttaactccccttttgaacatctattaatgctcggcccgtggctaagaatggtcttcccaaaataatgggaatagttgaatcttcctccatatcaagaattaggaaatcagcagggaagataaacttaccaaccttcaccagtacatcttcaattatcccacgaggatgagtcaaagaacgatccgctagttgtaaagtcactgttgtgggctttgcttttcccaatcctagccttttgaagacagacaacggcattagattaatgcttgctcccagatcacatagagctttagtttccaccgaaccccctatagagcatggaat

SEQ ID NO: 259104 - DNA, 521 bp, Cannabis indica
caaaattatgaaaatcactaaatgacataaaatgcatttctgaattcaataataacagcataataattatttaaatacctataaataattttccataattaaacataattaactgctaatttccaaattaaactaagtggtctttacaatttgcatctcgaaatacttgaggtgggaaagaggatcttctcttccagtgtacagtttccaggttgacattttgaacttgtggggcaatgccaagagattgatttcaggagagaaaggggttccacatgctcggtccaactcgagatcattgtttctctgcccggccatgccttggaacatactctttagttcgtctagttgtgcttgcacaactagactaatctgtttggcattttggcccatttgagtcacgtcagtatctttctgagcgagaatttgagcacggcttccaggctgtatgatcgtcgtgccaagttgattgtctgctgctcttcttctgttcaaatcatttatgagatcatgggtcgtcc

SEQ ID NO: 259105 - DNA, 1051 bp, Cannabis indica
acaagctttatatataacctttgaagtttcatattcaacaagtaaaaaaggtttggcactatgtacacaaaagcattcatttcaatttgaagcaaacttagtaaaatgaacaacaaaacaacaagagaacctgaaaaaagatgtaaacttttcaactcaattctcatttgcttgaaatccatttccatttccactcccaccaccaccattactacctccatttccatttgatgatgatgaagaagaagaagaagaaaacaaattgaaaggccatgacaatgagaaccttcttccactactacttccatttcttccatctccatcattatgttcttcttcttctcctccttcttcttcttcttctccaacaacaaccacagaattatcattaccaccattcttagattcatcagaagcaatctgaaacctacaaacaggacaagagctatgaagctcaagccatggcaaaatacaatctttatgaaatttatgcttacaaggcatctctttagcttcacaaccaatctcaaaatcatctaaacagacagaacactgcaacaaactcaaactctccttaattttcacagtgggaagagcttccacagcttcctttttcgccggtggcgtcccgtaccgatttggatcattctcagccaaatgctgtagcaacatatccaatcctggtcctataaagtaatcacccaatgacccaattggattttgattattatcattaccattttgactttgaacaacaagtgtttgattaaatgggttaatcaaaataactcgttctctttcatctctttctgttaaagactcagaattttgtgattctgaagctaacccagctcgaattccttgaagcaattgaagaatattagctgagcttcttcttcttctccttataaacgattccaattcccgatccaactcagtatctccatctccaccttcatggtgagggtttgaatttaaacccatttcatcatcatcttcatcttcatcttcttcgttatcgaaatccatagctctgaatcttctcctgcga

SEQ ID NO: 259106 - DNA, 2594 bp, Cannabis indica
agggcataaaatccaacacactcatcacctctccccaacccaaatctccttcctggatgagcctttctcaaaagatgagatcaaaaaagctatgtttagcctttctggagataatgctcctggccctaatggtctgaactctctcttttatcaaaaatattggcaccttctgggatctgatctgtgtcatgctgttcttcatatcctaaatcataatggcaatatttccctaattaacgaaactattctagttctgatccctaaaaagaaagggcaacaaccctgtgtgatttttgccctatcagcctatgtaataccatatataagtgcctctcaaaagtcttggcaaattgcattaagaccgttcttcattctgtcattgctaataactagagcgcgttcctcactggccgtcaaatctttgataacattctcattgccaatgaaattattcactctattcattccaggaaattgggtaaaatcagttgtgctgcgattaaacttgatatggaaaaagcttttgacagggttgagtggccttttctcaagaacatccttgctcaagtgggtttcctctccaggttcacttctcttatcatgagttgtcattccacagtcacctaccgtttatcccttaatggtaattggtctgacagttttttctctttccgtggaatccgtcaaggagaccccttatccccatatctcagctgctattagaaccaaagagatgactaacgatttctctggtatcaaaatttgtcggggagctccttctatgtcacctcttgtttaccgatgacagtatgttgttcacccctgtcactacttagtcgagtactgccataaatgatttccttcatatctatcatcaggcaactggtcaatcggtcaatctggaacaatcatccatccttttctcacccaacactccccaggactctcaaaatcttttcaggaattcgttacatcttactaacgagggtttcatcagcaaatacctaaaggtgccccactgtgttgacagggttagcaactctgccttccattaccttatccaaaatgttttttcaaagatgaatgtctagcatggaaaattcttttctagggctggtaaggaaacacttatcaaagtcgtcattcaggctatctcttcttttgccatgtcctgttttaagctccctaaatctatttgctgggctatccaacgtctaatctctaaattttggtggggttcgacttcaaatgataagaaaatccactagaagaaacggtctactatctctttttcaaaattttttggtggtcttggatttagatctcttatccatcataatcaagcgctacttgcaaagcaggcttggagattttggtctaatccagattccctccttcattcaattctcaaagccagattttcaaaaactcagatttcttgtttgccttcaatggttacaacatctctttcacttggagaagcctcctctggggttgtcaacttcttaaaaagggccttgtctggaaaattggtagtggcaatgatatccctatttctgcttccaactagataccaaacatatctcacccaactcttcttcatcccatcgatccttctttttccactgtgtcttttttcataaacccaaacaacacctggaatatggccaaactacagcattacctcccacattaccaagccattatacaaattcctcttgaccccaatccccgcgatacccatcatttggggttaccactagtcaagcattcttactgttaactctgcttatcaccttgcttcctcatcctccaaaatcaattcaccatccccatctaattccaatgcctttaatcaatggtagaaaactctttggaaccttcccatcccacaaaaaatcaaacacttcacttggaaagctttcaaccacatccttccttgtgctcttaacctgtttcataagaaattcctcaacgacccattttgtcgcttcagtggaggcagaatggaatctgtaacccatgcacttatagattgcaacagagctcgcactatttggaagcattcaaaatttaaggaatttttctcagctcatagaggccaggacattaaagaattctatctccaaggcctcgccattttagctaaagtggaccttcctctgttcattagcttaatatggcatatttggaacactcgaaaatcagtgttgtttaataaatcttataatactgacaatgtggaagaatttgttaagaattttttgcaggaatataaggaggctcaaagaattaatcgcacaaatcctccctcggccaacacaagacaacaacaatctcagtccaatcctgcatcacagcacactatcccagctggtagtactgctttatttgtggacgcagcgctaaatcaatcaagtagtgttactagtttaggcttcgttttcaagaaaggctctcaccaagtcttagcctctgcaatgactcataaaccaggagctcctacccctatttttgcagaaggtcaaactgtactggagggtctctcttgttgcctctcccttcagttgcagcctgatctttgttgggatttt

SEQ ID NO: 259107 - DNA, 615 bp, Cannabis indica
gttcaattaaatgatctttgaactgcagatccatatattctccacccctatcagttcgcaagatctttaaagttttacccaattggttttgagccaatgctagaaattcttgaaacttttcaaacatttcagatttcttatgcataaggtaaatatgaccatatctagagtaatcgttgatgaaagtgtcaaagtactcataaccacctctagcttacattcagtggtccacaaagatctgaatgtactatgcctattggttccttggcacgctctccctttgcaggtaaagaatgttttgcaattttgccttctaggcaagattcacaaactggtaattcacctaaggtgacatttttcaatggaccacctttggttaacctgtgaagtctatcatagcctatatgaccaagacgtaagtgccatagatatgtttcgtcttcattatcaatcttttgctttttttggtttctaggtttagctactttaaacagttcgttattaagcgcaaatggttcttctggtcttagaacataaagcccccgttccatcgatgcaacacaaacttgaatgtcatttcgagaaatggtagaaccagaactcaaaaaatctaat

SEQ ID NO: 259108 - DNA, 894 bp, Cannabis indica
aataaataaaacattttctaaaattaaaaatttcttttgaaacttgaggcgggcttttcctttggcttggaccgatactaactcgccatttccaactttaagctttaactcatctgggtgaagattctcccaagtttcaagcagctgcaatgaagaacaaacatggttagtagatccagaatcaacaatccataaggatttgtcattctctaaaacacatgattcaaagacaaaagcattaccttcgttcgaattgtttagaagcctgggacatcgttcttcctgatgtcccttctcattacaatttgaacatagaagaatatgactatcaattgtacttgaagaagcagcattgttagaagcttcatgcttaatccttttcctctgattaaagtttgcaaaaccgggaggtggcattgcaatcaaattctgttcatgagctcgcaattctgcttttagcttatccatgtcggaagagttaaaattgttgatcatataagatacaacaaatccattatactctggaggaagactattaagtatgaactgtacccattgttcctttgataattcaattccaagtagatttgccttttggaacttcagattcactaccagggtgcattttcacactatagagttcatttaatttgcaaaggcattgactaggagtgggtcgaggtatgggttattcattttcacactacaaatatcaataaacagaagtaaatcacttggttcaataaattcatacacaaaattcagaaaataacaagtaaaaaaatatgtttataaaaataccaaaatttacatattttatttttcaaggttttcaacaaactaatacagtgtcccgtttaggcgagagtcaaagcatcatccatcgaatagagt

SEQ ID NO: 259109 - DNA, 1740 bp, Cannabis indica
atttgtgagtaacaagttgaacaaaatcatttcatgactatctttacttttcttaggctaagacaaacttaagtttgaattatatgtaggcgactgagcgaaatatctaatgcaagtacttctctttcattcatcaccaacatgaagtctctgtcgattttgtaagtaacatatttttcaatacataatcataaagctcatacatgtacattttttttttctttggattgtaatcaaacaactttttgctacaacatgtagagtactgaagaatatcaatgtcattggcacgattccatcgaatataagtgaactcaaagagttgcaacacttgtaagttcattcatgaactttaaaactagtcaattttgaaatttctaactatgaagttgtaatactctttcttaacagggatttgagcttcaacaagttaaatggacagatccctgactctctttttagcatgagttcacttttcgctttgtaacatatcgataattttatcttcttgattgaatcatatcatgtgcaacataacagctatgaaagcaactaatttttgtttatttaaccaggttgcttggaaacaatagcctaaatggtacattgcctcagcaaaagagtgaatctcttctcaatatgtaagctaatcacaagagttatggcaatgattttgaaattgacactcttcttaattgtgatatatatgttatatgtttccagagatgtatcatacaataatctagtgggaaccattccttcttgggtcaacaaacaaaatctacacatgtatgcctttgttttcggtacttgtaatagtcaatgcttgttttcctactttctttaactttatatttcacttttttgatgcagtaacttggttggtaataactttactatagataattcaaacaacaggtgagttttcctcaagttttttgaaatagtttactgcattattgctcttggttgcagctaattaagcaatatttggtttgttatcagtactcttctttcaggattgatctgtcttcagaaagatttcccctgcaatcgagatcgtcccctatgtaataaggataaattttcacaaatttctattaatgtcttcttagtttcatttctattaatgtcttatgatattttgttatgcagattataactttgggatcaactctggtggtaaacaaattacctcttctaatggtcttgtgtatgaaaaggatgatgaagcacttggcccagctgattattttgtcaccagttccaagagatgggcagtaagcaatgttggaattttcttagggaataacaatgctacctatacaagtaattcattttctcaattcacaaatactttagaccctgaactattccaaaccacaaggctttctgcttcatcattgagatactatggtttgggactcgagaatggtaactacactgtcaaactccagtttgcagaaattggtttcgaaaattatcagacatggaaaggtcttggcaggcgaatatttgatatttatatccaagtaataaccacctaattgtcctatgcatcctctcacaatgtctctaaattttgttttaaacttaaatgttccaaactatttgtgtgaatttatgacagggaaagcttgaaataaaagattttgatatcaaaaaagaggcaggtgcagtccctcttcgagcagttcagaaggaatttaaggctcgagtttcacaaaactaccttgaaat

SEQ ID NO: 259110 - DNA, 516 bp, Cannabis indica
tttacttttttactgtgttttttcataagtttcatactgcagtatattgtattaagttttcactggtgttctactggtgttttactagtgttttactgttgttttgagttgttttgctttgtgttttactggtgttttacaaaaatacagtatttttgaaaagatttccgtgtgacagtatttttgtaaaaattaactcaaattccagtatttttgtaaatttccctttttcttttctactgacttctcttttaggcttttgacttcgaatgaagttgtccaactcctctactctcagtaggaggaggaaggagggggtcatttgtctctttcagtttcttacaaattaaaactttatatattagtttttaatattttatttaatgttccataaattaaatatatatatttttggtaaataaaacatatttatttcacctcataaacttttatggataccaactttgcttaaaagagaaaactaaaaccagaaaactaaaaagaaattatacatga

SEQ ID NO: 259111 - DNA, 739 bp, Cannabis indica
attaaattttaggactcttttatatctaattttggacatgttgatcaaacttagttttaaaagttcaatctttactgtttttttttttctctttttcctctaactacaataagattcttggtaaaggggcatcaaagacagtgtaagtagctctctttctctgcattcagtttgacaatttagaaagagaaaggcttttaatagttgttttttgctttctggtctatttatttccttggtgggaattttttagttttttctcagttaaagtagaaattatctttagaagggctcatacagtataataagaacaagtattcacatcatgtaaccaaaacacaaataaaacaaattaaatttgtacaattcatactgaaaagagaaataaaaatcaaagccaaccttccattggccctgccttcccaacaagaagagaagacaacactgctgttatgctgccaacaatctagacatcaagaaaacagaacccaaagagttaaaagtaataaactcaggactacacaagaaatttgaatcaatgcaaacacctgctccaagtcacattagctcatgcattttaagtaaatattagaaaaaaaaattgccaaaatgacaacaagtgaacacaaatataattgttctttttaaccgtgaacacaaatataacttttcattaaagttataactattaattatagctataacttttcattaacaaattacattttgaacaataagt

SEQ ID NO: 259112 - DNA, 2946 bp, Cannabis indica
tgtcagtattttttttgtcactggtggataattaattgtaccttgatagtaatatatggaaaaataactattagacctctataaaccaactttatattaactaatttagtatattaataaaacaaaacatgttatttattttttctgaagagctttgtatattgtattgacaataagaaacacttgcaaatgtgataaaatctattgtatcattgtcaatttgtaatgattgatatgtcaagtttcaaagagttagaaaaatatttatacaattgtaatgcaactgttaattataaaacataataaaaaccagaacagtgtttccacgtacgtacgtaactctatctacatatgaatttactattatattcgtgatttgatatgaacaaattcatcattgataatttggaacgtaacaaaaatgcatagagataaatatttaactatagtattgatgtaatatttttttttattatacctgagttaaattttttgggaacttcagttcaactttttgcaatttgcatttcatgaatctgaaaaataaagtcaagatattagttttatgcgaattaaaccgaatttctggttgaattttagttttgtaataatttttatgcacatttttcatgaattcgaaacagtccatattttgattgattctgatcgtcttctcaggtgaagtcatcagaattaataagagttctctttctgattaggttacgtttcggctgtgtttagttgttggattggttgctgaaagttatcgttgttgaagtagatagataatgaggctgaataaatagagcaagaggtattcttgtaaaattttattggttggcatgtaaaaatatttatatggcccgctcaatatacttgtaaatatttttgccaatttaatatatacttgaaaaaaaaaccccttaattattaactcaatgattttcgttctcataataccaaaacataaattacaattcaaataacaaaacactcccttaataaatacccaaaacaaagtgcatatatagcttaattaataatagatataagttattatctcaaaccccaacaataaacaaacaaacaaagtgatggtaattagttaaatcatatcatcaaagaaatacatcttgaaagcttcaacatgttccacaagaagacaaatcacaatcaagagagactcatcatcatcacaactattccttattatccaaagatcaccatcaatttcatgataagctggcccaaaatggatctcctttccccacccaaaatcaatacccttaaacggcaaattcacatagtttatgacactaatcacaggattcccacaatacttgccacctccgttagttgacgatttataagagtattgaaacttggtcagatcttgttgacttttcaagtactcaatagctgacaacacgtaatcatttgtaaccatatcaataactgaacgtactttactagcaacttcacttaacgaactagataacaactcccccgccgtacacctcgccgttacatcgaatactccgttaccaaagtactcaaacggtaacggaggctccagacgctttcgcgaatcgattgtaacggcacaagctgttggttgttgagtgtcgtgctttctcgccttactcgaacacctccaaatatgagctgctaacacctcataacgcgtgtaaggtcgagatggacggttcagatcgttatttgccttgttcttaagtttctggacttgttctttcgtaagctttagtgtgaacattgttgttttcatcttcttaagctcttccgcgttaggttgtttcagcaaaaacggcatattaccaaagtcgtttgagtgatcaaatcgttgcgggtttgaaccacaacaatctccaactccaaaggcctttttgtcaaaaaaatggtgccttctgtaacggcaagccccgtgcgattcgggcccactcagtcatgaagttggcggcgcttagtccgtcaatgaggacatgtgatgcggtaacccctaggcttaaacccccgcaactgaacttggttagttggacgagaagaagagggagttcgtggattgggagagactcgtttacataaggaagtaaacgatcagactcaagagtcggtgtgaagtaatctttctcgaaataagaaagatcagcgttcagctcggctgcaacgaaaacaactccgtttccattgcattcgatttgaaaacgcccgttgtttaagctgcgcaagcgcccagctagtggatagaagtggggtagagtgtggcttaaggaatcgattagggtttgagtaatggtttggaatgggagtgtggttggggcgtagaagtatatagaacttgtatatgtggtgcatccaatttgatcccattccgacaaagattgattccctttccaagttgattgtgctggagtcaccattacgttttgcttgatatttagttccatggtattttggaattggttatgaaaagagcttagaatatacatatatttatagaaaaatgttaagggcacttgaagtgctaagcaccacaaatatatatgactaattgttattagtgcaatttaataatatcgggtcctacacattttaatttaataaagagcattgatgttgcacgggtggttcccagcactttacaccctacgattggttaatgatattttttaaaaattattttcttaaattatatgggacctgctacttaattatactaatagcggtatgacactaaggagggtgctagtcgaaactattaaccaattataaagtgtcacatattgttaagtaatttaagataccaaataacattgctctatactataatgctgctatctccaaccatgaacattaaatatagtagtttatatatatatatatatatatatatatgttagagattttataacaatggaagaaaatcaa

SEQ ID NO: 259113 - DNA, 3099 bp, Cannabis indica
tatataataaaaaaaaagttcaaaaaaaaagtgcaaaatcgggttggttgggttagtcggtttaattgggcgggttgaaactatttttaaccctccaacctgcccaattaacagaatgggcaatttgtaattttttcgggttatttcgatttgtaatttttatcgatttttttggttcggtttgggggggttattcggtttgggcggtttataaatttttttgtacaaccctaactctaatagctgtccaagattctacagaataagttgtcaaactcaaatgtccgttatcaaaaagaacaaaaacagttgtcaaacttaaatgtagtaatctcgatcgtgaaacttaacagatatcaagactaagcaacactaaagcatccataattaaaagttgagcattgttacgagttatttatggggcttagtactacggtgaattattgccttataattgattagcgattttttataatttttattaaagtaaaataagtgaaacctgatattaagttacaccaataaagatattacacctgttctaggcaccatgagtgttctttagcatttctcttaaaaaatggacactacctgttatacaagaagagctgtacaaaaaaagacaggattatgcaaaatataatttgcatcacttggtctttgcacctaatgaaataatttgtatagaaagaaccaaaacaatttcaaatcggattctatcatagaaactaataggaattgaattatggcaattaaaagttaacaaaaaaatatattaatatctggagttggtttggagcctggcaaatccagaaacggcagctgtacgcctttttctgaagtatacagctgaaccactgaggagcatcaagcaaaacataattccctgtccacaattgttttaaaacatatttatcaattcacagtaaagatgagctaccattccatctacaaaatcatgtgactatgtaattaaagcgcctcttgtgttcagcaacagtatcacaatacataaaaacacaccagttgaaacttctattgggctcaatacataagtcacataagacaagcggataagcattaactaactagctatacatagcaagtgaaagagaaccattgacaataaaagagatcaggccttcctgataattagcaagatcctagtaaaataaatctcatatatatatattttcaatttttgatataattctatttccaaaagagagtgatttttgtgaaaggaaagtgcactaaatagccaatcaactctgacagtgaaaaaaaaaagcatacctcaaaaccaagcatagacaacttctcttcactaacggatggtatacagcttctgtaagtaatgtaaacttggtttctactctctttcgttgatgaatcagccatcaaccttctatgttttaaattggtacttagatcttccttagtattcaagactgtgcgcaactctagatttttggggaaaatctccaaagtcgatcgaatcttcctagaagttttctcattgggaactttcgagccatctcttgtttccatacattttagagggatacgataaccagtctcactgcacctatatttttcgtcattctaccgaacaaagagaacatcaaaatatgaggtaaagtagtgaattcaatgcatagcaagtgaaggaggaagtgcaattcagcaaagaaacaaaggaggggtttaatattgaagatgctgagcataaaacaagcaatattacggttcaaaagggcaataaggttgcataaatttataggttcattgggtaagtatggtttcaagaaaagttcttgctgaactttgatgcaatgttaactcctgactttgataattggagcgtggacaggagatggaatcgaaactgtctaaagttagaaaggaagaaaaaaaaaaaaaactacctaatcaatttcccaaaatctcaacaaacctaaacaaaaatgcctattatataatcaggaagttcattctagaaaagtgaaactagcaataaatataaagctgggtatcgcgagtatcaataatcaacaacagaaagctttgataccttttcggagtagaggcaaggaacgcaaggaccagaaggagaacattcgaaagtagcgttacttcctcgaggagtttctttgaaactaagcaaaactctacgcccaattcctcggtgttcatcatttctaagccaatccaatcaccaaattgttaaaggttcgatcgcactcgattagacaaatccaaaccctaaaaccacagcataaatatataaccattgatataagaagactgagaattcgagagtttacatgccctgggcgtgaagtgaaggtgctaatagcaaagcgagggttgcgaaagagagagcgactagaaccattgatgaatctgaagccatagttgatcctcctctgctttctcctctacacttggtcgaatttaacaaatgaattgaccgatttgtaagacccttccccaaagaaagtaatcaagaagagaattgatctcggatttctctcaaattaccgtcgtccgtcgaataataaaaacgacaccaactgttccaaacacgaaggctaatttcataatcgcccaatactttttttttggtttaatgttgaaataagacacttttgttaaaagaaatactaaaaggtaaaggtacaagtggtacctattaatttcaaaaattataaaccaacaattaacctggaggctagcaaagacactctcaaagaggtaccccaaatgtgtgatcttgcatggccacatgtgtcccagcatgcctcgggaaaagtcaatcgaccttagcatgaggaaggccactcgaccatggcatgaggaaggtctcttggccttggattgaggatcgaccatggaatgagaaaggccactcgaccttggcttgaggaaggtcacttggccatggcttgaggaaagtccctcgatcaagtgttgaggaaagtcactcagccatagcatgaggaaagtcactcaaagtgttgagaaaagtcactcgaccaagctttgaggaaagtcactcgaccaagatttgaggaaagtcactcaaagtgttgagga

SEQ ID NO: 259114 - DNA, 576 bp, Cannabis indica
ttagtgtattttaatatcgagtcgctaaccgtgttgacattttaagcttccaaataacaatactcttatggcatgtttactaataggtaatgggaatcaatagtaaggtaatcattcccttacatttgtttacttgcattattaaaattaggaaagggagaagttgattaaataagggagaaaaaaaagggagaacttctcccaccaattttgtaaggaatgccattaagggtaatggatttttattatttttattttattttttaatattaaatatataatgacaattttgtcctttaaaatatatcttgcaaaataactaccatataatatagtttaactcaaaagggcaatttatgtatacacatattgttatttatttcataagtattatacatataaagttcaaatgttcatagtctctcctggtagagagtgttctgtccctcatgattgagagtgtctaattctgtttgttctgtcgattgcctaagattatttttgtctttttggtctgcctgcttagtctgtgtgtattgcagatggcttcatccagtaatggggaaaatctcacta

SEQ ID NO: 259115 - DNA, 548 bp, Cannabis indica
ttattattatttgtgactcgattatgatcgagggaaagttcggtctttaccgttaatgaaatgagaattactcctaaaatcgccgttaggtttcttacttatcagttgctttatcgggcagtgatagtgacatacgtagctcatggttaataagtggtaagtgttagaaacggtcattaccattatgagtaattactcgttgaaatcggagataggtttcttacttatcgttcgctttatcgggcaacgatagtgacatacatagctcgtggatagcgagtggtaagggtgctttatgaagcactgcaattatgtgattatgtattgaatgaatgtctgtttagtgaaatgatgaagttgttgattataagttactatgattttctcataatgcgtaatatgcgtgttggtatagatattaaattttttatgcatgctaaataagtaatgaattatgagtatgcatattatatcatattgtgattacttgtgtttaccattgccttgatttaatagcttttcttgctgagtcattgtcactcacgggt

SEQ ID NO: 259116 - DNA, 872 bp, Cannabis indica
aaaaatattttcggtttttaaaatgaaataaaataatatttaaaattaaacctacaattttgaaaaaattaggtttcaagtaacctaaatatcatttcaaaaaaaatttgctaacttaccttttaaacttcatgttatttaataaattaaatattcaataaaatagaaaatgataaatacatacccttttctgattttataatttaatttaactaaaaataacaaaatttaaaagttaacaaaaatatcttatttccctttttaaaataccatgattatagtaatcttattctaaataaggtcaaattacttaaaaggaatattttataaaaaaaatttaatttctgaccttaaatttaaaaataagataaaataatcaaattttaaagaaaataagaaaagaggtaagcaaaacttgattttaacctattttcaaattcaaattacactaatatctaaaattaattttgaaaaatcaaattaatttatttctgataattagatttgaaatatgaaaaataaaatcaaaatacaaaactacacaaaaaatcgaaagttaatttcatgaaatagcatgaaaaatcgaagaaaacgaagaaaaactgcacgctgtacaaatggtacgcattgcataccacccgcgcgcgcatgagggcaatctaccgtgtttccacggcgctgggaggctgcaagcagcccttccgcgcacgtgggaagggtgatcaccaccccgatttttctcgattttcaaaaattcataactaattcaaataaatcgaaattgagttctgtaaaaaagtaaattgcttagaatttccaaactatccaataaaaataatttctgaaacagacaatcaattatttttcccaga

SEQ ID NO: 259117 - DNA, 937 bp, Cannabis indica
cactaaatagggagatcctcactgatgacgccattgcacaagagttgggcaagagggaactcgattccaggttgaaggaaaccaaaaccaaaagtttctctaccggtggcaacttaacccggaaaccagagcctggacatattttgtcaacgccagaataatgccgacgtcacacacttcatccttagactatgagcactgcgtcatagtttatgctatcatggccagaatgacattcgacattggctgggtcatcttgagaaacatcaaccatttctctgagatgaagacaacagcggatctggtacacggtgccctaatttccacattatgctcgcaacagggtgttcctatgattgaaggagccatcttaaaagcacccatgcagaccatctcttgccggatctactatgactttccgcttgcatcattagagccgccagaagacacgcgaaaacgctagaagggtgatgctgatgtcgaggaggaggacccagcagacgctggcaccagtgcaccagtggcacctatgccccagcctgagccaccattggactcccacacccaggacactaatgatagactggttcagtctaaccagtaccttgttcaggctcaccaaacacaagctgtgtactacaatgcatatcttcagcagcaacttcattttgctcaaaggaaagttcaggagttgaattctgctttctcgtgtggacaatgaaccccgatgatgctgaccatttcttgcaacctccactgtggcagccataccagccaccaccacctccactgttggaaatattttaccagggtctagatttactaccatgtagttttattaaaaatctaatatggattctaaaacaatgaaataaacatatataaagtttagtaaaccttacattgggtgcagcggattataatgactccttccatt

SEQ ID NO: 259118 - DNA, 556 bp, Cannabis indica
ctcttttttttatatatatcttactcagcgctttttctaagacatctcgaccggccaagcggtctttaaacttggaattatttttcattttttggacaacgggctgaccgggcagcttttaatcccggtactacgtgcttttgtcatccttaatgaatttcattctctgtttataattgtcgtgcaattgtgattgttttatttttaccaaatgctttgtacaggtataggtgccccccaagtgaccgagcagacgtatgactcttggtcacttgtctttcgcaaatatattgcttatctgttcggtgttttgggtttgactaaaccttttgtacgcactttaggtaaattataatcatgctgattttttcgactcaattgaatttgaaatactatctttattcatttattgatcgaaaatgtatttgttaccgtagtaacttacatcagagctatttgatctaatctgatcttttagcttaacatgaaataaaacaaattgcagacataagaaactgtactttaaagtggttagcccgacctgagtactttgttt

SEQ ID NO: 259119 - DNA, 709 bp, Cannabis indica
gtttaatacacgatcgttttgacccaataaaagcaggaaaattacagctatatgattttcaaattataaccgcatttacactacgtgatatgtaatcaaaccccgtgattttaggggatgatcgttgtaaacagattacagtcaactatgtaattaactgcccactatgtaattataaatagtggcaaacaagatcaaaaaggggacagaaaaactaatacaaaagaagccccgaaaaataatcagaaatctaaataagattgactcgtggactatgcagaattttaactacaaaaccacgtaaaaaaccttgtgtgttcatactttaaattttataactttaatttttttgtgtgagattgtcacagttaggctcaaatttagttaacgaaaatctgcgttaacaagtatttcaactaaggctcagggttgaattatatggatttaaaaagaataaaatattcagaaaaaatccacttatggtcgtacaaaataatggaccgatttctagttagatttttgccactttatttcaaccacttattcttcttgtcaataataccatattttctaattcaatcctataaatctcaaaactatttatttaataattataattaattactaaataaattgtcatttatgtaatttattaattagaccataaaaagtctcttaattaacaaattgaccctaaaacctcttttct

SEQ ID NO: 259120 - DNA, 818 bp, Cannabis indica
cctacgattataggtttctttccaatttctattttgaaacacttgcctggagttgaaaaaaatccaaattagatgttcttttatgtggcttacttataagcattttgatatgaaagaaagctaaaccttagagattagatttgggtatttaaaatctttaattactgcttccaaccaatctcgattttttcactgcattttgactttgatcacgtgctttttgctaattctttttttttttttttgcaggaacttctaattgatccaaatccttcaagtcctgcaaatgttgatgattctcagctgtatcagcatgataatttggcttacaacaagtatgttaatggtaccactaattgagtatagagtgtgtcgctgtgctcgtagttccaatagtatattatagaaactcaataaaattttgtgtttatgcaactgatctacctagacttgtctaaaatgagcactcactttctgagattgcctaaaaatggtttgtagttagaactattattgattatatctttctaatgatcattttctacatatttttgttatttgggctcattttctctgccagtgaaactaattaagtatagtaatcaaataataattacatactaaaaggctgcttattgtattttatatgttatagaagttgctatatgaaatgaaatgagaaagaagaaaaaatattttattttcttatttatgttgtataggcattctctctctctctctctctctctatatatatatatatatatatctatctgtcttgtgatatacaaaatagataatcgtacatatacttaatt

SEQ ID NO: 259121 - DNA, 501 bp, Cannabis indica
cgtaggcagtcattccaggcatatttaagcccaaatgagtcatgtcaaaagagtaagaacgaaaactaaaacagggtccatgactgattgcagaacttcaaggcaaaaagtggctatctttcatatcagtaagttaagtagagttcttccacttaattaaaagacttgcttaaatcagatatacagatgaaattgattaaccccaatttatgatagtaatgaaatttagtaccaagaattccagtatagtaagagagaggaatatcagtggtatgttggattttgaaaaggccttgggttgagttgaggatggtgtactcttcccaaccggtcatcccccaaacgaagtctccttcgttgaaattaggatccccagattccaacactttacacacaccatacccagtgatgggctgcattcattcacattattcatacaaatattataacaagataagagttcaaaaaaaaaaaaacaagaaagacagaaagacagataga

SEQ ID NO: 259122 - DNA, 1289 bp, Cannabis indica
ctgagcgcaatcgtgttgtccacggtagcaatgccaagcctgctaaaatggtagcttccttgctgctaattatctgctgtaattccacacggctcaagagaaattcagacctgctacttcagcaccacaaccgacggctgctgctgcaactcactctcaccagcttcttaaacgagtcactcctcctgctttgtggcaacctccaccaccgacagctttaaagcttaatgttgatgctgccttggattctcagcaccacataatcagagttggtgcagtggtccatgactctgctggtgttgttcttgctgccatgtcgaaaccaataatcagcagctttgcttcccatgaaatggaagccaaagcaatcttccacaacatcaattggatcctacaattggaagtgccaattactcacatcgaaacagatgcgctcattgtttctaacgctttaactggttcttgtcctgcaatttcttctttcaaagacttaattgttggcatatcttctatcctttctccctaatgtatctattagtcatgttaagtgtaatgctaacatggctgcccatgggttagctagatatgctttagggttggatgaagcttgcttttggatgggtgatatccctcctccgatttacgatattattgtaaacgaactatcttttattttatgataacatagtatttctcctaaaataataataataataataataataaaaaaaacttatctttaaatgtcttaattttcttctttagggactgagatggctaatataggttctaatggcagaattgagtagatcgcttgatctcaacgtgattgaaattctcgcttctgtgtacaaatggatgtgattttcgatccaccaaatggaaaatccttctcgattgaagtgggtttctttgatacaattctagaaatcaagcaaaagatagagaagtaccacgccatacccatttcaacccaagcccttgtcttgagtaataatcaccaagttcttcgtacgagggcgactatgaaatcttccaaaactctcacatccgcctcattatcccctccgattatttataagaagatagcgtataaagtataatgatcaccatcgcctacattgatctttcatagtagtgataaattaatagtaaattgtagcaccaagcaagatcttggaaagcctaagacatgaccacatacgatacttattattattataactgatatattaatggaaaataacctattttcaatgggagaggtaagaaatttctcaaaaattaag

SEQ ID NO: 259123 - DNA, 587 bp, Cannabis indica
aggattctccgccccgtctctgtccccattaagggattttccgccccatccctcatagaaaataaacgagaatggggattaaaattcttaacgggaatgaggacaggaaacactccccgtcaattccttgccccgtatgcatccctacctcccatcaaacacatttttttgaaagatttttactgctgttacccacagatttattttattattcttttaaaaaacaatggaagaaagtcacgtttaaagagagggttaaatatgttgggttatatatgttgacaaaaaaaagtgagggttatattagaagtgtaacgcataatctacagcaattgcatgcctgccatattttaattttgcaggtgtaactccattttttttttgggtcagtaatcattagattcattacttattattatcccctttcaagaaaaaaagaaatcattactaattattattattataaatatataaattggaaaaaaaatctatggtactcgtgagttgtttttttaatttaattttcttttatgattatttatatagtaattttttaagattatttttaaatttctattttttttttt

SEQ ID NO: 259124 - DNA, 979 bp, Cannabis indica
atctagctcaatgtgctttgtccaagcatgatacacagggtttgaggcaagtgcgcttgcactcatgttgtcgcaccatataacagggacagatgatggtttaaatttcatctcttgtaataaagactcaagccaagcaatttcagaggccacttgaacaagagatctatattccgattctgtgctccatcgtttaacaacggattgtttctttgaagaccatgtgaccaatgtttccccaaagtatacacagtagcctccaactgattttttgtcatccggacagcatgcccaatcgacatcacagtaagcaatattgataggcagtctgtcactatatttaatatgaataccgtgatacatcgtaccttttaagtaccttaggaccctcttttttgcactccagtgtacagatgttggacactatagaaattgactgagtttatttacagcaaaagcaatgtccgatcgagtgtgagtaagatatggcattgctccaattacactttgataggctgaggggtctagtagttcttcaccatcatgaatgtacatcggtttcccacctgttatgggtgtcgggcttgccttgatgttggtcatctcaacacgtttgagtaaatcagcagcaaacgttcctggggatagatagataacagtagcatcaagaaaaacctcaatgccaaggaaataatgtagttcccccaagtccttgagttcaaaagctgtgttgagtttggtgatgaacaacatcaattccttagagtcattcccagtaattatgatatcatctacgtagattaataccatgatcacatatttgggtgtttgttgcatgaaaaatgaagtgtctacccgagaattgataatcttccagctaagaagtgtgtttttgagtcggtcataccaaggggactatttttatacaatgatttcaggagcttgcacatatggtctggtttctgtttgtcttcgaacc

SEQ ID NO: 259125 - DNA, 629 bp, Cannabis indica
aaaccatatattcaaaatcaaaataacattttagtttattttatatgttgttaatcaaaccaaaaaaaaatatatatttaaaaattatgagatgttattacaaaaatagaacactaaaatactaattagtttgtgaaagatattatctcatatatttctgttacttattttaggtagttaactttaaaaattataatttcattttcaacctatatattattgatcaatatacaattatgttatattttagtttatttatttttatagcagtttttacgttatcttcaaagatatataaaatttaatataaaacaataaaataaattgatatagaatacatatcgtatggtaacttttatatgtaaaattacaaacaatttatagtaatctatgagatttgttggcaggtataaacaatttgtttaagttatcagttacttcttcttttgatattttttatcaagaaaaaaaaaatataaaagaaactataagattatttttaattccaaaaattttatttggtcaaaacatttatggttccaacatgtcaaaatctatatatctatctatatatatatatataaggatgcacaagacaatctgaggtggcattctaagaattcatttct

SEQ ID NO: 259126 - DNA, 608 bp, Cannabis indica
gaaggacaaaagaaaaagacccatgatttctctaagctctattctgactcaaaaaaggaataggcctctggtattactctagaaaatttcaagcttcattctcattatttttgttacaatgataatgctagagatatgaaattttatgagaataggaattttgttatggagaaaaattttaacgtcattgctcataagtcgtttagggtatataatttgttaaaaggaagacaatgggtgaatacattgatcgtttttgatggctatgtggatcgaattgttaaggagttttatgctaatatcactgatgagtatctcgataaggattcttttatgtttggtaaagtttttgtcaggggacactgatgttcatttattgtgaaggatgtggttgaagctcttaatctgcctacgggaattgagccaactgaagttaaatttgatcgttaaaaggtgttcgggtatctcaccgatgacaatgatgtggaactctccgacacaatgcacatgtctcaacttacttatcatcatgctactcttatgagattttccctatccaattgttttccttgctcaaatccgataaatgtttcaaatgaacttgcttt

SEQ ID NO: 259127 - DNA, 1123 bp, Cannabis indica
aaatgactcaacagaggaatcctcttgaagaccccacagacccttactatcttcaccatggagacaatccgggcaatgttcttgtatctcagcttctcacgggacaagataactacatgtcttggagtagagctatgcaattagcaatctctgttaaaaacaaactcggattctatggtaccatctctacacccatgccttctgattctatcatgtataatgcttggcttagaaacaacaatattgttatttcttggatattaaattctgtgtccaaagaaatctcttctagcatattgtatgatgagtctgctgcagctatttggattgatcttaagatcagatttcaacaaagaaatggaccccatatatacaatttgctaaaaggcttgatgaatctgaaacaagaaaatcaatctgttagcatgtatttcacaaaattaaaaactatatgggagcaactgtctaattacagaccaacttgtgtttgtaatggatgtacttgtggtggtgttaagaaatttcaagaacaccaccatatggaatacatcatgtcctttcttatgggtttatctgactccttttctcaaatcagaagtagcattctcttaatgtaacctttacccaaaattaacagggtcttccacttagttactcaggaagaaaaccagaagggccataccaacagcaatactgaacaaaatcagcaactagcttttgctttccaaggtgataaaaccagtatcaacaagaaagatacccaaggaaacaaacctcctagaaagaatagacatttttgcactcattgcaacatccttggacataccattgagaagtgctacaagattcatggataccctcctgggtatggaaaaaataacaaggaatctgctgtcaaccagtttcaaaccagcaatgacaccaacaagtcccctatagataatcaagcccttttgccacaattgagtgctgttcattaccaacatgtaaagaccgcttagtttaatttggaaattagcagttaattacgattaattatgaaaattatttatagatatttaaataattatttatgctgttattattgaattttgaaatgcattttatgtcatatagtgatttt

SEQ ID NO: 259128 - DNA, 189 bp, Cannabis indica
tctatatgttccacgatatagatacgctataaacatttaaccatcgttctaatctcaataatcaaagatcccctatagatgatttacaccgagtagggatgaatttaccgtttcactcctcaatgtattttatccttaaaacacttagcttcctgtaaatgatatttcagtgaactaaaatataatcac

SEQ ID NO: 259129 - DNA, 648 bp, Cannabis indica
ttcttcacagtcttacacactatgattgagaactaacttgctatgggtgggcatgcactcaatcactaaaggctgaattttattttatgaagaacactaaggatttcgaattagagaagaaaagaagaagaagaagtctcaaactctctagttgtctaacaagaagaaaactaggtcaaaagtcattagtagcattagttgaataatgagacttttctttttattttatactaattcacttagggttaggattgatttatttggaataaaaaatgataaaataatggcaaaaaatggaactaagtggctggcccctagtgggtccatcactagttaaatttttaccacttttctcaaccatttatctatttttcacaaataccattttttgtaatttcaatcctataaatgtcaaaactatttatttaataattaaattaattatcaaataaaattatcatttatattatttattaattagactccacgaagtctcttaattaataaataaaccctaaaatcttatttcttcacaatcaagccgtatcttagtgaaaattcataaactagacataccctaattttagaattataattgattaactaaaatcaattaattgagtcttacaagcagtttgtctcaactag

SEQ ID NO: 259130 - DNA, 691 bp, Cannabis indica
ccgaactccaataccgaagctatcacagggattgaagctcaaagatcaatggctagaggtatttcgatccttcattgcatattcatttcgatatgtttatagtttttccgcattacatatcgtttatctatatgttgtatttcatatactatatactatagtcttacagttagtatcagagcggtttaatctttgccttgatttagtttgagtttcatatatatatatatacatatttaggtgttcatatatatatatatatatatatatttgttttcgttcgtgtatatatatattcaaattcatacaatcccgattatatatattttcatacgtatacacatatatacatttcatgttatatatacaaaaaaaagacacaacaaatttcggtatataatatatgtatatatgtatatatgtttatatatacattatacattgtgttttatattataatatagtattgttctaagcatgaaaacccactttgaaaaacaaaaaaatctcaaaaatttctcgaaaatattttcggacctgaaaaattttgttgattttaaagtctttgttttacgtgttttcgatgcatgaaatctatatgaatgtcttaatttttccatttagattcatttggaattgatttgggcctttttggtcgttggaattatattttcgatcgggtttgggtcgg

SEQ ID NO: 259131 - DNA, 2350 bp, Cannabis indica
gggtaccagtagtgcttaccactctcttgtgtgtaaatatcgctattggtccatataataagttttttataggagtattgctagtcaatcgcaaagcgacatgtctagagtgttagacactactgatgcccaataataattgttttatatatatactatattaatacatatttgtagatatattataaatttttattttaattagttgtataaatagttttttttatattatttaataaataatattttttattaaaaaatatttaatttaatgctatttatataagaaaaaaatctaattatattcaaaatatattgctaagtgtaattttaatttgactgtaatactttttatttttttagaaatatcatacatatttttttaagcaaaataatttaaaaagatattttttagtaagtgcaatgcaataggtaacataaacactttttgtattttattgtttaaaaagaaaacagtaatagaaagatattttttttagacatgtggatcaaataaaaaatgataataaagacattttcaatataagatacaatggtcacagatatttgtttattgcaatcacccatgcaatccaaaccagtaatcaaataaaactcctcagcactaaactcagtacaacggtcagaaacttttgcccaaacttccttcggattgccttgctgaacctccctcaacaaaagactgtgaacaacttggggatgaaatttgtactcgagaacatccaagaaatgatcgaattgagtgtcacggaatattttcatcatatttttaggaattttgttcttgatgttgttaataacactataagtgctagtagtgacacacttagacctgtaataatcagaagggtgtaatttgtattctcaatcctatatagatatatagaaacacaaacatagaaacatgaatttcgtaacatagggagtttcaaaactgtattaaaactataattaaactaaaaaaaaagacatttacacgtaacaactaaaccatatcaaaaaagacagtatacacgttactttacaacaatgtatatatatcatcatgaatatcacttaaaacaaataatgaatcataaactaaaaataacaaaaaataaaaaataaaaaatcacactccaataagccttcaacatgcataaatttattcaaatctataaaaatcaaaatcaacaccaagtaccataaacaattaataaaggaaaaatgattccgaagttgagaaatgaaaattaaccctaaaaccaactaatgtgaaatacaaacaaatctcaaatgaccaaagcaacataccagacctaaaacaaactaacaaataatatttttcaaagcacatgaactatacctaaaagtgataaaaccttaaataggacatctaaaaaaaaacgtaatacaaacctcaatcaaatgaggagcttgattctttccctttttatcaacaacaatatgagtcccctcaatttcatctcctttcacgcttttagatttcatcttagccggagcctttctctgtttcggtatgacctcaacaaaatcatcatcagagaaatgttcatctaacttcctttccctttccttttttggaaacagatttcaaacctgtttctaaaactttagggtgtttaactgcaagtttttgcacagagggagatggagaagaagaggaacaagtgataaccatttatatagaaaattgtagaagaaagaaaaggacatacaaaagtgggttgaggcttcaatagtagttaaagatcgtggggaatcaattttttggagagacttttttttttttgaatgaaatatcaacttcattgaaatgaattagcattctgaatacataaggttctgaagttcagaggaaataggaaaatcagaaatgctaccaccagcataaaatcgagactgcctagcaacataatgtgcagcacgatttgctgatcgtttaacaaaatataaattaacattgggcaaagataataaagcagaacgacagtcctgaataactaaaccaaaagtcgaccccatggtttgagagcttcggattgcttgtacagtgactaggctatccgtctcaaccacaacatggtcccaatttttggttttgatccaactaagcgcctctttgattcccaaggcctcaattactgcagcagagtaaactccaccaaagcagcctgcccgagcctccaaacaattgccaaaaaggtcacgggccacaatgccaaactcatattgttcttctctttcaaaaatcgctgcatcaacgtttaacttgattgttcttcttcttttaattgtgatgagaagatttaaaataaaactgaaaaat

SEQ ID NO: 259132 - DNA, 1366 bp, Cannabis indica
ctccacgagaacgagcatgggaatctggaactgggagggagaagtgttcatctgtggaatcatcgagggagaagaaatcaggggcagcgactgcttcgaatcctgataatattgcaattacatgataaaaaggaaatcaagatattagatcctaacttgatgatcattatgttacatcaggatcactgatacataatgatcatattttattccttaaaattttttgataaaatacaattgaggcatttcttgaaattggactataacttggatttccaatcaggatcactcaaatcggtcgacaggctcaccaagactctgaaacctttcttgtccagccatatcccaaatctacataaatgaggatggatttaacattaagttattttagtaataaatatcccaaattttacataatgcccttctaaattaaacaaagcttaatcaatataccaaagatttatgtaaatcaatcataaaagatctaacaacaacagtttaagagaacaaaaaatctttctctttgtgacatgaactgtatttaaagagttctgttaatgcttaaaaaactgccaaaacttttcccatctcaaaagtataatagataaaaccagtattgaagggtattatctatgccaaattaaaaccagttaattcaactttaattcatcgagggcataagagaaaagcttatttccttcaatttgctaaagctatacagacaagaaaagagtcaacactaacagtaataaaaacaattaaacatttacaaataaacatcccccagaacaagattgctcaccaatcaaaaactcaaaactgattatcgaagaaatgtattcgaaagaaggaagagaccaacctacagtgtgaacagcctctcttcaaactgaccctctttcgtcaaataatcaaccttaattgtcgccttaaaatgattactaaactcagtcggtgaaacacctacgttctcatcaccgaactgatgtccttacaacccaatcgacaacaaatcgattctgaatcaaatatagatagcttaatcgtatcaacccaatggttagactcaattgaccattctgaagctcaaatgaatcaattgatgacaaatcaaaatcgaatgctcaatcgtatacatgaatatatagagtaacggctgtacgtatgtcagtcgtatcgacacaattgttgttcgcctcaatcgaccattccgaagctaatcaatcgacaacaaatttaaatcgattctacaaaaattgaatgcatcgttgaatcaatctttaaacgggagatgaaaaatgcaaatctcaattgggaaataggtactgaaatcatacgggagtggggttttgattttggtatcatt

SEQ ID NO: 259133 - DNA, 1738 bp, Cannabis indica
agacccgccccatttgccattcctaattggactagaaaactaacccttttatgtccctggctataatgtccaacacaaaatggactaggagtatttatttagtccaaccttgatggacttaaaagaggatttttgtagtagtgaaagaaagtcaacatcttgcaggccaaaaggaaggcagagatagttgatggcacagttgtggactacctgcccctggctatgtttttggcgcccaaggtttggagcgatgtggtgccttttctatagatttgatagatctcattgccaccagtgtgtgtgagttaacagtagaaaagtaggtagttacctacagcactgatcctattatgttggcacacacctccaaacaacaagctattttagtaagtcttgcatatgtaacttgttgttttcctttagtggtttattttatgctaacttttctttatctcgatgcaccaaatggccatgtttgctgagaggacttgccacgaggttcattccatggctattgaattgtattaagctaaggtcaaaaaacaggactttggcttcgaaagtagaagaaatcaagattcaagtcaaagacttctggaagagggccatcaaggagcctaactagaaggttgaggctatgtataattacttcgttagcaaggtcactgaatcccataagaaagaaatacaatagttatagaatgagttacccaactactaaaaccaaaatggaatctctttccaaggaaatccaagaggccaataaacttaataaaattttggaggcccgggtattacagaggaacattgatgttagagataaacagattaagatcaacgatctgaacctcaagctaagggatgcagatgtgaaactcaaagaagaggatatggaatctttaagttggaggggaaaattgctcaagattgagacgactatattgatagaaaaggattggcagaggagacttactaacagtgagaaaattctgctaaaagataaggaaacctaggaagctgaaacacacaaagcctttgtggttgctagggctttctgtaagtcagctgacacttatcgccaacatattaaggaccattaaggagtccacaaaggtcacaagggaatgaagggaagctgcgaaggctggggaggcctaccgcataaaaagcgttgatatagcccttatgagcactctccacctattatggaagagggatccttctgcgctcaaagttttaggagaggatgaagcggagtacttggcaacggtacatgcttttaagaatggcccatatcctccacctaactccaccatctcatgaagaggctgcctctccaaaaattgtggttgtttcttttgaaattgaagcccaactcaaaataggccaaactttagctcgagaccaagtctaggaccagactcatccatgaggttttaacattcccttctctttttttttcctttttttctttttggtggcccatggcccccctttggtatttgcagaggcatcttaaatgccttaaccatgaggttatttgtaataactttagctttttcctcactcctttttctttcatgtttttacatcactttgcctctcgtaaattcttgttatttgcataactgctttcaagagactttggatgtcttgacattatggttctaatggcatgaactctaaggcttaagcttcaattaggaccgttttaagttgcaggttatgtgtcccgcgt

SEQ ID NO: 259134 - DNA, 5616 bp, Cannabis indica
attgaaataatttttatatgttattggtatgattgtgctatgagtatgatgtcagggttgtgatccctacatatatgtaatggtttcgtttagtacaaatatatggtatatgatatagctttccatatatggagttatttaaattacaattattgagctaaggcaaaatagtggggcgttacagatctctcttctcccaactctctgtatctgatttttctctcaaaaacttcatctttttctttctcttttacactgtgtttttctctctctttcgaggtgaaccaactttgaaaacaacctccctttcttttgggtatagaggcaggcttacatacatttgtggtcgagagaattgaggtaacgatttctaaccgtctttgtgtctgagctggaatactgttagagaaattagttggtagttaattgactgtaaatataaagtctgttacttgtttggacaggttggcacagggtggatttatcaacatatggactctatttaagagagtaaacgatcgaatatatttaactaaagcattactcaatgaaaaactctttagctaatctatgggcaatgatattatcatctctcccacaatgagcaagtttgaaattgaaattaagtgagcctttcttgatcctccatgcttcatgaatcggtatttcaaaataacaatgacaatggttgggtgacattcaaacagtccgcataaattgtccagtttggatcgtttaaaaaactctttcagtttctaaagagctttttaaggggcaattattatgcccatattttgagccatgaatatggatatgacacgtggaaagctggacacagaaattgtggaaaactaagtaataaatgaattgtctctgagagataattaattacgagcaatctcacacttgcattacgcactggcaataagaacttacaactcattgacccacatatgctaagcaaataagcaaagtccaacttatttcaaaatctttctaagtctaagagtttccctgaaaaggctacagcgagaataagcatattaacggacatctcgtaaaattcaaccagctatccttgaatatcgttgaaagatatgcgaaccatccttagaatgtgttacctcagcaacaaaagaccacttccatataagatcaaaagacgattttcagcaattattttattttattctcatgttataaacatgaaacgtggggattattcatgtttcatgaacagttacctagataaaatcgaaaaaaataattgtcatagtaaaatcccttaaaatagggacaaaatctaaagggaaagggatcgatgatttttgagaaatagagatcctatgagattgagtaaatattcatagttattcctctgtaatccatatacataactcataaatactcagaattaataataactcgtaaagtatataactcgtaaagtatatagattttaattataaaattatgtaaaaaaatttagtgtttcatatatatatttattaataattatatataagtaatttttatttataaattaattgttaacgaaaatatgaattaatgccttatattgttaaaaaaatgaaccttataatatataatcttctatttagatttatatctttcagtactagattgttcttttctccattcccaatttctcatgtttcataatttggtgataatttttttacattacagtggaagaaagttcttcaatttcttattataaatttgttactcaagattttgatagacataattgatttgatgggtctaattatgtttatgtaggtaaattcgtacatgatatttttctcctcttgagactaattctttgagtggatttccctcattattcttagcaaaagattaaggttatctttggaaattagatttcggtgaggaaagcatgaggaggtaagaaaaatgtaagggcaaaaaaatatagaaaataaaattaaaacaaaaaatcaatttttgtgttccatataaaaattttattgaatcaacatttttcgttataattctttccacaccaaacatgataaattgaactttttttttcccatatttttcttaccactttctttcccagccaaaatatcaaacttctaaacataccctaatactatgtttggtaggaatgagagtataatggatgaaaatttgagagtaagatggattagagaagatattaactctccattatgtattgtttgatataaataatgagtaaaagaaaatattggttcttttgaatggtacaatttacaaatccaaaattacaaccaccaattcctttggtaaaagctttgatattgtgattaataattctaattgatttcagaaattaagctccctaattatgtgaaaaattgggccttaattcattcatgatacactttttcacacccccaacaagcttattataaaaggatgttaacctcacatttccaaacaaacactaacaaagaatatatcactctacaaatgagacaaaatttgctcataatttggtaccaatactctcatgattttccacacaatatcatgtgattccaattaatgaacttcagtattatatgttcatgtacttcatgtgaccaaaaaacaaagtcattgctttttgcaatctttgcagttgatgaataagataattaagagaataatagtacatatatcaaacatgcatagatgtacggatgcaaaaacaagcaaaatgtagtaatgctttttaaattaataagaaaattacataataataatccagttgaaattgatcatgaccaataaacaacttgtatctggtgattaaaaaagcacaccattgcaagtcacatggttgtagtttcgttacataatataattaaccctataaaataaaggaaataaccatatgtagtaactagttagtatatacatatagtaactagtgactagtgatttttagcaaagaaatgatcgataataatgatcaccaaaatgaccaaaaatctttctttgcataaaaactgtgtatatataaaattatcttaattactctaaaaaaaaaaacttgtcatcatgactgtatatatgtgtgtgtttttccttctaacccaacttattatatatctacttattaacctaataaatatctctcattataatgagattggatcatgagagaggtatatatataataagttaaggttaaaacattattatgtatatattactttgcagaagaggcttttctccaccttgcaagtcgcaatagaaaagtcaaaacttctgaagggtcatgcaaagagttcaaagctttggtctcctttggaatggacgacacaattattggaaacccttgtcctctattccgaatggcctgtaattataatataatataattaaatataattaaccacttttcattacaacttaaccaactccaataatctataatactaactagattactatttcccattgtagtataattcttaattaattagtctatatgtggaagagtgtatataaattaatacatattctaataattaggctaatataggttattatatggaatttaactatatgtttcaaaattgatgtgtttgtatcatcatacaagatatatataaaaaaaataatgtgcaatgtacatgtacgtgtcatacatttcaatccactaatgtatgaatatttattatttataatacacttaattttagaccttgaaaagtgtaggtatataagtttagcttgcctatgcctaaggctggccgtgaatgtgatttatgcattatggtatataaaaatcaactgtgacacatcaactatactggtaataacaatataaattaatatagtataattagtatatatatatatatatataatgtataccttgaatgcgtcttcatcagtacgatcatcaccaatgtacaagggaaggacttcactagaattggtgaagcctaagttgtcaagtagatagttaagtgcattgcctttgttccactctatagaaggtcgtatttccaaaacctacacacacatattatataactagtttagaaatacttaaaaaaaggaaaaagtgatcactaaaatatgtgtgtatatatattaaagtggatctagtaattaatgtaattttttattttttattttcaaaaaatttggaagtaaggccctctagtgagtactacttattttaacttttaaattaatcaaaacataaagatgataacacaatctgttacaaaatctccccaatgaaccataattagtactacttatttagttttggaagaattcttttgaatattatcatggtcttattaggattgaggagaattgaagattggaatatgtagagaacatatattttgagttgttgcttacaagaaagacaatttaaacaataacaatactacttaatattgttcaacatttaaacattgtaacattattaataaatccacaattatgaattataaaattttaatttgtttttcttacctttttacccgaagttaggtgaaaatcagggtagtttaaaatcacagactttactatctcttccaatgtgccataatcctacatatcaataaaaacaaaaatataatcttaataataaataaattaagtttatgcaattattactttaaaattttgattaattattacctcttcccggaccttgcgataatgaacagacacacaaaatctgttatcttctacattcgaaccttgaattattttagttctttcttgcaacagtgccaatatctgtgtcaattgtacacatgaattttttgaattgaattttaatgtttggaataaaattaattaatacaaaatatagcaaaaaaatccttcacaataaattaatttacctcttgcatggcaggcaagaacctttgtgcaggttggaagagaacatcagtgccctaaataagaaaaaattatatatataagaaaatatatatataatgaaaaataaaaattgggaaaaaaaaaaaagagaaagacctttttgtccatggaattattgttgtcactagacttaagtggctttgctggggccataatgtccattccatgactcccagcataataaatattacttagctgaacgaattccttaacctaaaattattcaacaataaattaaaatcgtaataattatacgaaagattgtttttttttcaggtgaatttagttgtggaattactcataaaatcattaattataccttatctctgcttcttccactgattattgcagtcggaaaatattttgcaacttctcgtacagccgtacgcatctaagaattaataattattaataattgtcaattaaaaacaaataaaattaataataaaaagggtcaatgcttaaactaatcttaaacaaatacaaaacaaacacatattcctagaccaaaaatttagtatcgtgtgagataacacataacaataatatacataaaatattatatagtcaatataatactttaaaaattataaccaataaaatgatatgaatggcaaaaaaattgtgacagtgacacaaggaataatcaaattaaattaatgtatatttatatgtatatatata

SEQ ID NO: 259135 - DNA, 964 bp, Cannabis indica
ataattaagtacggattggattcggttactttttgaggtcaaacaacatccaatcagcgcaagtgcatattttagatttttcaatccaatccaattcgcacaagtgcagatatccgcattttgcggattggattggattggatcgtgcggattagattggatcagatactttgtgaacacccctactagcgactagacaaaatacaaccagccgtcccaaagactgtaccgtacgctccaggcctaactgccccggcatgtataatcttcatccgctcactctcacggctactcaaccttagccttgcccttacctacatgtgcaaacaatatctgtgagtcaatagacttagtaagaaaagcataatcaataacataactataacctggattataattaggcgcccatacacccaaccataaccctatcctcgtgtccaacacggtactgagtctagaacgttcatacgacagtactatcgaccataatatcagactatactcaatactctagtcgtaccgatgtgatagcatcaattagtacttagccaaacatatactgtcgatattcagtgcatctctatgtacactaataccgctataaaaaatatattatctaataggcattcataaacatgcacgctaaacatgtaatcacatatgcatgcatatcattatactgatcttacctcatttccaattttagttatatcggccaacctgagtggaacagctgctcgacaatttacaggcccctaaatcacattattcgtaaaactggtgagtgacatgctaaattactttttggggacttaaacttgaatctaaaggtttccctatcaacgagttattgaaaatcgtgaataattaaaacttatagttcattgtttgtaagcattatataattacttatagttgtatataattttattaatattgttgctccaaaattcgcccaaaatac

SEQ ID NO: 259136 - DNA, 628 bp, Cannabis indica
tatctaaaccatataggtactctcgtcctatatcgaaattcagttctatttcactatagcataatcgacattcacttctcaaatctcgcatcgaaatcatagacagttaattaatggttagacaattaaaagtaattaagtgcgaatgaaataaaatacatagaaactgagagaaaataaatcatattaaaaccataaaacaatgtcaaacaatatctatctagatcctaatgaaaattcctggccatagtaaccccttgaaattctgtaaaaggcttctggaattccgtgtttcataatcattagactcatgcaatttgaacgattccacctctcaaattctattttatcatcatgagaactttccttagtgagaggtgcatgttgttcattccttagtgcatggtctaaatctatacatcctagaactataagtaagttcattttctaatccttgaaattggtctattaagcataggaatagaattaatattagcagatattgagacaacagaagatgaactggttgagtattgaacaaataaaattagctcacattaatatgcataatatgcataataaattcaaaaattagttaatcccatctcaagataccaaacacacatta

SEQ ID NO: 259137 - DNA, 492 bp, Cannabis indica
tcttagggctttcttatttggcaagtgtccgagggggcctctttccagcgttaggggacccccattccctttttgaacattagagtttggtttggggcctgactgctggattttctcgatttttttagaaccaaaatgtctgctttcgcatccggttccaaatcttccaagaaaggagaagttcgtctggccaccctcgaggaggtcatgtagggtcctgtggcccaggagaattataagtcccgcgccaacggatgggaggcggcggagcttcgctccacactgatctgcgctcaccagctggaaaagattgtggtggtggcaggcatcaagccctcagtctctgggacctaccaccagctgcctcgggacgaggagacacccaaccacaattacgggggcttcggaccttggagccagacccacctgatgtctagggctatgctccctctccaagactattttataaactttcttgtttttgttggcctt

SEQ ID NO: 259138 - DNA, 926 bp, Cannabis indica
ctttgggagctccaagataaaaggagcgagagtcttcctgctgcattaggagtaagctatttttatcttccttcacacttgaaaggatgttttgcttattgttcaatattcccaaaaggttatgaatttcaaagagaggagttggtcttattatggatgactgaaaatcttgtaatgcattcctgggggaataaaagaatcgatgaagtgggcggtgagcattttgatgatttagtatctatgtcatttttgcaaccgagtcagtggaagaaatcttgttttgtcatgtatgattttatagttgatttggctagaactatttcaggaaaatacagttgtttattggagcaaaatgacaacattgataggcttgagaagaagacacatcgccttggatgtgtcaaggaactttattttaagatagctagcggtcattttggagatgcatgtgtgcgagcctctttacaaacactgaaattagaaaattgtcaccaacttgaagctctgcccaatgatatgcatcttctcattaatttgagacatcttattatcagtggctatagcctagttgagatgccatgtcaaataagaaaattgacgaatctccaaacattgacagcttttgttgtggggaagaatagtggcgctaaaatagaagaattggcagaacttcatagtctacatggagagctttccattgagaagttacaaaatgtggttaatattacaaatgcactgaatcaagtaaatgtactggagaagaatcaacttaagaaattgaggttgaaatggagtgttgatgatgttgttgttgatccaaaacatggagagggtgtgcttgaaatgctttcacctaacacaacattgaaggagctcgagattatgtactatccaggaaatttttttccaaattgggttgggaatga

SEQ ID NO: 259139 - DNA, 706 bp, Cannabis indica
aaccttatttcatagtgggaaatattttagaaaaattaaatatcgggatcgagcggggtaatggaaattgaccattttacccctagctttagaaatgcttaggttataacctcaagggtattttagtaatattgtttggggttgggtggctgcctagaagtgtggcacgtggccacttatgttcagccaaggtaaattgagtttttcccaattttgatttatctcattttgtaaaaaagaaatttaagaaagaaataccaaaaataagaagaactctctctctctctctccttcctcctttctctcttcgaaaccagcaaggccaaggggattttctattgaattttgaagttttcaactaaggattcaagctaggttcaagtgaggtaacaccctagatctttggtttcttgttttaaagctttttctttggttgagtttatgaaattgtgttataggagctgttagagtttgatgttggtttggttcgaattctagggttaggttgagttgaatttaggccatagcagctggttttaaggttattggttggttttatgcaacttcgaacattgagttcaaagctttgagctttaatggcaaattgatttagaatggtttgttctgtgaaatactgtctggattttgttgcttatgcattgtataggagctctggaaggtttcatggcaattggtggagagttga

SEQ ID NO: 259140 - DNA, 633 bp, Cannabis indica
atatatttattattatttattatttataaatatttattatttttttttattctaatgggtattagcggcggagcaatagcggcgggaccccgccgctattgccctttgtcagtctagaaacaccgccgctattaatattattagcggcggaccctgtttttggccgctaatactattaatagcggccaagcaatagcggcggaccaatagcggccgaggtccgccgctattaccctttagcggccaggaatgatactaatagcggcggagaggtccgccactattagtgataaatgttgtagtgaccatagtaatatatatctatggcatttgcatcctgttcatagtcgttttgacaagatcattttctacaaagagaaaatatgccaatattcacttgaaaataagatcatctgtattcaaacatatggatgtacattcaggggtgggtatgagttatcgttaaattcttaaaacgatcactctagatattaccttatgcaaagaaatttgaaatgtttgagaaattttatgaatttttagcatggtgaaaataattatggtaagtggttaaagatcttgcgaactaatagggtggggaaatatttggttatgctgttcaaagatcattaa

SEQ ID NO: 259141 - DNA, 1018 bp, Cannabis indica
tcactcattgcacgaaaaaagttgaatgaagtgtagatagaaggaccacgttaatcagcttagtagtgtaaaaattttaaagacaaaattattaattattctattatatttgcataaaggtaagttatacgtatatagctatagatgctaattaaaaaaaatagaattaatttttttttttcatttgataattatacacttgttatctttaaatagtttagagttgacacgtgttatatgactgggacagaagtttcaagaattctgcctcaaggacccaaaaaagcacatgttaaaaatagacccgaagtacccaatctgtaatcttaaacctagtacacgtgaagtcatatagaccaatttgtaaagattcattcattttatcattaacttactcgagaagaaacaagagtcacgtgtggggggaatttaataagcctatattaatcttaaaaatatggttatttactagcgttattattattttaacacgtttgatgtaattttaacacattatggtggtaaatggtggatgcgggagagctcagtttgactaagcagaacataattgaaaattttgatgatcttaaaggaaaaattgtacttggagctgaacatgaaagttatagatcttgttctcagctttccaaaatatcttgaatcgtctgattttgagttgtattgaaaaatttataataaaaatactaatctgaacatgcgacagcataaacccaagaagtagcgcccatgtgtcacttaaactccgcttaggcgctcatatccgtatggtgtccatatgaatttcaaaaattcagtttttaagtttgaagttaattgtatttttagggttatataaatagcactttcagagtttattttaagaagttttccattaacttttttaaaagagattactcaagagaagaacagaatttacatctacatctagttttactctttaaattctgaaaaaccgtgtttttgcaaatgtcagttgtatataagaaaatataaaaac

SEQ ID NO: 259142 - DNA, 787 bp, Cannabis indica
aactggcagatggcttctggtcttattaatcattcaaatgttgcattgcacctacatgaggaaatagaatcaatctcttttgttgaaagatattatgaacttaattccaccaaaggaaagagttataaatgtgacattgctgtggttgctacacctctagatgaggtgaaaattcagtttactcctcaagtatcaattcccaagagaagtttacagcatacctatgcaacttttattaggggccttctaaatcctgtaagttctctaacattcttatcaatccttgtgcagaaacctttgttttccattcattttattcaacattatttctattaaaattaatccttgatgttttgttgttccgaaggaatatttcggcctggattcggtatcaaaaattccagaattagtgggaacgattgagcatccagatctttcattctcaagcatttcagttcttaagcaatatgatgaaaaggatatggcgtacaaggtcttctctcgtaaacctatgaacgatgaattactagatagcatcttcaggtactatcaactagccatctcttattcattgtgtgggggaaatcatttattttttacgttcgggagactgctgcatacatacattgtatgttttaattgaaaaatcttaacgtactaaataatttagaaatttacagtacctggtgtgatgatggcattaccttaatcatagtttgctctgaaaatgttgacaattgtcctcccattctgtcttagcactggcttccacttatcaaatatcaat

SEQ ID NO: 259143 - DNA, 522 bp, Cannabis indica
cagttctcttcattgaaatcacccactatcaagccggctacttcagatactgttggcaagttgtattgacgaccatcttttgtccgagtacttaaaagtcgtaaacggaacgtacattctggttgttctttgaatctatcccttgccattctaaaggatttcaccaaactattatgttgatccaacatttgagataattgattgacaatatcatgttcaatctcagttgttggcttggttttttgaattgtggcgattctattttctgtctcattttctgtatcatatatgtagagctgagcgaactgtggattttttccatgttctggcaacaacgaaccaatgtggtgataattttgaccgctcatccgaaatacatacgaaccttgtgattgattgattaagttatcgattcgacctcccattgatgtaaacgcaaacattgagttgtaagctctaatattttttctgaatttaatccctttttggcctgaatcaggtccgaggagatatttgagcaaa

SEQ ID NO: 259144 - DNA, 552 bp, Cannabis indica
ccaaggagaagatcgccataggtgaaaggcaacattacaagagagaaataaatgctccatagtttcactttctgctccacatagggggcaactctcatcctctaacaccgaacgaactgggagagccttagacagaatacaccaccaaaggactttgagtctctctgggattttactattccaaagcttgttccacatagagggagcaacctctgaagggttcgaactatccacggtttgggccaaataggcagatttgcaggagaaccgaccattactttccaaggtccaaaaccagctatccttgcctcgaccagcaggaacaccctcactcaggatagcagagattgtttcttgattaaacaaatggtggagcttttggaaattccatccaccattctgtaacaggagctcggctaccttggtctccctactcacgacccgcccactaggttggggggtgaatccctttagatgcgcaatccaagggtccaaccaaatgttggtatcctggccatcagccacacgtttacaagcccctttacgaatgac

SEQ ID NO: 259145 - DNA, 644 bp, Cannabis indica
acagagctattactactcacagtctctgttttgttgtccccactactgatcgctgcccgaaccgacccacgtcgcctgagtttcgacccagaaaccgccacgcgggtctttcttctaaggtctccatctttcccggcggtggcggtggagatcgagctgaaactccggtcgccggagatgttggggttgttgttgagaggtgtagtagtgggtttcaatgataacatgtcgagcagcagaaagtggagttttgagaagaaaatgagttggtcaacgtgaaagtaccatacaagagtcaaaacgacgacgtttgtggttgagggtgtcggagaatatggctgtctgtctctgagctaagagagatgactatatgttgtagttgggatcttatgacagtggtggtgccttttattaaagttctcgaatagcacgtgtaaatcacgttgtattgggtcaacttgttttttttttttttctaacaaataaaaacaaaaacgacaattgtttatttgtccatttttttttttagtagatttatgttataaatagttgtgtttaattttttattataaataaatatttaaggttaatttttagagataatagtattaagttataattataaaatttttgtaggtaatttg

SEQ ID NO: 259146 - DNA, 553 bp, Cannabis indica
attaagaattgcttctgacgaaacatcttcatttgatagattttgtattacaactgttcgtttaattattgcatggaatgcaggcaaaacttgtgtgtgacttgaatgcaacctctactgtggaaattggagcccttgattatgacattataatcaactcttatgaaaagatcagtgcaaatagtgcaaacttcttctatactgttccggaggatcaagcattactgattttgtctcattgtgtatacgatatgtcatctacagagttaattttaaggcatagttcctatggattgttactctcgtttctcgaatttgctggtgaagttctcagtcatgtagaaaatgatctagaacctcctccgaagaaaattggtgatcattggacagtaggatccattaagcgcataataaacaagtttctcttgaagcatctcgggcatgcaatgaagggagatgcttctttgaaaaaggtatgaaatcttgtttagccttttcttgtatggagaagagctcaatcactcagttttatgataaattgatgcggtttcag

SEQ ID NO: 259147 - DNA, 925 bp, Cannabis indica
ttcccatactttcccgatcattagctcgctgagtactttctcctctttgagttgatcggctatgggttctagatcacctcgaagtcacacttgcttcttcacgctttgttctttcctcctgagagcggtttgtcgtatttcccccattagggtacgtacgagtcctcgctctatgtttgggaagaacgttggtgattcctggcaagtgatctccgttatcccggttaagttccaagatcctcctgattttcatgagggatttctcgttcatcagtttctgattgtctcctttctcgctgttcatcctgattcttagggggtttctcattttccccgggttgttcttcctgggcctttccctgtcttctggtttgtgagccacgaggttggcctcatggtcttctcactctaaattcaggttgattttgagcgtttgtcccctgcgccaccctggctgaggctgcctcacgttctaactcagtgtttcgatgttggccctcttccagacgatgtctcaggcagcaactttccatttcataagttctttctcccacagattgggcacctccacagttgagctcttcatccctcgtcctgggattctgaccatttccacggtgagttctcctcgagcgggttgttcacgtactaggaccaacgttggtttaagttcttcggggatgtgtggtccgagcactggggctaccctcaggttgagccctcctggaacgggtagtacttctagactgcgaattggtagatattctggagcccatgggatctttttcaaaacgatggttagttttctcatgtggggtgttaatattctctggattttcagccatgaaggaaaaggtttttctttaaaagaaggcaggatttttttttaagctttttcacagaggctctcagtgaaagcaccaaa

SEQ ID NO: 259148 - DNA, 1086 bp, Cannabis indica
aaaaaatactacactatttatttcttatttaagtgcaaaaaaattcttggataaaaaacacacttgtatgtaaataaaatttcacatattttggctaatattcaaactcatatttcttttttttgagtgtagtgtaatggtattttacaatcatttaataacttaaaggttctagattcgaatccatgacctcttcctttttcccatccttcctagccttagtggctttattcaaactcatatttcaattcatatacgttaaagcacatcacgaataattcggctcatggtgggcctaggctttatcctcaaaatatgaacacagacgacccgactcatatttttatacgggtcgggcttataaatttaaaaatagacttcttaaaatatggatggggctcctcatatgtacaactcttttttttttttttttttttaacatcatatgtacaactcttagtattcaaatgataacgtttaaaaataatataaaatggtctctgagtgaccctctctgttgagcgatagtcgattacggactgtttgatatgttcgagtttctgattctgcttggcctgatggtgatgggtgaaaggcctgttgatgtggatgagttagtgaatatgactagtaagcttggtgttgatcatgaggaggaatgggaggagaatgaggatgcagcggtagcgttcggagcgaaatcgttggttgggaagttaatctctcataggaacattagggagaatttgtttaccactatattcaataggatgtggaggggcattacagattggactgtcaaaatgaatgaagatgatggggaagagaaactggtccgggttacgtttaagaatgttgaggatgcgaagagtgtgttggggaagcagccttggctcttcaatggaggtcttttgattcttgagaaatggccattgtcgggtaattggggggatgcacggcttgataaggttttgtgttgggtcaaagtgaaaggattgccgattaagctttttgttaactcaaacttttcggtctccttgttttgatgattagcaaatatttgattattatttgttactaatgatt

SEQ ID NO: 259149 - DNA, 865 bp, Cannabis indica
gaaaaattagtattcccaacgatttataacaataactggaacatgcgatggttttaattagaattcgtgaatttattgggcccttatacctcacggttaaaccgtcgggaataagggcccattaaaaaatcgtaacctacttctcgccatattttccacgtctccacctacttctttcctatttcccacatgcccacttatttcttatcacctatttcttctccatttcccacaccctaaaatgaaaatcttaactctccaaaactccacccacgtctccccaccatcgccctcctctctcaccgtcttcctccctctctcgatctccttttcttctcgtctctctcgtccatcgatctccacccaccccttctcctgtcggtctccctctcctctccgtcgcatacgtcggaccaccaccacttcccgttggtgtccctctcatctcggtctcatacagaccaccaccacctcccgtccgtctccctctccaagctcagtataaatacatttatttatttttatatatatatttatttatttattatatatatttattttgttattttataaatttaatatgttttaaagttagttgttaataaaattaattagttgtttattttaatggcagaaaaaattgtatttttttgtcttcatttttttttacattcctggcagttaaaaaatcatcgcctataatagggtataggtgacggttttaaaccgccgggtagtccacattagcgatagcgacggtttttaactgtcgcctattttgaccgttttgcgacagtcgtattggcgacggttataaaaaccgactgtttaaaaacgtcggaagaaactatttttgtagtagtgg

SEQ ID NO: 259150 - DNA, 806 bp, Cannabis indica
tacattgagaatatatataggcaaatgaagacagcccagaaaggcaagtgggccgaaatacatgggccagaaataagtgggccttctaaacctaataaactctatatctaaattataatttaattaaataaaacaaacaattatttttaaaacacaaaattaaaatttatatttactctatattcgcgcgcctagatttatagtgtatcaaataaaacacaataatatattcatgttgtaatgggaatattagtggacccacgccacacggtattaaaatggaaaattttattttcaccaataagctatccattacaatttttgatgtctttctaaaaaagaaaattaataatgttaatcaactcattatataaacaaaccaaaccaccccaaacctttcactgccccttacaaatacacatttattagtttagatatattaaccgtgagttgtgggtggagttgagagatagaactcctcctccaaataaaaatatagttcatggtcatggctagtaaaaataatagcaacattttctcaatgggttctttattattcttcttctacatcatctttaatctcttccaatattccttttcagaagctcagaataataaggctactccagccatgtatgtgtttggtgactccttagtggatgttggtaacaataatcacttactcttgtctcttgctaaggctaactttcctcataacggcgttgattttcctggcaaaacagctacaggaagattctgtaatggccggaatacagcagattttctaggtatatatctataaatgt

SEQ ID NO: 259151 - DNA, 529 bp, Cannabis indica
caaaataaaatccaagatgtcccgagaccgaacactccaggctatgtttgtctcgacatgaacaatcatcatttcgaaatcagaatttcaatccagttttagctttttgcctttttctcaacctacacatgaaaagaagaaactgtgaagccaatagattcaattaagaaaagcaatataatagataatatattgctaacttgcatctaggcgcccacacacctatccacaaggcttatcagatgattaagaacgttcttaactaagatacgaccattgtacaactgtagcacatgcactcagtactgccactgtactagtattggtagggtataaaccgtaccccgagtaccgctaagtgttgtaccacatgcactctgtaccttcccataatagtgttggtaacaccataatgtattccttagacatcgtacactataccaatgcactaagtaccgctaccgaactagtgttggtagtgtatgaatcacaacaagcatgcatatatatcacatatacttacatttgc

SEQ ID NO: 259152 - DNA, 1212 bp, Cannabis indica
cagaatgatcgggatcgatccataaacctggtgggtaaaagtccacttagcgacgttgtgtgccgcaaagttacagttcctactaatattagaaaaattacaacacatgataaaaagagaagattagcacaaaaggagacatagttatctagagcctaatgggacgccttcccattgagagcactaattactagtctcgagtcactctccacaataacataattatacttcttatctaaggcaaccgacaccgccaagcaacaggccgccgcttctcgcaaagagcttctgagaattccaatcgggatgtgtgaatagaaaccacattccctaggtgattcctagcaacaacagctatgcacatactctccaaacccacacgaacatcacagttaaactttatccaatccagaggtggaggcgtccatctatccttcacaggtggcgaagggctaggcaagagagaagtatgtgcctctgcaaaaaaagaacaaatgtggtcaagacatttaagaatattaggggagcagttattgtgtaccacgtcgttgcgcattctctatatattatccacaacaatggaggcataaagaaacacatcttctactcggataccccgattattaaggctccaaatgaacttcacccaatcccaaactcgaatactagtgtcacacacagggaagatcccccacggagaagaacgccataagtgcatcgcaacatcacaagtaagaaacaaatgttccatagttcctcacccatcccacacaacggacagctggaatcttcaatctgaaatcgtctttttatcactgctcgaacagggagagcttgggaaagaatgcaccaccagagtaccttatgacgttccattatgttactattccatagcttgttccaaagggcaggggcgacattacactggggagctctctccatggcctgggccaaataagccgatttactagaaaaacgcccattactttccaaggtccacaaccaactgtcttttcccgaggccccggggggggggggccactcttccttagatatctataaaaattgtctcattaaaaactttactaaaaaacttggtcaaaagaaaaaagtgtagtgtaaagtaactccccctcatataggcattcgtgaagatcttctaatcgacgaattctaatcttgtatgtcgtattctcaaatgttgatgatggt

SEQ ID NO: 259153 - DNA, 515 bp, Cannabis indica
attccataaaaatattattattacaattgtaatgcaattaaataaaacaccagcattactaagtaataaaatagaacaaaacatcacgaaaataaatatacaaaacaatcctatataattttttaatatatattatataaatataattgaattagatcgattttcttttgacatccatgattgtaattgaatattcaattttttataattggattaaattaaattggttcgattcaattagattagattggacgggatgttaagttgcgtacccctaacaacaatgtcaaaacaatattattatgaaacaatgaaaaacaacactcagtatatagttataaaacaaatcgtgttgttttcctatagcaaaagcattaaaataatatatttttttcaaaaccaacaaattaacaacactatttttgtaaataaaaaagaaattcgtaaaaaaaaaaaaaaaaaagacaaaataccataaaaatagtataatttttagttcattttgtatatattta

SEQ ID NO: 259154 - DNA, 827 bp, Cannabis indica
atatatacaccaacaatccaacaaataataagatgcactatttgaatgtatgttataaactatagagaaagaaagtattctttaagaaaataaagtaaatgttctgatttccaataataaaacttacatttcattttgctttacaatgctagtaaatgttgagaaaagtattgatgactgaaacaagttgagaaatttagatacaaaatggtaggaaattgaacaagaggctgagtagtacttaatagtactcaagatggtagttcttcacatattcaatcccaagagtcaacaagtaaaagtgttggtgtttaagaagaagaaaaagattttaagcgtattggaatgtagctcatcgaatacagattcgcaagtacaagaatcgacaagtgaaagagctggtattgcaaatgaagtaaaggattttgagtgcgttggaatgtagctcttcaagtacagattcacaactattgcaagtcccaacaagtgaaagagctattacagagggagaaaaggatttgagagcgttaaaatttagttcgaatacagattcacaagcattgtaagtccaagaattgacaagtgaaatatctggtgttacatagtgagaaaaggatttgaggtcattggaattcagctcgtcaaatacaaatttgcaagaaccaacaagtgaaagtgctgatgttaaataaaaattgacaaagtgtgctgtgcaaccagaagaatcaactaaagatgaacatcaagtgttgaagaaagaaaaatatatgttgttttgtttgtcgtaaaaaagaagtttgttcgtatatcattaagtttaactacta

SEQ ID NO: 259155 - DNA, 1255 bp, Cannabis indica
aacttaaaaatataaagaaaaatacgtaaaaaactaagtatcactttttatttaagtttaatacttcataaatatactattcttacaagtgtattgtagctaaaagttttaaataattaaaacaataacatttctaagtaataaaatagaacaaaacatcatgaaaataaatacactaaacaatcaagtgttacaaattcaacatacaaaaaaatctaataaaaatataataaatatttattatatttttcaatattttttattatataaataattttttaatatatataaatgtaattggattggatcggtttttaattggattttgagattgacatccaataaccgatccaatccaattagaatccaacttttaacatccaatccaatccaattgtaattggatatccaactttttgtaattggattggattggatcggttcggttcaattggattggattggatgatgcccacccctatttatatatactgttatttagaaaaatgatgtagcatgacaagttggcatcaacatgatatcaacacgtctgattctgggcataaacgggttagttttgtgcttaaagcctacttagcccataggacaaaaaaaattctctttttaaaattatacatattttttattaattttagagtctaaatttttttttatgtacccactaaatttcaaaaccgtaccatcatactggtcgacctattatgaataattaccttgctcatgttgcttgaagttaatatgtactatatagacaaaatattaaataataataataaaaaagaaatagttttcagtgtagtagtagaaagtgttgttgtaaattttagaaaatttgtattctagtcgtcatattttaagaaataacatttttgaattatatgataatgcaattatcaaattttatgattggtttatcttaatatctattaatttatttattaaaaaaattgaattattaaatttttataattaatttaatttgaaccaaaatttagagtgcaagatcaacaatgctacattaattagttaaaaaaaaatgcatgaaaccgaaagatcaatttgtttattttatttctctccacaaatattataagagactcaatgcatgaaagctacaaaatccactaattaagatcattaatggctctgcatgcaattttgatttgagaaaagcaataccatatacataaaataatgcaatgaatttataaaatattatttcaaaatacatttt

SEQ ID NO: 259156 - DNA, 1015 bp, Cannabis indica
aaacttaaagaatatagtagtacaatttaacatttttcattgtttcagaaagtggcatattttggtatcatttcatatatactttcgttgggctattcctattcacatgacaatattcatattgttatattgttgggttattagttagtggtatattaatttatgattaagagagagcgtacgtaatactttttcttttattgggcacatcaatcgtaaaaaaagcaaaagtaaggaataataataatatgatataatatataataaaacacaaacaaaagtgaagtttcttaatggttccaccaagtatcgttagcctgtcatttgctgctaatccctttttccagttttttttttttaatttttttaattgatattgttctatattttttttgaattaaagttgataaccaaagactaggtcctcttggacaacttaatttttatatttatgttctaatatatacaaagtctaaattaactataaaaataaacttatcattaatactcattaaaatatataaaataattaactttatttatattatttttaataacttataactataaaattattttgtttattgaatagtattattgtattaataagtagcaaatatgtaattaaattaaagatatagttattattgtaaactaaaatttagtagatgctatcttttttaagtaccaaaaatattttttaaaaaataataatacatcacatttatagctctctgagatgctcttattcctcaaacatcaaataactagcttaattaagctacagatttatagattttgcttttatttattcttactctgttgtcctttagaaggaattactatataaaaaaaaaaaaaataccattttagtgacaactttttaatcactaataattttttttttgttgattaaatagtgatttttagttcacaacaaaaaaataaattgtgattaaataatattattactacaaattagtcattaatttaattttagttcacaacaagtatt

SEQ ID NO: 259157 - DNA, 590 bp, Cannabis indica
tggtaccctaattggggagcaaaaaggaaaaagaggatgaatagatgagaggtggctgcacttgaatactagtacgaaaaatacagcagagaaaaaagaaagtttctaagtacaaagaaagaagagagtacaaagaagaagaagattgagaagaaggagaagaaggcaacaaccaaaggaaggatttgagctcatcactcatttcccttgctctctacttcgtttgtatcatttccttctcttcaagttctctttaactccatgaacaatatgttttctagttttgagtttttaatttcagctatgaactaaactttttgagatttgggtggttatgaacccttgtatggactagtgttttgattttgcaatgatgaagtaatcttggcttagttcaattagttgtgatgaaatgttgaatgaatgttaatttttggccatttttaacatttagcaagctagatcttacttggaaaagtaagacctagttgaacccttctaattgatgcatgatttttacctttacttttaggtattaattagtagtgaaataggaatattttgctaccatgtataactaaggatttgat

SEQ ID NO: 259158 - DNA, 556 bp, Cannabis indica
tgacaattttatttgatagttattttaattattaaataaatagttttggcaattataggtttgaattggaaaatatggtattattgaaaagaagaataagtggttgaaataaagtggcaaaattgtaactagagattggtccactatcttgtacggccaaggttgaatttttgcccaatattttattcttttttaatccatataattcaaccctaaccctattgaagaatagtataaaaggaaggctatggtctcattatccaactaatgcctccaaagctaaaaacctagatgagacctcttccttcttctttcttcttcaattcgaaacactaagcctttcttcacactaaataatttcagccattagtgatagagtgagtgcccacacacatcaagtggtatctcaatcatagtgtggaagactgtgaagaatccaatcaacaagaaggagaatcgggctcaagaaggagagaaagagatccaggttcagatcttgataatgctctgctacagaaaggaatcaagggctagagatctgaacggaaggagtcat

SEQ ID NO: 259159 - DNA, 520 bp, Cannabis indica
tcgggtcggagttcgagtcctggtctgagtttgcgttcaggtcttgatttcagtctacgtccatatcaggctccaggtgtgggttctcgtcctgggtctttgtctaggttgggtcagagtcccaagttccaatcccgatctgagtctggattcagttctcggtctaaatccttggtcagggtccgcgttcgggtctggcttttggtctgattctaggtgtgggtgtttgagttcaggtgcgagtctgtatttgggtttgtaaccatgtctggaccccgatctgggtctaggttgtgtgggttcgcgtcttgggtcttggtcttacctgggtccgagtcccaagttccaatcctgatccgagtctagattcagttctgggtgtaagtccttggttctgatactgttctgggttggagtttgggtctgggtctgggtctagctttgggtctgattctatgtgtgggtgtttgagtttgggtgcgagtctgtgtctaggtttgtgtccaggtctggaccccga

SEQ ID NO: 259160 - DNA, 527 bp, Cannabis indica
gtaggcaaaagtcccaaaacttctagaaagtaaatcactaggtctattcaatttctcagttattctacttgaaatataagaatgcgtcgcaccagaatcaattagaacagtcaataaagtaccagcaacagaaagctgacctgtcacacttgaaggaccagcatcagcctgagcttgagtcagggcaaacactcgagcaggagcgggtgtatcattcttcttttgctctagtcgtagcagatgtggacaatttctctacatatgacccaccaccccacagtggaaacgagccctggcctaacactcgccctggtgacgccttttacatctcggacattcatgaaaagtctgtcagttttcgttcccaccagaacggaaacattggttacccaggaaccttttatttgggtctgtagctgataattcactaggtcttttcttgcgatcaccgggataagtacccctaccagaaccagcacctgatgtttgcttccatgaatcccttctggcaatatttttctttcgta

SEQ ID NO: 259161 - DNA, 588 bp, Cannabis indica
cggtcctagtcttgttctagggtcctagttcagcgattcttgttcaggttctaattttgggtccaggtctaagtctgcgtttgggttttgttcttcgccttggttctggtcctagtctgcgtcccagatctggacaccgactacttgtctgttccaggccccgttacccaaatcccgagtcaatatctggatcagtttcatgggtctcggtctggttctggttccggtcccaggtcccatttctgagtttgggttcgggatcgagactggggtgcgattctaggtccctaccttggttgtgtatccctagcctagttccatgtttcggttcgcgtcccatgtataggttttggttgggatcccagtttggctcgcaattcgggtgtaggtctgatttggagtctgggtcctagtccggttacggttatggatctacgtctaatttcagttatgattccaagtccaagttctagtcccagtcccggtcaacttccggttttggttcccattttgggtcacacggtagggttcaggtccacttttgggtttgggactgggtttaggtccgggtgtgggttcgggtccttg

SEQ ID NO: 259162 - DNA, 1228 bp, Cannabis indica
ctacagaccaacacaagtatttctagcatgctttgtcctcactcgcacactttcgaataaaacttcttaggaggtaacccatcctgaaattatcctaggtcaagcatgcttaactgtggtagctttttttcgtgatgggctaaccagaaaacaagatgcaccctattgatataagtactattaatcaatctatttaggtcctctttaactgtgtatttttatatctatacagtctcataatcatcacacttgaccttctccaggcgatgtgggattgcatagcttactcgatattttcccttacgaatcacaggactactgactttcacaatcattaaaaaaactaacatttatttcaaaaaccttagtaccaatatccgagtttaggttcctatagagaagaaaatattattactttgtattattataaaaataataattcaaatcaactcatgatagataaaggagtcataatgatattttcttgtaaacttgtaaatgtaaatggttatgactatattaaagttttatttgttatattattttacataacttaattatgtacttggttatttattcaattaaagaataaaatagaaataatttgtgaactagttatgtaagtatggacatttttttcttaaaaatagtgataattatatctcatttaagtttatcttcttttagatatttttagaaacaaaaaaggaacattaagaaatcatgcctctaagaagatcagttcaaaattaacggtaatagaaacaaccacgtggatacaactccatcacccgcaaagggcagaggccaaggtgatggtcgacgtggaggctaaagcggcaggggaagtagacatggagcaccggtagcaccaatacttcgagaaaacactcttatacgtgaggagctaactccagaaattacaaaattaaatcagttgatgcaggagtaatttggtgagagtaatatttggccaatcacaacaactaatatttcagagatttgatcccaaatcttaagcctcacattccatcaccacactttaacaaggcgggtgtaattaagttatatgataattatagtatttatcctactagttttaaaaagatttcaagtaatttatcatatttaatgtcttaaacaattagttacacatttgtacatatatatatacactaggttaacgttacgtgcaaatgcacgtatacataatattatttttaaaaaa

SEQ ID NO: 259163 - DNA, 801 bp, Cannabis indica
taaatattataattaaatggcttaacggttaaaataattatagtagggatttatataagaaattatttaattattaattgctaaaaaatgtcttgttaaatattcaattaattattttaagaaaataattaattataattaattgattctaaataaagaagttttacttattgataacctgctattataggtaaaagaaaaatgtaaggttacaataaaaatgtaaccattgagtagtcacccaaaataaaaattattaaaataggtgcacttataagtttttggagtacaaataaaatttccctaattataaataaccaattttatttgcaccttataaaggggcatgtaaggtcatttgcccccgctaattttttataatataaaggaaaattttatttacatcccaaaaatttctaaaaacaccctattttaataaattttattttatataaaatttatatctttaatatactaagttttttttaacttttttcttttaatttttattcttaaaaaatatatctatcaaataaaattaagttatattttaaatattataataaaaaaaaaaaaaaaaactatttgaaattttcttagaaaaaaataaaaaatatatatatacatgagttagaaaaattataaaaatgaaattaaaataagtatttaaattaaaataagataatgtgaggaaaaaaaaaattaaaaatattaagagtaacttttaaattttttttaagtttatatttttttaataatagggtgtatttgtaaattcatggggtgcaaataaaattcccc

SEQ ID NO: 259164 - DNA, 1033 bp, Cannabis indica
ttggtgcacagcttcacacgtggatagcaagccaaattacggattgggacttaacatcccacgaaaatagagagaaaatatctattttgagggacattttagtcattcatattttattaatttaatatgtaaattatagcttatttgatatatttctaaggaatttgaagggtctaagctctcctatataaagagtcttactcaaaccttaaaactctaagtttaaagtgactaaaatcttaagtctaagtttgataactcatctctctctcacacgcccacttctatactcatacttgagatttgctaactctgattcctgcattgtaacctttagagagctccttcagatcccatcacaatagtgatctgagtagtattatctctcgatatcaatacagctaaaaggagagtaggtcattacccactaagggggccaaacctctataaaatcctgtgttcatttactttattgttcttattgtgtaacacgtggtaagcattagcattaaatacgactccactatcggttggccaaatctgaggtcaacagtttggtgctttcattgagaacgagttaataatttatctaatcaaacgtcatggttaatacgagaagaaccccaattatagcctttgcctcatcgagtctccctcaagatcctttgactgtagatccttatattcatgttccagccacaattggaatttccacaaacactacagatgtggtcaaacctgccatctcggtaggtaccatgaatctggccactatagctggccaagtcgacacaaacatccttgtggatctgaacaatcagcctttgcctcctggggaagaccctctgttggagccacccactgaaggaaggacccacgaggatcagccccttggcacaacaactggacctcgccccttgtactatgtaagagagacagtgccaagaattggcgagcctactattggcgagtcccgtgtagactcgaaaaaaaatctcgagttagccagacttagagaggtcgtctgccaaat

SEQ ID NO: 259165 - DNA, 1383 bp, Cannabis indica
tgtaggtaaaggaaaggcgaaggctgaacaggagtgaacccgagctcagatgggattgtacatgtcaaagcagcgcgacctggaatgttcggtcccgggacgtctggggattgtattttgttagtcgctgtgcgacctgtaataaatgtgtattttggaatactaattttacaatgtttgaaaaacgggatcccggcacttgtaaatattttatcatattataaagtttaataattagtataaaagttttaatttgacacgtttttcgagaaaattctttgattagcaaagattacactgtaattgaaaaatcattgtcgcgtgccttagcattagggcgttacatagagcatccgtgagccaagcctagtaaaacagtataaatatgaatatacacaataaaacatttctcatatatattaatgtcattacacttattgtctatttgacagacctacgtgttacgctcacacgattatttatgtttatgtgtcatagacccacgtattacgctcacaagtctaattacaataaggccttagaagtgtttatctcggttctaattaccgagtctaaccaaattatgccttgaacgcataattctatgcttcgacatatctagaatggaatagcatttaaaatcattaaataactagggtaataaccctaggcgatataaccgctcacattagggtaataaccctaatcctggttctcaattaatcacaactataatattaaacaagagcgccactgtgcttaactctatgtgctaactattgtcttacctgatgtcccaagtatgtggagattccaaatccccgggtgctcctgaataagtatcagtaatcctagtcacaattcccaagattcatagatagggttaatccctaaatccatttccacataatcatacagttggcattcaaatacaaataaacatatagagctcggaacgagctttccaatgttaaatggaacaccccaaacggagtccagattgaaaagttatgaaaaatcaaaattaacattcaaaactacccagaaatcccaagtcgggcctcgacactccccaagcatgccgcaatactcgtagagggggccgtagagcctaggttccaagcccagaaaaacaccaattcagcaacacgaattccaactcaaacatgcaccaaactcaactaaagacatattcaaacccaaattcatcatccacaaattatagccattccaacagggaattaaaaacacaaattcaagctttgaataacatccaaatatgcaattccaagtcaaactcaacaagtgttaccactatcaaaaatcttgaacttaaaatcacaaaaccataacctcacatattcaaacaccatctcaaaaagt

SEQ ID NO: 259166 - DNA, 1232 bp, Cannabis indica
ttataccattataatatttgatttaaaaaaattatatttttaataccttttaattattataaataactttattcgaaatgtgcttttatttttattgtatatgattaatatttgtgctaattacaaataaaagaaattttacataaatatattatataattttatattagggattttttcatttttacacttcaaaacagtttttttttacattttttacagaattctacaaagaaacccctattgcaactagcgctgcaacctaaatcgcaacaaaaaatcgtatagaaacccctattgcaactagcgctgcaaccactttagaaacccaaaccgtaaatttgaaagaaaaaaagttaaaaaaaacagtatatggggtaattcccctttatattattcataaaaaaaatataaaatagtattagactgaattgagattttattcgtaactaaaaattaatttctttcatgtaaaattttaaaaaaattattaaaaccgcgcgaagcgcggatctattccctagttaatgtaataaactaaatacttaaaaagtattataaatttattttcaaataatactttagtataagtcatagaaaatattataaaaagtgttatgatttttaataacgcaaccttccttaatacatcataaagtattatgaaaaaaatttaacaatatttttttggtattataaaaagcattatttcttgttgtgaattgtttatcttttttaattttataataatgttacatatattaaataaataaagtgtgaaaagtagcatctgtagaaaaaggagaagacaaaagaaacttcaaacacactagctatatattgtaatatactttgtaataacattatttatttaattagtgccgtacaggaaccattgatatgttccaattgaaatgtaaactgttgtatgctatttaacatacatctttattttcttatatataccaaagtttctctacatcaaaatacacaaccttctcatttttaatacaagctctgaatctcatataaagtttcataaccataagaaaagtaatggcttccaaatttcaaatcacatcaacaacactagttttagtcttagtgttaaccatatggctctctcagtctcagtgtcgaacattgaacgatgcttcaatgtcagaacaacatgagcagtggatggctcgctatggtcgaacctacaaagatgatgctgaaaaggaaattcg

SEQ ID NO: 259167 - DNA, 705 bp, Cannabis indica
gtaaagcttacggaaccgtgagttgagctcgacactggccttaattgtacatatcttgtcagtcttcagtgaacaacctggtggctctgataccaaactgtaacgcccgtattttcaatttaacaaactcaaaagataactttaatatattatatctttataattatattggtcgggatcccatgtttcaaaacacaacaaaaggtattttactaatatagagcttactagtatatacacatatatatatatatatatttttctaaggaaatacgtgtacaggcaactcaaaatagtaaaagattgaaaccctccaagttgcactgccgcgatgtgtacaatagctgccgagctccatctcactgttcctccagcttcgcctttcctttacctacataaggtagcaaactgatgagtcaatagactcaacaagataagcaagacatatgtataagtaatgcgaggtcggttttatgcttaagccgccttgagctcaataattgagctcaccaaatgattaagaacgttcttaagagaagtacgacctctgtaccaaatgcactaaagtaccaaccctgtactcgtgttggtagagccattattgtactaccgggagttactaagtgttgtaccacatgcacgacgtaccctctggtactcgtgttggtaacactgtaaccattctgatatcccacactatactaa

SEQ ID NO: 259168 - DNA, 631 bp, Cannabis indica
ttttacctttttttcaaaaataggaaagctagacaactttccttccaagtttgaatacacaaaataggaaaccatattaaacacataccacccgaaattaataggaaataataaaatatttttgtcaattaaatatgccaaaaatagaatgaacaatttatctagtgtatatatatagatttagaatgataacatcataataattataattaagaaaataatattaaaaatttaattaaataatatatttatttattaatatttgtaactaattatattatagatattattttaaaatttaaatacttataaattaaacatctaataactgattgaggaaagttcttaattacttgggagaatatctcaaccataaaaatatctataaccaaattttaaattctaatttaaataaatttttatttttctgaagtaattaattaatccaaaaataaagtaagtggggcccactacagcactgtgtaataatatagtgtaggcaccacctacaattgtcgtgatacgtacattgtggcacctaccttatcttaacaatcaaggtagtgtcatcccatcttgtctttacgattcttgtctcccctaacttatttaaataataaatttttttttt

SEQ ID NO: 259169 - DNA, 1049 bp, Cannabis indica
taattgcatacaccgcacaatcttccatgttataagaaatttttgaaatcaataatacatacatgtttgcagtaaatatcgactaagaaaacatgtatgaatagacttataaatatactaccgttgaactttgaagaacatcaagtaatcaagaaaatcttttccacctgcaataaattatgtacctgcaataaattaaacataatctttctactatttgaataacataagaaaaataataataaaataaagtgaacaaattcaaaaaatactggatgtgttttctctcgtgacattgatgaaggctctaattgttcttgtccatcagattcttcttactcttctccatcaaattctatttgttcatctccaatagattaagcttgttcttctccattcgattctgtttcttcttatccacttgattctgatttttcttctctatttgtttatatgattgttcttcaaaactttttcattgactgatttaaataaaaagaggtaatattatatcaatcgagtataaacatataatagtcaagctttacccacaagcggttgagctcaagtcaagcagttgagctttatactaacattataagaatttagagactacatctcaaccataaatggtcgagctctactccgtatagtcaagctctacactaatattttaagacttttgactacattggtcgagctctactaaaagtaatcgaaatttatactaacattttaattataatctcgaccatttatgttcgagctctactaatatcaatcaagctatataaaatatcaaatagactttagaaatctcaaacatatttgatgaagttctacccatttacctcatcatttaattgagttgttgtgcatgtgggaggagttggttcgtttaaaatcaactgttgttggattggttattttggatctataatacttggtattttgcttcgtgccattaaattaccaaaatataatatgttagagttgaacttcggtgattgaacaattggatagcctgaaaatgctaatcataagtaaat

SEQ ID NO: 259170 - DNA, 786 bp, Cannabis indica
agattagttgccaaaggtttcacaggtagaagggatagattacaccgaggtgttctcacctatactgaagtataagaccattagacttatgttgtcgatggtaacttaacaaggtttagaagtggagcagcttgatgttaaacctatgtttctaaatggttatctagaagaagagatatacataaagcaaccacctgaatttcaggtggaacaagatagaaaagagatggtttcacaaggtccaagtttgatcactatttgtatttcaaacactagaagagtcaacagttgtgtatcttctactctatgtagatgatatgttaataatgggcaaagacaaggcaataatcaaaggaattaaagataaactcaaggcagaatttgacatgaaagaattgggacaagtaaagaagatacttggtttagaagttcatagatccaagagtgatggagtcatgcatttaaagcaaaagaactacattgagaagatcctaacaaagttcaagatgcaagattctaagagcacttcagtacctcttggaggaaagtttgtattaaccaaggaagaaagccctatgagcacagaagagaaagaagagatggaagaaatttcatatgcaatggctttggagtgtctcatgtatgtcatggttagcacaagacctgacattgctcatgctttaagcatattgagtaggttcatgtcaaatcctgggataaaccattggagggcactcaaatggttgttaagatatttaagagggacatcggatattggattgactt

SEQ ID NO: 259171 - DNA, 596 bp, Cannabis indica
aaaagttgttcactcacagaagccattctcggaaggcttccttatccttccgtgaagggtcttcaggaatagctagcctctctctgggatggagatccaattggctagttgctcctcgtggaaagacagttttggatagtagactccagcaagctctatcttatctaaaagctccttcagcgagtgcctttggtccgtgatctcgaaagctcatatacattctcggatgcactatgacttatgctgacgtggagatctcactcaaaagaaaaagttcgttaagttagttactgtctaactaacttaccaacttcaattcttgcagtcaccgactttaggatcttgatcctaagcctataaataccacctcacttgttattttacaagatggtttagactgagattgacagtttgagagagaaaagattgagagatagatagatagagaggtatagagaaaagagagacattagatttgggttttgtaagaagaattttctatagatgaagaagatttttgggttagagtgtgagaattaaaacactttgaaagaactcaacagagaatccttttcgactgtattttacatgttctt

SEQ ID NO: 259172 - DNA, 1152 bp, Cannabis indica
ggcttgcctgattaggcaatgcactacatgattatcagactaaaacatcgacttgcttgattaggaaatgtgatgtcatgaagatggttactttatgaggtaacatatatataatttatattattaaatgaatataattcctattattggtataatagttttgtattaccagatatctgtatactgatgcttattcatggcagatgcgagtagtgatttggatttcatcttatgaacaatgcgtaatggtttgattctaattgtatagaaatgataatattcgaataataaactatatgattattattgttacttttcttgctgagtccttgtgactcatgggtgctatgtggtgcaggtaagggcaaggaaaagttagagctgccattaggttactgccttctccagcagtgtacatattgacctcactggcttgcttgccgggttgccaagagttgttttgggctgtatctactatgtattttggttttatgtttttaaagcgtcatcgtatatagttcttttgtaaagctttttataatagggatccccgaaacatgctttttatgtcgttataatgtctgtttttagtgttttattttagttaagtttttattattatcaaagtttctaataattaattaatttattagtattaaactagtttataaaattacacatgtcgcgtccctatgggatagggtgttacaacttggtatcagagcagccatggttttaaaggtcctaaagattggtcgaatatgtacatttgttgtgaagaaaggtcgactcatggtatagtaagtgtttatattatttgctattagattacctgcctagactatcataaattatgttagggaaggtagcataatggtgattatgatatgaatatgtgtatggtatacgcatattgataatgatatccgtataaaatctaaatgcttggaagatgtggattaaatatgtgacaagttatacagtaagggcaattgaattatctaattagcgagctatctgtgttcggggaaaacagtaaggaagagacaacttgttgtcgagtgaatttcgcaacaccaaaatatattatttaattaatataaaaagagaaatttcagagaagtgacaagtgcgagtattcgacctagaatg

SEQ ID NO: 259173 - DNA, 722 bp, Cannabis indica
tgaagcaagctcatgtgctcaattgcaagccaaaaacgggacagcgacgacttctcctgtcgtttttcagaagaggaagagcgacgttgtcgtgactcctgtcactgactcgtctaagaagcaagtgaagccttcgcaggacaaggggaagaaggtcatgattgactgggttgtcaaggcccgcgattttgtgactatgcagagcaagtttgtgagcggtgagttcatgtcgaaagtggaagcgatgtcgcttggggcggagctggccacgccatttatgaccgtgttttcgagggcattcgtcgcaggttccaaagaatttgatcttctgaagaaactgattgtatagcttcaagaaagcaacaagaagctgaagcaggatgcaaatgccaaggacaacgaactcgagaacctccggaagtccaaagagcaggtggaacttgcaaccaaactttctcaatcgaaggtcgaggagttgtctcgcgatttggaggctgagaaggagaatggaaaaagcaatacaacaaagcaatctccgactatatatatacgactctttccaagataccagatttcaacttcgcaatccttggagcaaaggcggccgagatggcggaagcatttcgtgctatgtcgcctacttagactcaagggtgcggggggaatgtttttcctgaggacgcagaggctacgaatactgaagaggtcgctgatgaggctgc

SEQ ID NO: 259174 - DNA, 3451 bp, Cannabis indica
aatccaaacagaaagttctatggttgccaaattacaaggttagtttttagttttttttattttccaatattgatattcaaggtttcaactatttctgaaatttatccttcaaatccatgaattaaaaaagattacttggttttcaacaaaatagataaataaattggtgagtttttttttaaaaaaaaaaattaattttcattaatcacttgaacaatacatcaacaccagcaccagcagaacactgttgaagaacactgtggtggtggtgtgggaattggcagactgtttttagccactcacaaattgtggtggtgtgttggaatgggcagctgtgtcgtgctagcctacaagtgggtgttagactcactaatggctgcacatttacgagaaatggagattagatattgtggttaactcatgttttgtacttgcttgattagggtgagagaaatgtttagtagttagtcatgactttttgaagggattcaaatgaagaataatattaactcacagactaaggctcattaacgcctcaactacgcaattcttattagcatctcaaaattaactactgacaatggtgtgtttgtggaattcttttcttatttatgttatgtcaaggacaaggtgacaaagaaggtactgctccaagggagacttaaagatggactttatcagcttaaagttccttccataacttaccaaaatcaatcatattcctccattcttttttggtcttttagtttcacccaaacaaaatgtaaactagtctacaattggtacttctccttttttaatcaaaaatgtatggcacaatcccttaggccatccatcctctagggttttagatcttgttttgaaacagttaaatgtaaaaagtgctaatatgaatgaaagcttttgtgatacttgtcaacttagaaaatctcattgccttccctttaaaataaataattaccatgttaaacaacccattgagcttgtacattcagatatttggggggtggatgtctaacaccaattttcggttctatatccatttcatagacgattataatcgttatacttggatatatctactaagagctaactctaaagcactaatgactttcattcaattcaaaaactagtggaaaacaagtttgagaagaaagattaagacactgcacacagatggaggtagtgaataccatggcttcacttgacttgtcacagattgtggtattgattttgatcactcatgccatcacacctcatctcaaaatggtagagctgagcgcaagcccagacacattgtggaaaatgggcctacctttgcttccacaagctggagtaccacaaaatattggtgggatgcctttcagactttagtctatctcataaatagactccctacacatgtgctagacagcataacaccttttgaaaaagtttattccaaaaagcctgattataagtttctagaaatgtttggttcaacatgttttccatgccttagactttatcagaatctcaagttcttatatcattccactaagtgtgtcaaccttggctatagtgataatcataaatgctacaaatgtttgagtagcactggcaatttatacatctctagacatgttattttaaatgaacataattttccatttgaaaaaggttctctaaacactcacccgcctgaaacacttgattttgtccttattcctagttggtctacctcttttcaacatattgcagcctcacgagtcactgtcttctctaagaacttgagctgatgaggtttatcagggggatccatctccttctagctccatacaagcttcctctcatcattcacctgctactcttgccttgtcatctggttcaatctccagccataacatggaataggtaagtgatcatgagcctcctatttttcattttgagatggctagtctatttgatgatgttcttaccagtctagatcaggtacctacaagagaaattgaacaactagaagctacaaaatcctcctcaagcataaatattttagttgctggtgcaaaacatcttcacccatcttatccaatggggacttaggccaagccatgcatttgtaaagccaagacttatctgagtcgttctgagtggaaatcaataagtaaggagttatgttaaatgaaggatgcactaaatcacaagggttggaaaattgcaatggatgatgaatacataacacctaacatgaatgtgatagacaatacatgggttttcaaagttaaaaggaatgcatatggaccttttcaaaggtataaggctcgtttgatagcaaaggaatttaatcaaaggccatatgtaaattttggtgaaattttagccgtgttatcaaggcttcaataattcaaatcattctaactatagttgttgctaagtcatgggaggtaagacaactcgacattaataattttttttctttctaaatggtcatttagaggaggatgtgttcatgatttagccaaagggatttgaagacaaagatcgacctgactatgtctgtaagctgaccaagtctctttatggtcttaaacatgcacaaagggcttggtttgttaggctaaggaccacttttgaagcttctgacatgacagttccaagcctctgaaataacatcttcgtatctaggatccttgcacacaatattgaggaacctaaccgaaagagggcaatattttgcatccataaccaggttgagaaccaaaggggagtgattagagtacacaataagaagtgcatgaaccctaactttcggaaaagaagtaacctaggaagggtcacagagcacttagtccaaacattcacaaataaaagtatcgaaattatgtccactggaccaagtaaggaaaaccccagaaccactgagatcgacaacttcaaattggtgagaaaaatccctaagacctctctcttccgccaaggtgaaagggtgaccaccactttttcatctttcttgataactatactgtcaatactataagtatttgctttgacatcagtgcataaccaacattattagtatcattagcatcaatttaaaaccgacacaaaattatagacgacatatagaagtgaacaaaaaaaagtatttggtaacactatatcttaccaaacacatttttttttattttgaaaataataagattatttgagattataattttgttaggtctgtgttctaacaatgtaattttgtcaaaatgtagtatagattagaacatatagaccaaaacaaatttattaaggagaataattagccgtaaaaaaagtggtcacccattaacaattataataactcaacagaaaactaaagctaaaataaaagggaaatttgaaattctatgcttaaaataccatttaatttttcccctaaatgcatagttattgaaattggtcttatatgacaactttccta

SEQ ID NO: 259175 - DNA, 752 bp, Cannabis indica
agggcggtacaattttggtatcagaactgccatgtttgtctaccgaagcttgctaagacatgtacaatcttcatcagagaaagctcggttcacgtttcagtaagctcatacttgtgtagtattttaaataattgtgaaagcatgttaggaagaatattagattttaattaattattttaaagtgtgttgcctttatgtccttaagagcggtgttaagttttaatcgctgtctaacctgcctggcttatggattcacaggctaagtcctataaaatggatgccccgtgaaatacaagaagtcagggtgacatggttgagaccggaggcggtcagagaaatccccaaaatttttgtggtcgcggttgtgaacgtggcagagctcagggtggtcaccctataaatccaccacaagctcctctggattgggagcaaagatttacaaaagtggaagatcgaatctgccaacaggatgaagagattcagaggttgaggcagcagggtcctcctgtcgtgccacctcaacaagttgctcaggttgttgcagttccagcggtgccagcagaacaacttgttcttggcaaccgtatggagccattgtacgaaaggtttggaaagcaagcacctccagtatttcagggaggtcctgatgtaatgaaggctgagcagtggctcacagtgattgagcgtatccttaactttataggagtggttggtaatgatcgagtgacctgcgccactttccagtttcagga

SEQ ID NO: 259176 - DNA, 876 bp, Cannabis indica
aatcatctagaccacagggcgagcaagtagagcccggggttacccaaaccgatccaccagcactgcctccacctccgcaaaatccgggggataatgcgggggccgttaatgctaatcctcctgctgactggcagcagatgtttcatgaaatgcgaagtgtcatacttcgtcaagaggaagagttgcaacgtttaaggcaacaagctgccccagtgaatcaagggttaccaccagctcctgtgccagtggtgggtaaccaagggtatattatgccgcaccgggactctgtgttcgagcggtttgtgaagctgcaacctccggcttttctgggaggcattgatattattaaggccgatcaatggatgagcactgttacccgtatcctcgataatatgggggtgacgggaactgagagggtgaattgtgcggcctttatgtttcaagatcatgcccgcgtatggtgggatatagtgaatcagactcgagatgtcagtgtgatgacatgggaagagttcaagaaactttttgaagaaaagttttataacgttgcagtgaggacttcacaccaattttgtgaagttgactcaggggaaaatgtctgtggccgaatatactctggaattcgatcggttatctaaatttgctggtgatctggtgcctacagattttaccagaaagcagaaatatgttcgaggactaaatgctacaattagtcgggacttgaagattaccacatcacatgacactctgtataagagagtggtagacttggccttaattgctgaggaggccgagcagcaagtaatgaaggagcaggctgcaaaggatgccgccatggcatcaaaccctcctgctggtggtaatgtcagtaagggg

SEQ ID NO: 259177 - DNA, 917 bp, Cannabis indica
tatgcaacctttagggtaaatttcagtagaagggccttcgtccccaaaaaagcttcattttactatttttcctataaaatttggaagacatatccattgtaaaagggatctgaattttgatttaagaaaaatgctaccaatgaacaccttctcttcttaattactttcaactatccttaatctaataataaattagttgtagaaattctcggtcaatattttggtactttcgttgagagttgtaggtagcatttactactccttccattttccttggtggatatcacaccatggctatcacttggaataatcaaaggcccttgttgtgtcctgacgctctaggacatgtggaaaaaagacattgcctcctaagtcaaccctgaagaagatgtcaaggacgacgtagacgaccaggactatgggatcaaaagttatccataaggctacaaagaagaagattacaaaaacatagagctcatatcccggcggtggtgagccatgtaacacaaagctgagttggctaaacagtgagaagccatcatgagaatgcaagaggccttagaggcaataaagaaatttttagtgatggaaggcttgaacatagactcagtatccattttagtgatacgcaataatcctgatagagttggtccctcgtgacctcaagaaaaaaaaaaggatgatgcgtgaaaccatatggcaccgagtcccagcaggtatcctgctgaaaaagcctcacaatgtcagggaaaacctcactacaatacctagggactgaaactagcccatttccacgtagggtatgctctgaccacgtgcaagggaaaatttgtaagggtataggctccatagatggagtaggacggtggggaacaccgtaacatgcttgtcaactaggggaggaggaacacccagcg

SEQ ID NO: 259178 - DNA, 503 bp, Cannabis indica
gtatctcatgccattagagcctacaaatacctctttctttgatgtgaaacggtgttgaaaaattattggaatacttcacccaatgaaatacaagaatttcttgtccttcattatggctttgaacatctctttaagctttcatattttcatcctctttttaagtcttgtgtttgagttttgattttttggcctaaagttagttgacaagtttttaccgtcaacaatgtccatcgtataggttttgttgtggcagagaataaatgtttctttcttacaacaaacatgtgttttttcttaaaaaaataaccccttgaaattgactccttttgacgtgcctttgagttctcttctctattattctattgttgttcatccttgcaaactgctccaacaagctcgattttcctcaatggaaacaccatctccttaggtgaaacaatgttgttttcatcacaaatgatagtatccacgctatcaaaattttccttgtcaaaggtcagaaa

SEQ ID NO: 259179 - DNA, 629 bp, Cannabis indica
atcttaaaattttttgggagctctgcctgtaggatgtgcttggcgcatggctcccggtcctcacagtcagagtctgagtcatcacctttttgtctccaagagactcgagcaatgtctttgcgtagtatggcaagcttagccataattccttcgttcagcgttctcgtggagaccgccggtgcatatttcttttggtctaggtgatcccagaggtcaccatgttttcgttaatctgatgtcttagatcaacgggtggtatctttggctccttcttcctctctctccgggtttctggtgcacagaaacgctttttcgttcctctcgatcctgagggccaagactccctttttggagtttgcccctctacggacctttccctttcgagaaatctgagcggaactttcgcatatcccacacctttttctttttctcgggggtggaagtaggatttttccgctggttcccttcagagggataccgtatagggctaggctccctggacttatgcttttgggtgcttggtgaggactcttctggtgtttctccaagtcctggagggatggctttagggtgtacatggatccctgctacctccaacgctttctacatggcgagcatcacctcttgca

SEQ ID NO: 259180 - DNA, 592 bp, Cannabis indica
aatttgtagtagtgctcggtccaagacccgaacccaaacacaaacatgaacatagacacggaccgggacccgagatttgaatcagaacgagatcgggacccaagattgggatccagatcttgacccatgacccacggcttggacctaacccgtagtcggtgtctggattttcgaatcgtaccaagaccccaacctcgaaccattttagaccaggatctaaaaccaaactcggacccaggacccgaaatcagaacaagaatagaaatcaggaccttggaacaagaattggacctcaacccagaacaagatctagatgtagaaccaaacgtggacccagacctagactagggatcgatacccggacctaaacccgaacctggacccagacttgcgccaggacctgcgacccagatcttggaacccaggactcgtgacccaggacctggaccaaaacctagacccgtaccagaacccagacccaaacccaggaccagacccaaaccaagactcggacctagacccagacccgaaccgaaaccccaacccagaccaagacccgaactcaaactcagacctagagccggactcgtac

SEQ ID NO: 259181 - DNA, 1440 bp, Cannabis indica
ctaatataggcctcaattccatcccccgttttggtgtcaaagaaagcagtgacgttatgaaaatttagggctggacacccaacccatgtagggttaccccatccaaaatcaacttcataaacctgaaacctacacaaactagtaaaggcaaacgtaacaacttctcccctgacgaagctactacaattatccttaatcatatgaaaatgttcttcattaccctcttttagtttctccacaaactccttatcaatcttctttatttcctctcttatacgcttcaccaactcacgaccacaataatcttctccaacactggacgaaggaacaaccgtaaaggcagacctataaaagtttccaaaatgatgatcttcgagaggaggatcgaatttcggccgtagattcacggggtgaataacaatgtgaagtttctccgaattgggggatgttgcggccacaaaacgactccatatgaaagatgataaggcctcaacacgcgagggggctttgatctcgtcgctaattagtttcgttttgagagcttttattgccctagcgtcgaacacaaacctcttagctatgatgtctgttcttgttatgccaatattttgattataagatcccatatccttgggtgggaagagtgtggccgaaatgaattcgggttgtgttatcgtgtcatgtgatatctggtcgtcacaacgagcaatggccgcccatgttttgacgaagatgatgcaagacaaagcgtccgcgatcttatgggacgtgcataggccgatggcgattcccccgttttcgaaaatgttgagttggacccctagggcaaactctcctacttcgtcgagtttaaatggaagaaacttgttgtggtcgcttgaaattggagctttgatagcttcagaaaatgattggcctttgactttggtttcgaggaatggaactccttggtcgttacaatcgacgaataagtcgtctttgaatcgtccagctagtgggtagaagagggttaagaccttagacaaagatttcttgaggtggttgatcatattattgttgaggttgtggtgagaatgatcatcattaggatcatcacttttaagttgatcatagaaaaagagtaaaggattataaactttgggtgatatttgatcgaggaaagagagcttgtaatggcggagatcatctggggttggagaataaggtttgataatctcattagagattacttcaatttcgacaaccttagtactagtcattttatcacattattatggcgtaacaatgatatagctaagttaggttttgtagatttttatatacatggccttacatttaatttatatataaaagaattatttcaaatatatcttaaaagaagataaaatagtacagattttgtgtatacatatatatcaagatgaatgaatgatcataaaa

SEQ ID NO: 259182 - DNA, 1417 bp, Cannabis indica
aatcttacctcaatttcgaaatcaggtgtgcccgtcaacctgactggaacaaactgcacgatggtttacaagctcctaaaccataacaatcacaacactaataagtgatacgctaaataacataaaaacgagaaaatctagggttcctgaaaatctcccaatggcagaccggttcttcaaccgaaatttcggttctgggaattcctgaaccccatccggaattccggatgcacaaccggaattccggttcctcgcaggaaactatcaaaaattcataacttgctcaaatcaaacccaattcaaacaaaaccttccagacctgctatttagaccccaaggaacatttctaaagcaacaaaaccacctagaaatcacaggatcaaaaatcaccattaaagctccaagcgttgagttcaaatctcaaacttggttaaatctaactagcatgcatccaaatcagttcaagcctacttaaacatgcataatataacctctgaaaacacacgaaattgaccccaacaaacacagcaacacaactcacaatttcacttgaaaaaccatagctttgagtaaaattttcatctcttgatgaaaccaactaatcaccaaccctatcatgcttgaatcaacattctaaatcatgttttaactacagaaatcaacaacaacatacagcagcaagtatcacaacaaaaccaacatgcaacactcatctttttcatcattttcaacaaattcaagagggaaagatatagaaaccttaccaactcttagagatcacaaaaaccttgaagaaatcagctagaaacaaacaaagatccttgctgctcaaggaggccgaacaagagagaaagagagagctttgagaaaattttggtttttctttaactttttaatttttgaaaataaaggaaaaatgcaaagtccaccttatattcagctaacaattaacaattaaaaccatataatttcaccacataaagtccactaaatgacaaaatatcaatggggtaaaatgaccattttgccccttcagactaaaataacataaagagcactaaagggggtattttgggaaattctaaattccctacccatcccgacattcccaatgtctaaataactgtcccacaatactaacatactaagttgtgattttactgagccaaacaccgagttccatgttgccgggcaccacaaataaaaaattatgaaaatcactaaatgacataaaatgcttttcagaattcaataataatagcataaataattatttaaatgtctataaataattttccttaattaaacataattaactgctaatttctaaattaaaataagcggtcttgacaactattccccctttaaaggatttcgtccccgaaatctaacctgaacaactctagatattgagccc

SEQ ID NO: 259183 - DNA, 778 bp, Cannabis indica
ttggctgggaattatcacttgaaaggatgttggtcatgtttcacttttcactttttgcattttttaataatttatgtacattttaagcttaattattctcaagtcatgcacatatataaataagaaaaagtagacctatagagttggtattaattaataatatataaaaatcagaattaagaacttaattaattaacgtaaaggtcaaaaatgaacaatattaatgaacaatattaatggatcatacttctttagagcccataacccgacctaagatagtatcataacaatactctatattacgatgattgtgctttctatatctaaaccacagaagagtattcacaaatgccacaggaatgattcccgtcggaatcaaatgttgatttaagaaaggtgagcagatctctatcacttgttcattccaactataatcattcttcattaccaaaaccctaagcccatgttccttactcaattcaccaatagcaatagcaggatcagattcccaataaaaaggaatgagcttcgttacatcacagaaaatatttcttgggaaatttctcaacttctcatatttctcagtaagtagatcaaaacaactaatctctaaatcaaaagtaccttgttgttgtggagttcgaacaaggtaaaagaagagtaatttctccctatctttgtctttgaacttgagtacgggttgtccttttcggaaatcgggttgtagaggtctcacattttggtcaccaagtttcagaatttcataacccttttcaga

SEQ ID NO: 259184 - DNA, 689 bp, Cannabis indica
aaattaatcatacataaatatatacaattcataccatactcttcttcaactcataatcatgacaaacagcatccactttctctgatataattaacatctcagcagatgtaataccatcgtcagtgctctcactatcccttttagatgcttctataacattgtcatccccaacaatttttttatcttccaacaaatctacaacattttcagactgggccaacaaggaacccataatatcaaaacttggacgatcattaccaacctgaaaaagcaacatattagttactaaatcaacaaaacaaaatacaaaagcataataaaacaaaaataaataaaaaacaaaaccttatccatgcaatcctcagcatgttgatcaccagcctgaacgacaacttcattaacaacagcatctgatatttgtcttatttcctgaaaaaagacagcaaaaagatacaaatatataataaaacctataaacacaaataataatataaaaacaccacccaaatcatcatcctaaaaacttataaacttataaacaccttataaacttcagcaccatcatctttaacaccacccaaatcatcaacagctgcaccattaccctcaccatcatcctacaatgacaaacacgtatgaaaaaaattataaacaaaataaaaattgaaaagttattaaaatggaaacta

SEQ ID NO: 259185 - DNA, 493 bp, Cannabis indica
gcataaatgaggtaggtgagggtaaaatagtaaaatatacaatttacaatttattggctgagagaaatagaaaaatgagccaaataaatgcaaaggaatataaaattataatgtattttgaaattgcattttcttgaaggatgctggagagagaagctggcgtgggggacaaattgcagcgggagggccacatgtcgtcgtgtgaggggttggtggagagaaggatactactggtgtgggggacaggcaggtcccatgcgtggtggcgctggcaggctgggtagggggagaaagacgctcacgcgcctctctctggccgtgaaccacacgcgccctgctggccctttggatctgtgcacggacggctggagatggggagaaaggtgagcgctcatgcgcccttgtctggcggtgagggacacgcgctcgtttgggccaccagatcttcgcacggacggctggatggtgcttcgagctgtgcgcgcgagtgggc

SEQ ID NO: 259186 - DNA, 527 bp, Cannabis indica
gagtcatgactcagggccggagtgtccaccctccgggagcgcttagaaggctcctctcccaccatcttgcccttgcgcttgcgcacgagggcgacctcttgctgttcttcaccttcttcagcttcctcaagaagtgcctcctcctcgtccactaagataatagtgcctgaaggggcgctagaggaagccttcccgggagtgaccaactgagaagaagtaggaggagaggaaacatcaggactatgggctccggcaagggtggccaagatttcgtccatgggtacggctgctgcaataagagaaaaggttaagtgttagaacatctgtgaaagtaacgtacacttaacaaaaagcaatcaagctagtcctaccctgactctctaattcggccctagcaaagtcccgaatcttaacactggctgcatcatccctgagatagctgtccgagggacggaaccagctagaagataaataggccgaagggtccaggggaatgggtaccggataaaggaattaacaatgaatac

SEQ ID NO: 259187 - DNA, 2239 bp, Cannabis indica
atcttaatgaaaaggatggtccacccctaatcaccatagaataactatcaaacatgcaaaccttagttaacagttttagcttttcttatgttcacgatcaggacatccctgaatctagtaatagtttacactaagtacacaaccattccatcattctggaatttttctatcactaggatattttcctggaaggactcagggagctgctagtaactaatcatagatctttcactttcatcaatatgcaatttgaatttctagggaggtaagtttggatacaatttaaagttcaaattaatgatctttgaactgtatatctaccaaatatttctccaccccaatcagttcgcaagatctttaattacttaccctaatgttttcaacattgctagaaatttatgaaatttcttaaacatttcaaatttctttgcataaggtaaaatttagagtgatcgtcttaagaatatagcaattactcatatccacccctaaatatacatccatatgttaaaatatagatgatcctactttcaagtggatataggcatattttctctttgcaaagaatcatcttgtcaaaactattatgaacaagatacaaatgccctagatatataataaattgtggatgtggtcttttgatgacttaggtctagttacaatcaagagttcttagaatagtccaagtgagttctggtcacaaaatactaaactcatattctatacattagcatacagtttgaatccattgacggaaaatagatattaaaacttgcgaaagttatactgtaatgtgtaatgcattcatggaactaaaatttaaaatttctatttagaatctaaaattcaaagtcaaagacttaaatttatactaaatattttttgagtagttattctttcttggaccaccactaatctaactctaagttttaagtttcctcaagtaagcatatacaagtaggagatttctaagatcgaggatttatatccttttggcatagaatgtcgggaatataatcatctgtgccattcaatttcatagaagaacattgaatgacatcataagcatatgatttataaaccatctatccaatgatatactatctaagcaaattctaatagaaaaagctaagagaaaactaataatggatgatttcgaataagaatccaacgatgtcccgtataggagagagtcaaagttattcttattttataaatctcttcattgtttcatattttaaacactagtctaaggtgtcatctttggatgtacaattagattttgcatttacaaatacttatctatcgagatctaacactattatgtttgtttaacggatgacaatcctttgggatttgtcccgttaaaacaacaaattaagttagaccaacaatgaagattcgaaatcacactacaacattaataacagaaaacaatatgattcaatacgaattcatacacattcagaaatcatcaaacatttagcaagtaagaaagacatgtgaaaatacaaaataaacacatcttaaataatttccaacatttctaacaaatgatacagtgtcttggtaggcgagagttaaagatatcattcattgaatagagtaatcaactcatcgaaaatgggcagcattctagcaaccttttattcaatcaaaataagaattcaacgttgtcctggtaggcgagagtcaagattattcttattttatgagcttccaccatagtttcatttcttccaccatagtttcattttttgtaaatttatctctaagtagtcaccgtaggggagagtataatagagacgacttacaaaatacttattatataagaactttacggtgctaaatgcttcaacgaataaccatccataaggatgacgaagtctagcgtcttgaggttatattgaaaacaataaccatgtaggaccaacaatggagatcgaatatccttataactaaagctcattattttaaagggttgtgtttttatttgatacttattttaatctatttatattatatatatttatttaattaaaattactaatttagataactctaaatataaattttaatataatatttataaaattataccttagtaagatctaaaaaataaaaaatttattttccttccttagtattaattttccaataaatattatgaaaattacttaatttaagttggtcagaaattaaataattaattttcaactcaaatttaattttctataaa

SEQ ID NO: 259188 - DNA, 609 bp, Cannabis indica
agccaagtacaattatgcccttgacgagtactcctgggggcatgctgaggtggaggccttgaggagggttttgcgagcagaggtgcaaaattcccttaatgaggagaactttcagaacccgtgggatctcaacctggaccccctgacggactggttcaatcatttcatcgggcctaccttggctccttttgccgcggagatgaccggcgagtatgtctcccagctaactcggtgcgcacctaagcggtacgctgcttgtgcatccttgaactccatctttcaagctcatgatctcagccactccttggccgcggtaaatatttagtgatttacttcttttctcattattttgcttaaaggcctttactcattctttcttccttttccagcttgctgcagaggtcggccgcctttccaaaaacataattaatcacggcttcatcttgtccgaatttgtgggcatagacgaagtcgtgaaattctgcaggacctgtctgctgaaaggcgggcgttccaagaggaggctgcgcgacaggaggcccttgctaaggctaagtttaaggaagaggctaagcaaagggaagcccaagcggaggcgatgatccgaga

SEQ ID NO: 259189 - DNA, 721 bp, Cannabis indica
tgtttctgggcaattttgttatagatttcagagctattgtcaatggttaggaggtgtggatcggttcttaaatttctctaaataacttgtgttttcccacttgtgtccaaatatactgccaatttttatttgcactgaaatttatctgcataatctcaaatttatcaacgtaattcctattccgtttagctaattattttatttctatttattgcctattttacctttttagattgattgtttaggagagtaaaaattaaaactttctgtgtgttggttttaggatttttttcgttgcccttggaatatacatcagaagaaggattagttgttttggttttattttttgggttttaatctgatttggagttttgagcgatatgaataagaaggattcgttccacttgtttgccatggccattcgcattctgtggttgatttgttttatagtcccatcacgcccaatgagttcttcctcattggtgccagcaaaggtgcgtttgatttataatcttaatgttgtttcaaatgaattagtttattagagtgaatattattttatgtataggatgatattgaattgtttaatcaaactttaaattttcttactttattagtccatttcaatacagtagagaaaatgtataatgaataaatgcattctaataaacgtagatttatttcttaacttcatttacttaaattgccataaaactaacaa

SEQ ID NO: 259190 - DNA, 514 bp, Cannabis indica
tttttactcataatttaaacaattatactttgatcaaattcaaaatactttaagcatttccactgatcttgttttccttttgtattgtttaagtagttaataatccactatgtactcgagcagttgttacctgctatgctttctatgtagtttatcagttttacttcgtgtaaagagttataatttgatttaagcaaacttaaacatacttttgataattcatcttgtgaattactttgtatattttttattgcctgtatgaatagttaggccttctatccacacctcaagttaagaattttttcaaggcatcttggtaccttgttttatacattcctataaaatgcgagcagttggatatttagcttcacatgtagcttagtgttattttcatgagttaaatctcatttacaattgctacttttgactttgcatcgtccatagatgacttcaatcaattacttgaaaaactttaaaaaattaaaatttttaaaatggagtgggtttgcaatat

SEQ ID NO: 259191 - DNA, 586 bp, Cannabis indica
tcacctcattcaaagtctttgtaaaaatactcctaattgttctccgatcttcacatatcctgtgaagatcaggccttgttgaattttctcacgaacaaaatgacaatcaattttaatgcgcttagttcgctcgtggaacacgagatttgaggcaatatgaagagcaacttgattatcacaccacaattttgttggagtagaaatcttaaacccgaattcagtcagaagctgatatatccatttacctcacacacatattgtgccatagctctatattctgattcaacactggattagacacaacattttgattcttacttttccaagagatcagattccccccaacaattacacaatatcctgaagtggatcgtctatctaccttgaagcctgcccaatctgcattagagaaatactcaatctgggtatgtctatgatccttgaaaactatacctcgtcttggtgttcctttcaagtaacataaaatttgctctaatgctgcctaatgatgaattgttggagaagacataaactgactaacgatactaactaggaatgcaatatctggacgagtcacagttagata

SEQ ID NO: 259192 - DNA, 717 bp, Cannabis indica
cttaagttttaaactaaagggtaatttagtcttttgcaaagtttggattaggtggctgccttattatttgacacctaaccaagtcaagtaatattcagcatgaattaattggggaaagtcctttctcatttgaggaaaacttaagaaaagaagaaaattagaaaatagagttttctcttggaatttctctctctttctttcggctgagacaaagcaagggcaaggaccaacttttctcttccttttctctgggatttagcaaggattcaaggtttttgcaactaaggtaaaccctagaaacccttatctcttgagtttatgagttttctttggtttcaagctatgattttgcttgtaaggggctgttaggcttaggtttgcttagggttagaattctagacttaatttgagttggttaagagtcctagcagctggttttagtgtgtggtgttgatttaatgcaattttgagctttgagttcaaagctttggtctttaatggcaagttgagtttcaatggtttgttctgtgattttctggctggaatgtattgtgtatacccttattaggtcctttgaaaggtttcattgcatttggtggagaattgagcaaggaatgagaggctatagggactctggtgcaaaccggctagccagtttacagagcctcaaaaaccggctagccggttttggcagggttccccgggcctttcattttc

SEQ ID NO: 259193 - DNA, 615 bp, Cannabis indica
atcaaatttatctcttgctattattttttttttcacattaagaatttttctcttcaaatctgtatatatattttttttataacaatagaactttttggatcataactctatgcatatacatcctttccaattataattctcaaaaaaatttctcctcccacttacatcatattttttatttagtacacaataacctatgtttatggtgcaaaatagagtaaggataatttatttaagttcatggctcataatcaaggataaatatgcattttgtttttaatagagaataaaaattggaaacaattaggctcaaaatagaacaacaaaggataatgtattaatgttagctttttgtctcaaatgattcaaaaaagaattgtcttaatcatttctacacaacaaagatttaggattttgcctcaataaattaatcatacaagttctagttatttcaatatcaatcaaaataaaccaagtctacataggcacataaaatcacaatatatattgaataagtagaacaacacataattcatatcacaatatcaaaagcaagcataacaggttaagcacgcaatctaaaagtttttcacacatactaaataatatcaaaga

SEQ ID NO: 259194 - DNA, 2756 bp, Cannabis indica
attctccgattgatgctgagcacattcgagcagttggtgtagtcccggggcccccttaatttcaagaccgagtgataaacactgcttttgcagcagcgatttacttgttgtggaaaaaatgaaatggttgtatttttgatttagtttgtacttctccgttttaagttgagcatggaaattaggaagatttctcaatctagaatcttaagtatgacttgtaacacccttaaaaagcaggatagtacattattgatgtattaggggctggtagctttgtcttttggttgctgctgtgttagcagcccctttggctcgttgagtcctttgttttgttttgccttcagctggttgttcctgcttgttttgaataaagctcattttgttacaaaaaaaagtataattattgctttaaaaataaatttaattaaaatatttttctaagcacaatcgaaattaaaaatatatatatatatataattagaactacaatttaaatagacataaaataaaagtaaaaaaaaataggtttggagttaggtttggggtttgttagttgaacctatttttaattatattcaagattaattataaattaaaaagatatattaattatcctatagtttttaagggttaatttgagccattagattaaatcaaaggctataaattactatcgctattgatagggaaaataccaaatccctactgtaatagtcccctaatatgtaacatacgacaatagatattatttgtcatcgttttgtaacatatgagatagttacttgttactatgagtaacctctacatttatcactaatattaagtgtgtaaaaggtgttacacatcttaatttaaaattcttaatactataggagttatggtgtgtgcatgagttacatttgagtccataacatccatgagcggttatgagtttaaatttcaaatggtgatattctaaacactgtataaaaaggtctaaggtgctcatattgagaaagaccgaattttctatcaagaaagcactttgctacaaaatcttaaaagacatgataattctaaaaattatttcatgagagttcccttagtgcttagagataggggaaataagcttttggacaaaagtgttataccttattcaagtcatggtgatcctcactaatctacacacaagattgtgagtgagtgtattatatataaatatatatattattctcttgttatatctatgtattatattatatgtgttgtattctttttcttctaccttatatatatatatgcaatatatatagtgtatatatgtgtattgtaatatatatttaattaatctcttagtttagtccttgtataattttacgatagagttgtaatgtatcttgattttcttctattgtaataaaatattaatagatacgtatatacaatagatcgagttcaaacaatctgcatatgattactttatatttcaagaatctagagcaatggatagtcgtgttcttattgctctatgtggatgatatgctcattatgagcaaagataaatctatgatcaaaagtatcaaatccaagctcaaaagagaatttgagatgaaggagcttggaccagttcaaaagatacttggtattgaagttttaaggaatcggaaggaagggactattatcttaaagcagtatgggtacatcaagaaagtcattcaaaagttcaacatggaagacacaaaaagtacatcctttccgttagggggataatttgctttgtcgaaagaatagtgtctgaaaaattcgaaggagacagaggaaataaaagatgtaccctatgctatgttcttaggatgtttaatgtatgtgatggtgagcacaagaccaggatagctcatgctctaagcatcctaagccggttcatgtttgatctgggcattgaacattggaaggctctcaaatggttattaaggtacttgaaggacacttgggattatggtttgacctatgggaaagctaaaggagaactagaattgaaagggtttatggatgcggactatgctttaaatagagatatgagaaaatcaaccacttcttctatttcatgacaaattagaagtgtatatgctggaaggcccagttacagtctgtggtcgctcttttcaccacagaagtagaattcatggcgactatggaagcttttaaggaagctttatggctttttggagttctttatgaaacaaatcaagggggatgactatgtattcatatagctaatcatccatctatctttgtaaaaatctagtttatcttgaaaagagcaaacatataggtataagactctactggattagagagaagatagaggaatgattgattgaattagaaaatgccagatctaaagataatcatgctgatgttaggactaagatcttaacagttaacaagttcaagcattgcttggacttgatcaatcttagaagttagtatattgagataattggaacaccaaccataatggttgcattctttcttcatcattgtcttactattaatccatctatgcaagcacagttagatcaattgaaaaatatggttcaaggcctgaccggcccaaaactcactgatctccaggtagaccgagcacacagatcacccttcacccccgagatcaacatccttgagctacccctaaagttcaagatgctgacctggaagatgtacacaaggaaagaggataccttgtcacatcttaaatattttgagatgcaaatgga

SEQ ID NO: 259195 - DNA, 543 bp, Cannabis indica
attgaaaataaaaaaaaaattatgtcatgcatattgtatatatttattaagagttaatcccacgttgctaatgtgtggaaataaattgtgatatataagatgaaagggctactcttcccattgccaattggttttgggatggaacctcattcatcttatccccatgattctaacatggtattagagcaacaaacgaaaaaatctctagcgactatccaactccaaaaaataaaccgatcaaagtagagccaccaaaaatctaaaaaaaaattgatccaagagccaaagtcaaaaaaaaccactagtgattcggggatatagtgagccaaaaataaaaaaagagccaccaaaaatccaaaaataccgatccgaaaagtagagcaaaaagtgtcacttgtgatcaggatagtaagctaaaaaagattcgcttatgatcgagtagtccaagatggtgagcagctaaaatagctaccatcttgagggggatgttagagagtcccacattgctaatgtgtggaaagataatagaatatataagaagaa

SEQ ID NO: 259196 - DNA, 1490 bp, Cannabis indica
tagtttagggggcattttcaatgccttaaaaatttaaggatatgatttggtacatgtcaaagttcaaaatcctaattcataataacaaaaatatacacacgcctacaaaagaccagatataacaaacgtgcaattgaatatttaattaaactatcgtaaattatctaattaaaaactctgcaaatatctaatataactagaatatgcatcgtcatgtaaacaatatttcactcataattttcccaactgcatacttgtagaaacaaaaatagtgtctagcttattaccatattttatatttatataaatatttatttgaaaaaaatcctaatttagaatagtaattaagtagtatgatatgatctagtctgctccatgagaaggcaactgattttggacaacattgacattaagagtaacactactctcttcaatgtcatctttatactcagcaaaacaagccaatcttcccaactcctcaacttcttcaataacaatatcaagcttagcaaccgtctcaaccaacaaagaagcaaatgccgcgaaaggcaaagcttccgagaattccaagcttgttatcgcgattttgctaagttgaggcctaagcattttgtgttgactacgattattttgatctcctcctttagttttccactccatcaaagcggaagagtcagtcttcacgcttgataagtgtgagttattactcaaaaagtgatgtttgtgttgttgatcgcttcctcgcagggttcgcttccccgctgaggctgcatgagctgcagctagggctaacatgttgtttgtagccgagccgcctttgtctgagccgaggaagaggcggggttgggatttgattgcggtgtttagatcttgtaaggcctcgtggaggtgatctgagaggatctcgggcgagcaatggcggcggttttttatgcttgtggctagctctattagggcttttgacacttcttttgatactcttacgcatgggtctttgaataaaactctaactgattttggggtctgaaataaacatacaaacacatacataagtactatttcgtccaaataatttatgttaataaatttacaaattaatcttcttttttcacttaaaatatataaatctgcaagaagtaaaaaaaagtgtgtattgctttgtgtaaaaatccctatatatagttaatctaagtcttcgatccaaaaatcgaaaccctatattcaagtgatatattttgaactcagaaaaaaaaaataatgtattttgaaaatttaagtgaaaataatagtaaaagttaaaacaatttttttatatatatttctcaataaagacataataaaatattaattaaatttggataggtgatttgtattaaccactttaggttaatcacagtcttattttataaaattgaaaattataatatgataatgaggttgttagtttgtttttctgacatatatgataaaagattcaaagttggatgtat

SEQ ID NO: 259197 - DNA, 1806 bp, Cannabis indica
agactggtcaaatatgtgcatttgctgcgaggacaggtcgactcatggtatatagtaagtgtttatattatttgctattggattatgtgcctattctattataaagtatgttggaagagtagcatggtgaatatttttaaagaatatatgtatggtacattcatattgatattgatacacgtcttagttttaaatggttagaagatgtggactaaatgtgtgataagttacgcagtaaaggcaatcaaatagtctgattagcgagctatttgggctcagggcaaacaatatggaagagaattatttattgccataatgctgggaacatgtaaattctgctatacaggatatgattagacaacaaggggaaacaaaattgagatctgaaagaacaataggctcatcttgtgtttgttcttgtactatcgacacttcctattgtaccactagatgtatatgaaggcaacttattagtagatcaagaaacaaaaactaaatgaaccaccagttatgggacaagataagaaaggttccagggtggtcaagatagcggtcaatgtgagaataagaaatggtgaccttatcttgagtgttcaagatgcaaaaagatgccatttgggatatgtagagccagatcttgttattgtggagtagtgtgtcatctaagaagaacctacccacagttaagaaagactgatggtaaagaagaaaagtgtacgagtcctgcccaagtgccagttatgatttaaggggacccaaatatcggtccttcgagcgactcaagttacaatttatgggcaatattataatttttattgatattaaacattgtacatttagttagagacatcaagaaatctgaatggactgtgcatgtatgttatttagtggtaatccatttaacaggatagacagattagaaagatgacaatatgagttaaattgttgatattccctagtggaatataggacatgactagttaatggaggcatcgatctaattgattcaaataacaaaatcttttgtttaaaaatgatctagcattagtaaaggtgagacaatttatgagtattgtctggaatcctagataaattgaaggcgacgattgtgtagtaattttgagattatgtaggcgtgggactacctatgttagcaagaagcatcatcttttgatagcttaccatgagggaacaccatggttgagtgtccttaatttagggtgattttatttaggaaatttccccatgaagtgtggacgttaccggggtaacatataagagaacgtcaggaagagtagtggtatcactaaagtaaagaagattacctttacttaaggtgatacagtaatgatggatagtactttataattgactggatagttaatatggtatataaggagaccattgacattctagaaaaatattactttattatgcaattatggaaaggcatcctcaccctcaatggagaaaaagcttatgaattgatatgcaatttaatagacacgtaattgagtgattagtggatgttggatcacaaagtaggttgtttattaaacaacgagctgtataattgagtgtagaataaattttaaagtggttaatcaagtatgaagataatgatgattgcaaggaagcaatgatggtgtatgaactagggaacaaaaccttagtagtaatgacgggaaaaaatatacgagagtcgtagatgttgatggattagcttcatcaacgatggactcactataagttggtatggtaatttgtaccaatggcttatcagtataacaaagaatatacttgagg

SEQ ID NO: 259198 - DNA, 958 bp, Cannabis indica
catgaaatggataagacagaaaaacccatgcaatagtggactaaatagaccatgatctgactgaaccactatatttcttttgtgctctttatatttccagtacgtctgtgtatccatactttgaatactcaccattctaggttgagtactcgcacatttttgtttgtattcttaatttattatttattttggtgttgtctaaattcctccagcaacaattatataacaatataattattcaatcatagttaattcattctaattagggttgctaatctattttactaatctggggatattacaattatcccctccttatagaaattttgtcccaaaatttacgtgaacaactcgggatatctctacctcatgtcaaactctaattcccaggtcgcctattcgaccttactgttatcccgtaacactttactaacaccagtgttttgttcctcataactttctctcttctattgagtatgtacactggttgttcttcataagacaaattgggctgaagttccaaagctttgtagctcaaaatatgagatgagtttgacacatattttcgaagcattgaaacatggaacacattgtgtagagctgctagcgcttggagtatagccaatctgtacgccacttgccctatcctctacaatatttcaaaaggtccaatgaacctcaggctaagttttcctcacttgccaaagcattttactcctttcataggtgaaatacggagaaataccatatctccaacctaaaagtcaatatccaatcactttggattagcataactcttttttttactctgagcaataagcatcaagccccaatcttattaatggcctcacttgtcttctgaacagcttcgggacccagaaactttggctcacctaactcatctcagtgaatatgtgatctacactttttcccatagagcagttcataaagggcccga

SEQ ID NO: 259199 - DNA, 527 bp, Cannabis indica
taactaggaggttcaggccaagcagcatcttgtaagaaacgacatttgccttctgttatttcttgcaagaagcgcctgtggtgactagcaatatcttttggtaggtttttactaagtggtccctaatttttgcatcattcatctctaatttggattcaggttttgaaatattgggtttatataagatggctagttcactggggcactctgtttctaaaaattctggacgataaacttcagaaccagattgggacattattacaaaaagaaagcaatcccaattcctggatgaaatttatcaaactagaagcttgttaatttgagaaacccaaaaatctatgttctgcctaaaccctaaaatttacccagagaaaattcaaccctaaatcgctaaaaccaaataaagtgacaaagatgcaaactaagaaagtagtaatcaaacccaaaaatgtgaaataaaaagcatataagaaaatagagagatgaatcacttactgttttgttaattccatttttggcatatttaa

SEQ ID NO: 259200 - DNA, 1133 bp, Cannabis indica
agtgaaattaatttatttacatgtttatggactatattattatatagtatacttgtgttgtccttttttgggtgtgttctgacaagttggcgcggtatagtcacaaccgggtatttcgggccgaaatataattttgggattaattattggcattttatttatatgggaataatctaaaaattaattgaatttatttgtgcgtggaagtgattattttacccttgaaatgcttatgtgggtgttttatggctttaatggcaaatgagtaattttgccattttggagtaaggttcataaaagggatttttagcaaaataaagatttaattttctgcattttttccagccctatagctgaaccccctttcttctctaaactcctcccaactcttgattttgggttgtgcttgcttggtgttggtggcttttgtgtttgagagtgaaaatagttatttttgcattttaaaaaggaaaatttctgggctttttcctctgccctagctaaaccccctctccctcttttcttcatatttttattttgctaagtgttggaaaattcatcttgaaagcttggattcttggtggattttgtgcttagctttgtttggagcttgaggtagtttttaaccccttttatttgttgatttttcttgctgaaatttattgttcaaaatcatgaaaatagtgtatgatgttcttggtttgcatgtggggagaatcaatattaatcttgagaaatttgggtgtgaattgcttggttttgtaatggattatgttggttgggttctagatgagatttttgggtaattttcatgtttaaattcaagtttttgtttgatgtcttgttgctggaaaaataagtttgatgcttgcttgaaggttcaatttcttgattaggaacttatgatgaattttactctaggtttggatctttgatttcatattgtttgaatatgaatttctatacatgtggactgaaattttaagcttaataatgtgtggtttaacttttttttgtggtagtttaattgtataagaggttatgttggattgaagcatgtttgggttgaaatggatgagtttagggggctgaaattcattgtaaaatactgatttttatgttgcttgtttttg

SEQ ID NO: 259201 - DNA, 1085 bp, Cannabis indica
tacaccgaccaaccactacgacaaatactgcaaaagccagatgcctctggacggttactcaagtgaacagtagaattgggtcagtacgaaatcaacttccaaccccgaatagcaatcaagggccaaaccttggctgactttgtggtagaatgcacaggaaaaaaagaaagcataccagaaagcaatcccgagctagtacctcagccaagtaatattgaagacaaaccgacctggaaactacacgtcgatgagtcagcaacagatcaactatctggtgcaggaattgccctcatcacacctaggggcaacacctgcacgctgcggtcaagttcagatttaaggcctctaacaacgaagctgaatacgaggctctaatcgctggacttaagctagcccaggaaatgaaggccgaacacattgagatctgcagtgattcacagctggtggtaaatcatgtatcttacgaatacgaggctcagggagaaaacatgatagcatatttgagcaaaatacacgacctgctcgcacaattcaaaagctaaggtcttagacaaagtccaagagaagaaaatacaagtgcagacgcgttagctcgattggcaagcaacaatataagtgacaaggcaaacttggtccctattcagttccttgaagagcctagcatcactggcatggaagaaatcgaaatgatcgacacatccccaaacaggatgacaccaatagcaaactactcaactctggggaactcccaaataatcgaaatgaagctcggaaaatgagaagaaaggcagcacgatacatcatattagaatgggtcatgtacagaagaggattctcgatgccattactcagatgtgttacacaagacgaagctacacgaatcttatctgaagttcacgaagaattctgtggaaatcacgcagccagacagagcttatcaaagaaaattctaaggcaaggctaattctcgccaacaatgattgaagattcgagagcctatgttaagaagtgccacaaatgccagagattttcaaagataccaagagctccgcccaacgagctgacacagatgcaaagtccgtggc

SEQ ID NO: 259202 - DNA, 607 bp, Cannabis indica
tatgggaatcctaaagctagtgacagatccgattcttggagattgctgggacgccttaaggatctttttgatcttccttggatttgtggtggtgactttaatgaaatcctctccatcaatgagaagaagggcggtgctgatcgtagtttttctgctatgaatgatttccaacagactcttgatagctgttcattggttgatatggggttcgagggtcaatgttttacatggcttaataaaaggcaaggtgttgcgcatgtgcaggaacggcttgatcggttttgttgtaaccaggattggcataatttatttccatcggttcgaattattaatggggacttcctacattctgatcatagaccggtggtggctactttggaaaatgtggttcgagttagaagaatgataaaaagaggtgtttcaggtttgaaactcattggctgaaagatgatgaatgtcatgacattgttaatcagacgtggttggaacctgatgttcctctggatagtcaagacagtattatggatatttttgggagatgtgccgagaggttgagggaatggaataaggataaatttggttcgattccgaggagggtgagggaaac

SEQ ID NO: 259203 - DNA, 576 bp, Cannabis indica
cggtctactttgtttattagagtgaaaaaatttctaagttagttaatctcctttgactaatattgaaatttaaatttttaactgcattctcatgcatcttgacacgtaaactcatcctatatacaactaaattagctccattattatcacttagcaaagtgcccacatcattctccttaaattttgagaggaagcctttcccatagtttgccaccggtataaattttaattttatgctagatttttgactaaattactaaccaacctgataactggtaccacacgtatatactatgtggaagtggcttacatgcaactaacaccaattcatcaacaaacccactattctctcaactaatatcaagtcaaaataattccttttgctttgctacaaaattctacacgtgcatgctttccatgcatagcataacattttttttttcacttaattatttaatgtagcatacacactaactaattattctcttatactcatcactcataagttcaacccgtatcaacttaatctcatgttctttggtgcgacactaacatttttatttattatttaattat

SEQ ID NO: 259204 - DNA, 946 bp, Cannabis indica
gtgcagctttccttctcttttttcgagcgtcatttcggttatctgggagtttcccagagtcgaggtaggctgctattggtgtcatctaatttggggatgtatcaatcattttgatttcttccgtgccagtgatgctaggctcttcgaggaactgaataggaaccaagtttaccttgtcacttacattgctgcttgccaaccaagctaatgcgtctgcagttgtatttttttcttttggaatttttctgagaccgtagcttttgaattgtgcgagcaaatcatgtattttgctcatatatgctatcatcttttctgcctgagcctcgtattctccagatacatgatatgccaccagctgtgaatcactgcagattttaatgtgctcaaccttcatctcctaggctagccttagcccagcgattagagcttcgtactcgggttcgttgttagatgctttgaatttgaacttgactacaacatgcaagtgttgcccaccaggcatgacaagggtaattcctgcaccagatagttgatctgtagtcgacccatctacatgtagtttccaggtcggcttgtcttcattgtcacttggctgaggtgtttgtatcggctcagggtttctttctggtatgatttcttttttcctgtgccttctaccacaaagtctgccaaggcttggcctttgattgttgttcggggttggaaagtgatttcgtactgacccaactctactgcccacttgagtagtcgtccagaagcatctgtttttgcagtatttggcgcaggggctggtcggtgtatacccgaacaggatgagcttgaaaataggcctcaattcctgttgctagataaggcagtatgcgagtttttctatcaacagatatcggctctcagtctcaatgagtcttttactgatgtaatagactgggtgttgtacgctgttcac

SEQ ID NO: 259205 - DNA, 1275 bp, Cannabis indica
aaaaatatttttttttgttttcaaaattttgattctcaattaaaaaattgaaaaatgaaaacagttttatagaacttgtttttcaaaattatttttatctttccaattttaaaaacaaaaaactattaaaaaaaatgttatcaaacgacccataagttttcaatttttttttcaacaagtagataacattagatcagctttcataacccacaaatatcaccagtttattcatcaaattggcaaaattacaatctaaaagtgtgtgttgtatttgattatagcagctgttggtaagcattaactaacaaaaaatagaaaaattttcacttttgaaagaagaaaagctcctcgaaaatgagagtaaactcagttccttcgctctttgattacttcaagatccatctctgttggatgagtagcataaattttatagtggatgccttccaactcttttctacacctgactttggatgtggcctttttaagcaagttctagccgttaaggagacttgatcaaaattataatgcaaaaaatacataagatactatcataactctatgaaaagcaatatgaaaactacattgaaagaaaactttttgttaagactcaaaattagattctttgcaaggtttattttaacattataaacaaagtaaaataataaagagttcaaagttacccatgcaatgaagaatatcttgctcttttgacagtcccagaggtcacaaaatcatagttatgaatagcatacctgcaaatattttcagataaagttgcaatgaaatcgtcatagttcttagttaggccactagtcttatcaaccaaaatttccttttttttctcatcaaccttcttcctctgcagttccatgtaagaatttttgttgtgatcagcaactcccattccacatgaagcaatatgataacaacaactacaaaacattcaacttattgaatgaaacttgcaacagaagaagttacaaaagtaattatcccttatattttcttagtggatttatttttggggaattttcaaagatatccttctttaatgttttattttaaattttacggtctaaaatttttttatcacaaaaatacgtttgtaaatttttaaaattaccaaaatcgactctgctcaacaaaaagtaaaaatacaattaaaaaataacgagaaatcaacctcatgataactataaattaactatatataaaatatctaaaaataagctcataacaactataattcaactaatatttttttttttttggtaa

SEQ ID NO: 259206 - DNA, 1332 bp, Cannabis indica
ttttttaaaaaaaaaatataattgattattttattttattattaacacacaacatccacttacaatttttcttatatccttgagtttctatgttttttttacatttgataaaacataataaaaaatactttaaataatttttatcaaatgcatataaatttctatttaaaaaaaattaaaaatatatataaaaaaaatattatataaaataagtttttacatatttgtcattataataaactagattataacattatcattatcattataatagatcttaacaactcacagtactttgaaatttataatttaccaaacactcagctcagcttttttctacagttttgctgaagctgctttttctcacagcacagctacaactgttttttcccacaacacagttgtgtcaaactggcccttagagtacgaaggcaaatttgattttaatatcacatggataagatttaggagggcaaaatattacttagttggcatttatagctcaattttcaaaaagaaaatattttttaatataactaactttaagataatttttaacacgaacagatatagaaaatataattagttttgtcataacatctctagatcatattattattaagttttattttgacaaaaaaatcagtttagggtcctatttgtacaattttagaaaataaatgattcattttgtcatttaacaaagtagaaagtccaattggtaatttttacaaaatacagggtccaaaatgatatttatcctagttaatttaattctacaaaattgaatgtttacatgttagtaacctgctattacaggtcaacaaaaatgtcactatggttacaataaaaatgtaatcattaaataatcactcatatatatatatatatatattctcaaacttttatatcattaattttacattatatattagcttatctaaaagaaaaatgctaaaatcatataaatgtgtcatattgttgttagtataattaaatatcgagtttcacataattttaatttaataactataaaatattactaacaatttacaagatgtcacgtatggataatctagtcactactgatgtctaatagcaacataaactcatgtaaatttgttataaagctttaacataatttaataaatcaatgaaaaaaaaaaaaaaaaaaaaaaaaaaaaaaaaacacatgttatgatgtagtacattagtttgggcctgtttggcatgactttggaagagcttttgaagtctcaaagctacttttagatatgtttggataaaatatgagaagagctttttagagaagcaatgactcaccagcttttt

SEQ ID NO: 259207 - DNA, 1260 bp, Cannabis indica
actccttccctctaaggtattttgattttaaaatcctccatcatagggattgactaccattcagaatattctacccccatttagccagaaaggccaagttcatttatctggttttcctaaacctaaggccccccaaggaaatttgggaaggcaaagcttatcccaagcttgtaagtgcaacccgtggttacctttctcgaaaccccaccaaaaagcacgcaccaagccatcaactctggttgcaaggcgattggagagcttggtagtttgcatagcatgtaaaggcagagacaggcccacagatttgatgagagtagcacgacccgcctttgatagtgttttcgctttccaccactgtaacttcgaagtaagattttccaggataaaactgaagtctgcgttcttttgtcttgatttgaataggggaagacccagatacttgatgttcccctcaggcgtgtcgattcctaaaacttccttgatcccccttttcattccattggaagtattcttgctaaagaagatcgaaattttgagtttattaactcgttgacccgaccagtcacagaatctctcaagacactgccagtaacctttagcttcatttaagttggcctttccaacgagtattaagtcatcagtaaaatatatacgagagataatcgggtcgcccctgctaagcttaatgcccttaataatactcttacctagagcctccttcaagagcctagataacacttcaacagcccaaatgaaaagatacggagatagggggtcaccctggcaaagatcgcaagagggcttaatagtgccaacctgccccgcattgaggcaaatgttaagagtggttgtagtgaaacactgggacacccaattgtgaaacttctgaggtataccatagcaagaaagcacatggtcaataaatctccagctcagcctatcgttagctttcatgaggtcaatttttattgcaaaaaaaccttccttgccttttttcctattaaacaaatggataatttattacacaatcacattgttatcctgtatatttcttccaggcacgaaagaagcttgggtagtacaaatgagagaaggtaaaaaaggcttaattttgtttgtaataatcttatatatgaccttgtacatcacattgcagagagatataggcctaaaatggttagtttgtttcgggttttgaaccttgggtataaggaaaatattcgtagcattaacaccattatggattttgcccgacctaaa

SEQ ID NO: 259208 - DNA, 311 bp, Cannabis indica
ttatcatttaacaaaatacagaatccaatcaattttttttgcaaaatacaaagtcgaaaatagtatttatctaattttattatattattataaaagtaaaattcaattaaaaatatatatatatctaacatccttatcctataaccacaaaaacaaataataaaagattactaagaagagtctgtgagattgtatgatttttttatttttcaagaaaaaagcattaatattttattcatttgcttcagaagaaagattccaatttgccaaattcatcacttgtaattttttttaatatattttttttgaaa

SEQ ID NO: 259209 - DNA, 644 bp, Cannabis indica
aagaataactttgactctcgcttccagggacattgttggattcttatttaaatcgaaattatcctaagttttcctcttagcttattcatatcgaattagcttaaataatatatcattggataaatggtttataaatcatctgcttgtgatgtcactctaatttctcttatgaaattgaatggcgcagatgactatattcccgacattctatcccgaaatgatataaatcctcgatcttagaaatctcctacttgtatatgtttactttaggcaaattagacttagagttagattagtagtggtggtccaagagagaataataactcaagaaatatttggtataaatttaagtctttgactttaaattttagattccaaataaaaattttatttcagtttccaaaatacaatacagttcaacttttacaagttattaatatccattttctataaatagattcaaactgtatgttaatgtatggaatttaagtttagtattatgtgaccatgatccacttagactattctaagtactcttcatcaaaagaccacaatcacattcttatatatctatggcatttgtatcttattcatagtggttttgacaagagcattctctataaagtgtaaatatgcctatatcc

SEQ ID NO: 259210 - DNA, 1029 bp, Cannabis indica
ttttgaaaccccgaacgtccacaactatgagaaaactgaaaacatagaaagcaagcgtaattttatcctaaaacatcgaaaaacgactctatttgtgacccaaaacataggctaaaaatagcctaacaagtttatagatgtttctaatgctttggtaaacaatgagtaccggaagaaggatcaacatgatcatagagactcaacgccagaagcattggatgcaagtagaggaagatcaaacaacaagtaatcaggtaaatcgaataataggggaaatccaaatcaacgtctagaggagagtcatcaagaagatatcttgcgaaagatgaatgagcctattgtcattagaaagggcactggaagaaaaattatctaaacaagaacaagtcgaatgcaaattgttgtccaaatttctacccaaggtgatgtggcatccacttgggtgacacgtgacaaaattcatcacctggacagaagattgtacatttaatgagtcatgcaagaagatttgatactcgaagtgataaacagaagttgggacatccgagcagaacatgcgaagacacccgaccagcttccatatcaagcaggtggctaacatacactgaccaggggatgcgagttatacaattttagagatatatcctatatatccttgtaagacaacactatctctaaatttatgggatatattcgtagtaattgagaagaaaggaaacctacctaatttcctattctgcttattgtaattatagaaagtaaacaaatttctcattttattccttattgattttggaaaactaatttgatgtaattaatgtgctaatttaccatgctcctgctaaatagtgcataattttctattttactcaatcttttttacacatatttcataagtatatagaaaatagagtaaataactatatatatatggaagaggttttaatggttacatttttattgtaaccatcgtggttacatttttttaatttattggattactattaaatggttgtgattaatttagaa

SEQ ID NO: 259211 - DNA, 1632 bp, Cannabis indica
aagcatctataataaatatagttattgatttaacatctatattttataatatttgtagagagagggattattagggatgtaaacggggcggggcgggtgcgggaatcgctcccccactcccatatccgcttcttaaattcaccccatacccatcccaatactcgtttaaattaaagcgggggcagggcgggaattacccgacgggagaaggattctcatcgagtacccattatatatattttttaaaaaaaaaatgatgtctcaaagagaattaaaaaaaataatcataaaaaattagtaaaacaataaatttaagtggaatagtatgtatagtaaaaaaaatagtataatcaataaaaaaactaagcatgaagttattttaattgtagtaattatgattttaacacttaaacatatacatatatcatattggggcgggtatctatttcccgcccccgctccgtttctgactcaggtatgaatctttatgcccatacccgcccctacccccgaaagtcaacccccgtactcgcttcgctccattaggggcgggtacccaaacccttaggtataattgccattattatatttttttacgcactaataccattattttctttttttttgtgcacatgaataaattataatctcatttatatataagatgttgcccttgcccatatagttgcccaatcctaggcagaaaaactccattctttgaaagtttatgacagattctatattaaaattttttaggagtgctaaaattaattattcttacgcaaacatgtgagagtttactcatcagtcttaaaagagaaaatctagtgtcattcattctctcatctttaatttaaccaattctcaacaattctcaatttagaaattcaaataaaattagttaaggatattttcataaatattcaaaaataacaaaaaagtgagggtaaattatatgttagacttaagtagagaatgagagtatattaggcaattcactaaaaaaaaagtgggtatattttaattaaaaaataatatgagagtatttttgattaatggatacaaaaaagatatattttttaacttatctctattaaaattagcataaaataatgtgaggaaaaagtaagagtaatttctaataattatttaaatttatatttttttaataataaagtgtatctgtcattttatggggtgcaaataaatatcctcatatatatgataattaacatttaattagaataattaaattggcctgaaacaaatatatttcttacgcgtataaaacaaatataaataatacaacaaatcaccatgctcacttattcagtgagtaatgaaatcataattttttgtgttttaggtggattgttaacgataaaaatcataaaatgcattgatgtaattagattaaaaaattgttggcaaaagaatgattgtgtcattgggttcctttcttttccaacaaagctcttaagatcaacaaactgaggctgacgctatagctattccctcactctaatgctcgatgcgatccttaggtgatcatcctatttgattcatgagaagagtttatttatgtcttagcagaactaggaggaatcacctgattggctcttttgtaattga

SEQ ID NO: 259212 - DNA, 940 bp, Cannabis indica
aaagaaaagagtagggggagctcgggcttgtcccctccggccaagaagtctaagggcggtgagactccgtccaaagagaaggcaccagctgaagaggtcattgatctttccgaggagcaacctactgtggaccgtcctgccttgaaggtcgccaagtccaaaggttcccgaggatggagttcggatggacctaagtaggctaaggttggatccgagctgatcagaagtggatctgaacaagttagggctcctgctccacctttggtattgtgcacagagaccaagagaggtagaggcatgctcaaccattatgtgagccggtcgatcccagaggtgaacaaacagttgctttagcgaataatgacttgtctttggagctagttttggggggagtcttgaaggagcgtttatgagtaagtcctttttaacacttttctttcatttctctttgactagttcaggttttaatgctatttccacgtagactggtgtgaagatggcttactcctattcccaagctaaatcagccgctgtcaagaaccttgccacttccaacacaatgcggagggacgtggacttggccaaaaaggatgccaaagatgtatgggcccaacttgagactatgcagacgaaacttggtgaggtcaataagaaactccttgctgaccatggaactagaggagatgccgtcaactgagcaactcgaggtagataattcttctttgtctcgggacattgctagtctccaagatgaaagggagggtcttcggactcttctttgcaggttagaagatgagcttaaggataaaaagaccatggaaaaggagcttgagactgaagctaagagccaaaagtctgaggtggagaagctcggggagaaggtgaatgccttagagactgatggtcttgaaattttgtatgacttctcgaaggctaaccc

SEQ ID NO: 259213 - DNA, 467 bp, Cannabis indica
agtcactttttataaagctaaaccagacctcttttgtttcactttctttttttgggggttcaaaaaaggtgttgctagagctaccctcttatgtgaggatttcattttttaaaaaagaggaaagtttattgaagaacaatataaaggtggtggtgtacataaatataaaagagaatgaatatgtagagagtagagtagtactgtggtatagtattgcagaaaaagaaaaggcagcagctagctatagcatataataatatgaatatatagtaaacggtcaaagtacaatttccaacagtaaaaaaaggtaacaaacttaaaatgaacttccaaatatatacttgatttttatttttgaatttatccaattttttgaaacataaaaattatagtagtgggagtttagataatgaaagttgatggcaggcaagaaagacagtcagagaagaagatagcagaagcaaaag

SEQ ID NO: 259214 - DNA, 457 bp, Cannabis indica
aatatgcatccatgaatgtcattagctcttgtccaacagttgcatccacccacttgtcgatcattggtagtggaaagcaatcctttagacatgctttgtttaaatatgaaaagtcgatacaagttctccaagttctccacgaggggtagaacacctcgcgtataatgtcgttagtcagtaacttgtctactttttctttaagtgccccttgcctttcagaatccaagggtcgcctttttttcacttagctgggtaattagggtcgatattcaagttgtgccaaataaatttagggtcgatccctattatatatgaatggatccaggttaattgattctggtttgccttcagaaaatttattagctgctattttagtttttcatccaaattttttcccgagaaacacaaatttagtaagattttctagatctaaaaaaacttcctccaattcctcgat

SEQ ID NO: 259215 - DNA, 624 bp, Cannabis indica
aaatgtgacatagggccttcgatcagagatggtatttccactcagattaactggcattcatgaacccagaattgaggtaagattagcatagaacatattatatatgcatgttgtgtttgtgattgtatatattttgggtgatatcataacggcacaaccattgtgtcggttcggcagtacatgcatcgtactggttaagagtgacattcaccccagagagtattaattggcgctatcatagtggcacaactattgtgtcggttcggcagtacgggcacagtactggttaagagtgatatcatgaccaattatactcttggggtgctattgatgctattgtagcggtacgaacatagtgccggtcccgcagtgcgatcatagtgctggtagtgggtgatatcatggtcaatagcaccaaccattaagaacgttcttaatcatttggtaagccccgtggataggtgtatgggcacctaaataatagtcgatattatgttatatgtttcatgcttttcttattgagtctgttgtctcacagttgctgcattttgatgtgcaggtaaaggattgtcttgaactgattattagtgagtctggagcttagtgaaggttgtacatatctga

SEQ ID NO: 259216 - DNA, 628 bp, Cannabis indica
acagacttggggggcaaatgttaccccaaatttggcactctgacgtggcatcacgagaatggtgacacctggactccacttggaacatctgctcagaatgatgagccgagcaggacgcctcgctggcacattcagaatgaaattttcaacgagccgtgtagagtgatcaacacttagcgaattcagcttgacacaccatgagtcatcagctcaatccctacaactcagggatcagcttacgtggatgtggcatacacacgatcccactatcagtgtattcagcctcaatcccacgatccttgcattcagcattaatcacacaatctttctgtttatgcgcattgtaacgagagaggaaaaggaccgagaaatcataagtcgatacgcagttaagctaaggctatattattatctacaaattatatattcagagatacttttgtaagacctataagaaaaggaaacttcttccttgttcttaagtcaatacaaataacgaggattaggctattaccgaaatgctcggggctgaacctctataaaatttatgtgtcttattattgctttcttacatatattctcattacgacatatcgtttatcgcttatcaaaaagactcattgtcatt

SEQ ID NO: 259217 - DNA, 508 bp, Cannabis indica
aaggtgttatgggctatgttgattcagactatgctggggacattgacacaaggagatcacaatcgggctatgtcttcatgctaaatggctgcaccatcagttggaaagcaaaccttcaaactactgttgctctctctactactgaggcagagtacattgcttgtacagaagctgtaaaagaaggcatttggctaaagggaatcactagagaacttggcattgaccagaaaagtgtaagcattctctgtgatagtcagagtgcattacatctcagcagaaatcaagtgttccatgaaaggaccaaacatattgatgttaggctccatttcattcgagatgtaataaatgatggaaagatcaagctaagtaaggtgtcaactgaagagaatgctgctgatatgctgacaaagaatcttgctacagcaaaatttcagcattgtcttcagttactcatgatcagtgattagtgacttatacttgtatttttctttgtaattctcagtgtaaa

SEQ ID NO: 259218 - DNA, 777 bp, Cannabis indica
tttttgaatcgtgagtttgcaataatagatcaaaataaaaatgatatcatgcccaccctcaaactaagttataatcatctctcatcacatttgaagcattgttttgcttattgtagattgttcccaaaagatcatgaaattgatgtgagggagttgatacaactatggatggcacaaggatttataacatactctgatgacaaaagccaatgtctagaagatattggttacgagtattttataaatctactttggagatcctttttccaagagccaaaaatagataaatttgatgatataatgacatgtaaaatgcatgaccttatgcatgatcttgcaattaaggtggcgggatcaaatagtgtcataatcgatcaaaatcctaaaatttctagtgaaaaatgtctccacgtgtcattagtaaattttggttttgatactaaaagtgtccaaaaaagacttcgaactttacttttacataatggtaaagggatgagtttctcgaaacttaaggactttttgtccaagtataagcgtctacgagctttgagtgtaccttctttggaaattaaggagttgccaaggaatctatgtgaattggaacatttgagatatctaaatctttcagagaattctaagttaaaagagcttcctagctcttttaaaagattaaagaatttacaaactctgaatcttaagaattgtgataggcttgttagattacctcggaaaatgaagaaattagtcaacttaaggcatcttatgattgaaggatgt

SEQ ID NO: 259219 - DNA, 694 bp, Cannabis indica
agatttagttctactccaacatagagacattggaaatggattaaggtactatggataaaggattgttctattccaataattgtaggtcacaacttattggctacatagatgcaggatatttatctgatccacataaatccaaatctcaaactggctatttgttcacttgcggtgacattgttatatcttggcagtcaacaaagtaaactttggtggctacttcctcaaatcatgctgagatacttgcaattcacgaggcaattcgagaatgtatttggttaagatcaatgacacaatatatcgaggaacatgtggattcttctaataacgaagtatcaacaattctctatgaagataatgctgcttgcatcactcaacttaaatgagggtacattaaaggagatagaactaaatatattttaccaaaattcttctttacacacaatcttcaagaaaatggtgatatcgatgttcaacaaattcgatcaaataataatcttgcagactcattcacaaagtcatcaccaacatcaacttttgagaggatggttcacaagatttaaatgcgtcgattaaaggatctccatgaatgcctaaatgagggagagtaatttcataatgcactcttttttccttgaccgagttttgtcccactgaattttctcggtgaggtttttaatgaggcagttattat

SEQ ID NO: 259220 - DNA, 480 bp, Cannabis indica
ctcttatagttgcatatgtgagtctcaacatctctctctcttgttttcttttcttttttccaggcatgttttaactctgtttttgtgggtttgaacttaaaaaattctctcacacatttagaggttcagttttttgaattgtaaaacatatttacagtaattggttatctcgttttattccaattattgttaaagattttcaattttggctttaaggggtttgaaaaagacatttttggaactcaatcttatcttttgttttgactcatatagtttaaacaaatgaatatattgcactaaaataataaactctatgtttttaagaatctgatatatggggcttaattttaaaaattttatatattatttaaatttttcttcgatgacttgatttttggtttaagaaatgatttatttacatttgattctaaaatagtatatatatatacttgtgctgctattcttttttttttctttctc

SEQ ID NO: 259221 - DNA, 548 bp, Cannabis indica
tctagggtcttggttcggcgattctttttcacgttctaatttttggtcccaggtctaggtgcgggttcgggttttgttcttcatttgggttctggtcctagtctgagtctcatatctatacaccgactactggtctgttccaggccctgttacgcgaatcccgagtcaagatcttgatcactgtcacgggtctaggtatggttcttgtttagggcccaggtcccatttctgagtttgggttcgggatcgagacaggggtacggttctaggtctcgaacctcgttgtgtgtccctagtctggttccatgtttgagtctgagttcaagttcgggttcgggtcccgagtcaaggtttgggttgggattcaggtctggttcccgatttttgtctaggtctgatttcgaatttgggtcctgatccggttatggttctagacatatgtccaatttaagttatgattccaagtccaagtcctagttccagtcccggtcaacttctcgttttggttccaattttaagtcacaggaaactgcttcgggttcactttt

SEQ ID NO: 259222 - DNA, 1101 bp, Cannabis indica
tacgtgctaatcactgtcttacctgttttcccgtaattgacagagattttgaatccccgggtgctcctgattaggtgtcggtaatcctagtcacacaaatctgggattttcactcaaagggttaacccctggttttcaactcataaaatttaattatggcatttaaaactcagataatcatatagagctcgaaacgagctttccaacgatataaagaactcccaaatcggagttcggaatcaaaagttatgaatttttaaaattcaactcgaaactgcccaaaaataccagggcgggccgcggcatgcccaagtcatgccatggcacctggaacgaactcccaggttccatcagcaggggcgggccgtggcatgcccagagcatgtcgcggcacctgggttccaaacccagaaaccagcaagcaaaactcgaaaattcagcaacccaatccaaccaaatcatcccaaaactcaaccaaatcctcaaaacaagattgccattcatcaagcgcaaatatagtgcattaaaatacatacaacaagcactaaactcacactttaccctgaaaattcagattgtgaaaacatatcaaaatcatgcttaaactcacaaacctcaagctctcaaacttgagcttaaatccaacatacccaaatattttccagcaataattatcctcaaacaatagaattaaggtaaggaagaaaccctaaaattccatctacagcttaatcaaacaccacaacaaagattcaagcacaaacatactcaaatttaacagaattacctctaacttcatcatacatgcacaaacaaggctatatcacttacttcatgcttttccataatatttcagcaaggaatcacaaattaaaaactataaaaactacctcaatctcttgcacaatcaagccccaagcttccaacacccttttccaacaatcaagcttcaattcaagctagtttctcacaaattcaagtttgaaaaatcaagagggtaagagagggagagaggggcggttgagaggggaaacaaaggcagaaatctcattctatttcctcaaaaataaattcttggcaaacataaaaattaaaggtcaa

SEQ ID NO: 259223 - DNA, 956 bp, Cannabis indica
ttaatttggtggttaaagattgtcaaattctaaatataagtttcaataatgttgcattatattcttttagggttcgtttggaacgccgcattaggtcgtattgtattgtattgtattatattgaattgaattatatatcatatttttatataatactatgttaaactttaatttatattaaaatattatatatttaagtgtccataaaagttaataccacatatagttttacataaaaatattgcataaaatacaattcaatataatacaatacaatacaatacgacctaatacggcgttctaaacgagcccttaaacgatttgtgaatataattgtttacgctttaacgagtgattatacttaattaggtgatataaatcttttgcctatttaattaggtgattatacttaatgaagttgacatttattccaaaatagaaataataaactatattttttcagcaacttacattttttttagtcacaagatagatgcattttttttttttttaaatataacaaacatgcatagtcttatttaattttgaatatcacaataaagttacatagttttgtttttctctttaattaataaagttacttaatttttccatttaaaaagatatcaaaaaaaaactagttaccataaagtttcatatccacattaaaaaataaaagacaatggaaagtttcactaataagaaccccttccacttaggtttattttttaatacaaagttggccattgctactttacattagtcaatttttttaattgaagaaccaataatataacaacatcaatatttaaagcaatttattattaaatttaataattgagatgccaaacagagcttttaattaaaataattctaaggccacattttcaatctatttctctcagacaatgtaactttaatttgataatggtgcaatatttacactcatttattat

SEQ ID NO: 259224 - DNA, 1397 bp, Cannabis indica
cagaactggcactgagaccctagacctgacccccagacccacaccctgatctaggacctagaccagaacctttgatccgaagtggaactagactaggacccgagaccaggatcctgatttcaacccgaagcttggacctgacccatagtcgatatttggatctgggaccaacacctagactcaaacccaaacccggactcggacccaaacccagatccagacctgaacctgtacctcgtgactcgaaactagaagcggaccgggacctgggaacaagactagaggactaggacccgatctcggacccggaactggaatctgtctaggacccagacccaaacacagactgagatgtggactcaaataaaaaatcggatctagactcggacgtaggacctggactgggattggagactcaaacctggacccaggacttggaatgggacccaagacccgaccccggtctctgtcccaaacccaaacacggacatggacacggactgagacccaggattcgaatcggaacgagaccaggacccaagattgggatccggatcttgacccatgacccggtgcttggacccaacccgtagtcggtgtctgaatcttagaatcgcaccaagacccaaacctggaaccttttccaaactaggacccaaaccaagactcggaccttggaacaggatttggacttggaccgagaactggatctagacgcggaaccgaacacggacccagacctagattgggatcaatacccgaacctagacttgtgccaggacctgcaacccagaacatggaacccaacacccgtgacctaggacctggataagaacccaaacccgtacaagaaccccgacccaaacatagacccagacctagacccaaacccacacccaaacaaaaacccagatctagacctagacccagacctagagtcaaactcatactagaactcaaactcgaacccgggacttgaacctggaccgagtttaggactaggacccagacccggacaaggatcgagccctgaacctggactgggactagaacctatattgggattgggacctgggacctgagacttggacttgggacctgagaaccgaactgtgacctacatggaggacctgggccccaaacccgaacctggtcccagacctggaccaaggattcggacatagatgggggactaggacccaaacctaggcccgaaaccaggactgagacccaaaacttgacccaaactcgagaaacaagactcgactttggacccgaaacccaggaactgaataccaggacacaactctgaacccaaacccaaaccaaaacttaggactcgacctgggactccgtgcctgaattggaactagactgagatccgaatctggacctaa

SEQ ID NO: 259225 - DNA, 741 bp, Cannabis indica
taaaattttaaaagaaaattaaaatcaagaaaaacaacgaaagtaagaagcatgtaaattaataaatgaattaacaatgaataaaagttaggattttcgattttagttgtatctattgattatgctttaacatgattctattcctattaccgatttctatgcaatagcaagtttactaaagtaattcatagtcttctcagatatataaacctcaattacgtgcaaattttctactctcgtgataaattaaacatgtaacatgcattaaacacagaaaccctataagctatctaaaccatgtaggtactctcgtcctatatcaaaattcagttctatttcactatagcataatcgacactcactttttaaatctcgcatcaaaatcatagacttctaattggtgatcaggcaattaaaagtaattaagtacgaatgaaatagaatacatagaaatttaggaaaaattaaatcatattaaaaccaaaaattaatatcaaataatctccatccagaccctaatgaactgtttagctactcacgttcatcgtagcaaattcccacatattaatttaagaaaagagaagaaactaaagaagaaaagaatattgaaaactccgttgaaaacgcctttgcgatcaattttgctctccaaaatttgtactccttgattgcttgttgaaaactattgaagttcacttcttttatagccaaaaaaaaataataataataaaaaaagatgca

SEQ ID NO: 259226 - DNA, 1122 bp, Cannabis indica
aatagataaatgattgaaaaaatagaaaaaaatatatatatatttagtgggacccactctcatggccagccactatagagattatttaactattattttaccatattttttttatttcatataattcaatcctaaccctaggtaaattagtataaaaagaaaagaatagtctcataatctaactaatgattctaaacctagttttcattttgtcagatagctagagagttttgagacttcttcttcttcttcttcctaatttcgaaatctaagagtattcatcagataaaatttcaagccttagtaattgagtgcattcccacccataacaaattagtcctcaatcataatgtgtaagattgtaaagaatccaaacagctgaaggagattcgggctcagattttgattatactctgcaacagaaaggaacaagggttagagatctgagtggaaggagtcatttaattctgctgcatatgtgtttaagttttattgttttaggatgttaaaaaaaatacttgttagtaaatctagttcctaataaatataatccaacaactgacctcaaagccatgctaatgatttactttcaataaatatagatttaaaacgatgtatgtgtgatttggatgtgattcatgttgatctatgtgtttattgatgattgattgatgtttacaaaatctttaagtaaaataatttagaatttcgttctaagaattattttcttggatagtatggaaaaaattaaacaatttattttttttttacagaacttaatatggattttatttgaattagttatgaatttttaaaaatcgataatatcagggttgacatcacccctcacgcgcgtggaacacccttgtttctcgagtgcacgcagttttggacagggatttgtccgaggatcctcacccatttgggcattttttgtctgaaaattgagccttgcgcatggggagagattgcatgtagcctcttacactgtgattcctcggtcagcatgcccatcccacacgcttggatggtatgacaaatccaattatcagttttaaattttttttcgtatttttttattttttcattaatttttcagggaattaatttcgaatttttgtg

SEQ ID NO: 259227 - DNA, 491 bp, Cannabis indica
cttttcttataacttccatatatattttatgatactaagaatgtggatctttattatgaattgagttatattgatggtttatatgactatttagtattattgcttttaatatattttattaacattaatttctatttcttaaaattttacataatatattttttttttttcattttttcaatatatattacacaattatatattcttttatcttcaaattattattattctttttaaaagtatcattttatattgacttttgttttaaaattacatatgacatttgaaaaaaaaaccataaccataactaaaacctaaaataaaactaagtatacgtggtttggcacgtaatatctccctagttaatttttaaaaatatgtgatattttacattttaaatcttataaaggttttttttaaaaaaagtgatgagtatttaatttacaatttaataagatattttacttttaaaaaatcttttttttttaaaa

SEQ ID NO: 259228 - DNA, 1059 bp, Cannabis indica
tggggacccacgacttgtcagtcctagatcccagttgcacactagctctcgagacaggagctttcctcgagccaagcaaagacccaccaccaacctcagcaatattatttccccccaccggcacctaagaagagagtaaagccggcatcctctccttaccaacaagccttttagccttgaacgattcacgagtgccagaagcactaagtttgccagagaagcaacaagtgtaagaagagtttgactttagccatggaccatacagcgggtatttgataccctgagcatcctcaatggtgattggagaactcaaagaacattccccacgttggtgtccaaggcatccacataaaaagcaaaagttaccaatattttcatacttgatttacacccaacaattatctccattaactattttaaaaaaacaaccacaaaatagggcatgtgtacattgatctctacctaaacccatatccatttattccaagtaatcggtctagactcatccaaatcaatgaaaatcaccttacctgcctgagctccaagaacgttagcattagttcgggagaaatagtggtccagcaagaaatgtatttgaatccacagggtgatgttgttgaatgagggttccatagtgtcgaagccagaggaccaagaaaggagaaccaatgaataacatttgttacaccagggtccattgtcgagaacgccttctcctatctgccaccttctcgaatccaaatctaaacacattaggagcatcctgtctagaaaaaggggtgtccaccttcacatatgttttccaaaggttagcacagaagacttccacttctttctcccccaaagctctaaaggtcagcacttttccaatgagacaaaattttgacagcacttgggaagtagaagcactagggacaagagtaatggtggcctcattaagagaaatgcatctgccccaagaggaagcagactttgaaaactacataaatatgaaaaatggagataataaagaattagaaaaaaaaaacttcatataagatgccacctagaatgctttgt

SEQ ID NO: 259229 - DNA, 1145 bp, Cannabis indica
aatgttcaaacagtctattttacacgcgtataaaataaaatagtcacacgtgcaacacactgtttgaacgtagttttcagcgtgttaaactttttcaaatttcttaaaattttacaggttgtcttaaataactataacatacatgactatgagaaaaaaatttgactaaaaaattatttcgggtgctaaaacagacaatggtgcatcaatatatccattctaaggaggtgtattgtagaatttccctattgtatatatgcactggtgagagcgaaaaaaatactctcatattaaagaaaaaaaacctaattataaatttatataatattaccttgtcatcgggttgttctggtaacttgccgttgccggaattcacaggaggacgaaccccatcggatgagtctccagaaactccatttttgtcaccgaattcatgtttcgggtttggaactgagttctttttaccatcaatactcacattcttccttcctaataattaaaacatgtaaattaattaataaatagcttaaattatttatgaccattaattccatcttatatatgttttaatgatgtttaatatgtgttaaaaaaaaagccattctgttatgttaatcacgacattagaacctgcatattatatgtagtaattaactggtaattctatattaatcacatatatatatatatgttctaattaataatcatatatagagataaaagtacatataattaattaaagtacttaactagtaattaattcttgtttctcacaccgcaaccagcataataataaatcgaatccgtgttaccaaaaaatttatttgagaccttccctcccttcataattatatatataaagagaattgtcaaaagatactatcggagtctaatacttttttgagaatcatactgttattgatgtaattaagtattgagttttatataattttttaaaaataacttttagttaaaaaatatcgctaaacaattataaagtgtcatatatactcgtatataaattaagtataccaatatatttcatataatagaagtttagaaatgatcccaatttaatattatattgaagtttgtaatcttagttttctgtatgaacatgaggaaaatggaataatcggcactct

SEQ ID NO: 259230 - DNA, 866 bp, Cannabis indica
actctcgtgataaatttaacatgcaacaggcattaaacacagatccctataaactctctaaaacatataggtactctcgtcctatatcgaaattcaattctatttcactatagcataattgacactcacttctcagatctcgcatcaaaatcatagacagttaattggtgatcagacaatataaagtagttaagcgcaaataaaatagaatagatagaaattagggggaaaaataaatcatattaaaacaataaaacaaagttaaacaatctccacctaaccctaatgaaatgtttagctactcatgtttatgagagcacaatcacacatattaactttaagaaaagagatgaaaatggagaagaaaagaatgctgaaaaccctctgaagaatgcctccaatattgcagttgatctctccacttcgcatgtgtattctctctttttttcactctgaaattacttgatcaaaactattgaagtccacttcttttatagcccaaaaatgataaaataagataaaattcgttgaagagaaaaaacttattctccttaggattagaaaacttattctgcttagaattagaagaagaggtgatatttctattgcgtcgactgatagtattttggccataactctattgatatttcttggaattaaacgatttaagatgttccggaaagataaaatatagatctagaacttttatgttttgactttttccaaaatctaaacagaagatagtcgaattcaggcttgaagttttagctttattttcgtgcacaattttctctattttaaatatcatcttttggtggagatatttttatcttttttttccatctttttcctctgatatttttcta

SEQ ID NO: 259231 - DNA, 1792 bp, Cannabis indica
ataggtcagggctaggaccattctcaggccgtacaataaaaatagtgtatgcaaagatctcgccttctcgtttgttcgttggtccaagaaatttatttttctttcatggatttaaacgaagtccccccaccagcataaccatgtctattgagggagaacttgttcaggtaggtgaaaggccttttgtgggacaagactaggccagagcttttctggcgacaccacagttggcggaggctttagaaactattaccaaaggtgaacttttcgttgaatgagaccatcctgtggataacaagagtagtaaaaggagggaaattcctttgtcaacgtaggtccaccccgaatccatatgggagatggaccaaaaagccaactgctttcaatcttacgggatgtttcaagcgtactccgaagttgctggtctttgcaatgttcctggtctaatgtggcataggctttctgtccatggggaatctgcatctgtcagtgttgatggatttagtgcatggagtgggtcccatatttctagtggcgctcacccccctttgagaacctacttcgcgaatctgattacgaggattgggattgtgcccttccagttaatcccttcatcgtacagactcttagctaggtgatatgtgttttgcaaaattaataggctggaggttccctctccagaggaaatcctttatttctactatgtcaaagccaatccaatgaggactaataggtcaaagctagggttcttccatcaaggtaggcacctagactcctactgtccaacctctgccagacggattgcacccacgatatttgggagtataggttttttcctctgggattcctaccagcagggtgccatcccttcagttgagcttccaactcctaggtattttaatatttcatcccaagctttgtttgtttccaaatcgcaccatttcttgtgtatgaattaacgtctcttaatttgtagatgagcttcccctctggagtgttagaacagaggaaatacccaggaaggagggccaatatagggccttctctgaagaacaacttaaggttaaaggcttggtgacaactaagcttctttgtagatcgagcctaatcaccaagttttagaacattgacattgtcagtctctggggatagcatcaacccctcaaggaggtaaaggaagtaatggccaccagtctggctactataatcaccaatgcggccaaaaatgactgcgccctcactctgatgggtgttgcgtcgtcttgatcctccgtctgaggaagaagaaatctcagaaagatttgctgcctatatcccgacatgggtgtaggtgccagtacatcaggaagaggtaatggaaccttccgcatcttccgtaccccaagtctcagttgcatgtcccggaggaattaggggagatttgacaagtattttctaggcataaactgtcttgaattccctatgaaggattatatagataaagtagacctaataggtaggagccctagtaacccagggaatccttcaaacatcgtcaaagttgaccctttgatggttatgtcctcgcctgaatttgaggaatatggcagctctatgagtcataggaacattttagcatttgcccaggggcaaccttatagctcttaactgaacggtacacacacgcacaagtttcctcactagattttcctttttgcggttgttattgcttatgatgatcatatgacttgttatggcttttgtcctttactgaaaacgttgtcttattttgcagggggctctgatgacagtt

SEQ ID NO: 259232 - DNA, 670 bp, Cannabis indica
cgagagtacctatatggtttagatagcttatagggtttctgtgcttaatgcctgttgcatgttaaatttatcacgagagtagaaagtttgcatgtaattgaggtttatatatctgagaagactataaattaccttagtaaacctactattgcatagaaattgataatagggagataatcatattaggccataatcaatagaaacaattgaagtcgaagccctagttattattaattgttaatttccttatattttaactgcttcttctttcactatttatttattttctagttttaatcttttctatctttttattaaccaaatagaagtaagagtttaattttaacgtacttaactacactctctgtgggatcgacctcactcctcgtgagttttactactttaaacgatacgtacacttgcgtgtgcaaaatatcgcaacaacagtggctaaaatctaacttttaccagtgcatttacgcgctgggaaaagtcatttttgccagcgcttttcattttatgctggaaaaagttctaataccaatattgatttgccgacccccttttgccaacacatcacaagtaaattctattttaccagagcaaaacttttgccactggcaaaagtgacatttcttgtatcccacagggagtgtagttaagtacgtta

SEQ ID NO: 259233 - DNA, 2371 bp, Cannabis indica
atcattgatgactacactagaagagtttgggtttttctactcaaaactaaggatgaagcatttcagacttttgtcaactggaagaaactaattgaaaaccagacaggaaggaagattaagaaactaaggacagataatgggttggaatattgctcagatcagttcacaaagttttgtcaagacaatggtattgctagacacaaaactgttgtgaaaacaccacaacaaaatgggattgcagagagaatgaacaggacattgcttgagagggtgagatgtatgctaaagggtgctggtttagacaagaaattttggggagaggcactgcaaacagcatgctacctcattaatagatgcccttcaacagcactaaggtttaaaactcctcaagagttttggacaggtgaagtacctagatatgatcatctcaaggtttttggctgcactgcatttgctcatattaaacaagacaaactagaacctagagccatcaaatgtttgttcttgggttaccctgatggtgtcaagggttataagctgtggtgcctagaagatggacacaagaagtgtttcattagcagagatgtggtgtttaaggagcatgaaatggcaatgaaacatacaagtacagagaacaatcatgagaagcaaagtgttgagcttcaagcagatcaggagaatgcaaaatttgcagatcaggtggatatttctgctacacacagagaacacagcactgaagaagatctaaggaaagaacaagtgtctttagaacttcaagattaccaactagtcagagatagagttagaagagaagtaaagccaccagaaagacttggttatgctgactgcattgcctttgcacttgcagcagctgaagaaatcaaaaactgtgaacctactacctatacagaagttgtcactggaaagaatagaaagaaatggcttggtgccattaatgatgaaatggggtcacttgaaagaaataagacatggattagattacctagacctaaaggacaaagggtaataggatgcaaatggatatttaaacacaaagaagggttacctggtgaagaggtcagatacaaagcaaggttagcggctaagggatttatcagagagaatggattgattacaatgacatcttctctcctgtggtgaaacaaacctcaattagaatcatgatggcaaaggtggctatgtttgatcttgaaatggatcaaatggatgtcaagacagcatttttgcatggaaatttagaagagaaaatctatatggaagaacctgagggatttaagaacatgaagactgatcaggtgtgtttgcttcagaaatccttatatggtctgaaacaggcaccaaggcaatggaacctgagattccatgaattcatgctgcaaattggatactcaagaagtgagtatgatccttgtgtttactacaacaagtctcctatctggttattgctttatgtagatgacatcctgataattgggaaggacagaaaggctatagacatgctgaaagaacaactaagctctgagtttgagatgaaaaatcttggtgaagcaaaaaggatactagggatagatatcaagagacaaagacctggttatgttttcttgtctcaggaaggatatattcagaaaattattgacaagttttgcatgagtgaggccaagacagtaactactcctcttgcctcacacttcaaacttgatcaaaatcaagcaacagataatgaagaagacaggctatacatggacaatgtaccctatgcttcctgtgttggaagtctgatgtactgtatggtctgtaccagaccagacttggcttatgcattaagcatggtgagcaggtttatttcagaccctgggaagacacattgggaagctgtgaagtgggtcctaagatacctaaaaggaactgcaaaagttggtttactatacagagacaatgcaaagtttgagactgaaattgcagggtatgttgactcggattatgctgggagtattgacaccagaaggtcaattaccggttatgcatttactgcctttggtggatgcataagttggaaatcaaacttataaaaggtggtggctctatctaccacagaggcagaatatatggctgccactgaagctattaaggaagcaatttggttaagaggtttcacagaagaacttggattcaaaggagaagacatcacagtccactgtgataatcaaagtgctatacacttacactactacaaaaacaccctttagaggcggtttttaagccctttcagcgtcggttttcgcgaaattcgctaccgacgctgatcagggcgacgctaaagggtttatatgaaccgacgccatatataccc

SEQ ID NO: 259234 - DNA, 1873 bp, Cannabis indica
aagatattcaaactcaactaacatgcatattattacacccatctgacagcagtacaatatatcacggaatctactttactatgaatgaatatataagatattcaaactccactaagcatgcattgataattaattataataacaaaaagttggtgaatgtatatacctatagcaagttaaaatccgatcaacaccaaattattctgaaccttaagctcacaacctacaatataatgaaatacaacaaaattagaattttaattatttaattacttactagttataaaaaaagtaacaagttactaattactaaattatatacattaattttttaaaaaaacatcacatatacatacatatataataaattatatctaacactaacacaattttaaaaattttatttctaaactaattaaatctctcctatctcattctcattcacaatacatatatacacatacatatatattacttagaatatatagatacagtaacaaaatttacataaataatatacacaatatatataaatacatattcaataaaacacaaattattttacatatatattatatatcaagatagtaaatatttaccttataggcacaatttggtgaccaattacgacaaaaatttggctaccatgtacacacaataacataatattaataaaatgaaaaagtcccaaaaaaattacaaaagcaaaaataaagcaatgtacattaataaaatgaataaaaatcatatttatactttaatggacgttcatattcaacgttttctccactaacatcagtggtcagggttataccaccactttttttaatagactcggttacagtgaaataaggagaaaaaaccaaacttttttagtgtataaatttaggtattgaaaataaaagattttaaaagaaaacggagtaaaatggtgtagaaataagggaaaataatgttttttagaggtgattggcgagagtttcgtcgtgggtgtgggttctgctatggtatttcttgctgaagaagaaaaagaaggcgaagtggggaagacgaagtctgagggttttttatataaacctatgccgtcagttattaggaaataaccaacggcaggtgcacacgtgttagtaaaggtgtgcacgtatggtgtcggttatttcctaataaccgacgacatagggttaataagtaaccttgaaaaattcccaacctacaatcgactctatagggtatagttaatttctatacctaaggtttttactaaaaaattatttttaaatgtcaatttttaattatgcgagtatttttacgccctttagttttcttttttataaaattgattgaaagaaaaaaaacctctaaaagtccatataggactcacctgaacataaatttgcaaagtagcaacacttcaattatagtctctatttttattgagcttttaaaccgttcacattgttaaaaaaaaaaaacaaaaacgtaacctgtagtcagatatttgcatttggtttgaattttagcttatcaattaattgaaatgatatctttcaaataaataattgaaatgttgagtagatcgattcgtcttgtttttaaaatcacaaaagcgaatctttctgatacgattgtttattgattcaaattatgatcgattaatatatttactcaacgacaaacacttatttaaatacaatatactgataatttttaattacatatcgtcatgtggaaaaaatgttacattgatttctttattctcccagctcattttttctttttgctttggattactttctatgctgctcccgctgatcgactacgtttagatacagtattaaaataagcaggagagtattggactccgaatatatat

SEQ ID NO: 259235 - DNA, 723 bp, Cannabis indica
cgcctaagatagttagggtgttacagttttctaaactcttatgtgtttaatttcatcgtattagaaaattcatatttagggtgttaatgaaccatacatgttagtaaatcaagattctcgtaaaataaatcctaacaactggtatcagagccatggtaatgatttactatcatgaaatattgatttaaaatgatgaatttgttgtttggatgtgttcatgttggtttatgtgagatttgatgattgtatgtgatttatgaaatttgtccatgaaaataatttttttagattccttgtgaaaaattaagaaattttgatttttatggaactcgatttcgataaaaatttaaaaagatatggatgtttgaagttttgagtcaaagtggtgtcgagagactcgcatcgcatgcaccagtcactcgaacaaggtgttcgtgcgcgcgcatgccttagacatcacagtgtctcaactcgatcacacgcccacttcagacacgatacgcgcctagaaatcctacagctgaccgagattgctcagtcaaggaggctgcaagttcctccttccgatcgcgcccgaggctgcgtgcagccttcctaggtagttaggattttcaaccaaaatcgatttttgggtgatgttttcacccaattttgattttttctcttcaaaaccctaaatatctaagtaaaatattatttttaatatttaaacttaaatatcaa

SEQ ID NO: 259236 - DNA, 828 bp, Cannabis indica
atttttgtatttttttcttattatttttgtgtaattctgaaataatcccatttttttcttcgtatatttataatttttagattttaatataccataggtaaagtttttttttttttctcttgcaaccaattttttaatatttataaacatatggtaatatatatttttttgtaaattgtaatataggtgtgtattttttttatgttatttctcaactgatttttaatttagttatttcaaataaccgatttttgatttaattatttcatttgattagtttttgtgtaaaaattgttaatttgattgttttacataactaattttctgttggaattttaattaattaactggttcttataatttaaagttagggaataaattttaatttcggggtaaaataaaaatttaaattatttttatttttatttttcaaaattatttttgagaaaaaatattagatggaatatggaaagggaattgggtgtggagcgtttgtatggtcatggtgtttggaggagcaacccaatgaaaattaataggtcgagttttggcttcagtggtccaaccctattgtcgtttttcatgggtattgtcattcattgtcgttttattctaattatacttgcattacatattctcatatactgcagttcaattaaaatcatattcagatgaagtaactataaaaaaataatatgtaaaatttatacattttcatacatagaaatatattattattactaataatttttatagaaacataagttgtttgtccaaaaaaactcggagcaattatcacctaaaaaatggagaattcagttgtatgta

SEQ ID NO: 259237 - DNA, 498 bp, Cannabis indica
ttttatttagggcacaaaacgcaacacttatgtgctgaggtgaacaatcttcatgacgagaggactttcttcgagcagttcttcatcggatgaaggatgaaaaggaagccaaggacggggagctttcagccgaagtggataggttgaaggagaaggtcaatgccttggagacagccgatctcgagctcttctttgatttttggaacgctaatcctcgtgccaattttgactacttgggtgacgctaaggacatgtaccttgagtaatgtgcgtcccaagtggcttatggcgaaactgaggtggctgcttcaacctccggtcagatcactgatgcacctgctccggttggcccagaagaaccgaaccaagaacctaggactccagccgtttaaacactcctctttttctctttttatttgatatatcttattaggcctcagggccttttctaagacatcatgaccgaccatgcggtctttaaacttggaattatttttc

SEQ ID NO: 259238 - DNA, 675 bp, Cannabis indica
ttaaaaaattctaaaaatcccgaacgtattcattgtccgtgtgtagattgttgtaatggatctaaaggaaatattacaatgattaaggaccatgtgtatttacgaggtttcaatagaagttatactacttggtattggcatggcgaacatttagctgatgatctatatccattaggaaagtgggggtagatgatatcgagggtaatgatttcgatgatcatccattggacttgcttaacgaagcacaggaggagtttcttaatgatcttcagaaattcgataatgttccttccttggcctaagcacttaattgtaacatccaaggtaacttctcttataaattaattattaatgattagtggagtttgaatatcttcaatattcaaccatagtgaagtaggttctgcgaatatatgtgctgcggtgggatggatgacaaactattgttatatctgtgttatttgtcattatacaggcatgtttaaaatttttgggggcattcacttacagccgttatgctgctgaaatttcggtagaatttagatcaaatttgatatattatgttctattttgtttagggtctactcgctcaaccaccttcaagacgtgatgcgtcgaaggagaaagctcccacgctttctccacaaggtgatcgtgcacgggaagatgaattat

SEQ ID NO: 259239 - DNA, 499 bp, Cannabis indica
cgcaccagagactcggacaaaacccgtttacgcgcgcagaatcgggacaaattccttgtctgaagcgctcttcagtcttgttcggacatctagggacgcacacgtctcgatcttgcagactccgagatttctcggcgtcactccctctcccgcgcgcgcatctggcccgtttgcagcctcctgggctgcaacgtgcagcctgtctcgtgggcagccccaaaaatgcgatttttgtgggattttttcccaatttcagattttttcaattttcataccccaaatttaaaataaaatatatatttgaacttaaatatcatcttttaaatttaaaaattgattattttattttttaaattatggtcagatttaaaaattttgttaatttctttaatatttatatattatttaattataagattagatattttgatatttaacatattttagataactttatcttttttatttgaaatattatattaaaattatcttatatgac

SEQ ID NO: 259240 - DNA, 540 bp, Cannabis indica
gattactcaaaggtaaattgtacacaaaattgcccttctgtgaagaatgtgtacttggcaaaagctgcaaagtgaaattcaccacatgccaacatacaaccaagaatagacttgactacattcactcagacctatggggtgcatcaagaaccaagaccttgggaggagcaagctatttcatgagcatcattgatgactattctaggaaggtgtgggtgtttctgttgaaaagcaaagacctggcttttgagacctttgttaactggaagaaattgatcgaaaattaaactagtaggaagataaagaaactcagaactgataatgggttggagttctactctgatatgtttgtaagttattttaggaaagaaggcattgccaggcatcacacagtggtcaagaaccctcagaaaaatggccttgctgagagaatgaaaagaaccctgttggaaagggtaaggtgcatgctcataggagctggtttggccaagctttttgggggtgaagctttaaaaactgcttgctatttgataaatagat

SEQ ID NO: 259241 - DNA, 1105 bp, Cannabis indica
accaagaccttaaaccctacttctggtggaacgaaatgaagaagaatgtggtagaatttgtatcccagtgcctaacttgtcaacagatcaaggctgaaaatcagagaccggcaggtttattgcaacctttgacacttcctgagtggaagtaggaggatatcactatggactttgtggttggattacctagaaccacaggtatgtataattcaatttgggttgtggtagatcgattgacgaagtctgcacattttctaccagtaaaaacaacctttacagtggatcagtatgcagaattgtacgtgaaagaaatagtaagattacatggtgttccaaagtccattatatcgaatagagattcaaagtttacttctaagttctggcagagtctacaacgggctatgggtaccaaactaaaatttagtatagctttccatcctcagattgatggacagtccaaaaggacaattcagataccagaagacatgttacgagcctacataatggatttcgagggctcctagagcaagtatctaccactgatagaattctcgtataataacagctaccagagtacaatagggatggctccctatgagttgttgtatggcagaaagtgtagctcacccattcactgggatgaaacaggagaaaggaaatacttaggtccagaatcagtgcaacagactaatgaggtcatagagaagattaagatcagaatgcttgcctcttagagtaggcaaaagagttatgcagatctgaaacgcagaaatatagagtttcaggtaggggtttatgtgttcctacgggtgtctccaatgaaggggatcaaatgtttcgggaaaagaggaaagtggtggcctaggtttacatgaccatttaagattctcgagaaggttggacaggtggcatatcgtctagctttgcctccagctctttcagcagttcacaacgtatttcatgtttccatgttacggaagtacgttccagatcctactcatgtgttgagttatgagaatcttgagctacaatcagacctatcatacgaagagcaaccagttcagatcctagacaaaaaagataaggttctttgaaacaagaccat

SEQ ID NO: 259242 - DNA, 691 bp, Cannabis indica
atataaggaaaagtatgcacaaggattacggatccaattgagttatgaaaaggtatggaggtgcagagagaaggcactacacctagctcggggtacacctgaagattcatactcaaaatcacctagttacttgcacatgctacagttgagaaatccaggtaccatcacagattttatggtagaagatggtcgcttcaagtattgtttcttctctctgggtccttgtattcgggggtttaggttttgtcgacctgttgtatgcgttgatgggtccttcttgaagactaggtatggtgggcaaatgttgtgtgcagtggaactggatgcagggatccatatctttccgatagcttttgctatagttgacagtgaaaaccaaaattcttggacctattttatgagaaaattaaaagaaacgattggtgatgttgagaacttaacctttgtttcggataggcattaaagcattgtttgtgctttggagatcgtgttcccttatgcacaccacggtgcatgctaccaccgcattattatgaacgtcaaccaccacggtgcatgctaccaccacattattatgaacgtcaaccacaagttcaagactgacgttttcacaaatcacatttacacgtgtgcctacacgtattcaaaatcagagtttccaaaaaaaaaattcagcacatgcatcggaccc

SEQ ID NO: 259243 - DNA, 9159 bp, Cannabis indica
tgaaatatagttgttactaaattatattaatactcatttatacgagagaaatggggtggtgtgtttgaattctaagtgtgatcacctaaacactataaaaaagaagtctttggtgctcatttaggatgagaagttttctatcaaaaaaatacattgttaaaaaaccctaagacttgataatttctaaggttatttcctagagaatttccttagtgcttagagatagggaaaataagcttttagataaaggtgtaattatatatattatacctttctaatgtatcttgattttctttcattgtaataaaatctctaataggtttataatttttgttgtgtataatatatcatttatttaagatgatatttagtagctatttaattatatagaatgattaggtataaattttttttgtatgtatatatattttaacagtggtatatataattttgttagcatgatatatatttttttgagtattaatttagtattattatgatcttttaatggtatataattttattactactgtatattaattttcagtgatacaatacatcaaatactgttgtatatatttaataatctaatatatttatttgtttttgttacaatatattaatatgaaatactaaataaattatataacttaacttagttattatatattttttaaaaaattaatatactaaatgtatttttataatttttattagctaacttattatattttgactattgtattaatttttttttttttaaaatatttattaatttaatttttaaatttaagcaattttataagtcttattttctttgataaaaaaataaaaaaaatacaaaaaaaaaaatatatatattttaagatcataaaatgtggtgtaatattatcacagcatttaattgttggctttcacttcgctagtaggattgtcaagttcactttctcatttggtaacttgttatgtttttttttttcctcaaatccaacaaataattttatgatcttcagtttctaagcggcaatggagtatttcccaattctgtaagtatttcgtcaaatttcattaaacaaaagctgcaatggtgaggacttacgtgagagagaacgtaccgctctcgcggttcggcgtcttggtggcgcagttggagtccattggcgcttccgcggttcagcaggcgccggagccactcctctgtttcgatctcttatcggatctcatttccgccattgatgaagaacccaaggtctccctaagtttctaagtctagctctactttttttttctccaattacgaaaccaatgcttgaatttgattccttcgattgtggtggaacgaacttgtggagttcgagaccttttggttgttcttcgtctcaatttctgtaggaacattaaatacctatctggatccttaggatgtaaatgaggcaatgtcacttcaatttaactcatgcgtcctcaccgttttgctgattggtgtgtagtttagtatgattgctttagatagttgtagtcggaagtttttttggatcaaactgcggcttaacgatgcagtgatttttgagttttttgatttgcctaagttgaaatataacacactcaagcattcaagctttgtgtcagaagttatggtggtcatgcttgatatattcatgttttctggggatcggtagttagtcttttgaaagagctcgagtatttatgtttgagtcaattgaatttttaattaaatgcactgtaactcctgattattctcactatgcctgtggacaaataaatttcaggaatctatcttgttgtggcaaaggaaatgtgaggatgcactgcaatccttgcttactctcggtgctcggaggcctgttcgccatttggcgtcagtggcaatggctaggattatatccaagggagatggaatttcaatatactcaagagtgagcagccttcaaggatttctctctgatgggaagaggaatgaacctcaaaaagttgctggttggttgcatacattttcacaagcttttttaattgctattgaccatgaaacagaagcaagaaggttattgctgtgtaatgcagtttgtccccatcattaatttattgttttctgaatcaattgtataggtgttgcacagtgcttaggggaattgtatcgacattttgggagaaaaattacttcaggattacttgaaacaactataattgcgacaaaacttatcaaatttcatgaggtagtcccacatgttttgcaaatttacaaatttataatacaggattcaaaagtgtgagaggaaccatttgttaagaaatgaatttggtataattgttattcgtaatcttccactgtggattttttttttctttcttcagagtggttttgtttgtatttatctcccccatgttgttaaggacttgtcccttccaccctttcacttttaagttggtaggattatacgccttttttaggtttcattttgtcattttcgttgcagcataaaaggcaactagagctaacattttccttacaattatggacaatttgtttgaatagtcacatttcctacttctttactttatgctggatgatttttaatctggcatcttagtctaattaagtgtaaatatcttttacgacttgttatttgttatgcacatgctctaatttaattatcctatttatttaatatagtatagcggcaacgatgtaacattacttttcctttccttttctttgatatcttctattgttatgattctagctatattcatcatattcaggaatttgtcagacaagaggctctacacatgcttcagagtgcacttgaaggctctggtggcagtgctgcatcttcagcatatactgaatcatttcgtcttatcatgcgatttgctgttggggataaatcatttatagttagaatagctgctgcaagatgtttgaaggcatttgcttctattggaggaccaggtttaggagtgggagaacttgagaattcagcctcttattgtgttaaggtaagtttcttctttgtctggttctttctaaatgtatgttggtatttcaatgctactagtaagcctttttgcgtttttccttattactattgtttatgcaataggcccttgaagattctgttccatctgttcgggatgcatttgctgaagcattggggtctttgcttgctcttggaatgaatcttgatgcacaggtttctttgtcctttattgccccacttcttctttcagttagctgtttggctgactttggttgaagtaaacactttcatattgttcagattcaattattattcttaattttaatgcaaatggtttgtactaatgaacataaaataaagaaaataattgtaaataggtcctaaattggacgttcactttgctgaaagttcagaagaaggctaatctatccatctgtttatttttacatttatgatttttgaagacttgaggtttaattttctttaatcaaatgcagtttttcaagtttcaaatctaattgaaaaattatcttactactatgtaagatgtatgagtgattaatcttaaaaaacacaatgaacaattgaatttaattaattaagatattacattttgttaacagatgacataatttgcgttatgtttatatgttagtttgatttgaatgaattctgattcacgtataattgcattatcagatttcagtatgccctttctgcattctatttggttttcttcgttgtattcctttgtaatcgcaagtttgtttgttttactaggttcaaccaaggggaaaaggtcctaatgttccagcaaaaaagctagaaggtggtttgcagaggtacttaactttgcctttcagaaaaggtaatttcttctgtgtactcgtttattgtctataccttaaatgggttaaaaaaaaaaagcaatgttacttttacagtttattagaatttaacttgtcgcggctaaattttgtaaaagttggcgactttattgtttgatgattggcgttgcatgcataatctggacataaatgcattaaatacaccagaaaaagagaagtagagtaaattggtagacatggcattcatgcttcacagtgttaaagtactctaacaaactatttgtattccagcaagtggatctcggtcaatggacatgcgagttggaattactttgtcgtgggtgttctttttacaggtaatgcttctttgggagttcttagtgctattgtggttgactatgctttggatttagagtacctttctactcattaagaaacaacaaatagtgggttttatttgtaagagtaatgctagagacacaaaaattgtacaccttttacacacaatgatatttatttaatttctaccatagataattatatatcgatgccacatcacttttaattgtggggttaagattaattacatatcattgtttgtaaatagtgtgtcacaatcattattgtatttttaattgatctagaactaaaattttctatgcgctaaatgcaagacagggatcttcttatgatgtgtgtgaatgtgtgtatatgtacatcacagtggatttgatttaaggtagtttgttttcactggataatttaaatggaagtatatattaagcagttatatattgctgcttgagtaacattgctctctctgtaagtttatgaatttgctatgacaattgttggatgtgctaaatttgaagtgtgaagtcacatatgtttatcttatctttttttaagatgctattgtttacttcttttgcgtttatatccgctctttacaagtttcttttgtattgtatctttcagaccattcgtctaaaatatctgcatccggatagtgagctccagaactttgttttgcaagtcatggacatgctttgcccggatgcttcagttgattcccatgctctggtatggattaattctcacatgtttctgttcagtaagtaaatagcttgttttaaaattgaaacttgatttcacagctaaatcattagtcaagttcaagaaaaaaaagagcttcttttttaaatagttttttagccccacccctctaggggcaaatacatagctacaattaggtaattctcgtacattttatatgtcattgttgtcatccgttagagggtgaaacagggaatgactaaatggaggaactgataatttagaagttagtcagcctcaatttaattcggttgaagttgaatcatggtgttgatttcttgtcattcatctcaatatttgacttatgttcaatttatcactcagttaagcagcaaccaatatttataccagctatagatctgtctaaaagagtatcatctggataagtttttgctgatttaccgaagaagcatgtctccaactaccagataacagatagtacaatcaagaccagttaattgtaacagcctgtgttagaattgaaacttgttacattagaatttagagagggattctgttttatgtacatagaggaacttcagattttattaaatgaaattaggggtagaatatattagctggattaagtcaaatatttattccttgtttagtagtttgcttgatggtgcttccttaaatattatggagcttgggaggattaggcatttagaatttttagtttttatagtgaacagttgatgaatgatgattctctctctccgtctatatatacattttaaaaaatactgtttgcttttatttgatgatatcttctctttgtcggtttctctaatatagctatgcctattagcaattccatcctatgtgaagctactgactgataaatcattgtttgttgaaggcatgtgttctctatatacttcgtgttggtatgactgaccaaatgacagaacctactcagagggattttttagtttttcttggaaaacaggtaaccataagttgaaaagcttattatggactctatacatttagatatcaattcttctgacgaattcctaagcttctatggtgtttctaaagcaaactttacaatgaaatttacagctccaattgccagatgctagtccttccatgaaaattgctgctctacgtaccttgtcatatacactgaaaacactaggagaggtaccacattgattttgttaattttatctatacctcgaataaaatttcttacagatacatttatgtcataactatgttgactcaattaagcctttgttcgtatctttcccatttgcaggttccttttgaatttaaggagatgcttgacgatacagttgttgcagcagtatctcattcttcacaccttgtaagctcttgatttgtcacctgcatttgaagatttagcccctagttttagataatcttattgtctccatgaatttccattttcttgcaaaaagctaatgtagcattatgagagccaacactcactataaagaaaatattactgccaaatttacatgtctttcctacaaatcctccaatatctgattctctggtctaatagtaacaagtttgagaaaatcattgtatcttggtgaattgaactccatgagcttcctggtttgctaatgcagcttaataattattgcattcagggtcgatttataattaggtattcaggtgtagatttagttaaccaactcaggagattgaaatccatttttgtcttaaggagattagtgccgtaacctctctagttgttttaatgttttatgcttctattactgtttccttggtttataattgcagtaagagatggtcaattggttcttgctgtgcttttatgtaacctggcattcctttgcttttagtttttttaaggtcatgattacagtgtttcaatttttaccatttctacaataggtcctgtagctgaatgtgaatgtacaattatggccaggtacgaattgaagctgcttcaacattgcgtgcattagctgaggttgatcccacctgtgttggcggtttggtttcttatgtagtaaccatgctaaatgctttaagagaaaatctttccttcgagaaggtgaagttgtagtttttttttgaaacagaacattaatcccgtgctatattctgatggctattttaatgaccagccttgattatgtttcatgtttagattgctgcaaagttaaaggatgtattcttgctagtgtttgccttttggtttctattttgtcttaccattaattacttaagctttacatattatggaacttatataatcagggctgctataaattattttactaaatagtaaaagggcaaattcatatacttgacctctgtaatttctcttattatttaccttggtcttgaatcacttctttcatgaataatatgtattataagtggttcccatatttctctttgcaggggaataatctgcaattaaatctgaattccttgcatgggcaagctactgtattagcagcatttgtatccatctcccccaaattacctcttgggtatccagctaggtaattactaattacttgttttatttctgatggtaaattgctatttgcccatcaattgagaggtactttttaacaaataacttcatttgctggattgacactaagacttattatatttttttgctttccaaaggaggatttcttgccatcctcatgaattctctacattattatatgcaagtggtttcatgactaattactcatttattgctcatagattacccataactgtgcttgaagtttcaaagaaaatgctgacagaatctagtcgaaaccctgtggcttccatagttgaaaaagaggccgggtggtatcttttgtcatctcttctagcttccatgccaagagaggtatccggtgatctctgtattcttatcaaaactgttggaatactgctttaaggcttatcattatatggtacgcctgaaccttgcaggagattgaagaccaggtgtttgatattctttccttgtggactgacctttttaggggaaatccagagcatgaaacaaaacaaagtgaagatttgatatctaggattcggtaatactgtaaagtgtatttctattctattctatggcactggtttttgacttgtgatgagctaacctaatacttcctatcatttttcttcttgtcaatacttcttctcattttagttttgttagaactctctcaggacctagtacattgttctattatctttcaagcttttatgtcttgcaatgtactctacacgtataacaagagtggtagctttaatttttattcttttatttcttcctgtagcatgtggtctgctgcagttgatgcacttacatcatttttgaaatgcttcgtttctcccaattctgtcgatagtgggattttacttcacccaattctcctatatctgagtaggtatgtttattgtcacaaatcttgctatcttttacatttttgtactttgtccattttttgtttgttttacatttcctttctacatagttaatttaaaaatttcttacttgacataaaacagggccttatcatatatatcagcagtatcaaccaaagagctgcgtaacttgaagcctgaaatgggcatatttattattagaacgttaatagcatatcagtctcttcctgatccaatggcatataagaatgaccatccacagcttattgaattgtgcacaacaccatttaggtgaagttttgcatctttccctcttatcattccagttctgttttagtaaaatgtatctagttccttccaaatcatttttttagaagtgaagttgatctaaccattctctattcttcctaatttaacttagcagggacgctgtggggattgaggaaagttcttgcctgaggtcgctgttagacaaaagagatgcatggttgggtccttgggttcctggaaggtgtccactcttttcttttctgacatcactacatcattaagtcatttttatagccaaatttggagtcctccacgcagtttctgcagtgagatatatttttttaattgtgtttccttagggattggtttgaagatgaacttcgcgcttttcaaggggggaaggatggccttatgccttgtgtgtgggaaaatgagctttctagctttccactggtaattgttgtttttatatagtttatttctttactatctgttcttgaaattataatttt

SEQ ID NO: 259244 - DNA, 580 bp, Cannabis indica
gagttggtgtagtatcctgtatttctcgttgttgattttcaggtctattgcatagcttgaagatggtgatctatagcagaaagatcagagcctgatgtaactgagttcagactgaagggagttcagtgtcatcttcgtcatcatatctgaagggatttcagattgaagagaagtgtcgaagacgaactcagctgctgcacaagggattgtgttcatacaatcaagattcttgattgatgttggtaattcaatactaattgctgtaaagattgtattaaattcctaagagtgaactggaaattgtaatactgatcttttggatttagtagatgttattaccctggttcagggaacccaagcactagtcggctaagatgtgttctcagtgcagatgaagcttgtaaatcattgtgtgctttagtgctttattctcaatccaattatctaatccatgagttgaaattaatcaatctaatcatgaacaattcggtaaattgaatctagaaaattggataagtagttctttcaatatggtcttagagtaccatcatttatactatcattaatgtgttatgttcat

SEQ ID NO: 259245 - DNA, 1549 bp, Cannabis indica
ctaaggacttttatagttggtatgtgtcactttctccgatgcctcgctattcatgtttagcgacagatggtttctcgctaatacactaattaccagtttgtacattgattcctcgcctaagccttacagtcagcgggttacaaatatactttgatacttacgtaattaatgagtcattctataaaaagctttagctccgatttacatttcctttatcttgacacatgtcctccagccgaatttcgggtataacattagcatttaggcagtccttgaggtctttcgtcgagatgctgtcatcgggatctaagttttccacgtcaacactttagttaacagaaattctacgggtggtttttccttccccaaatggtaggtcccagtacctaagcacgaggcctattgtctcgctcgacctttctctgtagattgattgggcgagctaaccctatacctgggtcaaccctttctcactagaagaatggattggacatgtttttgttgtctctgggagtgtcatgccgaagccttggtggatatttttttctttggggttcacccacctttttcttcctttttttttttgaatttgagagtctagccccgaggtggttgaacttccttgcttgtggagctccaacattaaggtttcctcttactgccacgccttgtagctctaagagggattctcgtatttggcgtgtgacttcctgttgttcctccatctttgcttgttgatccgaaatatatgtcccaatgtcaccacctcgtgttcctcctcgtcgtattcctcgtactttttgatatggtttattccatagtcgtccccttaatcctcatattggccttcttggtcatcctcctcaaggggattttcatcaacaaacttttctagttgctcgcctttccaagggggatggttggctacttctgatgcatcactatctcctttgatgtccacatgaacgttcaacgaaggaggcctatttatgtcatcagtagtagcgtcttccttatcgttgcgagcggtcagctttggtcacagttttggttgtgaccatggtgtaaatgacaacaatgctggaaacttaagttaaactctcacataacacctttcccacttgaaattcattaacagcaacatcttctaacacatcaaaggaatttctagtctggacttgggaagggctagttatcataaccttcttctctttagcttcctttaatccttgatcatcttctttaataattattgaagcctttccactcgagccactgttggaacttttaacttccaaagtttcttaatttgctccaccttttcaccttcttacaaacattacttgtgtgaacaatgcctttacaaatctcacatttatttagcttccattcataagaaactttgagataaaccatctgcctttttttatcttcaaactttatttgattgggaaatctttttaaaacatccatctcaattagaactttagcaaattggagcttatccttgttaatagtagcttgatcctacttagtcattcaccctaaa

SEQ ID NO: 259246 - DNA, 611 bp, Cannabis indica
tttatttaatctatggcttttttctatgggaatgtaaaaaggtgtttaagcttctctttttgttgtgaaatttgtcaaactaacaatttgaaatactaaaatttataaaataacttcttaatttgctctatcattatgcgactatgataattgtacaatataattcatgactgtttctacgaccatacaagattattttgctaataaaattattttattaataaaaaattttataaaaactatttttcacaaaactctcctctttaattatgacacttgcactatctcctctttttttctctttgatttcaaaatacaatttgatcacacggcaatctattaaagtggttattttgagatataagacgcatatgtcttttcaccattgtcaaatcaaatcaaagcaactaattaattgcttaggatactaattatatattgatttgttgcattttaataaaaaagaaattatattttagttctcaaatttatgtttggattttttgttaattatatttatagccacgacctgaaatttagtgggtcataaaaaaaattattttgggcccttatttagaaaaaaaaaagtgatgatttttaaaattaataaa

SEQ ID NO: 259247 - DNA, 548 bp, Cannabis indica
gtttaatgggtttgataataattcgatgaatgctcgaaaatagcatgatatctaggttagtgatgagctcgataaagcttgatgtcgttgtattcttttatataggttcgatagagctcattaaaatctcaaatgaattttgttttctacatatgcttgataagctcgatagggctcaatgttggcttgatgggttcaatttttattttttatctaagtttatggggctcaatgtacactcaatcgagctcatggtaaaacattcagaaatcaaacatatcgaacctctattgagtttaattgagctcaagataaaacattcaaaaataaaacctgtcaaaccaccattgagcccttattgagatgttatcaaactcatgttcaaccttggaacacaattttctgaatttatcaagctgttattgagcacctattgaatttttatcaaatttttatcgaatttgtttaccgagattttaagaaactaaaaatttataaaaataaagctaaagacgaaataattagaagatgaagaacaaatgtatttt

SEQ ID NO: 259248 - DNA, 715 bp, Cannabis indica
gagccttccaaattgcccaaccaaccatgacagcttcttcaaccaaccccatatttcctactatcaacacttccataaaccagtcaaagaaattggttgctgcagagtggccaacacctaacgcagatcagagccaacaagaatgagcacaggagcattgaaccaaaacatggaaaattgactcttccccatagttgcacaacacacaatgtaaatccacaggaacatgtttactatgaagttgagtacgtgtaggcaaacaacccgaaagagctttccaaacaaaatgtaaaaccttgggaggggctttaatcttccacaacatcttccaaacaacatcctccatggatgagttccaactaccattgaccgactataagtgattataagagcttttgacagtgagaaaaccagttggatccctgttccaaaaccaactatcactcacaagattaacactcaaaggcacttgtttgatgagttcaacatcacgagaatcaaacaagtcctccataaactccaagtcccattgtcaaaatagagtttgtattgaagaaactgacaaaaattatagtattacaaacattaattattggatgcttctacaatacaccccattaaaatgggtgtactgatgcaattcctaactgtttcggtatttataagaattttttagtctaaattttttcatagttgtgtatgttatagttattta

SEQ ID NO: 259249 - DNA, 218 bp, Cannabis indica
catgataccatccaaatcacaaacaaatcgttttaagttcaaatttcttgcaagcaaatcaattaataaaacacataaaaaagttaagaaaccttacaatgggtgcagcggaataacgtgtctccctccactcagatctctaacccttgattcctttctttcacagagtaagatctgagcccgaatgttcttcacatggatgtgatccttcacagtct

SEQ ID NO: 259250 - DNA, 635 bp, Cannabis indica
ttatttaaattttagaatatagaaaatatctatttctacaaattgtttttttatagtatagcattttacttattataattttttttaaagtttagtttaaattatttaaatcaatatctattgtttaggatgtatttagggtgatgatgtggtagtttagaaattgagtgttccaattttttaattttgtggtttttttaacttttacatgttttttttttcaattttcttcaaattttttcatttaatgacttaagtggtgacttttcaattatttttctatttattaccatatcttcatatatgtatagttaaaatatgagtattgctattaggtaccaatggtgtctagcaatttcttcacatgttgccttgcaattggctagcgatactccctaaaaattattatattaaattatatgggatccgatacttaagtacaccaatagcaatattgacatgtaggaaggtgttaggcaccactggtgccctttagcatttctcttaaattattgcatagtaaattaattaaattaatcaaaaatcaagaagcagatatgctttaaaatagtaaagttttccaagcaaaagtcatatatcaatgtattaatattttttgattagtttttatgtga

SEQ ID NO: 259251 - DNA, 686 bp, Cannabis indica
tagtcggtgtctagatctgggacttatattagtaccaaaaccaagacgaaaaaccaaacccgaacccagacgtagagttgggacctgaaatttgaacctgaaaaagaatcgtcgaacaaggaccctagaacaagactaggactgtgacaaagacccggacccagatgtagaaccgaacacagacctagcctcagacccaaactaagactggaattcgggcccagacacgatcgtgtacgcagaccggaactgagacccggtcctggacctaaatcagggacccgatcccaaacacagacttggacctatatagggatccggataagaaccaggacgaggaccaagacccagactgggttcgaaatgttggacttggatctataccgagatcttggccctaaccctaacttggacccgcactcgggaccccaagtttgaccttgacccgaacctagacccagatctagctccagacctcgacacaaacgcggacacagacttggacccgaactcaaacccacatgttgaatcagacccaaagctagacccggacctggacaacaactcgaacctagaccagaacagattcaaagacttagacccagaactgaattcagactcagatctggattggaacttgggactcggacccgacctagaccaagacccaggacgcgaacccacac

SEQ ID NO: 259252 - DNA, 728 bp, Cannabis indica
taatacttccagagatgatcagcgttccaagccctaggcaccatggttccatccaatcttttaaccttataggtcgcggagccgatctcatcctcgatttcatatggtccttcccaatttggcctaagtacccccactccgggttcttgagtggctgggaagactcttcttaagaccatatcaccaatagtgaattttctacttttaaccttagagttaaggtatttagtcaccttcttttgataagccgccattcgtatttgagactcatcccagagttcctcaatctgatccaacgcttcttgtaataaagctttgttcgttgttggatcataagttgttctcctgtgggatgggaataacgtttccaccggaaccattgcctcacaaccatattccatcgaaaatggcaagtggtcggttgatgttcttggggttgtccggtaggcccataacactcttagcaattcttcgggcaaattgtttttgcaggccagcagctttttctttagggtgacctttaggattttgttgaccacttctgcttgtccgtttgtttgtggtcttgccactgcagagaagcttttaacgactccgtgctgattgcagaagtcggtgaattcttcgcagtcaaactgcttcccattgtctgggactattttgtgaggcaagccgtatcgacatactatgtttttgataacaaagtctagtgcttttttagcagttat

SEQ ID NO: 259253 - DNA, 1625 bp, Cannabis indica
acctcgcatatttgatgaagtcgaagtatcaataggaaaaggcccaaacacatacaccaatcaacgtaagtcaacagtcaagcattcaaggagcattcatgacaagcgttacacatattttataaccgttgtaattaatttgattaataagcctattattattattatctttttgtaacggtctcattatggccattatttgtaaccgatgcctactacctataagtaggggcttccccctccattcaaagggggctgatctgaataaagagacagagcaagagactcttttgaacagtggattaggcaggtcgagcccgaagctcctgctgaaccactatattttttcgagtctattttataatatttacaatacttgcatatattatacactatattctttgagtattcgctattctaagtgagtactcacatatctattttttggtatccaagcagcccttgaatactcgcataaaattaatgttgtcaaaattcctctgacaacagcttcgaagaatttgagtaagaaaagaagggttttgggtcgttagttgaagaaaggagttgggtttgagagatctgatggattggagctaagaaggagtgtgaggaggttttgtgtttgcttaaagagaaggtagactaccaaaaaagtatccagaaagaataaaaccagttcttcttcctctaatggttagatgcccttttctctgcttccatccttgtttggtttgagagtaaattttcgtttagagaaagtaaaattgaagtctaaagtattttactagataattggctagtttcttttatcaattgaaattaataaacccaaaatattttgtttttcgactagacatcggttcaaattttataataatttgaagctttttgagaaaaagaggaagaagcacaagttaatgtactcaaatatgttgatgtctatgtgataaatctataggctatggtattgggctggttcatggttaagcttactaccggtattgaatttgctaaaggataatttgtatagctttatcaaataaaaagtgcttaagttcaaaataactcaataaggatacaattttctcacagagaaattatgtatgagtaatgaactttcttgaatgcatgtatatggactttcagttttagggtagttggtattggtattataaacaagttacttttaaatttgttagtttaaacttttcaatttttgttttttgttgtctttatttcttcagataccgtctttgaggtacgaaccgtgacttcttgtggtagttcgcaataacatatgcgtcgccccttttttctcagactactccctcgatcgatggttgtcgtcgaaaaagatggaccctcgaacgtaccgtggtcggagaagatggaagggtcggtgttcgtcgtctgagaaggtggagtcgcccactttgttctctctcacgatacccacaatacctcctatatatattttatgcttttaaaagtttttttagattaattgtttgattttgtattaattgtgttatttcagattttattatttatttattaaattaatttttatgtaaatattttttttaaagcaaacttaatttttactttaatgattaatatta

SEQ ID NO: 259254 - DNA, 945 bp, Cannabis indica
actcaggcccttgccacatatctagccgctcttggattccattctagaattcttcgtcttcatctctcacaattaagcttgaccatgttaacttcttttctaggaaatcttaggtcattcccaccattatcggacatgatctcaatgagatcttgttcacaggggtccctcctcctcagaatcttgttaataatactgccaaccccgagtatctccaatggcgacaaaaggaccaacctctttgctcatggctgcgatcatccatgtctgagaatgtccgtgcttcagttgctaactatacaacctcctactctgtttggcgtacacttgagcagaaatttgcatctcaaatcaaagctcatcaactctagctcaaaggtcaattctcacatgttcaaaaaagaggcttatcaatctctgaattcattgacaaagttcaagccattgtgaattccccagccattgctagatcacttgttgatgaacaagatttggtgttacaagttcttaatggtcttggacctgaatttgatccagttgtctcggggatcacttcaagaagcgatgttttgaccattgaagaagtgcaggctctccttcttttgcatgaaattcgtattgaacatgatcttgaaataaaacatctctcagtcaagatgcaagaaaatgtggcatttggcaatggcagatctggaggtgttcgaccttttgccaattccaattctgcaactcaaagtagtgcacaagcaccaacagatcgaggcaggggctatcccaggttttctaatcagagggttgtctgccaagtttgcatgaaaattggtcacacagctgctatgtgccattaccagtttgataaaaattggacaactccaaaactaggtaactttgttaatcgtgcattcctcactgatcttaaatttgattgtgatcctcaagcataca

SEQ ID NO: 259255 - DNA, 789 bp, Cannabis indica
actttctcttcggtaatttttctttctctatattagttctcaactttagtgattacaatacaaaacaaatggtcctaatattattattttttgaattgtgaaatgcagagaagaacaaggttcagattctcaattggaagcagaagtttaacatcattgtaggaacagcagaggggcttgcctatcttcatggaggttctaatttaagaataatccatagggacattaaaagcagtaatgttcttcttgatgagaatctgactccaaaagttgcagactttgggcttgttcgttgctttggtgctgacaagactcatctcagcactggtattgctggaacactgtgagttaaaattttcctttttcattgggacctttctttctgtgcccttgatactgttctctttaagattttacaggtacctaaaaaagtttggtggcctgtttaaaataaacatttctttgcctgcccgtaattattattgcacctactttttctctttgccgacccaccatttcccattaagtacttttttttgggttcagccgaatgattaatgcttgaataccataatgtgaaacagaggatacatggctccagaatatcttgttagaggacaactcacagaaaaagcagatgtttatagctatggagtgttggttcttgaaattgtttgcggtagaagaaactgtgctttcacacaagattcaggctcccttttacaaacagtaagcatctttacttggtttatcaaaatgggttcttttgagatttgactcttaagcatc

SEQ ID NO: 259256 - DNA, 951 bp, Cannabis indica
caaggagaaaggttccttttttttatatctcttacaaaggtatctctgaatatgaattcttagattatatctctctacaagaatgttcgaccctttgcccagtgagtatgcatcactatttatagggctatgagcttggggaagaagtatttcccttcttgttacaatggatataagcaaaaagattgcataataaatacaaaatacattaatcgtgggatttggacagcttgccatatctctgcaatctgatccccaagttatagggatttctttgatgactcacgatgcgaaagctgaattcgctaagtgttggtcgctctgcgcggattgctgatcgctttgcttcaggcatgcatatgaggcatcctgttcagactgtattctccgagcagatactcgaagtcgattccacgtgtcaccatcatgtgatgccacgtcagagtggaaaaattgggataacatttgccccccaagtctgtacgggacttccaaagttgtgtgtagacttcatccgagttgcttctgtatttggatgggtgccacgtgtcaggcgcgtctgttcgcaactcgatgtgaggttgactgggcgtcccttcggttttcggctaataaatgctctaataattgatatttcaaaatccgatattctctcaccacggttgacggctgcacttgattattttttatttcccatattttcttttaagggaggaaccgagacgtctgaggttcttttgaaatgattacccattttcgctgcttgcctataaataccaacgggcatttgtacacaaattcattttcaccctccttctttgctaagtaaatccagagcgaaaagagaggtttttggtttcaagcttgttgaagtgccttcatcaaaactgctcgtttcaacttacctgaatccagacatctgattcttgagtaagttctcgatttccttta

SEQ ID NO: 259257 - DNA, 909 bp, Cannabis indica
aatagtaaacttttgtaactgtattttgtaaacgagataccggaattttataaatataatatgttatgttttaattaaataagcaaattttaatttttcacgattttcaataacctcattgattagcaacgagctgcacagtacgttaaaaatcaagctaacacgcctatattagttagggtgttacacaacctaattgttacctttgagtcacataaagttaaagagagatgttatcatgcacatccattgtttagccttaagtgggtcagcaccaccctcgaacactggctgattctactttttaaactgttcatataatggctccaaatgatttcccacatcttgtggcacaaccaggggcgttggaagaatagggttaggagcaggtcgaacttgctcctctctcagctctctaatctgatctccttgcatcacaacatacatttgttcccagttttatggtggtaggggatttgcatccttacctctaacctcgagcctagaaatctcacagttcatcctaccagatcgcctcatgtgcataatctaatagacatgtgaccataactttcaaacatttagaactcccaagccaataccagtgctaataagtatttcaaaacttacatatacataagatcattatttataaacctatcatgctcttctaataactcctgcatctcaaataaacaaatattctaagcaattaacaaataatcaaataatcaattaacacttactataccataagtcgaatgagccttcaagccaatgtatgtatccaagcaatctttcgaatcattaaaccttggtcgctttgataccatgttgtaacaccctaacccgtaaggcgccacgtgtgtgctttaaaaattagtttacaataataaactaaccgcttaa

SEQ ID NO: 259258 - DNA, 633 bp, Cannabis indica
aatctacttcaggttagtcatttttcattgacccttccagctcaaggcatcgaccactaaattggcctttctatggggataaaagatttcacaatcataatccttcaccaacttgagccatcacctttgtctcatgcttatcaatacaccagagtttcatcaattaaaactatcacatgattatctagaaaatccttgaatacttggttcattaaatccatgaatgctaccggggcattggtgagtccaaaagacatcactagaaactcataacgtccatacctagtacaaaatgcaatcatcaggatatcctcttcttgaattctcaattgatgataactagaacgaaggtcaatcttagaaaagatcatcttacccttcaactggtcgaacaagtcatcaatcctgggtaaaggatatttgttcttgatagtgagcttgttcaattcccggttatcgatacacatccgtagtgatccatctttcttcttcataaataatattggagcaccccatggtgagaaactcaatttaatgaatccaagatcaagtaactcttatagctgaatctttaattcccttagctctgtaggagccatttgatagggcgctttagatactgattctgctccc

SEQ ID NO: 259259 - DNA, 633 bp, Cannabis indica
cgtaaaaatatttaaagttccgtgaatttataatttttttgttgtttttgcgtatttatgaaataatccatttattaaatgacaaaatgaaccctgtatttttaaaattgtacaaataggaccctaagctcaattttcaacaattttattttttaatataacaaactttaaaataattttcaatacaaacagatacagaaaatgtaaccagttttgtcataacttgtctagatcagattattattaagttttattttgacaaaaaattagttgagggtcctatttatacaattttgaaaaatacagagtccattttatcatttaacaaaatagagggtcaaattggcaacttttgcaaaatacagggtctaaaatagtatttacccaaattaaaattttaattaaactttaaacatttataaatacgaccgaacataaaagttgagatctcgtcttaaaagtttacaacaatattcaaaatatattttataaacacgtcgctccgcaactacaaaataaaggcccaaatcgtcctgagaccgaactcgtcaggtctaatcatcctgatatgtagaatcattcccaagccttagactctccacagactcagtaaaaaatcacaaaacatataac

SEQ ID NO: 259260 - DNA, 2919 bp, Cannabis indica
ggtaacaaaatcatgattggttcttttgggaagaaaaacaaaatgaagatgagattgaagtggtgtgggaaactagccaggtgtatgagtcggatgcatttggggcagctcaactttccagcaagcaaatgaaatcataagattgccaaccagattactacacagttcgattccgcctgggtgctgggccaatcgcaggcgaaaaattgtaaagtgtactttaaatgcatattcaagtcttaacaaattaggttgatccaaaaaaaaaaaatctaacaaattaggaaatataattggtataaaaaaaaatctgaaagaataatatgttttctcaagtaaataaccatgtaattagattttattgtgggataatattcagcttaatatatatatttgttttaggaataaacaaaagagattagtagataaaccgtaatattgttacatattcggtggagttttttctatttaagaaaatttatcatctaatctaggagcacgttaactcaatccatgggttttttgtaacactaaagttgctattaacataaaaaagagatgtgtagaaaaagtactagacaataaacttaaatatctaaaataataagtcctacttttatttatttctcattctacaatagagtgatacgaatggtatgcctcctattaaatttacttatgctaggggtaagcaaggtaaaaccaatgatgtgttggcttaagaaaggtattttggtaattgtacttagtggtgagctaccttttgtatggagagggaatgttattttcggttatgcaatttgtaatagagaaatctctactgcatcaggagagagctaccttagctctctgccgagtgtaggagagtgtctcattttgcctttaattcaataataactcacctattgattcaatcctactgtgtttctggtttatcgtgtattgttgctgctggtgtattgttgtgttgctgttggttgttgtgaattgtgctgcaggtgctcatcatttggtatcagagccgacgcttctggtgaatgctgtcgacaagaatggagaaaaaggttgaaggaattgaagagggtctcgatagtgtgaagaatgatattcacattattaaatctatccttggcgagttcaaggaaacccaggaacggacggtatcgggattggcggagcaaatccgtttgtgtttgaatggccaagcaaggatggccgacgagatgtgctctctgcgtgaaaatcagggaccgatgatgagttcgggacgaaggtctgtcaacgaaccaccaccttctccagcagtgatgggttcgaacggacaggaaggagatctgggaagatgatcggagtttcgggccagaaaaatcgagcttcctgtgtactccggcgacgaccccgacgagtggacataccgagccgaccggtacttcggtttgcagcgcctatcgccgacggagcagttggaggcgacgattatgtgtttggaggggcagctctaaattggtttagatgggagaattcgaggcatacgatcgggtcttgggaggaattgaaggggatgcttatacgcagattccgatctacccacgagggttcgatttatgatcgattcttctctctctgacaaactgaatcggtgcaagattatcgccggaaattcgaatcactggcagctacgatggggacgatgggggatcaagggctgcaggccgcatttgtgaatgggttgaagatggaaattcaaggtccattacgtcttctacatcccaatgggctgattagagccatggaattggctgagtcaattgaggccaatcaagccttagtaaggaatcatagagttgggcccaacaagtcatatatcaaccggcccaattctctaatcttacctgagtcacgagctccccacgtgaccacgtctcccacttattttaccactactgtacacagcaaagcttcctcggcatcatcttcatcttcttcgaccagtttcaaacggttcacgaaggccgaattaagagaaaagaaagagcggggtgtgtgtttcaagtgcgatgggcgctggtttcagggtcatgaatgtaaggaagcggagttagtggtggttgtggttcaagatgaagcccaagaagagcctccagatgactttattgcagaaatggtgggattaccgcctacgggatcgacgacggaagcccaaactgttgaggtatcgctacactcggtggtgggattaactttccaaaaaacgatgaagatgttagggtctagttcttggtcaagatgtggtagtgttatgggatagcggggaaacccacaactttgttacggtggacttggccaccgaatcggagctgccaattacaagcacagaagcttatggggttccattggggagtgggcaagcgatcaaaggcacggggatttgtcgaggagttccgttaaccttgcaaagcattaacattgtggatgatttccttcaacttcccttgggtaatacagatgtgattttaggagtgcatggttgaatacgctacagaaaaccacccatcattggcaagagcacactatggaattcaatctcggtaatcaacgggtggttctacaaggggatcccaccttacataagacaccggtttcattgaagaccttaatggcaaccttacaatcagaaaagatgggagtttgggtggagttaggctattcggctggggtggcagcagaggaagagccttccgaagctatttgcgctctattgcagcgttatacggcagtgtttgaagagccccggactctaccaccacctcgacagcatgaccatgccattaccttacgggcggatgcagctccggtgagtgttagtgttggaatttattttaccaggatcttagatctactcacaagtatgttgattaa

SEQ ID NO: 259261 - DNA, 587 bp, Cannabis indica
agcaaaatctagtctagaaagtcgagaatttttgcgagaattagaaaaacttcgaaaaagaaaaaagatgagtgagtaaaaatttcataaggaaaaggacacgagcttttatagaccttttagggtgaatattgatcaacaaccatccaacaatcagggaaaaactattgaaatttcattgatccaatggctaggatagcctgatagagaaatattataaaaagggtagttgcaatactcgaatatttgcctaatagtgatattaatgaaggtttccatcaaagaggcaagaatcgaattatttttaccaaaaacaaggaaaatgattatgaactataaataatccacgcgcatgttggatgacttctgatgatgtcatttcttgaaacagatggcaagtctcattttacaaaggtgcaaaacgagacttgggggtaaatgttgcccctaatttctcccaatggacgtggcgaaccaggagtaagccatgtggagtgaaattataaataccgggaataattatggccaaccccttaggataaccgtcaggacttagtgatcatgtccgggaagctcttctaggagct

SEQ ID NO: 259262 - DNA, 4295 bp, Cannabis indica
tattgggcttatgactcagttcgtgcattagccttagccgttgaaaaaattggtagtagcattgttaataatgatgccaaattaaataatattacaaatggtggctcaacggatcttgatagttttggtgtgtcaaaaattggtccaaaattattagaaaccttatcaggtacaagatttgaaggcatagctggaaattttagcttggacaatggtcaactagaaacgttgacatttcaaatagtaaatattgtgaatggtggcggagaaagagagataggtttttggatacaaaaactcgggctagtaagaactttgttgaattcgagtgaatcgaatctagggcctattatatggccaggagagtccacattgcctccaaaaggttgggattttgcaacaaatgggaagagactaaggattggaattccggttaaaagtggctttaatgagtttgtaaaagtggtcaattatgattcgagtaccaacatatctgatgctacgggcttcactattgacgtatttaaggctgtagttaaagtattaccatatgctcttttgtacgatttttttccctatgtaaaggatgatggtgaaagcgctggcacttatgatgacttagtctatcaagtatatcttggggtaagcattttagtattattgtttaatttggtgcggtataaatatatcttaatatttaaatcaatttctttttgagagtattaatacatctaatattctaattctcgaataatgttgaatgaaaattgaaatccatttactttttattgctttagattaattagaatttgtttaattggccttctacttctacttgtagctttataggaagcttttcctgagaaaacgtactactaactaaagctagcttcaattaaaaagagcttttttagagttaaaatttgaaactaattttgtccaatcagaacaaaagtctctttttttgaataggtaataatctttattaactaacaaactcagttgggacatctcccaaactgaaactacgccaaggatataaaatagaggcttgcaaaagcatgagccaccatattagttgaacgtttaatgaaacaaacaaaaataattttgcgagcaaatttttacaatttttggagcttcagaagcccaaaaacaaccttttttaaaatccagccaagtaaggctaaattgcttggaccaataaaaagtttgtaagtatctcacaaagtcaacatttaagaaactaatagagaaacaacaagcaaaatacaaaaattagatattcatgctaccgattaagacttatatatatcatcttcatgtaaataaatttgatcattcaattataatatatacttttctagaaatatgatgcagtggtcgcagactcgacaattagagcaaacaggtcaaaatacgtagatttcacattaccatacactatggaatcaggtgtggcaatggtggttccaatggaagataacaaaagaaaaagtgcttggattttcataaagcctttgacttgggatctatggatcgccatcctttgtttcttcctcttcatcggttttgttgtttgggttctagaacaccgaataaacgaagattttcgcggaccaccttctcatcaaattggcacaagcttttggttctccttttctactatggtttttgcacatagtaagtatttcatttatcactatcattcattatatttatagtagagacattttttattttgatatttagaagaattataatttaatttttgttatataattatgtacattgtaggtataccacttgttttttacaaaaatttataacaatttacagtgctaaaaataaaattttaaacatccggttgcacaagtgcaattgactattttgaattcaatttcaatactgtaaattgtttagaatttttcaaaagcataaataggatgcttattataactaaaacaattatattttgtttaagggtagatagtgacataatacttaaaattttgaatttgtaagtggcataaatccagtaaatactcaatgttagtaaaactgtaatttcctcaagttttgtcattacaaacttcgttaatgttcagtaaggcccaaattctaaattattggatatgtacggaaacatatagtatcataagttacgttaatatcttcttttaataaattcaaaatagagtttgtattgacgaaacagaacaaaaattatatatttacaaacattaggtacttacgctgctaaaaaaataattaaatttatgccggtcacaaacacaaaactttaagtacacttatgccacagttatcgtttttttatacataaaatcataaatgccttttccttatatatacattgcaattattcgattgttttttaatgaatattattaaaatttgattgcagaggagagagtgattagtaacttggctcgatttgtgttaatcatatgggtgtttgtgatatttatattgactcaaagttacacagctagtttaacatcacttttaacagtgcaacaacttcaaccaacaattagtgatataaaccaactcttgaagagtgggcaaagagttggttatttgggtaactcttttgtgtatggactattgagacaaacaggttttccagcttcacaaattgttgcttttgattctgctgaagaatgtgaccaatttttgactatgggaaatgcaaaaggtggtgttgctgctgttgttgaagaaacccctaatatgaagccttttcttgctcaatattgcaataaatataccatgattggcccaatatttaaaactgatggcttcggtttcgtaagtacactcatttcgaatgcattttattttaaagaagttatacattttatgaggttttatacaatgtgtgtaagaatataatttttattttaaaaaattattttatggtaaatactaaaagttatgcgaaaaatagtttagaataaccaggtaccccttaaagtaactagtttttttttgacaatgaactttcgttgaaaatacttaaaagtttatacatagagaaaagatgaaaaatcatctatccaaactagtttatcatccaccctgagtgcacgaactgctaattcatgtgtacaataaacatgaatcaaagatgcctcaggaaaactggatagcaaactagcaaaaaaaaccaaaaaaaaacctactttaaaacaaagaagaaggatttcctaaaaaatatagtaattgaaaataactagttatctcaactgtttttctcctttttctttttgaatttttgcataaaataacttcttctttttttttaaaaaaaacatttaagttataacaatattcaatgtagttatgattaatatgtctttctcaactataataattagttttgtttaacataattgtgttgtattgttttgtttttcttcacattactaattataaaaattctgtatatgtctatttttctgttaggtttttccaaaagggtctccacttgtaggcgatgtctcaagcgccattctaaatgtgaccgaaggagatgaaatgaataaaatcgagaggaaatggttcaaaaatgaacaaaacacttgttcaaactccgaccccaaaacctcatccaacaatctaagcctaagtaacttctggggtttattcctaatagccggagtttcttcattatttgcactcataatctttgctattatgttccttcataaacacaagcaagtcttgttggattctaatgtttcacttgggaaaaaaatcgaagtaattttcgaaaactttgaccagaaagacctaagctcccatacttttagaaaaaataataatcaacccaatgatgggtatgatacagatgttgtggagatcattactagtactaataataccaattgtcctccaagtccatcaactaccaactatacaattccgaattcacctgcttcaatgtgagtttaaggagtaataataatactattttctataatgctcatcaggactctatagaaatcacatgctgatcactttgatgagcattttgtttgattagttatggcaaataattacaagttactattttattactagttactttttgttactagttacttttgatttatacgtatttgcgcctttttctttcttaaaactaagcacatttctaattccatgcatgtatatgtaacactataattagtatgtaacacttaatttattgtatatgatggataaatagatgtatttattaattttaagagtattgttatttggtatct

SEQ ID NO: 259263 - DNA, 591 bp, Cannabis indica
tgaagaccaagaaggtggacgacagacaacacctagcccttcttcaagttagaatcgtacgggaacccctttttggaatgagctgcagcaagagggagcaactagccttcaggactttcagaagagagtccaaaaatacatcaatttggaagaagcccaaatagtggcttacaggggatactacctgaccagggtatcgggatatgtgcctagagctcaaactccaagagctccatctcctgccactccccgagtaagcaaaatccaattctctgctaccccaggatacaatcaaagtctcattttagcccccgcattgtcacatttcggggcgcccatgagcaatccctcggggttgagtatcaaaactccgtcccaatccgcactagccaccaatatggcaggagcttcgtaaagctcccaaagtaagagatcctcatagggtagtacccggactaaggacaagcgacagcgaaggggatataacccccattacactcaatacacggagcttacggatatccaggagcgtgtatacttcgccactcggcaaaatacatattatcgaaagcctccacccttgtacaggga

SEQ ID NO: 259264 - DNA, 512 bp, Cannabis indica
ttagcaatttcttttactaataacacaaactaaccctatttttgaacaggacatccatgaagactatgcaattcatacttggaaaaaaggccaccttagaaaaggaacggaagacacttggattagcgagacatgcagagaactacatgtaagtttcaatttttttaataatatttttaagatgaatgcatggtggtattattgtgtttctaatattttatttgatcaggagcaaatgcttgaagaggttgctagcatgaccggaacagaaaatgattcaagcgatggatcttctagcaaatacaagcaatttcaagctatgaataaagttcttgcgagtcgatcagactatcaaagaagagtgggttataaattgaaagacagctcagaaataagttctagtactcaaagtcgagctcaatcacaaggccttactccatttattagtccggaagatataggagtcttcgccgagtttacgttaaaaatacgtgataagattgatcagtctg

SEQ ID NO: 259265 - DNA, 1137 bp, Cannabis indica
tggtaaaataaatttccaatagtcacgacatgtacaatcatcatcagcaggcaactcatttcacgatttagtaagcttttattgctttagtagtttattttaattgtatgatttaagaaaagcttgttaggaagtatgttagtagcctgatagctaaataggcgcatgttttaaatttccaaaataagcgacaattagtaagttattcttgatcgcgattagaccggactagctcttggttacaaaggcttttctagtagtgtggacgtcaggcgaaacaccaggagtcagggtaattcggttggatctagaggcggtaggaagttttgattcccccaaacgtatgtggctgtggtagaggtctcacaggtagggcacgtggtcagggtgatgctgacctgccgcaggctgcccaagctgtccaagctgcccaagaatgggaaaataggtttgcataaatgcaagctagaattaatgagcatgatgaagagattcagcggttgagattgcagtgtgctcctacgatccctactccagaaataccagtagctcctgccccttctgtgcaggccgaacctataactgtggtgaaccagatggaacccctgtatgaaaggttccgtaagcaagcacctctaattttcctgggaggtcccgatctcatgaaagtcgagtagtggctaacagtgattaccagaatcctaaactttatgggcatcaccagcaatgatagggtggcctgcgccaccttccaagttcaagaagacgctctggtttggtgggacatggtttccatgattcacgatgttaccacaatgacttgggagaaatccaagaactgttcaatgccaagtgttacaacgaggcactcagaagtgttaaaagaaaagaattcacccagttgacttagaaggagaacatgagtgttattgaatatacgactcagtttgattgcttggcaaggtttacctcgggaatcgtgccaaccgatttcagtaagaaagagaagtacttggacaggttgaatgcaaagatcagacaagatttaataaccactactgatgatagtaccacctatgctgatatggtggataaggcactacgagctgagggtgtagtggagtgcaccttagagtc

SEQ ID NO: 259266 - DNA, 606 bp, Cannabis indica
aataacaaaaagtaaggagggcttatacattctaactaggagggagagatttcggaatgctcggtcactcccaagcccacgagaattccagctgatgagactcattactcctagcaggcctgtgaatccacaaggcctgcctcttcacttgaaacaacttccaccacatcctggcctgaatgaggtctgtgtcgcttcagcatttccctctgttcattccccaccgtggccaattgccttttgaagccacttgagggagtggattggttcttcttctggggtgggcggcggggtggcacatcattgctgccaatagcaaaggccagagatgatggaatgtcagcaatgtgggccacagggagcgaatccagttgggcagtggaggatggaaatcatcaggggggcttgcagctggctagaggatggggaagatgagcctctggaccctggagtggatgactgttggggagagacagagcatgataagtttccaccactggccactgataaaagagctacaaagtttggccctgagggtgtgagggattgatgctgtccagggggagcaaaggaatggattggacctaagttggaggggcctgctcc

SEQ ID NO: 259267 - DNA, 517 bp, Cannabis indica
atttcggttctggaaactgaaccgccatccggaattccggatgcacaactggaattccgattcctcgcaggcagaactcaaaaattcataactctttcaaatcaaatccaaatcacacaaaaccttccagacctgttctaaacatcccataaagcatttctaaagcaacaaaaccgagcttcaaccatagaaactcaattcaccataaaaggttcaagattgagttataaaactcaaaacttgtctaagcaacatatcatgcatcaaaccctgattaaatctcatattcaagcatattaaaactgcagaaaccaaaccctaactcatccaacaactacaccatttttcatcaaaaattcaagaaacaaagaagacaagagtaagaacaatacctaaagcttgagttgcacacaaaattagcttgacaaaccaaagaaaaatcccaagttcttactgcttcaaagggccgaacaagagagaggaaaagagagagcttttttgagaaatttctaatttt

SEQ ID NO: 259268 - DNA, 1300 bp, Cannabis indica
gccttgtaatgaaagtatttagttgttacgatccacatgcttcaactaaggagtgactttgttgattccaatagagctccttcttttcttctagacaattcaggtctctcaccaattgtttaatatgatgccaagtccctcttgcccatcctgacattgcaagtttaacttttccttaacctttttgagtctcctttaaatttattttttaatcttttaattccacccatggagcaaccagccacatagtaattctctgctgctacataggcggagtactatactcctcccccattccccaagattcctcaacctgttatttacacttgtcattcgctacgcaagtctactcataatgatggtagtagtaaacacaagaagtatcaatgattaaagttccattaacacaagttaaaactttaactactacaagtctgctaataaccgacgccatatgtactaataatcgatgtcaaatctttaataattattttttcagtttaaaatgtattattatttcaaaaatttaatttatttaattatatatttactaatttataataaatattatttaatatgtaatatttatttttttgaaagctaaattatatattaaataactagccaatattatagaagcaattataaaaattacaattatattacacaaagactttaaaattagtccaagtgttaacaagttaataaatctaattacaagttaacctaaaaaaatgagctacggaaaaaaattcttatacatttcagcatcaatcgtccaagcctgcgtgaatgactgccatcaatcgttctatccattgtcactgtaatagtaataatttaatttttgaattgtttgtctccttttcccctaactgtaaaaagaagtaaaaatttatattagtttttatatatattattatttgttaatataataaataggataactgtaatgccctaatgctaaggcatgctacaatgcttttccaattacaatgctgtctttgttaagaatttccttgaaaaaacgtgtcaaaataaaacttttatattaattaataaactttataatttacaaaactatttacaagtatcaggatcccatttaaaagcttttgtacacaatataccaaaatacgtaactggtcacacagcgactacaaaataatatccctagatgtcccaagaccgaacactccatgtcaccctgctttgacatgtacaacctcatcccagctcaagctcactcatgttcatctttcgcctttcctttacctatacatggaagtagaactgtgag

SEQ ID NO: 259269 - DNA, 803 bp, Cannabis indica
tctttaagtttgttatttttataaggtgttaatacaaatttcaaattttataaaagtttttgttactgttaaattaattaattatagtatatgttggttaattttttaaatttactaattattggtaatttaaatatatttggattattttttatgtttgtgtatgttaggttatagtatggtactttttgttttgttttatttattttatttggtggaggttgtcaaagtcacttttggagttacttacatgagataagtttttgtttttctttgcttattttatgattatttctatagttattttacttgatgttactagatattttgtaagaactcattctttgttttgttatttttgtagggaaattttcaattattcaatcaaagaacagttattgtgatggaagggctagagtggtctctcttgtttgttagagttttctattcatttaaagagtccaattgtttagttttgatctctgctttttctaagtgtttcacttgatgtaatgatttggacgctttcttagctgatttggctagtttattttccagttttcttgaggcatccctagttcatgtctccgttcatgaattagttgcgcatgcacttagggtggattgtgaacgagcttggattgatacttttttatcattttctattgatgtattaaactcgattattattaataagagtttaatttcaaaaaaaaaaaaattagggatttttcatatatatgggaactaataaacatctcgtttcgaggcggatatataaaatattttaaattatatattaa

SEQ ID NO: 259270 - DNA, 881 bp, Cannabis indica
ctcagcctattaattaataaaatcaaatgaaaacccaattataagttcactaaaggacaaaacacaaatgggacaaaaagaccattttgacccctccacactaaaagtcacttagggatatttttgacaattctaaaatctcgactattcccgacatttttaatgtctaaatatattgcctcgctatactaaaaataccaagatgtgattctaatagccaaacaccgtgttccaatgttgtcgggcacaaaacattcaaaattgatgaaatttcatatatgacaaataaaatgcattcaaataaatcataaattaataattcaaagttaataaacaattttcataattaaaccctaattatctgctaattttcaaattaaagctaagcggtctttacatgttgcttctgccagcaatcagacgggttttggagctataataagggactcctatggacatgtgaaggctgcactttctaaaccagttgctgggaacttcaaggctcatgaaatggaggctaaggctctctaccatggtctacaatgggcaaaaatctgcatattcaattagatatggtggaaacagattcgttgatggtggttacttctcttaatggtttagcatctagaaatttaggttttaataatcttatttcagatgttaaaaattaattatcctattttcctaatgtttgtgtatctcacgttcgaagagatgcaaactaggctgctcatggcttggctaagcaaactttagtgttagataatgattgtatatggtatgaggatattctccctaccattttctctattgttgtaaatgactctttaaatttataatagcagaatttttttttaaaaaaaaaaaaaaaaccattaata

SEQ ID NO: 259271 - DNA, 549 bp, Cannabis indica
ttgaagggtagaaccatatttatccctattcagtgtagattatctatagaggatctttgagtattaggattgtaataatggataatcataacctatctatatcttggtaaatatagagtgttttatataattgagagtgcaattctgtatctatagtggcacaaggaggaattaataagttagggtgtttacttagaaaattctagatctacttattagagcttagatatataggcccatgttctcatctctagttgagataatactgcttgtagactcagttaattggttttaattaatcaattatatttctaaaattagactatctcatttattaattttcactaagcaagggcttaattgtgaagaaaagaggttttagggttaatttgttaattaagagactttatatggtctaattaataaatcatatcaatggccattttttttataattaattataattattaaataatagttttggcatttaaaggtttgaaagtagaaaatatggtattattgaaagaagaataagtggttgaaataaag

SEQ ID NO: 259272 - DNA, 747 bp, Cannabis indica
aatctatacacacccgccatgtctcattcggttttggtaccagtaccagattagcaagccattccgggtagtacacatcccggatcaggcccttggtcagcagcttatctacctctttttctaaggcgtccgcttttaccagatcaaggggacgtcgcttctgctgtaccggcaacatgtttgggttaacatttaggacatgggtaattacgtgggggcttatgccggtcatatcccattggcaccacgcgaaaacatctatggctgcccttaatgcttcgataatcttgcttctttcctccagctccaggtttttttcctagacggaggatcttggtggattcgagttcgcacacttgtacttcctcattgtcctccataggttttacagttttttcggatccttagggggatccaactcatcttcttccatcaatcttggttcattgccctcgcgaactaccagtaccgacaagtgcgttgcgacattgtagcattgccttgcctctccgtggtttcccctcactgtccccactctggcttcctaagtaaggaatttaaggcataagtgtcgaatggaggtgattgctccgaaatcgaccaaggtcggctggccaaggatggcattgtatgttgttggacaatccaccaccacaaaggtgcaatatttaaaagtgctctgtggggtattcgggcacagggtgacagggagtcttactttcctcattgggataagtgttgtcccat

SEQ ID NO: 259273 - DNA, 704 bp, Cannabis indica
ttaagtattaatgatgacatgaccgtttagtcagttaccacatgagtgccatgttaacgtcacatgtgcaattaataagaaaaaaataatttaaaattttttaatttagttatactaaatttttttaaccattaattgatttttaatttaataatttttttgaaaatacctaatttttgattttttaatgttaaattatacatgtggcgctgatgtggaatttgctaagtagtcgtgtcatcatgttgtttgtaagaacttaccctaatggtaataaattgcatttcttttgtagagctcaaattttaaaattaaaacagaacctccaaaatgtttaagacgatcatgttgccacgtgtgacaaaacttaatagaaagatcaatgtacaatagtgtgagtagcttagtaatcatttgtaacaagctgaaaagttgaggacataattatgtatatgtcataatttgggagggaaaatcttaaatagcctaacaaactaagaaaaaaaaggtttttgtttttgtttttttttttttggtttttggtccaagtaacctaagacagggtttaagcagttcttctttgttactcttatcaaactaaaaccctgcggctcttcctacgaccccctcgtggcacttgcccactttggtatgcgacccatttcaagtattggatttttcaatcgcaacacacttttcccccc

SEQ ID NO: 259274 - DNA, 864 bp, Cannabis indica
tagaatgatgtgtgcttcagtagggctgaaaagatcaaacagaacttcagagtcccactctttaacatcggtcttcataagctggtacactttgcaagagtgcaaggaaggatggtctgatgtaacaaagggtgatgtatctgatggaagccaaggagagttgagaacattagtatcaaaacccgcaccaatacggattctagcgccagatttaacaagatcttgagactcaaagatactcttccaaatgaaacttgggttgcttccaagtgaagaagtgaggaagcttccttgaggataataccttgctttaaacacacttcccacgagagtattttcaaaaagaagaaggcgccagccttgtttgccgagtaatgaaagattataatcatgaagactgcgaaatcccattcctccatcatttttaccttttgtaagcctcttccaactcatccatgtgatgccacgggaatcttgggagttggtattccaccaatatttagacatcatgctttccaaagcagagcaagtgtctaaaggcagcaagaaaactgacatggcatagctaggaagagcctgagcaactgttttgagaagtacttctcgaccggctttggaaagaagtctaccctcccaactctgaatccgtttttgcattttatctttaaggaatcccaaaatggctttcttgtttctccccattgtacacggaagtccgaggtaggtactattgtcaggtgcaatctccatatggagaagagagcaaattcgttctttaactgcaacattagtgttaacactaaagaagatagacgatttgccaaagttgacttgttgccctgatgccgtctcaaagagctggag

SEQ ID NO: 259275 - DNA, 698 bp, Cannabis indica
ccccgatttgggtgtaggttcgggtccacgtaaaagttcaggtctcgagtgctagtccaagtttgcgtctaggtgaggatctccgtccagatctaggtccagcatttcaatcccagtcttcttcttggtccgagtcgaggttcgtatccgggatccctatctaggtctaagtttgtgtttggatcgggtcccagatttaggtccagttccgagtctcagttctggtctgggtacacgaccgtgtccgggcccaagttctaatctcaatttgggtttgaggctaggtctgtgttcggttctaggtctgggtctgggttctggtcacggcctagtcttgttctatcgtcctcgttcgacgattcttgttcaggttctaattttgggtcagagatctaggtctgggttcgggtttggttcttcgtctgggttccggtcctagtctgagccccagatctagacaccgactactggtctgttcttggccccattacccgaatctcgagtcaagatctggatcactgtcacgggtctcggtctggttctagttcaggacccaggtgcgatttctgagtttgggtttgggatcgagactggggtgcggttctaggtctcgaccctggttctgtgtccctagtcttgttctatgtttgggtctgagttcaggttcaagttcgggtcccgagtccaggtttgggttg

SEQ ID NO: 259276 - DNA, 569 bp, Cannabis indica
tcccaagttccaatcccgatctgagtctggattcagttctcggtctatgtcctctgttcttatcctggtctgggttctagtttgggtccggctcgggtctagctttgcgtctgaatctaggtgtgtgtgcttgagttcgggtctgagtctgcatccgggtttgtgtccaggtctagaccccgatctgggtctaggttcgggtccatgtccaagttcgcgacccaagtgcgggtccaagtttttgtctgggtcaggatctcggtccagatctaggtccatcattttgatctcagtatggctcttggtccgtgtccaggttcgttttcggatccttatctaggtccaagtctgtgtttgggatcgggtcccagatttaggtccaggttcgggtctcagttccggtcagggtacacgactgtgtccaggtccgagttccagtctcagtttgggtttgaggctaggtctgtgtttggttctaggtttgggtccgggtcctagtcttgttctagggttctggttgagtgtttcgtgtttatgttctaatttttggtcccaggtctaggtctggg

SEQ ID NO: 259277 - DNA, 729 bp, Cannabis indica
ttgccacccttgccacctgggctacctgttctagtggtcgaagctcttgggttgtcgtctcctccatcggaaacagtcacgaagccaaaatcccaagctcaaaaatcgacctacaatctgagctctcctttgaccattgcttctccaattgtaaccccaactcctgggcataatgatcatgatgaatcccattcatctgatcacaccttctcgaagtcatcttcttcaaatggtgttcccaatgccaagagagttattgctcctttgccaatggtgagctcttgtacaaggtccaaggtgtctacaccaaagaaaccagtagtggtttagcccaaagaagtttcaaaagggaagaaagtggtgtcttcatctgtaaaggcaaaacgtgtcaaagagcatccaccttccctttcctcatcagagtctgaaccaaaagaagagattgagaatgttaatcgagaattagagggcgagactaattatagtaaagaatttgttccaaaagaacaatcatctgttgatgattctagatctgaaagtgaagtccttgaagatgatcctatcactacagaaccagttactgttcctcctgctgttcaacagaaagcaaaggaaaaagacccatggtttctccaagccctattcctcctcagaaaagggaaaggccctctggcattactcttgaaaacttcaagcctcattctcattatttttgttacaatgataatg

SEQ ID NO: 259278 - DNA, 579 bp, Cannabis indica
aaattaaaatatgtaaaatttagtattttttttaataaattatgtaattttattaatagtaattaattaattaaatagtcgtaaaataaaattatatgagaaagattacagcatcacaattaattttaagaacatttatattcagtttttacaattctgttccagcaggttcattcaatctcgtagcttgagcactcaataattatgtaaggtatacgtaactgcactactaacaacccattattagtcgcaaagagcttattatttataatcactaacagtgatttaataacgagtcatcgaaaaataaaaaagaactaattacaaaacaaaacaaataaaaccatgtcatacatacacaagactaaaatattcaaaaccttgtcacaaaaacaacactaaaacacttaaaactcaatcacaaaaacaaactaatcgcaatagaaaaaaatcgaatcgcttgcaataacaaaatacaactcgaccaagccgcatctatacccaaggaaggtcaacatacctaattggagaaaaaagacaacttcttatagctatataaatttaaaaacaaaaaaaaaa

SEQ ID NO: 259279 - DNA, 1697 bp, Cannabis indica
aatgagcctcctccttagccaatgagcttctctttggccaatgtgctcctccttggccaatgagctcctccttagccaatatgctccttcttggctaatgagctcctatttggctaaggagctcatctttggctaatatgctcttccttggctaatgagctcctatttggataaggagctcctctttggctaatgagctcctctttgttggacctccatatctagaataaaaattcatgcacaattattttaatttttttgagagataacaattttgataaaaaatctgtttagggttctatttgtaccattttgaaaaatacagggtctattttgttatttaacaaaacagaagtttcaattgttattttttacaaaacacaatgtacaaaatagtatttaccttattaaaaatacaactttctctattttacagatttctctattctttttctttccatcatttaaatattgtacttttaatatattttattcattttaatattttctttctttattcgtaatacttttaatattcacattattagtatagaatataaataaattattgggtttcaaaaagaaaaatataaaacgatatatacataattcatcagatattatataaaataggataatttacatttggacacgtttttgtccatttaatttcagtattaacgtgatttttaattttattaagtttaccgttgttttatgctgttttaactttaattagttttgtttttggttcacgcgttgcaggtgatgtcagagtacagagctgtcgcgtcaatcacactccccaatatctgtaacctcacgtgcctgctcacatttttcacaatttcaatcatggttccctattttatagacatttcagtagactgcatagaaatgttattttgttactgtatacttttgagttttttattttttatttttgaaaaatgtgtttgcatattataggaatgttatatatgtacttttttcatataattaggatatatttttattttttgagtgtattatttaaataagttaacgtttattgtatatattgatgtatagttatatgtagttgttgtaatgtattattgttaaaatatatacataatagttattatttgatttgtggtttaccagtttaagtttttgtgttttggtttaaagtatgtaatcgtttcgcatttcgtgtgtatatagtatattatgtttatatgtgtgttgtataaataaatgtatattgtgcatatttttgtataatgaatgtgtgtatattgtataaattaatgtatattatgttctctgatttgggatgtatacttagattaggtgtaggagtgtatgtttgttaaattgtatacgtaatagtttagaatatatttatattgtaagtgttatttggtttgttatttattaggttagttttttgagtgtttgtttgcattatgagactgactcgaattttgtgtatatatatagtaaggtatattgttataccgatttaattttttgtgtaaatcgtattagataatgtatattgtataattcgatttacaatgtatacttagataaattgaggtatagtaatgtatttgttgaatatgtatagaagatagtttataatatttttatattgttgtgttgttttttatgtttttacaggagtgagagaaatattttaataaacctga

SEQ ID NO: 259280 - DNA, 4301 bp, Cannabis indica
atgcaacataaaatgttatttataatctttattagtaaatctgattatattgaaatgtgttttatttagggcacaaaacccaacaatttcttgccttcaagaaaagttgagccatataccctatattcgaaccacattgcctttttcttcacttcatattttcataccatgagtgatagagtgagtgcccacacacatcaagtggtatctcaatcatagtgtgtaaagctgtgaagaatccagaatcaagagaaggacattcgggctcaaatcttggtgatactctgctacagacaagatacaagggttagaaatctgagtggaaggagccattaatattccgctgcacccactataaggtttcctaaactttatatgtgtttatttacattgttttagaaattcatatttaggatgttaaataacatacatggtagtaaatctagatactagtaaaacatattccaacatcttacgcattaattctagggcaagagtggagtcaagtttagagatctcgagaagaataggggtcgaagatccatggttgattaattatgacctttctcctatcgccctcatagtggaaagcaaccaaatacatatttgagttaggggacctttctttgacactaactgagaatcttcctttccaatacttctccaagaaattcttgagggagttatggttgaaacttttggtggtgtataaagttgccatcaagtggaagatgggtacagctagtagaagccctttgtgaatatcgatatgaccaacgagtgagtgcacaatattttctgtgccagtgagttgcaaagctactaaaaaagagtaagctaagtcttctataactggtaatatatgagctaaaagacaaggcaagtagtcgtgaacaaaaatggtaattaaaaagttttggaacttacaacttaagtagtcaaaatgagtaaaatggcaaacgatggggttacaaattctaggtacattcaagtaccatagatgataggggtaatagctataaatggctaattcaggcgaaagaatatctaaattcatccacaattcaggttggtagtctgaataataaaagttaaattctaaattaagatctagaaggacactcgaaaataaatacgagagaaaataatgattaggtttactatattaacatatcaaacccgaaatattttcattaatgccaatccatactttaaaaaattttgtgcttgagattaggctgacctcatcaccttgtgtagaggcagttgggtgtcaatccccataaatatggtgctaccacgacaatgtcaaggtagaaaatatacctagaaaggtgggaaagttgcagagggtcacgaggatcttcactgttcgaagaagaaaaggaagagacttgggtagaaggcatgctcgctgaaaacgacgaatggtgtctcaatggttcttaccatatgttttcacttgcatatttgtccgtaaaaaaagttaagagaaaagaactaatgaagtaacttcgaagttagctttgttttgatttcttaatgattaattataatattatatcctcatattaaggttaacaatgaaagaagcttcgatcagttgacacgtgttacaccatgtcggtagttcttaagctgccatgtttcatcactgtcttctcacttcactccaccccgttccaaaaggtcaattatgctgtaaacttcaaagtcagctgctttgattcagatctagggtttctcaaaatcgttcccaaatcaggaaagattatatgtaggctagttctcaaatcgtgcaaatgtagatttcgtccaaaacccagagcttgattttgatgttttaccccgagatggatccgacctggtttgaaccgtcggtcagaagaattccgagaagggtctggttagggtttcaaaaatcaatgggagtcctcgtgggtggaaatcacacttcgtccaggttttgcacacgataatctttttctctagcttctcgatttcgattactctttcaaagattttcttttacaattaagaatcgcaaattcgttacaagaaaattgttctcctacaactcagatcctttaatccaaaaaatccactcttacgcgtttaagagtgagataacggaaaaaataaggggcaatcacgatggagttgaagcccctgaaatttccgatctttcatggacccatagcaaggcgtgtgcttttacgatctttcttaatcgccttagctctgtccataatacctttggtgcagattttgaccgggccgtacttgaaaatgtttgcgcccattacctccggtgactgcgccatgcatctgacagagttaactgccaacttcactccaagttggtacatatttcagggtcgccagctgaaccccatttggagttccattgaaccgacgcaatgcaaggaatatatgaatttgactgttaatgtggtcagagagctaaggagtactcaactgttgagtaatggtggaaaagctctctgcattggtgaagggtcggctttggctgtgaaggcattgaaaaatttgggattctctgatgcctatgatgttgatgaacaccgatttttctctcttaagcgcaggcagtttgtatacaagattgattacgaggaaaaatcatttgatttcgtctactctagagatctagatatggtctctgcccctgcgcttcttgtgctcgagatcgagcgtgttcttaagcctggtggagttggagctgtgctagtcgggaaaggcggtggttcaacacaaaatggccttatcagatcggctaccgctatatcttcagtactgaaaacttccagcattgtgcacgccattcgattaagtaacctcactctagttgtattcaagaaaagaacggaaaatgctggatacttccagcgataccgccttccagcagactgcccgtctctcactaacaatagacctttcatagagcaaatggagcctcttgttaaggatatgcagattggttacgagaaaaacttctcttatctgccaaaatttgtggacctttccttgaagaaacggttggtttatgttgatattggagcagggaagcatctgaactcgaatgtgacagattggttccctccttcctaccctgtggaacgcagcgctttcagtgtttattttgttgatcacaacacttcggttttgatgtcctatgttaagaagcctggcatcagctttgtttatcatcctggtctttctggagccaacctgaatgttagtgttgatggggatttggagccgtatttgggagatacaggtttcaattttctagcttggttcaaggaaacattgcaatatgcagattttgtggtggtgaagatgaatgcaggaaaagtggaattgaaattcctctcagaattatttgaaagcggagccatttgctatgtcgacgagctgtttcttcattgcccagttcttatagatggtgaaggtgcaaactccatggattgtatggacctgttcagtgaccttcgcaacagtggtgtgtttgtccatcagtggtggggaggaggtaactatagttccacttccactggtgtttggtgaaaactgaaaagccgtattggttgtgtgtttaagttggcatgtcttagatgtcatgaacattgaagttgccttatggttgggcgcttcttatctaaataagcaaccattttgatgtctgttctgtgctgtgttgtgttgtgtacttgtaatattttgttcgagatgctttgtagttaagcattttgaactaaataaaaagtgaaaaccaagctcacttatgagtttgttaataatatatattatgtttgtgttgtgatatggatacttctattctattgcctttttcatttctttagcacataaataatgcgttggattctacttttagaagaacttcataaggtgatcattatattagggacccatgcataataatttactctttttttgaggctttttactaaataagttatgggcatgctttttcatgagtgcaagcagcatatgtttttttttgttgtttttattcaagtcatggacatggcatgcttttacaattgcaagcaatatataagttttaataaagttattattatgagcatgctttatattttgcaaacaacgactgtataaaattaaaaattgggatatatatattgtttttggaagaatttgcacaataccaaaatcatacgagtattcaaataaagttaaagttagaatgcttaaaattatatgtgcgagtgttcacttagaataccgagtactca

SEQ ID NO: 259281 - DNA, 529 bp, Cannabis indica
gttgaagcacttttttcacctacttctccacctactggtgcaccagaactgccaatatctggtttgggcagtaccattccatgtcctactactgagatttcatctcaacaaggcccttctttacatcttactgaacctgctaccacaaatcacaactcccagtcaacaacacccccctgtgtacaacaccataccagtatcactgtcccaaccagtgatcaaaatacaatgcctactgtaattggtcctataaccaacactcatagcatgctaactagagccaagtctgggatttacaagcctaaagctcttttggtttctcaagagcctaccaatgtcaaggctgctcttaaagaggaaaagtggtgtaatgcaatgtcagaagagatggtagctctaaaaagaaatggaacttggacatatgttcccttacctcctggaaggactcccattggctgcaaatgggtgtataaggaaaagttaaatgctgatggcacagtaaacagaaacaaggctcgattagtagcta

SEQ ID NO: 259282 - DNA, 8206 bp, Cannabis indica
agttcaggtggtttagccgtcaatatcccttataataataatcttttcaaatggttctattcaataggggcattttggtaatttccctaggctgctgccaaactttggctttgtttcaccaaaccaactaaagccagcccttccatagctacagagaccttcttcaatcttcaacaaaggcattttaggctttttccttagcttagttgatatgcaaaaccaaattatctctcgaacgctcaattctaactcgcatttcctctagtggaggctttcatagtccttcgaagttgaattacttgccaaagtatagtctttattatctgtaaaatcttgtaaggaattttcggttctgggttttgccggtatataccttttcagctaacaattaatggatatggcgctcgactcttcgtttctgagctcaccaaagtttataaataagacaaaatcattgggtttgtttcactataacgggagaatacgaatgcccacgaagagttttccggtgaataatcgttacccatttcgattggcgttatatggcatacattctgagaattttaagagctttccgtgctcagcgtggagaggtgatattgacttgtacgttggtagcgattgttcgacacctagaggcaaagatggtgataatttcggcagccaaaatggtttcaattttgagtttttgcgagaaattttgaagcgtggaattgtgttcgtggcaatggtttctggggttttggtatatagttgtaaaaaagctttagcgagtgaaggtattgtcaatgctggatatggcgtttttgggccgtgcatattattaatgagaaatgcttggcctaagacgttacaggttcttcaggtcttcaaagaacagggtttgattttggctttgcttttgggactctctgcattcttttctatggcagagacttcaatcacgacgctttggccttggaaggtatgccatttctattaagttggtaattcagaatagtcctaatgctttgcattgtcgtttagataatccaatgtcgcttcacggtcaggtgcgtgagttagctgagaaagaatctgaaaatggtctcttcaaaatgcttcgcagtgatgttactcgcttcttgacaactatattaatcggcacaacgtacttctcacttgttcttgatttgagtgttatcatttttcttttattagtctttagctttttatattgagtatctctttcttatgccgacgttttattgaatttctcagtgttgtcaatattggagctacggctttagttacagaggctgcaacagcattgtttggcgaagctggtgttagtgcagcaactggagtaatgactgtaagtttcagtatccccaccttaataaacttattctagaagtttgatagttatctaattcttgactgaaaattcaaactttgaaactatttaacttgaagttcttctaaacattatatgtatatatctatcaaacattagggacactatttgaaccaatattcatgcttagtgcttctatgtatttacatgtagcagttttctttccctaatttctaatcacagcttgtttgtggttttctgcttctgaaaccatggtcaataggaaaaggctatcttaagatgcttatcatggattgcaacatctgttagcacattccacccatctaagcactaactaatagaccaaaaacgattgccattgaaaaagaaaaacacagaactcctagtttgtttttacttcctaaggaaaaatgtcactaggaaaatatttcttatattattttcccctgttttgatgatgctggtaggttgccatattgcttcttactgaaatcactccaaaaagcatagctgttcacaatgctacagaagttgctaggtttgtggtaagtgttgtcaactaaattccagttgcaattgttgtttatctactttatgtgtttagttgaatgttctcctatgtttcacattattatacaagatatgtgtgggatcttgtaggtcagaccagtggcgtggctttcggtggttttatatcctgttggaagagttgttacatatttatcgatgggaattttaaaactgcttggcttgaaaggaagaaggtgtgcttgcaaacaatcctattttgatactctgcatttcttttttctcttgttatgcctgtttcatttctcctgttacttgagtgcatttttcttatcagatcggtaatagaactttcatacaatactactagtagtttgttctttgaaattgctgcttgacaataataccactcttggtctgtttcttgttgaagtgtatgctgaatgatgtcattaactataataaaatagccaatgcgagtgttttgtattgaatgtttatgagtaagaataatgccacgatcatttgaaacaattttgaaggcttgattttcctaacttgcaaatgcactagtgttaaacatgatatatttataaaactgtagcataaatcaagacccagcgatagcaacaactatattgataagtttgagcatcacctgccacatatgatatatatgctcctataccttttgttaaacatgaagattatgagcaaattttcattataaaaatttgtgccattgctttaaagttcccaatttttctttgatcagtgaaccatatgttacagaagaggaattaaaattgatgctgcgaggggctgagttaagtggggcaatagaggaggaagaacaggtattacttacgctgtaatctttaaattctgctgatatattgtggtaatatactgaaattggtaaattatcgatacaatttgcgaaaatgttctgcttattatttttgtgctgccatttctctttcattacatgtgcttggcttcaagagtttcaagtcatctgtcatcagatctatacattatcttgctgttacaagcttttaaaatactatctgtgcattttcaacaacatgattttgcatcctatttattttaccgcagttcactgaactgtaaaagtatctccaaatttgttttctatttactaggtttattaactcatttaaaaaatacatatccttttgcaggatatgattgaaaatgtcttggagattaaagatacacacgttagagaggtaatgacacctcttgtagatgtagttgccattgatttcggtgctactctcatagattttcacaacttgtggttgactcatcaatattcaaggtacacccaaaatatataaccacagaaatcattgttcaattcactatgacttgacacagtgagtatgtttccagggtccctgtgtttgagcagcgtgtcgataatattgttggtattgcatatgcaatggatctactcgactatgtacagaaggttgtgatttactattttctcttatcctccgagatgtaaatactttgattttttaacatttctctgttttcttaaaattgtatttaacaatctcatagtgtgctgaataataatgttttttattttgaagggagagctactagaaagtactacagttggagatatggctcataaaccagcatactttgtgccaggtaatcttatatgccattttctagaatagctctattctatctatgtaagactttcactgcatgtcgttgccttctaattctgataatgtatttagcagagttggtagtatatggcatatggtgacacataatgtttcacaatagatatatctctagaactcctgtactctgccctggtgacaagtgcttcaaagaaattgttttggtttcctgttgctactagattgctgattgcttttttgtttaggcaatatctttctaggatcagttgcatggggtggatggtaaggtaggtgggccgtattttagtaaattctactgggatgatattaatttcgataggagagtatgctatttttatatttctgctgccatttcttagagagatgattctagtatttaatataatacgttgttcacaccaagcattataaggaggttcaagcttgctatgatcaattttcttcattcataaaggactttatacattggacctttgaaggttgtgttcttccatttaaaattgttgtataattcaacttccttatatttatatttgcaagtatataagcatgtgtgaactggaataatcaattggacatttaaagctaagttctaatgaaaatcagattgtctcttctatttctccaattccctgttaagactcttgcagttaggcagcccttacgataatttttttgtatactcttattatgctgtttatcctgattgtggattatatgatcatcatccatttattatcttctataacatcttagggaaaaaaataatttcacttcaatatttttttatatatcttttttcttttcttttttggatacgacttgattggttatatattacttatggtgcagattcaatgtctgtctggaatcttctaagggagtttcgcatcagaaaggttcacatggctgtggttcttaatgaatatggtggaaccataggggtgtgttcatttgttatgttgtcgttagcttcatgataaattatactaatagtacatcaatatactgtgctcattatggtgcttttatgttcctatcaataatatctcttaactatattttgtttattctgctgtgatcagttagttaccctggaagatgtggttgaggaaattgttggtgaaatcttcgatgaaaatgattcaaaagtaatgtctctatattacatatttttcctttctattttctttcttgataagtagtcatcataatagggcaaggaggtacaatcctatatttttaatggcaataaaagctgcaaaagtgagaaacattgaagatctaacacgcttcaataaatgagcctttgtttccatactaaaatgcctagaggcctttagatttctttctatctacaactatcctttttttttttgtgtaatatgaatgttaagcatttcatttttttggacagtcctattcctctattgacatctgatcttattttctaaagcttttgctgttttattgaaacaggaggagattcagaaaaaaactggctacattgtgatgcgtgcggagggagtgtttgacgtagatgcaaatacatctattgatcagctttctgaagatctaaatgtcaaaatgccagaggtactaatcattatgttatttcatgttcttgttttccaaggtgtctgctaggttcacctatatgagacttaaaagggaacaactaattcggctacttgctgtattggtagttgctttgtggctgagatggtttatgtgtgctatgctgtaattggtaactacagtacataaccaaaatgaatataggtgttagggcattttggattagtaggagagtggctatgttgaatgagcgattgttatttccctctctttgtttctaagtgtattctgggcatatggttcttcagagtttacatgggccttttggccatggaactggacagagtgtttaccatgccatgactccataaaaccattagttatacaagtcgtagacacgattttagggaaggtggaacaagtaaacgttactagagtttcagaactgagcatgagctgttcgtgttaacactttttgaggatggtggtgctatattggaactgctgaacgaaccagattgacgagaaatgcgatattagtttctgttgattaaattgtttgggttctaaatgctcttgacaacacacaaagctgaggggtgtattgagctttaagacagaatttggaaacaactctatgagtttatcattagagatttttcaaaatggcaggggaccttcatgaagatatttagagctctcagaatggagaaaatttgagtgaatgtttggacaacattgttggagttaagaaaagtttcagccaactgaagtttcagaagttcaactgcattggtgagatacatgatgtgagtcgttcctgggctagtgttgtggaacatgtttaaagtgagatgggctttttgtgtggcggattaattgatgtcgatataggaacaaaatcaattaatctgccacaaataaaataaaataaaatccgtaaagctaacgcaagtagcggtatagttattaatgaaatgagcatcaatttctgctcaggtcttggaaggacaaaccgtcaaatcctttgttttgcagtggttagtagagtatatgaatgaaatgattatcagtgttaggagttatggattagtaggagagtgactatctcgaatgagctattgtttcactgagttgtatgattgtttgatgtcttgtttagagattataactaaataatacaacgaggttgctttgggcactagctgagttctatcagtgtcacaagtggctgcatgttagtattgttttcatagtcacttatgtatgcattgcagggtcatcagtacgaaacagtatctggttttatatgtgaggcgtttggatatattccgaggacaggtgagagcatcaaagtagtcctagaaaatgaaattgaagaagaggagaatggtgaatccaaaccagatcaccaggatcagaaggaaaagcatcagatctttaagcttgaggtgtgttttttcgtacatccactataagtccaagaactccaagaattatatttcaaatattttatttcttgtgtataaagctattaaatctgcaataacacagaagtttgataaccgatcttctaaccccaaataacccatattttgtataatccccaggatttgacagttataaaaaagtgaaggtgagcttctgtcaatcaagctattcgcagtttggtaatacctttgcttctaatgtctttaatgcagattctagcaggaaatgccagaaaggtcagtgccgttcgctttgaaagattagacaatgatgatactgcaggggataccaaagaggtgactcggttggtccccaaaattgtgaaaaggaagtggagcggtgatgaagactcagacagtgcagaatatgatgaagattcattccagagaagaccgcagaatagtctccttgatgagcatgaagagagttatgatagcctaactaagcattgattatgattcttcttgctaccaattttacagcattgccaagggaagcagttaaatttgaggaacaaggtacggttccatgatcagcaaatgaagaacactttttcacgggcaaggcaactctcttcatccaaatctttggtagttatgtgttttgtgcacaactatcttggagtattctcaccttgatatcagcatgagatctattctactgtctaaatctgtcttggcaattggtaaaggggaccatagatgagatggcaatgccataccctttcgcataaacaatgttattttattatttttttttcttatgtgaaatgtgttatttttgagaagagattgatgtgattgtctctccaaatagtctttgtatgtctacttgtgtaaatcatgtattttgaaataaatactattggttctcaaaactatcttaataaattcataaccaagtgaagctgggacatagtggatgggcagggaagggactacttaggaggaaagtgttgacagctaaagccaaagagaagggaacctaaacttttgaaaggactttgttatcttggtttagtggacatatgaatagttgtcacgactttaggcccccctcttcccaatcatctttttaagtgtgctcgttgttattattattattattattattattattattatttattttgttgtgatattggcggcaaaattctttaaattttgaagatagttggacttagatcccaatcaaatatttgacgacaaaagtctcctatttataatttagtgcatttgccacgcttaccattaagtccggccaataatctgtgataatttcttactggttcaaaatgatttataattaaaaataaaatctaagagagtgttcttgttaacttgttgttataattttttagtcaatttctacattcgaaaacatatgggataaaatctatgaggtatatataatatatataaaacggagtttttttattggagttttttttataaatataggaaaatgtgatagaatttactttttttatgacatatataaataatgcaaaaaaatatgggattaaaaaataattaaa

SEQ ID NO: 259283 - DNA, 980 bp, Cannabis indica
atatttttgtcaattaaatatgccaaaaatggaattaacaaattcattgaagcaaataaataaattattttctcacaatatttcaacaaacattccataacaggttttataagagaaataataataataaatatttacacactaaaaaaaattaataagaaaaatgaaatctaaaaaacaatgcattttcctcttacgacagttactaccatctctacgtggtgattcgttggcatcaaaggcccaagaaggaagaactttgatgttgaaaccgagactaagaaagatctgagaccaagggagaagcccagaataataaaaccatgagcaatcccctagtgaaaaccggccttcaaaacccatgacgattgaaccccaagcgagagagatcaagaaccaagagagagagagagagagagagagatcagggagcatgagtgagagatctccaacctttaaacgcaactccaatgagataaactagagagagataactgaaaagaagaggggggatgaactgggttcggggacgaacgagataaatcagagaaagagagatcagaaaagatgatggaggcggtagagagagatttggtttggtcgacagggtttgttcgagtgaaataaatcaaagagagattaaaagagaggtcgtagagagagatggagcgttgaaagggtttcataactttgtatatatacctttttttcattctgaaacttttttataaaaaaaatagtgtctatacgtgtcggtttaaccgagactaaaggatcttttagtgttaattacttataaaccgacaattatactcaatttatatgtatattttttaacttctttttggtcttggttatacttttagtgtcggtctactaaccgacacttaaagtcattgtcagtaataaactgagaccaaagagttgtctttagtgtcgattatctaaaaaaaccgcccctcaaaccaacaccaaaagtc

SEQ ID NO: 259284 - DNA, 1147 bp, Cannabis indica
tcctctcggcccttttctttctctttctccctatcattctcttttcctttgctatttaatttttgtttagaattcacaccaggagtgggaacatcatcactcacaaaccccaaaccacgcttgtccgttctcttgtgatactcaactaccttaacatcctccttggcattcttcccaatgcctctcccttcgtaccatccatatccagcaagcaaagcagcaccaaaaccctccacgggcatatctgtaaactcgtccattccctgatcctcaggcaacctatgcaggtcaaactttaatttctgaagcaaaccatcttctgcaggaacatttcttgatggttccattaatggtggtttagaatctgaaccgatgacttgatccttagggccttcagtctcttcaacacccttagtagacttcctcaggttgaggccatatgacatattcgaatcattagcctctgcaacagcggacaatgattcaacctcaaaatgaagaccaccagagccatcggcttgcacaagtggaagttcaaaattcttcatctttttacgtggctcccactcattttgtataggagggataaccgaagccttttgcctgccactgtcatttacaatttcatgtgcgttaaattcagtgacaaattgtttagaatccacgggattgctgctgttcttactatcatccccaaagttatttgatggttttatggggtttggctttgaatttgttttagaagggagggaaaatgaaagtttcatttgcaaagatgacgggaaacaatctaggacccaaagatgctgtaatagtactgtgaatgttgcttttgtagagttcctacatggaaaagagaaacaaagtcatgcttatgagatacatataaaataaacacatacaacgaatattaaaatataattaaataatatataaatattaatataaaaaagaaaatatgcaagtaaattaaaaaagttagacttgtgccataaacggctggtaattataattaggtaatttttttcttatgtttaatttaaaatattcgaatattgtgtaacttcctctataaatagtaactagtaaacataaccgcgctttgcgcggttttgtaataaataaatatagttttagagttttattt

SEQ ID NO: 259285 - DNA, 539 bp, Cannabis indica
gagtgggcgccctattcagcaattctaaataaaaaaacttcaatcatttcaatttctttgaaaggggaaaaggagaggtaatatctatccttaaattttaattggtattactcatgaatctcaatgaccaaaaattgaaaattgacacgttaagtaactatagaataaatgaactaccacagaaggtttttatgaactgtttctcaattgaaagatcctctatatggataatacacattccagttgaccgactaattctaattgttttgttccgaagcaaagatatccatggagcggttcgtcctattcagatattcacgaccaagaatctctttcggataggccctgaaaggagaagggaagctggaatgccaacaggcgtctattattgaattcacccgacccaatagtacccattttgggaacgtccagcgccaaagtcactattgtgtttccctaatgatataagaaaattcaaatggatacataactaatttttttctgtcataaaaaaatatttctcaatttgaattataaca

SEQ ID NO: 259286 - DNA, 620 bp, Cannabis indica
ttctcttttttgttgcttcatttgattgctgtattatgcatgtttggagagattgttatctgactattattatgatttgaatcttgtccttcaatatcaaattgttggttgaatagttcattgtgtatttgtagaaccagttcctccactgtcttgctttgctcttgtattgagtgttcaaaagattgattttccactgtttgtatagctatctcttctatagttgtgatgcatagtggagaattagttactctagcctgtgtttttcttagctcaatgtagaacttgagagaattgccagtcagtagcttcattggtgttgttcccggtgatatctggtaggatatgtctatgttgcttctgttgcaatttatttctgtttttatcagctccatcaagtttgctagtgaagaattggttagaattagaattttagtcattgtgtagtcgtcataatttgttttttctctccattgacactcatatttgatcacacacatgatttgttccatacctgcaattttagaggaaatgtaatattagaatcttattttaattttttacttggaaccggtttaatttaaattatgtgtattattttttttttgtagtttttaact

SEQ ID NO: 259287 - DNA, 2043 bp, Cannabis indica
aatagatccttcatcagactactttgtcaaacaacttagaaaataaagagagagcatccattctaatttcgaaatcaccctcctcttttcttctttttttttgaaatccctatagtgagttgaggaatttcccacacaattcaagccaatgcccaggtctttgtggaagattatgaagaattctaacaacaaaagaagatctaggtttagatcttgatcatactctgcgacaaaaaagattaagggttagagatttaaatagaaagagacattatattctgctaccaccaatgtaaggttttttataacttcatataagtttatttcattgttttagaaaaatcatatttaggatgttagattacaattctataatcaacatacatgttagtaaatctaaatctaggtaaaataagttctaacaggttgaagtaatctcgctagcctatgatattctactttaacttgctaaacaattagccattttgacacgtactcaactatattacttttcatacctggccacccgtacagtgctttcatatcttgatacatctttgttgttcctgggtgtaatgagtatggtgtggtataagattcatctagaatttctcacttgataccatcatatgccgaaacacaaaccctatctttatactgcagtaacacctttgacgatattgagaaatcctttactgaaccagcttcaaaattctctatactctaattatatcagatcactttgctgagtattcttgattctttctagcaaatcagattgtaaagtaatgttggccaatttctagatcacaaactcaattctctctctagtcatgtctttggctaactttggtgagatcttcttcaattcataaacttgccttggacctttttgacttaaagcatctgctaccacatttgcttttcaatgatggtagaggatttcacaatcataatccttaaccagttctaaccatcgtcgctgtctcatatttaaatatttctgagtgaaaaaagtacttgaggcttgtatgatccatgtaaatttctcacttttcgccatataggtaatgtcaccaaactttcaaggcaaacaccactgctgccaactcagtgtcgtgtgtggaatatcgttgtttatactccttaagtttcctagaagcataggcaataaattaaccagaatgtgtgtacattttcaaaaacagcgacctcaaacaagtcacactgtggcttctttttgtcccttaacctccaccaacaattacgatccttgcacgtaatgtaccacacattcgtaccagacttcattacaataaacttaaaaaatttcttcatggaaaatagcccaacaacgtttaccaaatgctttttgtttctaaaaaatctttccaatatgtgtgtctctggttgttgtgccactcgaagatgtatgtttactactctcctcaatgccttctcttgtaaatatttgatctttgaattttgagcaatctacaaaagaacaaaatggatcactacatccccccaacttcactcgttcttactgggccactaccactagtacccggagtttgacatgcttctgtgtgagctcttctttgaggtggttgttgttttggtatttaggaaagtggagcaattttcaatatttgagaaggtagcttagtatcaatgttctctcgtaaatcatcttcaccatcaaaatcaaacacagactcaattttgtagtatggattacaatcatcatcaaatggaatgtccggattagttttccgaacaaatttccaacctcaagcttcaaaattacttgtggaacacaagtcccaaccgaattgcgtgtatccttcgcactacgttccacaatcacactcttctttaccaaaatcacaaagagatgaacaaattcattttgcttcttctgaagcatttccaaatataaacttacactcttattactcttcacatgttcaggctaatatattaacccttttatgtatttataattgaattccaattttaggtcgtgttgagcttcgtcga

SEQ ID NO: 259288 - DNA, 1137 bp, Cannabis indica
cttgctgacatagtacatggggctgagttttttcctcttcccgaactcgggctgcgctgaccgcattctcggagacggctaagtatagtaacaagtcctctccaagaacgggttttgataggattggaggcttggccatgtgttcttttaattttctgaatgcctcctcgcattcttcggtccattcaaatttttgtcatttctttagaatgttgaagaagggaatgcactgtctgtggatcgggaaataaattggctcaaagcagcaactttctcggttaggctttgtacgtctttgtgcttcttgggagacggcatgttcaggagggcttgaattttttctgggtttgcctctatcccccgttgattgacgataaatcctagaaactttcctgatttaaccccaaaagtgcacttcttcgggttaagtttcattccatatctccgaaccacttcaaagcattcctcaaggtcatctgcatgacttgcacatgcctttgatttgaccaacatgtcgtccacgtacacctccaagttccatcccaaaaggcctttaaacatccggttaaccattctttggtatgttgcaccaatattttttagtttgaaaggcatgaccaggtagcagtatacccccttatcggtcctgaagctagtgcattcttgatccgcaatgtgcatcttgatctggttgtagccggcataggcgtccatgaaggacaatagcttgaatctggaggtggcatccaccatttggtcaattcggggtagggggaagcagtcttttgggcaagccttgtttagatcggtaaaatctatacacacccgccatgtcccatttggtttaggcaccagtaccggattggccagccattctgggtaatatacatcccggatcatgccactagctagtagcttatccacctctttctccagagcttccacctttactggatcaagggggcgctgcttctgctgaactggtggcatatctggattaacgttaaggacatgggtttttgcatgaggacttatgccggtcatgtctccttggaaccacgcaaaaacatctttggttgcccttagtgcttattattttttctttttcctcggttctaggctctttcccagtcggag

SEQ ID NO: 259289 - DNA, 1118 bp, Cannabis indica
ttgttacccccccctcaagatggaccatagatatcatgaatggccatcttggagagatgagtattgaggatggtagattggagaggcttggtgaaggcgtcggcgagttgtagattgctgctaacagggatcaatctaatggcagacttggtgattttttcacgaatgaagtgacaatctagttcgatgtgcttggtgcgttcgtgaaaggttggattattggcgatgtggattgccgattggttatcacagtaaatgaaagcaggggtaggttgatcgatgtgaaggtcttgtagtaggtattgtatccatgttatctcacttgtggtagaagccaaagcgcggtattcagcttcagctgaacttctagagaccgttggttgtttctttgttttccaagagatgaggcaatcgccaataaaaatgcaatagcctgttatagatcgacgagtgattgaacaagttgcccaatcggagtcagaaaatcctcggagatggagggatgatgttgaagagtataaaatgccttggccaggtgaccctttgaggtagcgaagaagatgatgtaaagctgtcaaatgtgtagtgcgagggcaagacatgaattggctgagagtgttgacggcaaatgtgatgtcgggccgagaaagagtcaagtataggaggcgaccaatgagttgtctatagtgagatggattatcgagagggtccccatcttgatcattgagtcgtagtcttggatccatgggagctttggcaggtttgctgttggtgtatcccgtatcggcaagtaattgaagtgtatacttgcgttgtgagagaaaaagattggaattagctcttgcaatctcaaaaccaagaaaatacttaagtgggccaagagtcttaagcttgaatctgagctggagtgcgtcttgtaactgatgtaaaatgttcaagttaggaccggcaaggataatgtcatccacgtaaacaagaagcactacaaatgtgttttgtgttcctcgagtgaaaagggtgtagtcggcttgtgattgagtaaaaccttcttcaagaagagcgtcggtgagtttcttataccattgtcttgaggattggcgaagtccatagatggattt

SEQ ID NO: 259290 - DNA, 520 bp, Cannabis indica
aagccactactggtttgggagcttaacgtgtcttctaccacgttcccaattgtggacaatagcttattagctatggtacaaattacaaaaatttaagtgtaatcagtcaattaaaaaaaaaaatagtaactcgtctaatgaaattggtcggtttgatcgggttaatctgtccaaaccaactactaataatttttatttttacattcaattattatattttagttaaagttcaaatcaaccacactaaaaaaacatattagttttaattttatattttttaaatagtcatataaattatatgatatattaatatatataataaaaacttataaatatatacaaaaaggccctcttaatcgagttagtcgagttagttcggattaattgggcgggttggtattattttcaacccacccaatataaaaattgggcaggttatatttttgtcagatttttcagtttatatatttcgtcgggttatctcggtttggattagacagattattcagtttgggcggtt

SEQ ID NO: 259291 - DNA, 631 bp, Cannabis indica
tcggtacgctactcatactttagtcatacagatgtgatactatcaaatagtacggtgctatcaaccataatatcagcctatactcggtatgctagtcatactctagtcgtatcgatgtgatactgtcgaatagcacgaaagccaacatacatatttaatgtaatctaacaggcttactaacatgcacgctaaacatgtaaatacatatacatactgttatactaatcttacctcgattccgaattcaggtgtgctggtaaacctaagtggaataatttgttcggcgaattacaggctcctaaatcacattaatcacaacactgataagcgacacgctaaatcacttcccggggacttaacttgaaactaaaagtttccctatcgatgaataacatggcaacaccctaaataacacaaaaatgggaaaaataaggttcccaaaattgccctgaccggtagaccggttccccaaccaaaattccagttttgggaaaaaattcctggaagccaaccggaattcggattcctacaggcctctctaaaccggaattccggttcagtgcaagaaacactaaaaatttcataactcgaccaaatccaaccccaatccaattcaaactttccagacgtg

SEQ ID NO: 259292 - DNA, 743 bp, Cannabis indica
ctaatttgaataataacagaataactaattctgatactttttgttataaaaaatgcatttttataattttaaaactttaaaaatatatttttacaaataaaatcttttaatcgtaacattataaataaaatatataaaaataaatagagtaatatcatttgtgtgaaaatattacatattaacgcaatattacaattacatcttatttttatatgttagtactaaattttatttctgttggtattttttttaggaggagaaggagattgcaaaagtgagaatggaggtagcccatgaaatgagattggcgaaagaagccgaagctgcgaaggcgcgtcacattgctaaagctagccaagccattgaaaaagaaattacaaagcgctcatcctacatgaccgactattagcattaatattttacggtttgagaataaaactaaatataatcgttgtaatttgtatttggtttatggtttgtaatgattatgatggataatagtatgtgtaaaatatatgtatgatgatggtgaaatgatagttcaaaatatatgatgggtaatagtagtagtagaataggtaatgatgttaataggttaataatggattagttagatgggaaaagttagaaatgagttagataaagagttgagataatatggttagtagtaaaagtcttgctttgaggttttgtttttcattgattcaatttgtgatacattaagctctttatatagttgtgga

SEQ ID NO: 259293 - DNA, 542 bp, Cannabis indica
ttatgaaaaatagttaagtgattctaaagcagtaaaatatatttttgtaatgttatttactatctatgggtacgaaacaaaagagttttataatttattagttgctgtagtatttattataattatttgtgactaattaactatttaattgagttttaaatagaatatttagtaaaaaaaacttgtgttcactgttttggggaaccttcaatataatactaaaatataattatcatgtttggaattaatttgagactatgttgatatgtcttgctatttttggttaattatttagggttttattcatttttgacaataaatttatacataatcatggatagtatttcacacatattcctaagcagattgaatatgttttatgatctgtataaatggtcaagaaatatgctagcttctgattttgataaataattacataattgtatattttgttaataaatagtattttagtaaaatttcacgtaaaaagtgtttgtatgagtttatgtttttacgttcaaaatattcatatgggtacatgc

SEQ ID NO: 259294 - DNA, 754 bp, Cannabis indica
ggaaccaaaaccagaagttgaccgggactagaactaggacttggacttggaatgataactgaaattggacctacatccagaaccgtaaccggaccaaaacccagactccaaattagacctgcacccgaattgggagccgaacccggatcccaacccaaaactggactcgggacccgaatcggaacttgaactcagagccaaacatggaaccagactagggacacagaaccaggctcggaacctagaaccgcaccccagtctcgatcccgaactcaaactcagaaatgttacttgggacctgaaccagaaccagaccgagacccgtgacagtgatactgatcttgactcgagattcgggtaacggggcctggaacagaccagtagtcggtgtctagatctaggactcaaactaggaccagaacccagacaaagaaccaaacccgaacccagacttagagctgggacccaaaattagaacatgaacaagaatcgccgaaccaggaccctagaacaagactaggactgtgaccaagacccgaatccagacctagaacagaacatagaccttgcctaagacccaaactgggactaaaactcgggcccggacacgctcgtgtacccagaccagaactgattcccggacctggacctaaatttgggacacgatcccaaacaaagatttggacctagatagggatccagatacgaacctggactcagaccaagacccagactgggatcgaaatgctggacc

SEQ ID NO: 259295 - DNA, 1772 bp, Cannabis indica
aactcgtcttgaatgaaaatcgagtatttacaagcctttagtgattcccagatcgatgtctgtcaagtaaatggagaatacctggccagaggaggtcgtttggctagatacctcgccctcacttgtgagttgctacaaaaatttaagaaagtaattgtctctagaatacctcgtgctcataactctcatgcagatgctttggcccatttggcctcgacaagagaagccgaattactcgatgtaattcctgttgatgtgctaactcatccaacagtcagttggaacgaggtaatggaggtggataccgtcaaaaaggtcacctggatgaccccaataattgattacttgaaagaaggaatccttcctgaagataagatagaagttagaaaattgcgatatcgagctgcttgatatgtcatttacgacgataagctctatcgcagaagctttagccaaccattgctcaaatacatagatgggactgaatgtgagtacatacttcgcgaagttcatggtggcatctgcggcaaccataccggaggtaattccatggctttaaaaataatgcggcaagggtactattggccgacattacgagtagatgcctcaaactttgctaagaaatgtgacaaaagtcagcggatagccacgtatgtcaaccaacaaccaagttagttaaactccataacgagtccctggccttttgcggtttggggcatagacttaattagagaattaccaaaagggaaaggaagagtataatacgtcgtagtcgcagttgattacttcaccaagtgggcgaagcaaaagcccttgcaactattacgcctgttaaattgcgaaagtttgtgtacaattccattgtctgcagattcagcataccttacaagttgatatcagataatggaaaacagttcgactgtaaggagatgcgccagctgtgtgatgagttgggcataaaaaaagcattttccgcagttgcttatccacagagcaatggtcaaacagaggcagtaaataagataatcaaacataccatcaagggtaagctcgaaaagcgtaaaggtgtatggccagaagaacttccataagttttatggttgtataatacagtgcgattaggcccatctaaagaacactgcctataagcaacgaactgctcgctatttcaattctaagctcaaagagcgaactctgcgagtaagggatttggttctgcgaaaagtcatgccaaacacaaaaacccagcgcatggagtttttagtgataattgggaaggaccatacgttatcgctgaaaaaattggccacgcaacctatcggcttgcacaactcgttagtaccgcgattcgaagggcttggaatggggaaagtctcaattattattatcaatagtactcgcagtataattatacttaatcaatttatttgtataaatgttctaagtatagggggtatagcctaccatagaactactttgtactattggtttcttgtaataataaaagttattggtttcttaacattttaaattttttgcaagtcttatcctttttaagttattacaccaagctgtaattggaaaaacaaattaaaaataagtctataaaatatgtgagtacccgtgtactgcgaaaagcaaacagttacatagatatcctcgatgggatatatactgttcaaaacataaagaaagcagagagaaatttgtccaagtacaaaatgcgagtacccatgtaccgctaaaagagtttgataactaaggaaataaaa

SEQ ID NO: 259296 - DNA, 1190 bp, Cannabis indica
tcttgccatctcctgtaaggttcgattcttcttttcaacaactccattttgttgaggagttttgggaactgagaattcatgagttatacttgtagacttataaaattcatcataaatagaattctcatactgcttaccatgatcactctgaattcgaacaatttttccaatgttacatcctttttcaactcttaatctgaaacaaagagttttaaaagcatcaaatgtgttagacttttttctaaaaaaatctacccaagtaaaatgagaaaagtcatcaacacacacaaaaatatcacttaccattcagactttcaacttgaattggacccataagatccatgtgaagtaattccaatactttcgtagtattaatatcagacacacttttgtgagtgatttttaattgtttaccaagttgacatggttcatacttaccaacattttctttaccccaactgtaaataaaatggttgtagaagacgtcctctaaaaccatacatatctattgtattacacatatgtaatatataaagagataagaataaggggtatattctctaaaaaaaaaaaaaaaaagaataaggggtacattgaaaaatacctattttatttatcaaataactaaatctaccactaatttatatttaattgaaacatatttcgttttatatgtactgtacccaaaatattctgacataaaggagttacatgaagagtatattgacgtgacagaagtaaaattggtagtgtttaaaaaagaaataaaaatgatagatttaaaaaaataggataatataaaaatggtataaagtctaatttcctctaagaataattactctgttatacaggttcgattctgggctaagacgggctaggtccatgcttagggcctactcaaatctagggtctaaatttttatatagtatatttttttttagagttttttactaccacatactgaaatttttcaatttttttttattcttttattgtgggtcgatttttttttaaaagtatacacagttgttttatactgtgtactatgttaaatttttcacttgttgttttactaattatttttttagttgttcctattgttgtttttaattgttcttgttttgttgttttcgttgttttattaaaaaagactagtatttttgtaaaaaaaatctgtgtgtatagtaaaa

SEQ ID NO: 259297 - DNA, 1244 bp, Cannabis indica
tttgagccaatgtagagtcagattttattttattgtagggtagtgggtcatctaaaaagaacctatccatagttaagaaagattgatgttacagaagaaaattgtatgggtcctacccaagtgctagttatgacttaaggggactcgggtatcggtcttttgaccgacttaagttagaatttatgggcagtattataattgttattgatgttaaacattgtacatttagttagagacatcaagaaatctgaatggactgtgcatgtatgctatttagcggtaatccatttaacaggatagatagattagaaagatgacaatatgagttaaattgttgatattccctagtggaatatagaacatgagtagttaatggaggcatcgatctaattgattcaaataacaaaatcttttgtttagaagtgatctagcgttaccaaaggtgggacaatttatgagtattgtctggaatcctagatgaattgaaggtgacgattgtgtagtaattttgagattatgtaggagtgggactacctatgttagcaagaagcatcttgttttggtagctcaccatgacggaactccatggttgagtgtccttgacttggggtggtttcatttaagaaatttccccatgaagcgtacgagtcagagcaaagcacgttagaaacacttggattggttcgtgggaccagtcgtcagtccaagaaacagctagagtgatgaagtcatgtataagagccatcattctatgggcgtaagggcccaatggaggcatgaagtgtggacgttactggggtaacgtataaaagaacgtcaggaagagtagtggtatcactgaagtaaagaagattacctaaattacttaaggtgatacggtaatgatggagagtactttataattgactggatagtcaatatggtatataaggagaccattgacattttgggaaaagattactttattgtgcaattatggaaaggcatactcacccagaatggagaaaagcttatgaattgagatgcaatttaatagacacgtaattgagtgattggtggatgttggatcacaaagtaggttgtttattaaacaacgagttatataattgagtgtagaataagttttaaagtggttaacgaagtatgaagatagtgatgattgcagagaagcaatggtatcatatgaatcagggagtgaaaccttagtggtgatgatgaaaagaaaaaagaacacgagagtctca

SEQ ID NO: 259298 - DNA, 500 bp, Cannabis indica
tagttgaaacactataaaaggaacatgacgctctcactcatccacttgatgccttcaaccaattcaaacctagttttctctctcagacaacaagtagatgagagagttccttctatagtgatttcacctcctttattgttcttcaccatattcgaaccctatagtaatagagtgtcatgcccacacatagcaaatcaagtactcaatcatagtgaataagaaggtggtaatcaaactcgaaggagagaaagagatccaaggtcagatctttataatactctgcgacagaaaggaacaagggttagagatctgagctgaaggagtcattatagttgatgccttttacggttttgtgacttttatggtttttgtgtcatttagtatggcttgtccctatttgttttggctaattttatggtatggtcaatgaataagagaattaaactattttgtgctcataatttttactttaatgattttttcacttttaacagataagt

SEQ ID NO: 259299 - DNA, 1712 bp, Cannabis indica
tggtacgtacttatacctatgaacaaataaacaatgataaacatgtaaatattattgaaagtcaagagaaattatacatggtaagtactaagtagtttataaaatgaaccttaagtaccatgatgactcatgatccatgatacatctacgcatatgggtcattaggtatatatcctagagttttattacgtaagaaattgagtatgaacttaagttaaaattagatagaataaaagaaaataaatttaatgtacaaaaaatacattctacctgatgcaattcattcgtgattatacaatactaaactcaaatataactgcacttatatattagaattacttaacacttgaatgaatctttaaataaatggacaaaacaaaatatcgacaataatagtctaagatttcatcaaaataatataaaattagaatagactcaatccactctacacaaataatttttcttactaatattatgatatccaaataatactagccaataaatcaatggtaaaacagatcagtaacaaagccaaccaggaaaaatagtgtaagatcacatcaaagtaatgtggagttagagtagactcaatccactctacataaatctttcttcttactaatattatcaactccaaacaatagtagctaatattgagtagtaaaacaaaaacaataatatatagccaactaaataacagtataaatacataaataataagtcatgccacacactattatcataatacaaatattataataaaaaagataccttaaattcaggagaataccaacgatcacacaaaattatccaatcctcttgctggtcctcctttaagtctggatgtcgtttgtttttggccatctcaacatcattttctcctccaatttctttaaaatataaatgtagcttgtacttgtgacccttccaagcttttctcatttgttcatcaatacatttttttgttgtctcatcattcaagttgatgtcaaaatgttcctattaaataaataatattaaatacaaaatattctaaatataaatgtaaatattgtgaaataattaacttaccaaaagatattgtcgtaatggagctctcacatcttcagggaccattctccactctttataatgaaatgtaccatgatttcgaataatgaatccaatctcattattaaatttttcagcattagtacagattggttgacgacactctgcatcaaaagttaccgataactttcctgtcgatgatgccttagctatagttgtagttgacatgccacgagtagccccacgtggcttgaatgaggatgtttttcctataatgtaacataactttataataaaaaggaaaattaaagaaataaacataaaagaaattaaatttaccagatggatcttgggaagattgattatcatcttcagtatcaacatggattgtcacattgacttgttcatcctgtaccaaaggatgcgtggagtggtgagggtgttcactctctacattagattgtatggtagttctaggttgttgactttgtaccctagaacgagtagtgcgacaaacttgttgattatgtaaagttgagcgagtagtgggaacgacttgggcaggtggagcttgaggatcaatgactggttcaacttgttgactataagcagtagatcgagtgatgcgacgaccaggtgccatgatatgaaattccttgaaa

SEQ ID NO: 259300 - DNA, 3605 bp, Cannabis indica
atttttaaaaaaaaaaataatttttagttatgatttcaaatattcactaaattagcctattctcaaaataatgagccgatgtacacaatttcaatttatttaattttatatcattattattattattttgaaatatagtttatattaaatttctctatcattaaattagattcgttgaaccagaggtataggacgagtgaaacgctttcaggaattttaatattttaaaaatgaaaataaatataatttcacacattgcaaaagtgaccagtaaagtgatatttacaaattttgattgatagaacaaagaaaaagctatgcaaatccatcaatacagttacactttggcttttttgcttttgtttttgtgctgaacaatatcttggcttttctttttttggttaaaatggcaatatcgttgaaagtctttgtctacattcagtggacttttactaactccatctcatctctccttcccttactaccatccattaaccaatgtcagccgccacccttgcccggaatctctacgcacttctttctctgctctgtgttctttctcttatctccggaaataaaacagaggacctcccaattctcctcgaattcaaatcagtgttccgaaactccaactcccaattattcaactcatgggaatccgagaactccttatgtaatttcaccggaattacctgcaactccgacggttcagtgaccggaatcgtattatcgaatcaaaagctacatgggattcttcccttggattcaatatgccagctcaaatcgctggagaagctctctctggggttcaattccttgtacggagaagtaagggatgacttgagaaactgcacgagattgaagtatttggatttgggtaacaaccattttactggaccagtccctgatttaagctccttgagcgatttacagtacttgtatatgaacaagagtgggttttcaggcacctttccgtggaaatctcttggaaaattgattggtctggtgaaccttagtcttggggataattcattcgaatccactgatgagttccccaacgagctgttgagcctcactaatttaaatcttctttacctctcgaattgcagtcttcaagggaaaataccaactgggattggaaatttggtagagcttaagaacttggagctttcgcataataatatcaccggaaatattcctgtggaaattggaaaactcaccaagctatggcagcttgagctttacaacaatagtttaactggaaaactcccagttgggatgagaaacctcacgaaccttgagaggttcgacgcttcaagaaactatcttgaaggcgatttgtcggagttgaaattgttgacgaatctagtttctctgcagttatataagaacagactctccggtgaaattcccgccgagtttggagagtttaaacgccttgtgaacttgtctctgtatactaataatctgacagggactctccctcggaaactgggatcatgggcagacttcgaattaatagacgtttcggagaatttcttcaccggtccgataccgccggacatgtgtaaacgaggaacgacgaagaagattctcatgcttcagaacaatttcacaggtgaaatcccagaaagctacgccaattgtctgagcttacttcgtttcagagtcggtaaaaactcgctcaccggcaaagttcctgccggaatatggggattgccggcgctcaacataatcgatatcgagtttaatcaactggaaggtcggattacatctgatataaaaactgcaaagaatcttactcagctattagctaggaataaccggcttcacggtgaattaccagaagagatttccgaagcgacctcgttggtttcagttggactaaacaacaatcgtttctcaggtcatattccggtgagtttaggcgaattgaagaatctggccaatctttatttacagaataatatgttttctggatcaataccggagtcattaggatcatgcttgtctctaaacgatatgaacatggcaaacaactctctctccggcgaaatcccttcctttttcgggacatttcagagtctgaattctctagatttgtctcgcaaccaactttccggccaaattccaatgactctagcttcagcgagattgagctttcttaatttatcgtacaaccggctaaccggtacagtacccccacaactcacgactgccgcctacgccggaagcttctctggcaaccctggtctttgcagttcagatatcaactcatcatttcggcaatgtcctccaaattcaggcatgtccaaagatgtccgtacactcataattctctttgcagttgggttagctatcatcctcgtggctttgggttgttacatctatttaaggaagagtgagaaagatgaataccaaaacagaactctaaaagaagagtcttgggatttgaagtctttccatgttttaacattcacagaggaagacattcttgagtccattaaggaagagaacgtaattggaaatggagggtcaggaaaggtttacagagttgttctctctaatggaaaaaagcttgccgtgaaacacatttggaataaccttgattcccaattcggccatgaaaagagctgcaagtggaaggaatttgaagccgaggttcagaccttgagctcaattaggcatgtgaacgtggtaaaattgtattgcagcataacaagtgaacactcaagcttgcttgtttacgagtatatgcctaatggcagcttatgggacagactccatggctgcagaaagacaaaactttactggaattcgcggtatgagattgctctcggggcagctagaggcctcgagtatctccaccatggctgcggccggccattaattcatcgggatatcaagtccagcaatatcttattggatgagtttttaaagcctagaattgcgactttgggcttgccaagagtgttcttcaggctagtaatggaggccaaagttctactcatgtcattgctggaactcatggctacattgctcctggtaattactgctttctaactctctttattttctgttcattaatgattacttcactttctttttgtttacaattgcagagtatggatatagttacaaagtggatgaaaagagtgatgtttatagttttggggtggtgttaatggagctagtgactagaaagagaccaatagaatcagagtttggagagaacagagacatagtgagctgggtatacgacaatctaaagagcagagaaagtgtatttagtttagttgactcagatattcgagaggaccttagagaagaggctataaaggtgttgaaaattgcaattttaagcacagctagagtccctgaattgaggcccacgatgaggagtgtggttcaaatgcttgaggaagctgagccttgtaagttggtgggaattatggtcaccaaagatgacaagtgtggcataaaatagtaatttatagggtataaattattgtataataatactcatagcaacaaggaattgaacatgttccaccctttaatacgatattgtaaatatatttttatcatgttaggattattattaa

SEQ ID NO: 259301 - DNA, 506 bp, Cannabis indica
tattatatatctagggcatttatatttgttcatagtggttttgacaagatcattgtttgcaaagagaaaataataattttttcagttttattttattttatttcaatgtgaatttcaaaatgtattgcttctaaatacattgaatttcgaattcaattatatatatttgtagaaaattaaatttgagtggaaaattaattatttaattaattttggacaaacataaattaagtaattttcctaatatttattggaaaattaatactaaggatggaaaataaatttattattcagatcttcctagggtataattttataaatattaattaaaatttttatttagagttgtctaaattagtaattttaattaaataaatatatatatgttgaaataaataaattacaatgagtatcaaataaaaataaaactctttaaaataatgagctttagttataaggatattcgatctccattgttcttcctacatggttaattattttcaata

SEQ ID NO: 259302 - DNA, 934 bp, Cannabis indica
caagaagctcaaaaagtaaagtaaagtgcaaggtgatcgcccgcacagagactcaaaagtccatcatcacctgatctcgatcttatcttagacatgacagccttccctttccggcaaatgggggagatggccgaacaggtgaagtggactcccttatgcgaattgcatgttcaacaggcctgggcgtggccgggagtttcttcttcctcctcaatggggtcacttgctcgtcctcggcctcatcttcaggattcaaaggctcttgagcatattgcttggccgtggcacctcctttcaacttagcttcacgcttcagttgaatcaactcattgtgcagatgagcttgttcaggccggccagcatcaaatttcctcctcttccccaccatggacttaggagaaaagtccccgggatagagcccgtactgcaccagattatcactggaggccaactagatattatccatgtcttcccccggtaaccgggcaagtttcttagctctatccctaagagcaagagtgaggggaggacggtgatatgtcaaaatctgttgaaaccgagtccgggtaatgctcggatcttcaccatgaagtactcatcagcaaaacgccctattttgctgatggccttggcgtccgtgccggtcaaccacttcaagcctggctgagagaagtagaagtaccccaacctgccttgttttgtggtagacttaaggtcaaagaaccaggcaacctcgtggggagaaggagcatcccatccttgagaagcatagaggacaaagagggcggataaatacttaatgcctttaggattaatgtgggccgggcagagaccaaagaagtctgccacatccctgaagtatttgtgcaaaggcatcagtgtcccttgcaggccgtgagcccccgaccagccgcacatccccttatcagggttt

SEQ ID NO: 259303 - DNA, 1345 bp, Cannabis indica
aaaaatcacaccacaaattaccctttttcaccaaaatccgaatttgctactattcatcatcttcaaccttgatttttccatgaatatgcaacaatggaggtgaatggacggcattctcgcttagtaagtctatttcttttcaaaactttgattaattaagcgagtttcccgatagtttgaataattttctatagcatttgggaatttgtggatttcttttgaagaattgttgaatattgtggaatatcattattattggattattgtggtatgattttggtgaacaattgaactttcgggaagtgaagaaattaaggggaggtgctgccgaatttttccaaaaatttttgagtggtaatttagaagcttatcatgggttccaaagcgtactagaaccgggcaattgggtgcttaattatctaaaccgccaacaccggcatcgaagtccacttttgaaaaagatagatttgtcagtctgaaagcacaagaaaggtactttgaattgcaaaagagagctttcattatagatcgaggtatcgaatatgatggcaatcccatcccgaataacccattatttgagaccatgaggcaacaaattcagaaccgccaatgggaaaagttcgtggatgttccagagagagtcaatcaaactttggctcttgaatttctagcaaactggcctgaggagcaaaatgcaagggtaagagtccgcaaaacaaatatgcttgtaaacattgacaccatccatagactgtttggcttaccaatggtgaatagcgaacactacaaaatgtttatgagaaaaacgtttgaccctgtggacttggcggaaacaattggttttccggggttgagattgcatgaggtggatgaagaacctcaactgccttaccgctgtgaattgaacctagtggctcgtgcttggatgttttttgtgagtgctaggcttatgcctagtaaacatttatcggattttccattggataggctcagggttgtttatgcaataatgaaggggattactgtgccagttgggggtataattctgcaaagctttgataacatggtcgcaggatatacacatgctggaattggcctagcaggggttataactgaattgtgtgttgctaatggtgtgccacaatatccttatgataatcaagtacagccacaacggaagattgattggacgatggtgcgccaccttaagccaccacatccatatggtcaaccgccacctcctcgtcgtaatcaacaacaagaagttcatgtccccaaagaagaggaaaatccaaatgaagaaatgcctcatgcagttccattcccactcctcttgatgcgggga

SEQ ID NO: 259304 - DNA, 653 bp, Cannabis indica
gaccgtagtacatgtattcgcaaaacctacttcactatggttgaatatttaagatatttaaacttcactaatcattaatgattaatttataataaaagttacctcaggtgttacaattaggtatttaggccaaggaaggaacatgttttctacttccttgacgtattcgcacccctcaattgagattggaatttcaccatcctcttgcaccatttctaaaatgagaacccaagcatgtgaatcatcataggatttagtgtgaactgtgattggaccctcacgttcgtacaaataagctcgggccactatgttgtcgatattgtttgagcagagaaatactgcctgattagctgccctctatttagcaaaattgtacatgataggtggctcatttaaggaaacaaactcctgagcataattttgtggaccctcatcctcctgagcacatttttgtgaaacatatgcttgacgagccacatgtccttcttccttatcctcatcctcattctacttttcttcggtaacatttttcttctgtttaatggatttgattttggcttttaatttctcaatctccctctatttctgagctacatatcaaaaactttcctttcttcatgccaaacaatgtagatgccttggcaaggaacctg

SEQ ID NO: 259305 - DNA, 891 bp, Cannabis indica
caaggtccgtgagtaggatgctatctttgagtaaaacgaggtctgccatcaattactcccaaccggttccaagagagcacttgaatcggaagaaacttgatctttgccaacaactcagtccaaagcaagaggatcctatccaattgcgaatagacgagttggaagacaagtataggagatatcaagtgggggaattagggagacaatctatatacgactcagatgacgagctttagccgtaccacccagatatcatgaatacccgtttttctttaggatttaaaaacctgcatgtctcatcgtatgacggaaacaccgatccggtcttgtatttgaacaacttcaatacaataatgcgagcaagtaatgtgacaaataatttacgttgtatcttgttccccacctcgcttgttggagcagcaagcagctggtttaacaagtttactcaccattcaataacttcctgggaaaaattgtccagggatttcaagaaaccattccaggctgcaagggatagcaacctgaagcggcctcgctaaccaatataaagcaacagcctgacgagacacttaaggcatacttaagtcgttttagcacggctgctgctagggatagaaatttggatgacagtacacaacttatagtccttcaggtgggaatctctactgatccctcaaccgctgggggcgagctgtgtgatgacttacagggtctagtaagaaacatcactgagttcaacgaaagggctcagctgttcattcaaaaagaggaagcccgaaaagaattgaatttcttgaaaataggctcgggaggtaatcccagtaatgttttgacaagtactatcttaacgagagttgataactcaggggcttctagctcgaagagaaagga

SEQ ID NO: 259306 - DNA, 3206 bp, Cannabis indica
gccataagttcccccttctcattgaagaaattacttaacagagtaactcttggtcgttgaattcttggattgaaggcagctatgtagtcattccagttaagccagggaatccaaggcgagtgccagatatctttgcttctaccattagcaacgagccaacacgatttgcaccgaataaagtccctagaagccaggataccgcaggccaccttggaagccgcatcagggaggttaacactccaaaaggagtcatcgcgcttgcaatacttggctcagaaaatatggaaccacaacctcccatccccattagcaaacgtccaacaaagcttcgaaatcaaagccaaattcaggtctaagaacttcttgatgccaagcccccaaatcctttcagcttgcatatcgaatcccaactggccaaagccaagaagagagtcttattagttctgcaccgccttctgcaattcttcatagatcctcttaggaaaaaggaaagtggacatagagtatacagggatacttgcagcgaccgattggatgagaatagttctactagcttgggatagcaatttacttctccaccctccaaacgcgacttgactttgtcaaccacaaagctaaagtcacgggtgccgctcttaaagaagaaaatcgagttcctaaggaagctatcattagacgagagggatcgaaccccaaaagattattaatctcgaccttcacctctgaacaagtattctttgagaagatagtggcagatttggaagcattaagaacttgtccagaccagtcacagtacttcctaaggcatccttgaataacattgatctcttccactttagccgaacaaaatagaaacgtgtcatccgtgtacatgagatgagatatggggggactagagaagaccataataccgccttattcgcactgaggttttcgacatcaactccctatttctagcaaagacaaaggccctaggccgtgcccaacgcatccacctcaatcgcactagagaagcccatttgacgccaaatccaattcatcctaaccgaattaaccttagtttctatcaagaaagaaaaaacatcaagattttcgttcacaaccaactccctgagggtagacactgctcgagcttgccccaagccccgatagttccacaacaagaggttcatggggatttggggggcatgataaggctcgcctcttcggccatcgaaaaaaccatttttgtatcttttgatctctcatcagtatcattttgtaaggtgatatattctcacatccgaaatgcacgacttacccactttctgttgaccatccaatctagcaggggcagattccaccaacaactgagattcgtaagactcgttgcaatcgcttggtgtcgggttggccaaaggccctcccataatgggatcaccatcaagatgcacctttttggatggagaaataaactccccctcatccccatcatcaccgacagccacgatggcgctgccttctccaaacacatcagtgaccctatggttctccacaaaagcaatacagtctttcccagtactttcacctgtgtactcctctcccaacgacttcttaagtttagcccccatgctaggctcaaggtcccggttagaaaatctaaacaccggcttctttgggataccattaggacccaccatcttggacttcttcaactggtagcaagacttaggaaggctcccagggatatccacactttcacatgtagcaccaaactggacaggccctagcttctcttggaaaggtttggcaacatgggacacatgttgtgcaggaaaaggcaagtccacatagtcattatacgccaccgaaaaggttgtatctgacctttgtcgaggtaccccttccatcccttagcgaggatatccttgctgacaaggtcagacacgatcaaaccatccccagtgcatgtagccactacctagggtccaaggccaacaatcgcacaactcggggaaacaccagtcgcaacttcatccccttgagtttgagtagcatcatttttctctagaatcgtccgatcctgaatatctgcaacctctagcaaagaaaacccattctcgaggcgagacccatcacgcaaccagggaccgaagagaggaacactccaaccatcatccaacaaaacaactctcttatgcccggagcacatattctctagatgttcgattacgccacatttaaagcagaacaccgggaggtgttcatatttaaagaaggatcaatgtttcttctggccatcaccttccaaggaaaccctagggatcaaagggagacgaatactgatgcgggacctaaaccgaaggaaagagttcattagaatccccttcttcctgactttatccgccgagacaaacttccccactgcgtttgccagcagaatagtagcatcatctgtcataagctcgagggggataccatgtgccttcaccaacacatccagagaatcgaggttcgccgaggtccaaagaccatcctccaacatcgcagcaaccatcatgaacccatcacagggggaccacggtccattggcaaggataaaacccacttcccccttagagttcagacaaaaaacaaaggttttggttttacggtcaacaacttggaaatgccagcccctttggagtctccacataacagacagggctcttctcatagtggttgtggagaagtccctcttagagaagaagtgctccaccacataggtagcaatagtacccttagccgcctttgtatcagggactatttgaatcgaaaagttgtccaaggagaagttttccacctccttcacagattcctccaccgtcacattcctaggatgatccatatcagcagcagaagcaaacacttagcaaagttggttcagattgcagcagtcacacgagatctttgcacaagcctgaaacaggaaagagatgaggtgatttcgtagaacaaaataggagatattaaaccctaggaccattggggagtggttagggggtagttcccaatacccctatctgcggtaccggccataacggtaagtcgtacgttgtacacgcacctattcgtacatcacaaacgctacagtaaagagaatttcaaaaaacgtatggagagaatttcggagaattacgtggcttcacttgaaaaggaatggaaagagagattattgtgttgtatgt

SEQ ID NO: 259307 - DNA, 602 bp, Cannabis indica
ttcaacttagcttcatgcttcagttgaatcaactcattctctggatgagttcattcggtccggacagcatcagatttcctcttcttccccgccacggacttaggagtaaagtccttgggataaagcctgtacctcacaagattatcatcagaggtcaactggataatattgcggtcttcccctggcaaccgaacaagtttttgagctctatcgctaagagcaagagtgaggggaggacggttatatgtcagaatctgctgaaaccgagtccgggtaatgctcacatcctttaccacgaagtactcatcagcaaaatgctctattttgttgatggccttgtcatccgtgccggtcaaccacttgaagcctggttgagagaaatagaagtacgccgacctatcttgtttgggggtggacttcaaatcgaagaaccaagcaactttgtgaggagaaggagtaccccatccttgggaagcacagaggacgaagagggcagacaaatactcaatgcccttaggagtgaactagggtgggcagagaccgaagaagtccgccacatccttgaagtacttatgcaagggcatcagcactccttgctgacc

SEQ ID NO: 259308 - DNA, 1473 bp, Cannabis indica
actgagatcctaaataacagtaacatagattttggttaaaatcagttaaatgtagatctgttagacctgatatcattgtcaacaacaacccatatcatcccgtgtggatttctccttggtctatactgtgtgtgaccccaaaagtgactttacttaggtagctctgctcatgatgttggtcttgctagatggtgctgcctttaataccatttctgtaataacgtatgtaggactcactcacaaaagaatagcctatgaaaagagggtgctcaagtggttattgaccacctacttagctcatgcttagatgatgtggaatcttagaaaatagtcaatcttggtgctatttggtttattattaacttgcttggttcacatgtttatttttcttatgttattatttatttatttttttctaaattcaggttggaagatatgaaagatcagctgagaaagcgtttatttaaaaagcgcatagttagaaaaatcaatttcgcgattgccaatggtttgtccattgaactaaacacatatgctttagttcgtcacactactcctggtatgcatatattttgatcaaatttgttataaattaagaactcggttttgcatgttctatatttacagtggaataactactggtcattacctctaatctacaggagcaattacatggttggattctgtcaccaaccatcctttaaaggtgacaggaatactgcattttgtttacttgatcaaattttgttatatgtttactaccctgcatttgttttcagcatcctgtagcttcgtgtgattagtttgctgtttagcacacatatcatcctcgttctgtcccattgttacattgtagattttagctctttctcatagaatatatatatttttcctgatgaaagacccttctacattttctctttgctctatctcgccaaatacgcaaaatgtttatagtttggtgtgcttcaaaatcctacgttgattccattttcgccaataaaacctttgctgccggtttctgtatttaattcactctaaaacaggtttgcctgcttaggcctcggtggaactggtgtgattaaaagtttaaaagctgtattactgtaccattgctataattttcagttgaataatcatgttttaagctctggcaagcgcttgagttgtctgagttgattctgtgcagactgaaaggtctttcatctgtgcggacactggggcattgcttcagaattctactaaactcttttactcttataaaaagtaagcatgctattttgcttctttatgtaatctttaattttgtttttctttaggcttctttaattgatttgagttccattggcatgtagtatgattcaattaattgattatcaaaggcagattgcaacctgaatttattgatgctcaacaaacttctattcttttaactaacgaaataaaatatatcatctaaacttgaattaaaat

SEQ ID NO: 259309 - DNA, 744 bp, Cannabis indica
taattttaatgtaaaaaaataacaatttaaaaatctaatatatataatacaattatatttcaaaacttaatagatcaaatgtacattccattcacaaaattaaacatttctttatacatacaatttttttcttcctttgaatttgctattttttattttatttattttaatttatttttagaggcataaaataacaataatttattttattttattgctagttatgtgaaaaaaatatttttttcataaatattaaataatttaatattaaaaagtaaccaatctaaaataactgatccaatcagcacttttgcagattggattgagttgttgtgcagaatggattggatccaaaaaataaaatccgtacttagtgcggatcggatacagtatgagtaaaatagtacgaatttgattggatgaatactcttaatgtgtaccaatataaatgtgctaagaagtgtacacacaagtagtccatgttgacagttaactatgaaaaatagatgataccttaaatttgctattggtttagtagttggagggttttaccaccaaaatttgagcttggagggttaagtacaagtggagtaatagttgagagggtttaaccgtaaaaaactcttattattattaactatctttgatagtttttgaatgaaattacatagaactatggctcaaaaataaaaaaaaaaataaaaaaaaaaaaaaaatagggtgtttctacaatgcaacttcaaa

SEQ ID NO: 259310 - DNA, 514 bp, Cannabis indica
cttttggggtagaggggtttgcagtcgttagctcctcgaaaagatctatgacctccccaacaggcctctttttcttagaagaggacccctcaccacctttagagtgcttggccggaggagatgcgctagagcttctgcccattctcttcttcagagcatcaagcatctgccgagacatgtctatgcaaaacaaaaaacaacatggttaaaacagacatcagaaacataaggcataaaagtcaagaagctcaacaaacaaggcaaagtagtatgcacggtgactgcccaaacaagactcagaagcccatcatcacctaacatcgctcttatctcagccatcacagctttcccttttccaaacacgggaggggatggccgaataggtgaaatgggctcccttatgcgaatctcatgtttaacaggcctgggcggggctgggagtttcttcttcctcttcagcggagtcacctgctcttcctcagcttcatcttcaggattcaagggctcctgagca

SEQ ID NO: 259311 - DNA, 1095 bp, Cannabis indica
aaatatggcatttaaagcttgctcaatttattttcatcattgctcacctcgagtatagtgtgcaataaagaagggtcatttcaatcgacctaccatcattgtaacttcttctaagagacgtgccccctacatgcgcgtgttatcaataaatgcattaaaggcacaggacgcgtgccatgtcatggcgccttagttcttggcccttgaaattgatgacaactcaaagaatacatccatgattccaacaatcaccacgtgttgaaaacttatctctaagagttggaagaaaactgcaagctcttgcaactcgaagagtcccgaaatcttggggtaaatactattcgtgtttctaaactggtgacacatggcataaaagggaagagaaagtcttataatctcactaattaaaatccttcatcaaaactcagttacggagaagcgtcaccaaaatgggaaccaatcaagactaagaaataagcagaagtctaccttgccttatcttagcttcccgaacacgaaagacttattaccactccaggacccgaagtagcattcacttaaagtctacccaaatgatacccgaatgagaactctaagggcctattccaaatgctgaccacccaagagtatcgcagacgtctaccttggatacaacctagatcgcccaatgatggttgtgctttttctgacacaaaataagatcgtgtcccttgcgctgaacatggtagtgcgcgcacctcacacaacttttggtcagacggttattccaggaatctacttttaaaggttgaatcttttggcgacacgcatccattacgtacaatggtcctcaattgtccagctactgcaatgcacgagcacaattctttccaaggggcccaatagtgatctctctttttgcatgtgttttaccccattagtgggctttttgtagaaaccctaagtgaatcatgggcatgttcatacctaccttagccaaaactctactcatattatccgaagctttcttcttcttcaagagaaacacagaatacaaagttagggtttcttgtgctaaaacactgtaaaaacatcaaatacgcccttagaggctaa

SEQ ID NO: 259312 - DNA, 3294 bp, Cannabis indica
gacacaattgctaaggggtaaaagtcaacaagaacaacaaattttagaaggaaaattcctatctaacgtcattaaattgccaaaaaaatatgcttgaaatgctagaaatctccatcttccacacctaaattttcagttggtgcttgttctactccgtccaaatgttctaaatgaaaataagatgatccagctgcataaaatacaaagaaaattagcaactaatataaatcacaaaaaaaaaattctaatgagactaaatgtaccaaagaaaacttatctgctaaaaatgttgttctctagcgaagcaagcatatcatttgaagtcgcaaaactcgactagtgacaaaactttttacaaaaattgaatttttattttaatatatatttttttaaaatatctaaatgaatttttttaataaaaaataattttttttttaaattacttaactagttttaaaattttaatttcttttttagttttcttaatcattcaaaataatttttttaggatctaaattaattttttaaaatttaccgaaaaaaacgttgaatcggaggtactatttgataattgccaaagtttatggaacaaaattacttacatcaacattcaaacagaataataggttgaaacctaagactaaatttctataaatgtaaaagttcaagggattcttaaaaatgtgtatattttaagagaaaaaatcaatattgccgaaaattcgaggagataaattgctaattattctaaaatgaaagaaagaagaaaccccaccccaccccacctcacatcacatatgttaggatccatttgtaaattgtaggtttacctttcatgccaattacataagccaagtctatatggatcacttttctacaggctgaacaaggataaaagcaactgaaagataattacattttgttaaaaactagggtattcgggctggtatgccaagtcgtagttgccacttccactccccatgggagtctgggaataatgtgaagactggatagaagacgaagaaccgtagtgttggaactgaggactaaaatttggttgcatgaattcacgtgacgaaggattttgattcctctgcatgacaggagtgtatttatgttgagcatttatttgtattccactctgataggatttctggccagaatggtaggtgtaggtgaagttgccagtgtacccttgagatggcatatccatattcggccacccgtagttaccaagttgggcgcttagctcgtatctatgctgcatttctgcaacagaaggataactggtctgggaagtttgcttccttactgtgtcaatgggataacttgtctgcaaagtttgcttcctttctgtgtcgatgggataactggtctgagaacattgcttccttttccattctgtgtcattaagataaccgatctgggaactttgcttcctttctgtgtcaatagggtagtcggtctggtaattttgcttcctttctgattcaatgggataacttgtctgggaactttgcttcctttttgtgtcaatgggattactggtctggaatttcccactttccaaaccaggtggaaaatcttgtccaagagttttttctttgtcttggcaggccttttctttgttttcgtcttctggtgatccaaagacttcaggcgatgcaaagacttcatgcagtgcttgggttggtgaataacttggggaagacaactccatatcaatgctcacatcagaaggtgttgagccttccaaatccccctgaatcaacctctctatttctccttgtccatcatagtccatcttaatgaggttgctcttgctaccagtatcaatgtcatcatgatgaatatagctttgattgacttttatgggagtatttgatccagcttcttgtggttcagcctcatagttaacatccgcaacaccattgaataggcaagacatgtcaccgggtgcacacagataggagtagtcctgataaaaatcataaccttcttcctcgggatggttccttaccttgtttcctaccagatgcagctgttgcaggacaatatgaccatgttgtattgctatctcattgtgtctaagagtccagtcacggcgactccaaagatacaaaggtggcgccttcaggttccaatcctctaactgcttatcgtgcatgtcaatagatccagggagataaaaagactgaaaaaaatgggagagaaaaaacaaatcaaaatgcacaatcatgattaattctacaaatcctattaaattaaattatcacaactggtagctgggaaatgtatttactagcaaagaaagaatactaaattacctttcctgagagtactttttcatcctcccaaattaaatcataagggttgaagattgtgtcaagtctggaaaagcagcaaacaaatgtgagaaacgagaaatggtggagaataagttaactttaagaactcaccgtttggtttcctttggggtaattagaataaggagttttggtctgaactccagggccttaaaaatgaacctgtgagctaaagaagcttttactccaaaaggaggattgagtcctatgacctacttttagaattagttcagaagtataagaaatacaagcatctagattatttggtacatggtcaaaggggaaaacaaaactctcaccagctgagaaccatcaggcagttcttctaactttacactcatccagtctcttttctcgaaactgaagtcattctacaggaatgaatggtgaaggtatttagtttaacttttcttttacatttacatttgagagtcaagacaaataaatgatgaagagacacactggcaactaacaacaaagtccctttaggctttagcactcaaatccaagagtgcccagaaatacagtaagagaatatgttcatacagaatcaaatcaccaaggtttagtgttgtggagactaaagtcgcagtataataacaataactaataacgataataaatacttatctctaattgagcccttgtcctatgattttgataccacaaagtatcatctgtcacatttggctatcacataccaatgaactgatgttattcttttgccatttgcttctatttggcgttactttctcttgtttaaccttgttattagagtgtttactataattatataaagggaatatactcactaccttcagtttttataaaaaaagatatttggtatactgtattttcaataatacttaattggtacctcttattttttttgtacatatttagtaccctaaataaaatttaatcaata

SEQ ID NO: 259313 - DNA, 539 bp, Cannabis indica
ccactagctcagtactttactataaaaaaaaaaacaaaaccaaggctccaccggcgttctagaccgtttgctcgtccatagctccagtatacataccagaactgacccaactcatcaaacttacattcaatgttccctgtctattgcctgtagggggaaagtaagggggtgagctaaaagcccagtaaggaaatgcttatcatacaataccatataatatcacacatatcattaatttatttattaagttttagcaatatcatacaccttatttataactatagccaaataactgtacacatgaaaacctttatcatataggtccatactaattgttcacaccatacacatatacagagatcataactccagtatcatactcataacataatcatatcaatactataaataataatgtcattatcataacattggcatatcatagccattacttacataacccgggcctagcctgaccctacaatatcctgggcctaatctgcccatataataacatgggcctatgcagccctaccatt

SEQ ID NO: 259314 - DNA, 1156 bp, Cannabis indica
aataaaaataaaacaataaatgaagatttatgctagctatttttcgaattctagtatttattagtaacaaatttaatattttaaatatttatgttacaaattttttaataataaatttaaaattttaatataattttactaagtaattattattacttaaaatacacaatttatttttttatatataatttaaaatattttatatatccgccgcgaagcgcgacatgtttactagtatatatatatatgtatatgtgggtgtacttttaatgggtattacccataagtgggtaatattagaaagttttgagtttttatgattaatttttctatttaattagaaaaatttctcatttttacattatatgggctgcgattggcccatcagttgaaaaaaaaaataataaaaaaaaaaatcggcaaaaaaagttgaatttgacttaaatattttcttatatgaacatattgttgatatagtgtaaaaagagatattttttgatattttctttaactaactaactaaattaagcataaaaatttaaatttctcttttattattcgctatgggaccaaaatctaatgatttaatatttttaaaattaatatttatagtcaaatttttttattacccatttagaagtattctatatatatatatacatttttattgtaaccatcatgattatatttttatgacctgtaatagcaaattaccaataaagcaaaaaaaaaaatttagaattaattaattataattaactatttttttaaatatttaacaagatctcttttaacaattaacatttataaataatttttttttatttatatttaaattcctactataattattttaacaattaagtcatttaattataatatttacaataaattttatttttctttttcaaaaattaaactaaaattttacacaaattaaaattctcttcttataataaatttttaaataactaattattttgttacaaaatttgtacatctatctatatatcgatataattttaatttttaaacatctctttttttctccttttaaacttaatgcatacattcattgcctagtttatcattaatggttaatctattcggtaatttagtctaatctccctagctagatgtgttggaaattatttta

SEQ ID NO: 259315 - DNA, 2638 bp, Cannabis indica
tataaaattaaaacataaaaagatttaactgcgaattacccattacccaaatgaataatgtttgagctaaaatagctgatcatcttattcatctaatggagagtaaattttgacatcttaacctatatttttaggtattagctattttactagtgcacagtagaaatgacaaaataatcgtcataaaaatcgtaatctttatagtacagccaaatgaacatccctcttcaactcattgacaaaaaagacttgtattaaatataaatcaatataataaaggaccatggaatgaaagccaggatcaactttagttaaaatcttataaacaatgacacagaaaaaaaaaaaaataataaacataaaaatctgtatcaaatatcagattgttcaacttgtgttatatgtggtgcctataatgggtttatgggtattctcaaggagcaagtatacaaatttcaccacatccactaagcaagtgataaggtgctcatcaaaaccctcttttaccacgattctgtattagctgcatggagtggaaaaaaggtccaaaaactgaaactcaactttgaatccacagctattacttcgagctccagcttcatcaccatcatcactaaaaactataccaaatctagtcataaaagtccctgttttatttttatttggggaataaaattgtgtcaattgaactgcttaatcttgtaatatcagcatactatacaataatcttcctcacagcagtgtaagcaaataataataaacacatacatacaaatccttgaaagagaaaaaaagaagtgtctgaaatgtcctaaatctagaaccagcattgagtaaataagcataaggacattcattatgttctctggcccagccttgcaatttaaagatactaattcaatattaaacaaacaaggtgggtgacttcacttgaaagacattatcagataaaaacctggatccaaaatcaaagatgagcaccgaataatgaaccattttgcagataaagcattaccaaagcttcccaaacataactaacaagtttaacatactgaaaagcatatcatgcttacctcacgctaagccaaggttatgtagcttgttacagtggggtgtaggatgattcttattccagtgccgtctttgaagctctacctggcagtagcgcagaagaatacttttataatctttgatcacactatcttcaatatcactccgagcagaacttccaacaggataattattgtcgaatgctgtggatttaacataaaattccacaccatatttctcagttgtcttgggaacttgataggagtaattcttgtgcagtgaatattcaggctctgaaaaaggcagatatgcaagcaatataatgagtaagaagggcaatatttgaagaaggagcatgaaattaagtcctcccccatgaaactcttccctcggttgttgaccgcccattcctcgggccctataaacatgactagctcgaaacatttcactctgaccaaagaatgccctgaatatttcattagggtcaaactcatcctcaaaaatgtcctgctcagttcgcctccgccgtcgccttacattgttgtgttgctggttatactcaaattcatcaaccaatccagtctgatcatactgtctccttgattcaccatcactcaaacacctaaaggctttgctcactgtcttaaacgcctcttccgatccaggagccttgtttttgtcaggatgaactttcagagacaatttcctataagcctttctaatttcctcaactgaacaagtcttctccacaccaagaacagcataatagtctttatttttccttatctgcctaatcaactgaacatgttcctcagaataatttctctccctagtattaagcgggtcaaactcattcttaatctcacctacacttctcccatttctagactctgaaggagactcagaagaaccaagcttctcacaagcagccaaaagctcggcaactggcaaatcaccattgagacgctgagcaattttaatgaatttcaaagcacgtcttttgtcacctgagctaattgcttcttcagcaatgcgaacacatctcagtgcttcatccttgttaccatccataacagaccactcactgaaaaaaaaaaccccaattcacaaaatgcgatcttttcaaaacatgattcacaaagcatagaaaccctataaattaattccataaatctgattctaattcaaaattcagaaacaaagaggactgtgagagtccatatatatcaaaatcaaatttattagggtttgattgatcagagtaagaattgtaataattaccatatgatttcaaaaacgaaataggtaaatcaaataaaaatagtctaaacagagaagaagaaggattaccagctaataagattgggaggagagctcagagcctgaaagtagagagagaaagcatagagagagaaagagctgagaataagaaaatgggtttagtttatttagttccgtattcactatacggtggtacgtcactcaagaaatgatagtccacgaccgaataagatcgtgccacgtgttgagaataacaatttcaatgggctaatatgggttaagagcagagagaactccagcccggtta

SEQ ID NO: 259316 - DNA, 1268 bp, Cannabis indica
tcaaagtttttagaataatttatctaaaaaaaaacttttagaataataatgatgatattttgtataataataataataataataataataatatattaatttttataatagaattcatgatgtaattgtaaaataaggtaactaaaaaattgtgatgataatgaggtaagatttttactcaaaaaaaaaaaataataaataaataaataaaaagttgtgatcgaaacaaaaataaaattaacggtcataaataaaaaaaaattgttaaaatatgaatacaatcaacctaaaatatatctgtatagaattgaaaaaaaaaaatgttaattaaacaaaataaaaactaaaacttatattcaattaagtgaactcaaaaatacaaaatcaaacttaaattaagaaattgtgaaaagtatccaccgcattaaatgtatttaaatttatttatataaagatatttatattaattaatttttttttagatatacataataatataaaattaattaagaatattctattaaataatcgtatatcttgttaaagttaactaggaaaattaaaaaataagattaaattaaaaattatgttacataaccatattttatataaaaataaatataaatatttattcattataaataagttaaaaataataaatattatatatatttatatatatattagtaatggactcattaattattataaaaataaatgtgaaaaaccacgaaatcgagtcagaatatgaaaatgggttggcctatttaaaaaaaaattaggccaacacgagtaaagcacgacacaaatccgagtacggcacgagcacaccagactatgttgggcctaccccttaaaaatattggcacgacacaacacgatccatatttattaatagtacgacataacacaacctatatttaaataagtacggtataatatgttgggctgacaattcgtgttatcgtgtcgtgtttgtgttgacacgtttatgacacgatatgattaaggtaaacatgaacacaacatgtttattaaaagtatcgaaacctcacacacaaacgcaacacatttaatttattaaatgtgtcaaaacctcaaacacgaacacgacacgattaattaatagatcagacgacatgataacacgattatcattataaatacaagaactttaaatttttatttaaaatatatagaaattaatttgttattatatcaacacgattatgacacgtcacctgaatttatttattttgtgttgtttt

SEQ ID NO: 259317 - DNA, 546 bp, Cannabis indica
atgatttaatttcgttttaagttaaaataacaattgctttcgtatatgggttttgtgaattagaatagttatgaaagttctgaccttatagaattgttctcgggtagtcgtgggactagtttcgatattttcttgttgaatttgaggtgattttgagttagaaatcgagtttggaacttcttaaagcttagtccgaacgttaatggcgtttttcatttaaggagtcgatttttatttctgttacataagaatggtaatatttatggtgtatatgcaccctatgaagtttggagtgatttggataagttttggtagtgtttcggtgagtgcaaaaattgggattttcgagttttatagtttttagaaattatataccgttttggacataacttttggacatcagaaatcgtatttttatcataacttttgacttgggtgtccgttttggacatactatataccgtttcgaagcttgagacgagctctacaaatggtgtatgttttagagccaaaatataagttttattttagtgtatttatactgcg

SEQ ID NO: 259318 - DNA, 720 bp, Cannabis indica
acaaccagtgtcaaattaaaaaaaaaaataataaataaataaatataaagttgttgcaatcttgttgaaaaaaatgaaaaaaaattctctcatgtaattagaaaaggaaaattgggattgtgtgtgaaaaatttcttttgggtgacatgattggagaaacttatagtatagaaaagcctaaatgaccatttcaactactcttacataagcctaacattacaagcctagaaagactttctgattcttggttgtgcattaatttgtattaatggagtaagtattgcaagcatatgaaattttaggttagtagattgatggttgtaattggcatgcataaattggttcaattgttagttaattgcgttctatggtttcatgagctggatgaaattaaattgaagtgtgtcaagggcgtaattgaactgaaattctggattgtatgcataagtgaaaatttttcataatcatgttattgagtctacttgaaaattactcatgttctggagattgacttgtttaacttttgtttttcatttagtgttttactcgaggacgagtaaatgtttagtttgggggaatttgttagatttcttttagtattatttttaagttaatttttagtgtatttttaatttagttcaactcttgtttggagcaattttacgctttttatcttttatttttgccaaatttaaaatagaagaagattagaaaatatta

SEQ ID NO: 259319 - DNA, 618 bp, Cannabis indica
agtgctgtgattggagaaggatgtctcattgggccagatgtagctattggtccaggatgcgaaatcgagccaggtgtcagactctcaaactgcactgtaatgcgtggagttcgaatcaagaagcatgcttgcatttccagcagtatcattggatggcattcgactgttggcaggtgggctaggatagagaacatgacaatcttaggagaagatgttcatatagctgatgaagtttatagtaatggaggtgttgtcctcccacacaaagagattaaatcaagcattttgaagccagagatcgttatgtgatgattctgatgacatttgatatagacatctcaaaatggatttcatgtagcaacaacgtttttagtttcccttttctctttttgactgtatggattagatacaggaccagaataatgtatttatgttatttgttattggtgaatagaagaagataatagcatgcaaatgtaatttctaataaacttaatgatatggaattttagaaaccactcagaattagtctaattctttttatgtcaatgtttggaactgatttgtaattgagggtatctttaatgtggtgtatattaatgttagatcataaagtca

SEQ ID NO: 259320 - DNA, 527 bp, Cannabis indica
tctttaaacttggaattatttttcacttttcagacaacaggctgacccgacagcttttaatagcggtatcatatgctttggttatctttaatgaatttcattctctgtctataatcgtcgtgcaattgtgattgttttaccaaatgctttgtacaggtatgggtgccccccaagtgaccgagcagacgtatttgttcggtgttttgggtttgaccaaaccttttgtacgcactggatggtaaattagaaacatgctgataattttgagtcaatttgaattttgaaataactatctttatttatttattgatcgaaaaatgtatttgttaccgtagtaatttacatcagtgctatttgatccaatctgatcttttagcttaacatgagataaaacaaattgcagaaataagaaactgtactttaaatggtggtcacctgacctgagtactttgtttcttttatcgaaacctttgagcgtagtctgcccagcttgccattcacttaaaagtaaatgttcattcagtact

SEQ ID NO: 259321 - DNA, 518 bp, Cannabis indica
  modified_base (496)..(496): a, c, t, g, unknown or other
gttggttgtattaaaaaaaaataatcaaaaattaagctcaggtcctatttttactattttagaaaatacaaggtccattttgtcatttaacaaaacacaaggtccaatctgtaacttttgcaaaacacaaggtccaaaatggtatttacccttttagtcacaatgcttattatgactaaaactaaattagtgacaatttatatctaaatactatattttagttacaagtaactttttattgtgactaagtcacatttatttagtcaaaaaaaattatactgtgactaaaagttatcactaaagttagctattttttatagtgtctgtaaaactaacaaaaccctaactataccttatctataaagatatatatagtacacaatatactgtcaactaatttcagttgaataaattttattaaaacgatcagttaattaataattatagttcatttgttgttgtggggtggtgctttgtattacttcatttcttgatntattgtcttcctataatttttc

SEQ ID NO: 259322 - DNA, 655 bp, Cannabis indica
tgtaaaaatatctcctagttgttctccggtcttcacatatcctgtggagatcagaccttgttgaattttctcacgaacaaaatgacaatcaatctcaatgtgcttagttcgctcgtggaatacgggattcgaggcaatatgaagagcagcttgattatcacaccataattttgctggaatagaagtcttaaacccgaattcagtcaaaagctgataaatccatattacctcacacacagactgggccatagctctatattctgattcagcactggatctagatacaacattttgtttcttactcttccaagagaccagattgcccccaacaaatacacaatatcctgaagtggatcgtctatctaccttggagcctgcccaatctgcatcagaaaaacactcaatctgggtatgtccatgatccttgtaaattacaatgtttgaaaaaatgcaaatgagccttggggcgttttttctttgtaaggcgaggcgcaagcctcaaaaattaatagaatcaatacttttagagcacctaagaataaataaactgtcacataaagggacagtgcaccaattcgaaggaaggggcagtgcaccaattcgaaggaagaaggcagcaagcttttatttttttcgttggttgaagaaataagca

SEQ ID NO: 259323 - DNA, 564 bp, Cannabis indica
aatagctcacagctagaaactcagtctcaacctctggccaacttgaccacaaacaatagctcaaatgatgcaaactggtaccctaacttaggtgcaataaaccactctactcctcaagctcaaaatcttgcaaataatttttgactatagtggacaagatcagatgtatgttggtgatagctcatgtaacgccctgaccctcagggacgccacgtgtgtgcttttataaacttattatcactaatctataaattttggaaaagtgtggtttaatttaaatctttaattaaattcaaaataaagacttccattttaaatactattgtaatatagggatcccctgtttatatatatatatatataaaaattttttacaatagattacattgccaaacatagaaatgaattcgatcctgcttcccaaaagctaagccccacggttgatatgtacattgttgggagacctctgactcatggccgaacacaacttctaacttccttacgtgcaccacgaagcacccgtgagtcacaatgactcagcaagaaaagctactatataaaatc

SEQ ID NO: 259324 - DNA, 665 bp, Cannabis indica
gaaattaaatgactttgttatttaattttttttattttaatttttattattttttattattgttattattttatttttatttttttgcaatcatagcaaccatattgaacttttccatttgtagacattactttttcttttttgttgaatttttattttgtgataatcttgtaaaatatcatttaaaaacaacaccaatagattaaataaataaataaagacaatgttttcaactacaattgatacatatactacttaaatattttttaataacttgtactgtaagagaaagaaaaatgttcaataaaataaataatagctaaattatatattcatatctacaataagtataaaaaagtgattttttaacgccaaaatataatatttatatgaatatagagaatagtattagcaacctatggtagtcttttggactttcaaatgagcaattactaatattagtaatattgatgatggttatactattgtattatatagcttaaattttacatatgtcataaatatgagaaggtggaagtgctgggttttatgccctaaataaaactcgtttcaatataatcagatttacttactaaaaaagatcagaaatatcatttaatgttgcatggttcacatgatttatttcatgattatttacataatgt

SEQ ID NO: 259325 - DNA, 1333 bp, Cannabis indica
atttggtgcaatagagaggataaaaaagaaattgagagatggtgagaataaaagaatacgattgttagggttctaagtatatacgtatataacatgtcgtataataggtttaaatttaaaaataaaaatctaactaatcagataaaattatgttaatataatttaaattttaaattctaaactaactaatctaatgcctcactatttatttatctcactatttaatatatatatcatcatttttctcacccacccacacaacaaaaaagaaacaaaaaagatattaataataataataataataataataataataataataatataattgtatcacacttaatataccaaatatcaatatatgtatataaactgaatattacaaatgactgccacgtacggtgctagtgttgggcaccacgtgcgacacttggcaaaaaaaaaaaatacaatttcatttctttgatttgattctacactatattttaatatttaatcaatgtatacattttaagtgtcaaatttttttttaaaaaacttgcgttgttgtcttctaaaaagtcaccgaaaagaagaaaattttatgattaatgattgtgaattatatagaaccgcatatttgagtttttattcgaaaaatacgtattactatatatttgcataatattatatatgagtaattaaccattctggattgtatagagagctatataattaagtgtatgtatttatataagcaatgcatattaaatcttcctggaagactagctagtaataataatagtacactctattatatcgaccaatattattttttaaaagcaaaaatcgaccaatattattgaattaactaaatatatatttagttattattgatatcgtcattattaattatgacatatgtcgacaaaacaaattaactaactaattatatatatgataaaataattaataacttccgtctggaaaatttgaaataagtggtaagtggtgactccttccaataatttaaaaaataaataaataatattagttttgtttcctatattacatacagtaatgcatagactggtgggcacacgtaacatgatgtaatattgtcgatttagccctcaaactttgatttgtgaacatataataaagggattttttctataataggtattttagacttaaattttacatttttagcttagtaagagaaattaaacaaaaagtaaattcaaaagttttttttttcaaaaatacctattgaatcttcttcctcctccgtcaatgtatataatgtacttatataaattacatgatgagatccatctatcaatataattct

SEQ ID NO: 259326 - DNA, 1553 bp, Cannabis indica
ttcagcagcagaatgacctttttaaagcaaaatcttgatgtttttgcttggaaacactcagatatggtcgggatatctccgcaagtcatgtgtcatcgcttgaacattgaccccgaggtgcgaggtgtccgacaaaagcgccgcaaaatggaccctgcgaggtaccaagcgctaaaagaagaagtcgaccgcctccttgcctgcggctttatacgggagtcgttttaccccaactggttagcgaaccccgtactcgtgcctaagcctaatggctcatggcgcacatgcgttgactttacagacctaaacaaagcctgtcccaaagacagctttccccttcctagcattgaccagcttgttgatgccactgcaggtcacgaactcctgagttttatggacgcatactcgggatataatcaaatcccgatgtatgaacccgaccaggaacacacctcgttcattactgatcgaggactatactgttacaaagtgatgccctttggtttaataaacgcaggtgcgacttatcagaggctagtgaacatgatgttcgcagatctcattggaaacaccatggaggtatatgttgacgatatgctcgtaaaatctcaacatgcgaaggatcatattgcccatttacaggccatgttcgatatattacgacggtataagatgcggctaaaccctctgaaatgtgtctttggagttggctccgggaaattccttgggttcatggttaaccagcgaggaatagaggccaatcctgcgaagatcagggcattggtggaaatgccatcaccaaccaagccaaaagaggttcaaagcctcacaggtaaagtcgcagccttaaaccgctttatatcgcgatcttctgataaatgccaggagttttttcatattctaaaaggcaacaaaaggttccactggaccgaaaaatgcgagcagttttttcaaaccttaaaaacgcacttggggcaacctccgatcttgtcaaagcctatgaccggtgaagtcttatccatctatttagcagtgtcggaatatgcgattagttcagtactagtacgcgaggatcaaggacggcaatacccggtgtattatgtcagtaagcgattactggatgccgagacgcgctacccccaaatggaaaagttggcgtttgccttgataacatcgtcaaggaaattgcgaccttatttccaggctcacagtatcgaagttttgacaaactaccccttaaggcaagttttggcaaaaccagaaacatcagggaggttattgaaatgggcgatggagttgagtcaattcgacatcaagtataaaccaagaactgcgattaaggggcaagccctagcagattttatccttgaattccccagcaccgaggtagcactcatagaggacaaaagtgacatcgctatagcgaatagagaactgtggacattgtacgtcgacagagcctcaaatagcgagggttctggtagcggagtcttattaatcagttccaacaattttaaggtacatgctgctttacgttttgaattttctgcatc

SEQ ID NO: 259327 - DNA, 807 bp, Cannabis indica
tatatattattaaaatatttttgaaggagaaaaagtgtttctctacatgtaagaaggactattgtattctttatattgttctttaaaatacataattttttcaccttttttttttctttatttaaagaaaagctagttaattaatttaaaaaaaaattgttgagagtgatcctatcactataacaaaaaatagtattagggacgataattgtaggggcgacaaataattgcctctaataacctattattagagacgatattcattagtcgtccctaaattattgttcttaatttttatttcaatttaaaattttaataggggcaatgtttaatattttaggggcgacttatcacccctaataattagacaataaatattttattatctatagttttgttagtttcgtgttagatctacttatatatagctagcttgagacaattgctttcacatattaaaaaacattacataattaaagctacattcttttatatatgatcattaaaagaacataaattataagacatgtagataatcagagtgctatttatacaaaataaacattaatttaattataactcatgttatatatgtggtgtggatatatagcatataatatgtattttactaatatttaaaaaatttcaaataattttatggcataaaaaatatatagctcaaataatcagttgaacatgtacctactgtttaaattttataaatgcattagtagagttatttttgtaattttcaaaaattggtagaattaatatctatactgttattgaaacaaaatttggttatat

SEQ ID NO: 259328 - DNA, 3293 bp, Cannabis indica
ataagcttgagatatattaatgtcaatgaaaatagtgttaaatgataacaattatataaggtgtgtataatgtagagggaaatgataagtaattacgtacagctctattatcagtggcaacgccagatataacgaacatcaaaaggaatgagataataatctcaaaaacaagagcttggacattcgatccaactggtagtgttccaaagtaagcatcctcagttacgtcgaatagaaggtacaacgttccactcgctaggattgatgctattacctgtgccattatgtacagaggaacctgcaatccacataatttaatgtgcatatacaaccaattaattaataccattaatataaacaacctaaaattaaatctttaaattattgaaaacaacactatgaagtaatttgcctcagtgatagggaaacggcgaaaaattgcgaatgtgattgtaactgaaggattgaagtgagcgccagagatgtggccgacggaataaatcatgaccatcacaatcaaaccccaaaccacacaaatccctgggaatgttacagacccatgaatcttgtttaccactactgctccacaccccaaaaatacaacgaagtacgttcctatcacctctgcaatgatctgattatcacaacaaatacattttatatatcagtatacattgaatatatgtataaacatttataatatggaatatagaaatataaattactacacatataacattcttatacgtaccttttgcagttgtttaactacctcgttagaagagcatagatccccagcatttctttcgctttgaatatcagtatcaatatcactaacttcttcaatctttgatagatttcttgatgaagacattattgtctacaaaattattaataacacaaaaattaattcttgatacaaactcaggtagaaaatgtcaaaaaggctactaagcaggttaaccaaataaatgcttaaatatattgtagctatgttctctcgcttcgaataaattattagtggttaagctattttacaggataatagattgaataaataccaactatataggtttattttacatttgttttaatatattcctttattaaattttaaaatatctctaacttctaaaccgttaatcaaggaatcagttaccatttgagttaaaagtactttccaaaatttaaattcgtgagctttgaaataacattttaagttattaaaaagaaaaactaacatttcataattttatcatttctattttcttaatgtaaatagtctttgggaggatatttttttttgataaattactaaatatttattgacaacaaaactcaattataaccaagtgctatgctgtaaaaaaaattaattacaagctcttatcagcatcccacccaatcattatctagctttgtaatttaatatattgtaatcactaaaatcaaagaaaaagaagatccaggaaaaagaatagacatgaacagaggataagaaaaagttgtgaagaacataaatctggaataaaaaaaataaacgaatttcaacaaaaaaggtatgtaatatcaaactttacatcttatacattcataatctaacacattcatatttaatattcaattatcttgatctattaaaaaaataacagatcttctcaacactcatgaaaagctaacattgatcaagctgcaattacaccttacaaacaaaaaacctagtcggataacatttttttccaagaaatctagtcttgaaaaggttgttacttactatattttgaatctttaactttctcaagaaatggatcctatggcaataatactattttacaatgaattttaggaagagaatatcaattacaaaaactatgaagtgacaaacatattatttcaaaggaatttcttttatggaactcttgttcacacaatttgtaaaagtttggaacttgacaagaacaggtatgaacttaatgttcaattccaagtgaaaacaagaataccacctatgaagattaaagatgacaatagttgcaaattctaccaataactaagaataaaaaaaaaatgatgagacaacctatcctttaattgtgaacttcaaagagatatctacatttaccagaattgaacaaggaacaataaattttgacacattctttgaatcttacatagacatcaactatatcctaataattactttggatgaaatttagaactctctaaaaaagaacacaagaatggctggttacatagatggaattgcaaatatagtagatgcaattgaacaatcagatcacacacaattagcaacacaagtaattttgcgtcctcaagtacaacaaattgaagttagacaggtatttaaaaacaaagaaattctaaatactgccatcagcctttactccatcagaaaaaaccaacctttcaaagttaaaagatcatcaaaagtttattacaaactagtatgtttggatgacaattgcaaatggagtttgctagcatcaaaacatgggaaaacataaatgttcagaataagaaacattgaatatacacatactttctcaatagacataacctctggagaccatcctcaagcaacaagcaatctagttgggaaagttagaaaaaataaatacataaatccaaatcgaaattaccctctaaatgaaattgttgatgatatgataaatgactctagtgtctccatttcatatcaaaaatcatggagagttcaagagaaagctaaggagtatattagaggttgtccacaagagtcatatggagacatacctacaattttgtacatgatgcagcaaaaaatccaggtatttgatatttttatgtacatcttaaaacttcaataatagctaaatacaattaagcttcctttgaaatattaagcatacttactcaaataaaatactgaactaaatagtagttgcaaaccttgtattgtcactaataataccaggaactgttagttacaattataagttttattatcactttttgtggtattatatataaaaatatattaattgtataatatttacatcccaggaactgttacaaacttagtgacagatgaacaaggaagattcaagtacttattctttgctataagagcttcaataagtggatgaaatcattgtactccaataattgtaatggatggcatattattgaaaaattcacatagaggaacattagtaattgctaatgcacagaatgcaaataaatatatatttccacttgcatttgtaattgttgactctaaaaatgatgaatct

SEQ ID NO: 259329 - DNA, 596 bp, Cannabis indica
tgtgttttaaatcacgcctttaaatattatttttggagttgtctcgaaagaagcttggttccagtgatctcaatagcgagctggggccattcgtccttccgaggtcgacgatgcatgtttggtgtcaaccacagttctcaaagagtttctcaaggctcatttaaatgttatcttccggctcgtaaggattgtaagcctccctaacgctaactggatgaagctataagaagttaccatagcgagataggcacctcgcttacttggtctcaagccgatctgacttttacacttagtttgtatattgtatgctaaggactttcacgattgatacgtgtcgctttctttggtgccttactattcgcattcagcgacatatggtttcttgttagtatgctaagtaccagtttgtatattgattccttgcctaagaccttcagtcagcaggttacaaatatactctaatacttaagcaattaatgagttatcccataaaaagtgattacgtcgatccgtactccttttatcttgacacgtgtcctctgttgatatggcagccgaatatcgggtataagaaccccctagactaacttggcatg

SEQ ID NO: 259330 - DNA, 867 bp, Cannabis indica
actagccttattgatcatagcgtgatggctgaagaaaggggcttacgccatctatcatgttggttattgagattttaatacgtcttccccccatgcagcattaaatgcgaggttactattcaagagatcgctgcacctcccggaactaccttatcatacctctggcctcccggagagtagaaatacttcttgtgctctcctctgggagacacctccctgagatacttccctttcgcctaggacttagttgattttttatgtgttgatcctcacagatccacgtgtcagccttatccaggtccacgtattttgggagaaaataagggcaatatttaccttcaagcctcgtttagttgaaagaatgaatgaggcttgtttggtgcctccggtcggcttcttggtttaatggcacgtgcttcaagcgcgtgggctgcatttatgatggtcatcattaatattgatttccttttacaggcaacgattcacttcccgtccattgagaaaccgacgcatttaatctgtcagtatagtattcgaacgttttcaaccgcctggtgtccatttgtctctaccgtcagatttgtagaatttgaatcgattacgattcccaccgtacgatggcgtctgatcacagctaccttgcaccttttctggtctataaaagccagccttttttcttcactaggttactttcaccacttcgccatttctccccaagaatacctttgagaaaaaactcaagcaaccatagattcctccgtcattgccaatctacattctaccgtcgatcaacaccggcccccaattcacaacttttatgtaagttttatgagtattttatatgtttgttgttcatttgcatgccag

SEQ ID NO: 259331 - DNA, 839 bp, Cannabis indica
tatgtcgcgtttagcagtatttctcccaatgggtcagtcgcatgtgggacccattggttccctgcctacaagaccaatgggtcagtcgcatgcgagattcattggtcccctgcctacaagaccaatgggtcagtcgcatgcggaacccattggtcctctacctacaacaccaacgggtcaatctcgtgccagagaaatgggtctgccaccgaatcaagcttcagaagcagctcaggtcccgaattttttgtgctcggacgatgaggacgaacaactaggtcctttctactagaccatctattctaaacaattgatagtttcctttaatttccatattttctgcttctacttattttattagcatacaatttacttcaaataataattattattattattatttattattccaatagactaatgacttttctattaaaattactattatttcgtagaaatttatcataatatttctgttaaaatcttaatgtaaactgcttctacattttatatatatttttgttatataattaagaattctaatttttaagtacctaaatatgaaacatatgccttacactagcttttagaaccaaaattagattcttttctccattaaaaaaggcttagaaactgggtgccatttaacagcctcatcaatgagaattaccattctttttttttagtaaattcagtatatcactttctttttttcatttcatagaatcattcaaaggattaatgcccaaatttatggtgtaattaaaattaaaaactttcctatacatgacaattatcctaattaatattattaaattgtgtaattactaatttattat

SEQ ID NO: 259332 - DNA, 697 bp, Cannabis indica
ttctgttcataacagcaaaatccatctaaagagagttgagagagcgaggaagcccgattacccacatcaaccagtttcccttgcagatcaaagcttatgtgggtttgaagctcaagaatcaatggctggaggtatttcgatcctttattcatagtatatatatgtttgtttaatttcgcattttatatacacatacatatatttcagtttatacatataaattgtctaacaacttttatgtattgatggataaaaaaattattgaaacttgtgttcttttcttttttaaaaaggtttgtgatacgtcttttaactttagttatttttattgtgtagtaatatacatttatgggaccttcttcacccttaaatatataaatatatctattattttttacttcttaataattataatcaaatataaaaatatatatggctatacttaattgtaactacttaaaataataaaaaaaaaagttctaaaaatttaatttaatttactataccaaaaatataatttaaacaacatatttcacatgcgtatataaatacatgtattaaaaaaaattaaaatttacaaatattataaaatgaatacaatcatacaaaaaataatattataatattttgagaatcaaaaatatacaatgagatatttactaagtgccataaaatctcccactacaaaaaatcttac

SEQ ID NO: 259333 - DNA, 501 bp, Cannabis indica
ccaatccctactaccttcaccacagtgataatccaggaaatacgctggaggaaaattatgtaacctggagtagggcaatgcaactttcaatctctgttaagaacaagataggattccttgatggttctattcctaaaccatctcctactgattttgttatgtataatgcttgggttagaaataacaatattgtcatttcttggattttaaattctgtttctaatgaaatttcttctagcatactctacgatgacagtgttgctgctatttggatgatcttaaagtgagatttcaccaaagaaacggtcctcacatatacaatctaagaaagggtttgatgaatctcaaacaagaagctcaaaccgtgagcatgtacttcaccaaactgaaaatcgtctgggaagaactctccaattatcgaccttcatgtacttgcaatggttgttcatgtggaggagtcaagaaatttcaagaacaccaccacatggagtatataatgtc

SEQ ID NO: 259334 - DNA, 1928 bp, Cannabis indica
aaaaaataattaacccaaataatcagtaaaaataattaaaaagagttattgacaatttaatcatttatttgtaacttaaaatgtataaaagaaaaatcctaaattcaaatatcccttagtaaaaatctctcaatagatctaactagttttgacacatttatacaagttgtatgtttgtcaatactgttttggcctttgtgaaagaagaaaaaagggttcaactttttaatacaatatgcatttgttggagtagatttcaaggcacaataattatcattccccacctcccttttcccaacaaaaaaaaaaaaaaaaaaaaaaaaaaaaaaaaaaaaacaaaaaaaaaaaaaaaaaatagctaataaacattagtggtgcctaataccacccaaagattatccctagaaaataattagcaatacttcataatagttactaaattaaaacgctaatataataattttatgaaatatcactaaccattctttaagcgctagtgagacaccactactaaaaaaaacagcaaacaaaaagacaacccaaagagttgaaaaacagttttagtttgtgccttttgagattaataatgagcagaacatgacccacacagaaattggtgttttatctttaatgggaccttaaattggaatgaaatgttcttttttttcttcattactggcctagctcttttgtaagctgttgaaatttgcatcatttggtcaccaaattatggaccactgttagggggaactcttcttcttagttcttacttcttactctaccaacttcaatcttttatcactttaaactgtgttgctactactactaggacccattaagtgttagtctccactttgtgaattgaaattattaggaaaataaagaaatgggaggtaaaatatctacttcaaatgatgtattcattcattctttgggagatagatacacaattaaaaagcttactagcttagggcacaatgatgaaatacagtactcatattagtgaaggattttgaattgtcaaattttcatgaaaaaataataataacacttcagactattcattatactaataattgactctacaatctaaattaatagtcaaaatcgggctactatcagtaagagtggatctgataggtaacaggtcctcttcgagacaagataaatcttcaaaatacactctttaagacagtatcaatctcccgattgaaccaaagttctattttttcattccatatccattaataattacacaattacatatttatagattttcacactaattgcaaattactaataagcccctgtataatattttcatagtctaacagtatcatggacattctaaaattctaactttagaatttttccaaagctttgctcagccgtctctaggcgagcctcataaagtaactacatacactatctatcaaacaaaaagctagcttgctcgaaatcaaaatttcattttctttcttcatttaatgttcagaataagattactcttacaataattgagaatcgaaaaaataaagcaattgctaagcaaatcacatgtctgactatttgagctacatattttggttttcctataccagctaacatgcatgtgctaaatcaattgtctgaagaaaaaatagatcaatttcagatgagctatattaaccccttgaaattaacaaatttataaatattgcatgcttgctgggaaaaataatgagatatcttatgttagttgtactcgtacccctaaagacgacgtatctgttgatgcttcatgctcttgtcttgagtctctaatttggcacggcgctctgcatatgaagctggaaccaattcaagaattacaagttggttaaaaatattgaaattgattacagctctgtctatagaaatgtcttacacattgtgggaaatcactaaga

SEQ ID NO: 259335 - DNA, 655 bp, Cannabis indica
agacttaaatttataccaaaatacatgagtaattattatttcttagaccaccactactaatctaactctaggtctaaattgcctatagtaagcatatacaagtaggagaattctaagatcgaggatttatatcatttcgagatagaatattgggaatatagtcatctacgccattaaattttataagagaaattagaatgacatcataagcaaatgatttataaaccattcatccaatgatatattatttaagaaaatttgaaaggaataagctaagaggaaaataaaggacaattttgattaaaataagaattcaacgatgtcccggtaggcgagagtcaaagtcaatcttattttatgaatctcttcattgcttcatattgtaaacactaatctaagttgtcatctttggatgtacaactagatgttacatttacaaatacttatctgttgagatctaacactattatgtttgtctgacagatgacaatcctttggaatttgtcccattaaaacaacaaattaagttagaccaacaatgaagattcaaaattatactacaacattaatacaagaaaataacatggttcaatataaattcagcaagcaacaaagacatgtgaaaatacaaaataagcacatcttaaataatttc

SEQ ID NO: 259336 - DNA, 831 bp, Cannabis indica
accaattagtcaaagcctcattcttcttcatggttgctcctctcaaccattcaatacttcttcttatttttctatcttcattcttaaacttttggattttaatcatggcttgggagcatgagatatcacattaaaagttttgaagatgtatgatgttaaatgttatctagggttcaaacttattatatttttttgttttcagaaaaataagtttcagtaaagttatgatatctctctcaatattagtccattttcagcaatttttatgtcgttgaaaagcttattcgatgatctacaatttttatgaaaaaactattcaccaattcggtgatattctatgtcgaaaattattatctttctaatattgttgtcatttgtttatttcatattctcataaaaagtactttcacttgaatacaataactctctcaattctcatccattttaatgatctatatatgattttaaagcttattcgatttcccataagtctcatgaagaaactttttgttaattcgaagtcatactatgtcaaaaagttagttttcttctttatcatgtgattcgtttcttgaatctttgttcttgcaaaactattttggtaaaattataatatctctctgaatataattccaattttaaagattttagtatcattggaaaggaaatttaattttctaaaactccatattccttctcagaaatagttacggtaaaactatcacgactccctcaattttaatccatttttaatgatctttatatcattggaaagataattgaattttctataatttttatgaagaaaactttcactgaattcatgtagtt

SEQ ID NO: 259337 - DNA, 740 bp, Cannabis indica
tcctattgtgatcaataaattagtaaatgtagagtttcttacctcaaatacatcaagctgcttggatcgatagacataagatgatggtgatcaaagatgagagtgaagagaggtatagatttggctaaggatgtaatggaaagatgacttgaaaattttagggttagtcttgctcatggaagaaaagaacgatataattttagggttgaaggaaacctatactatctgactttattaggtttagttttatgaataattataataataacataataacaataataatatgataaattattaaataaacaaatatctaacttttaaatttaaattgtaagctctcaatctcgtaactttagggcttaattttgacctagaaaaattacgaattatgatatagctatttctacaaaatttatagatctttgaattatctttccaacgccactggaatcacctcaatcggagttataaaactctagatatggtcgttttagtaaaacagtttctaaacttgtgaatttctctaaacttacgaattttctaacattaatgaaataataatattatttaataccacttatacaattaatcaaatctaataaatatattataaaaaccctaatggattttcatatcgggctttattaaacgattatctacttataaaaatatcataatattttattttcatagttaatacaactttaactttctttagaaaattggtacaactactc

SEQ ID NO: 259338 - DNA, 530 bp, Cannabis indica
ttttctttgataatttgtttacattcatccttgtccgcccaagccttttcgtagtggaacttagatccccatctttgtttagtctcctcctcattcgacatggaattaaaggtgaccaatagcggacaatgatcagaacaccatctacttaaatgtttcactttggctactgcatatatcttccaccaattgttatttaccatcacccggtcaagacgttcgaacaccatattcgctgtccttccattgcaccaggtgaaattgctgccttccacttctagttctcgaagagcacacttgtctatggttgtattaaaattcttcattaggtaccctggtttccctcctcctccaagtttctcatgaatgcctctaatttcgttgaaatcacctccacaaagccacagcccaaagttgtttctagcaagtcttttcagaagagtccatgagtgtctcctttgagatggatcaggatccccatagaatcctgtaaaacgccaattaaggtcatcctccgtattgatccaagc

SEQ ID NO: 259339 - DNA, 1453 bp, Cannabis indica
agaatagttatgctagtttcttagaaatttaatctactaaatatatgtatatattatagagaaatagttaggcccgtttcttaagaattttattttagaagaattggaactaaatattaagatatagtgttgcttagacgatcaagtcgtctcaatagaaacagtcaagaaggaggagcttcaacacctacaagaagtttaagaaggagatgaactacgaggctaagttagtcgtggtggaggacaaggataacgagatgcactattatggaagaggcatccatgtaagtacataacaatgcataagctaagttgagaggacgctcgttttcacgagtagtcggtgaaagagaagccaagcttagggaacgactccaacctcaggatgaaaagttgcattgcaataagcggtaaaacacgagaaattcagttcaacagccaacacactgctttgagccaccatatgaaagaaaaaaaaatagaaaccactagcatttgaaggaggctctaatccattggaggggaaggaacgaccaaggattgtagcacccatattgggatatatggaactcaataatagacaattggcaaatgacttgatagagctggaaatgaaggatcatgacgctgcactcgatatggactaaatatctattcatcaattgctaaaagtatttggtcgcttttggcaacaaaggccagagaccagtttactttcacaggagttaagatggccttatgaacttctttaatctcatccttaaagactagctagctaaggaaggtatggtgttaagcattgttggccaatgtagtgcaccaagcagtggagacacaactaacaatgaaaaacatgcacatagtctatgaattccaaaaggtctttctaaaagatataccggggataccctcagacagtgatgtagagtgttatagctccaagagtgcttcaattttgaaggctccatacaaaatggtgatttacgagctgtggaaacccaaagtatagctacaagagctcctagacaaagggatcattagaccaagttactcaccttggggtgctccagtactcttcatcaagatggaagcatgaggatgtgcatagaataccgtgagctcaacaaggtgaccatcaagaataagtaccctttaccaaggattgacgatctctttgatcaattgcaaggctcgactgtgttctcaaagatagatctaagatctgggtatcaccagttgaaggtctgaaaggaagatatacccaagacaacattcagaacacggtatgggcactatgagtttttagtaatgtctttcggactaattaatgccgcagcagcctttatggatatgatgaatagggtgttcaaggagtacctagataagtttgtggtcttattcattgacgacattcttatcgactccaaaatagtggaggaacatgaggaacccc

SEQ ID NO: 259340 - DNA, 529 bp, Cannabis indica
atattgtgcactttacttgataggctacattaggaggtcagcttacagcagactttccagggaagccgggatgggacagtaatgcagccacatttcaaatgataatcgtttcaaataacttgcacggagattatcaactggctaatggctatggacataatgaggctaaacgggttcttaaggtaactccatgtcttcatgttcctcaacttctctttctccttttcattaattatcacaaagtactcttttattttgcacacttttatttttgtcaatagtttggacatctttgaatctgcagaaacatagaaacagttttatcactatagaagacttcaattttttaaatagacatggaattaatactgtgagaataccagtcggatggtggattgcttatgatcctgatcctcctgctccatacattggtggaactttggaagctcttgataatgcattttcatgggcacagtaggatttgtttacaccttatttcagacaactactactttaaatatatatatag

SEQ ID NO: 259341 - DNA, 1531 bp, Cannabis indica
ttatattacactaatcagttcctctatgttcagggctgatagtatgataatgagataataaagtttaccgaaatcagtaaatctttttctcggaaggtggagaaactccgcatattctctgctgccttcagcaattttatgaagctgcaacacaagaggacgccgagtaacaattcctgcacatattttgcatagcataaatcccataatgttcaagaagaacaattttcagtgctcaactgaacacaattgtttcaatgaaaatcctataaattaccagatccacgaggtaaaaagtccttgccaacaacactctccaacactgaagacttcccggaactctgtttaacaacaaagaagcaattgttattggtgagaactgatattgttatcactaaattttgtaaagcaaaaataaatttcggtataactgcctaattcctccattacaaaatcatagtcatcaacaaatttagctaaaaccaaatatcattattagatttctactcagttttgactagtgagtcaaagcatacattaaattttcctaacctggtcaaaatagatcacctcaagcatctcaattagtacactaatcaagtatggaattgtattaaagataaatcaatcaagttaaatcgattaacacaccataaaggagcttctttcaatccaaaaaattgaaacgacctaaatcaattccaccgtaaaaccaagcagaatatctaacaatagataagcaatcaaagagaaagcgatcggtaactgacctgaccaccaacaacagcgatcgcaggcaaggcgtcccatagagtaggcaatgcattagcttccccatggtcaccaagagcagtacaagctctctggattttattcaccaaagagataagattctccatttctcaatcacaaccaagatcaacgccgccgattacaaccttcagactcagatcacccctggatctgcacagattcaccgtgaaacgacgtcgcagaagcagagcaagaaagatccacaggcggtgacgatttcgccgaccagagagtttagagagagaaaaagcttttgtgtttgaaagaaagaaatgagagaaggaaaagcgtgttgtttggatttgaatttatagcgttttttgttttcggaatttaaaaacggtattaaagagaatttgggtaaccagttaccagagcttaatggtaaagtaagtaactaaagagtgttttaaaaaacaaaattttgtaaattgaccctattttcaataataatcctagatctgcgttgccttgtcattatccaacatttaaggccgtgtttggcagttgttttttgtttttttactttggttttaaaagaaaaaaattggttaatgataaatgcacacacaaacttgacacatacaagtaattttaactaataatttttatttaaaataagtctctcttaaaaatgacttattacataagggtgcgtttggaaagctataatgtaattagatttgtgagtaattggaggtaattacacaatttgaca

SEQ ID NO: 259342 - DNA, 619 bp, Cannabis indica
gcataaaacccaacaataacccaataggccttatgctctaattccaccggcagatggcaagcttttccaaacaccaaccgatacggtgacatcctgatcgctgttttaaacgctgttctataagcccatagtgcatcatctagcttttgtgaccagtcttttcttgatctatgcactgttttctacaatatcatctttatttcgcggttagaattttcagcttggccattgctctgtggatggtagggtagagcagttctatggaaaacgccatatctagagaggagtgcttcaaattgtttattgcagaagtgactcctttcatcgcttatgattgctttgggagtattgaaccgtgtaaatatattcttctgaaggaaggtaagaactattttaccgtcattggctggagttgctcctgcttcaacccatttcgagacataggccacagccaataagatgtataaattgctaaaagatgaaggaaaaggacccataaaatctatcccccaaacatcgaacaattccacttccaagattcctgtcaaaggcattttgtttctccttgagatatttcctgttcgctgacaacgatcacatgcctttagaaagccactag

SEQ ID NO: 259343 - DNA, 1287 bp, Cannabis indica
acacactttgcgagatttcctgggttgagaacaacttcttccaattcttcaattggttttaataagtttctttcatcttgaacccgaggatcaagatcctcgtccttcttttcgccttcttctacggggaccgccattaactgatgaccaacttttctatgttgtagctctatgcaatagcaatcgcgagctagcatctaatcgcctcgcaccactcccacactctctggtgtttgaaatttcagagataggttcttgatcgaactaactgtccctagtctgattaatgctagacgacccaacaatatattgtaagccgatggcaggtcgacaactagaaaatcttgcataactgtggcggataggggtgcctcgccttaggttaatgcgagctcaattatgccctgaatgacaatactgttgccaatgaagccgcaaagatttaccatgcaaggcctcactttggccttttcgagccccatcttcttcaacatttccttataaaggatgttcactgagctccatttatctatcaacaccctctttatccttttattggcgagcttaatagtaatcaccaatggatcgacgtgaggatatctcacattcttctcatcttcctccaagaatatgattggaggttcgttagttcttaccttcttggaaggttttggggcagataccgactgctcattctttatttctttcacatatctattttgggcgttgttgctctcccctgcgatatgcagccctcccgaaataaccaggatgtcctctccttcaacaggaagaggttgtaacccctggttgtttgggttgttgggtagactgggttggttgtgtccattgccctgtctcttcacatactggttgaaacggccccgagcgatgagactttctatctcatctttcaactgacggcattcgtcggttgtgtgcccaatgtccttatggtatttacaatacctggtaggatctcttttgtgtctcgcatgcctcatggactcaggcttaccgaaggaaacctttcgctcatccactaggtaaatattttcccaagtttcattaagctcgatataaattgtatacactggcacatacttgtcgtgcttcttctgtttctttctatcctttgactattccttagaattgtcctttctctttgagccagaggcccttgagttatcaactattgttgatgttgggttttatgccctaaataaaactcatttcaatataatcagatttaattattaatatagatcagaaataacatttaatgtt

SEQ ID NO: 259344 - DNA, 774 bp, Cannabis indica
atagcctttttgagtgcattggaaagttaatgaaatagtagaaaagtgttcttgagtctaaatttttcaaattaggattataaatctttactttatctggacaaacccatacaagaagaaaattcaaactagcctttttcccactccacaactcaaaaggagtttggggaatagattacttggaacacaatttaagatatcagtagcaatcatgagtgtttcactccataagaaatgtggtatatttaatctactcatcatgcttctaaccatgtctattagagtttgattttttctttaagcaatgcaatttttctcaagtgaaccaagcatggtgtatagagctactatcctactttcttataaatactcgacaaaatgccccatgtgttatccaaattctgtataacgaccataatattgtcctccacaatccgaatgaacaatcttaatgactcttcataattatttcttgacgtcattttgaaagatttcgagttaatcaagagcataagatttttcttaaattaagtaggtgaagccataatgagaaaaatcgtcaatgaaagtcataaaatatttatttctgcacaacatagtggaataaagtccattaatgtcagcgtagatagtttctaaaaaatattgactatgattgacaatcttcttattttagtcaatttctcatgactccaatcaacacaagtatcccaactagaatcaccaagaggaggaagaattttagcttgatgtaatcgatcaactctttctttg

SEQ ID NO: 259345 - DNA, 457 bp, Cannabis indica
cttttcttcatgggagtactggacatcccagagatgagacgatgatggttacttcaagttaagttcagagatgctaaaaagacaactaccacgtgcaaatgtggaggagcgcaacagaatgtttgaaactcgttggcataggacaaggttgaggggatagtccatgctgtatgcttggtacactaggcaaagtttgccagagtgacatcgtaagccgcaggagacgcttttgttgaaaggaaagcttgttggcaggagtatggaagtagtgcagggatcgtcagattcttgttagtcacgacagaggttgagagttgataaccgagatggttcaaattgggacagacatggaatgcttcagttgctacattgtgtgtcgagagggatgctcatggagaccaagggcgggtagatgccgcaatcgtcagaggatgattttacttggaggcgtttccat

SEQ ID NO: 259346 - DNA, 547 bp, Cannabis indica
tacttcgtcctccaccacaacttggcatccctgaataaatacatggtagatgtcgctacctttgcttcttcagagtctgtctgaacgaccctaaagtactgctccatgtcaaacagaaagttttggagctccttcgcattcctcgcccctccatagcatttaggctcagatgttctcggacggccatactccatacctccgtgcccttcgatatttgcctgctctgccgctatcatggtaagatttagcttagttgacattctcgcctactcttcctaaagagtcgtgatagacgcatgacaattttctattatatcattgagggagtcttataatgcgatctgcccattcccgctacctttgcttcttcaagtaggtctagttctgcaacgaccctaaagtactgctccatgtcaaacagaaagttttggagctccttcgcatccctcgcccctccatagcatttaggctcagatgctctaggacgaccatactccatacctccgtgcccttcgatattcacccgctctgccgctatcatggtaag

SEQ ID NO: 259347 - DNA, 510 bp, Cannabis indica
acattattatttaattttttagcaacaataatttttttattaaaaaaaataatgatagcatcaatgctactgtatagcattcacacatatttcctagaatgatattcttttccctctaatgatataacatctcaatattttaccacttcatctatccacctcagcaagcatcccttaatttttttaccattggagatgctctaacggagcaatttaaattgcaaccttaatccacataacaatctacatagaaattatcggagtaactcaaactgtaaaaataaaaataaaaagttaaaaaatgatacatgaggtttatattattaaaaactaatttagtttatatgtctgatacattagtgattgttctaagactcgtttgattgttattaaaaactagttttgtttcaaaacaaaaactagtttagtttatgtgtttaaaaacagttactctggtaactgaatttcttgtcagtgtagtgcttatttaattgttaaaattactttaat

SEQ ID NO: 259348 - DNA, 785 bp, Cannabis indica
ctctataaatgcttttggtatgcctttgaatactttgatattcatgctatagtgtcacacgaaatcaagagagaaaaaaagagagaaattttgaattccttgtgagagagaagtgcccacacacagcatacagtacctcaatcatagtttggaagactgtgaaggatcacatccaactgaaggacattcgggctcagatcttgattatactccgctacagacaggaatcaagggttagagatctgagtggaaggagacacttaattccgctgccatcactgtaagttattcttaacttttatgtcttttattcatcgttttagaagttcatatttaggttgttaaatcaacatacttgtgagtagatctaagatcctggtaaatatattccaacactagatccctagctctctataccaatcacagaaaacgacatccaaaaccgagtagtcgcacttgataaccaccatataccagggcttaaatttaattcactacctgtacagattttaggtctttcacctacatgtgcacacctgatctacctataatgacacacagagactaggtcgtggaacaataatatgcacaagtcatgatcaacatgacttttattaatataaccaaaagtaggcaaagaataagaataataaaagaatatattctctttttattttctagaaaatctggcagtataacgactgtattttgaataaacccaaaaattataacctacataattatttgtaaaaaaatatatttggcactcagtgccccagaacagt

SEQ ID NO: 259349 - DNA, 1014 bp, Cannabis indica
tgattaatctctgtttcaactcggaagcttgtttcacacttatctatccacaaaaactattgattctttttggtgagttccgtttagggtgttgagatcttacaaaatctcccaacaaaccgacaataataactaaccagacccaggaaacttctaacttctgtaattgtcttcaatctcagccaatccctgatggattcaatcttccctggatccaccttgattccatctttactgacaatgtgtccaagaaaagacacatgagatagccaaaactcgaacttcttgaatttggcatacagtttatgttcttgtagtcactacaaaaccatctgaagatgttgctcatgtgagcgtcatttagagagattttagactgtcaatcatgtgagcgtcttattcttctcctttatgtatatatatagatagattggaccaaaactttataaccaaaatacaagatctctatgtatgctttactatgttgttattttgctacctttctaaactttacgcctcctattatttccaatgaccatttttcaaattgtcttaaactttttccagtgaatttttcaaattgtcttaattagctctttgatgcgactaataaacacctcacattcacatcgaccttgtcttttgtgtgttgcaggttgcagctagagcaattctggaacacattaatcaattgcttcatacaccagttttaaagctactcaatggatcattccattccctaaatatatggctctattaaaccaacagttgtctatgttcctattgaagaaattgtgaaggccaacaattatgaacaataccatggcaacttatgaactctattgatggtttaggatgccatccgttacaaataatagcatggggagaaaagaaaaaaaaaaagagagagagagattaaataaaaaataaataaaaaaaaataaattgtcctcgtttgtagatgataaaaagtagaaggaaagtagcaatttaactagatcatgttaatttact

SEQ ID NO: 259350 - DNA, 651 bp, Cannabis indica
gcgagactcaaaatctcgtgctatagagtgtggaggttcgagtcctcttcaaggcataatattgaatattgaaaatgctaaaaaacgtggaggtttgagtcctttgttgtcccagaaaattatgagacttttcgaaagaaatctaaaaaatgattgaatcattagtctttgttctaatcaagattttaaggaatcaacatcaatattttctgtgctattttgaatcattgcagagtgtgaaataagaaaataaaacattcattcttattcctctgttttggcatttacataatattatagttatctgtttttcagtttaattaatatgtctatttattaccaagaaataaagcataaaatgataaataaataagtaaatgagcaaaaatgcccccctaaattaatatttttcatttatattcttatatatatttttttacttttgtctcaataaattttacatattttttattattagtctacataattttatttttatcccctataaaatttatattttttgttgttgttatcctttctatattttttttattttattcccattaatactatttaattaatttttttttgtctcttgttaatagctggttataataacagtaatccagagagataattttttttaaaaaa

SEQ ID NO: 259351 - DNA, 875 bp, Cannabis indica
aaagagttttatttagggcataaaacccaacacctttcaccctcagactgattgtcagtcagattgaacaattcagatactagaagatttactgcgagcctgtgtcatggactttgagggttcatggaataagtacttgcctttaattgaattctcctacaacaacagctaccaaagtacaatagggatggctccctatgagatgttatatggtagaaaatgtcgttctcctattcattgggacgagacaggagaaaggaagtacctgggtccagagttagtgcagaggaccaatgaagctattgataagatcaaggctcggatgcttgcttctcaaagcaggcagaaaagttatgctgatccgaagcgcagagatgtcacatttcaggcaggggaacatgttttcctgcgggtttcaccaatgaagggtattaggcgcttcgggaagaagggtaagttaagccctaggttcattgggccatttcagatacttgagaaggtcgggcaggtagcgtatcggctagccttaccaccagcattatcagctgttcatgacgtatttcacatttctatgttaaggaaatacgtgtcagacccgactcatgtcttgagttatgaagcccttgaactacaaccagacttatcctatgaagagcaacctgttcagattttggatagaaaagaaaaagttcttcggaacaagactattgcactggttaaggtgctctggaggaacagtaaggtggaagaagccacctgggagttggagtcagatatgaggactcaacatccagagctattcaggttagatttcgaggacgaaatccttttaacggggggataattgtaatgaccgctttagtaatttggattag

SEQ ID NO: 259352 - DNA, 1128 bp, Cannabis indica
taaagatgcaaaaaaaaaataatagcaagaaactagtttggtggagggccaaaacgatccatgtaagccctccattgtgccatctcatcttgaacattttcaaatccttggaccatgtcactcctcatggtgttgatatcattccttaaagtttgaaattgagtgtcaagagatgtgtgaagttgagcaaaagcctcttcaatattgaattgaggcatgggaggcgcttgaggattgacttcttcttcatcttcctcttcttcttcttcttcactagcactaggaattgcttggccccctccttgagcttgggaatcttgcttggtgtaaatccatctttcttcatcggtatcgaatttgtaggacatacccttgatagtgatttcccctaaaatatcggaatccttaaattctagcacttcggtttcatcattggtaggaatgcctagaagaggaaataggtaactaagaagggcaccaaagggtaaggcctttttttgtctaggcttaaacacttcattgatggttcgaattataagatagcctaagtttatactcttactttggacaatgatattgaaaaggagaatttggtcaagagcactaacgctatctttatggcccttcctaggtactatattgttgcaaataaaggagtggatgagttttccttgaagagtaaggttatggcgttttggtttgtcaaggacatcttctcctacacaaactatactagtaaatgaggcatggttatagtaggcatcattcttaagtctaggcctaggatcaagtaaaagaccttcattaggggcatttaggagttcatttaaggaatcaacggtgatagtaaatctaactcctttaagagttcccttaatgcaataaggatcactagcaatttcaatgcaagcaaagaaagccctcactagcctaggatagatataagtgttaattcctatcaaagtttcccaacccatttcttcaaaaagagtgctaaaattaataaagttaagggcatccaaatcacatttcttaccaatgagtatgtccctctttgagaaatcctcttgaaattttcttgcccattttccatgggagaagagttcatgcctagccttgctccttagc

SEQ ID NO: 259353 - DNA, 909 bp, Cannabis indica
ttggataagatatcataaacttttttttttgggggggaaatcagcaagtgttcttcattactccaatgtgttaaacgaagttaaatcttctagtgatactttgctaggccatacactatgtattctatttttacaagtatttttcaattgttgtataagaacattcggggtctcatctctttgctgccaaaacttcatgtttctagccttccaaattaggtacaccaatgcagcaagggcagctgccataaccctcttttggaagctagaaaccttcctccgctcaatgcttctcaccagactagtcaatcgggttgctggagtcttccatcccagccatgttttcacttgttgtagacaatcaatagcaaatgggcattcaaagaataagtggtcacaagtttcagctcctttatcacataatagacattgcacatctgctgccactttaaaccgaaatagtctctctttggtcttcagcctattttgaattgctaaccaaattacaaagctatgttttggagtattaagtctaccccaaaagatatcaccgttatatctttctaagtcaatatgactagttgatcttaggtctatagatcttaatcttgatatggttaggttcaatcttagttgtattatttatgttcttcaatttgttcgttaaagtcgaccaattagatcttctcgtgacatacagattaaggacatggtagttcaattgagtgggaatgttaatcatagatatagaatctatagcttatataagtatttagaagtgaaacgataatttttattgagcttggcttgatagagataaatgattgatgtctcatttcagtaattatattagtttactgaaatatcattataagtagctaagtgctttaagaataaaatacattgaag

SEQ ID NO: 259354 - DNA, 1192 bp, Cannabis indica
aaaaaataagatgaatttagttaagccccaaaataactcctaaattaataatacccaacttgattaaaaccccttgatttattcaaaaaaaaaaaccccttgattaataagaaacgtgatacttattttccactaccattcacatttgttttagttcaaactccaatggatccaaatgttcatatatatagatatgtatatatattcacctctactgtttatatattccacattaatctctatacgaattaaacaattgaaattgatgtaacaaaagaataaaataaattaacttacttaaactcttttgctctttctagaaagtaatcccaagaaatatcgccatcacgcaattctgcaccaatattagagccactacaaggaataacaatggccatgggagacttggcttccacaactctactgcacaatttaacttattttgtgagatggatgaatgaataataataataataataattttattattatttgtcaggaatgataaatttttgaatgtgtactaattaatgatatttaaatgtcattttttaattaactaattgataaatgtaattaaaaatttaaaatcggataaagagaatgtgacctgtataagggaatacgcttcttcccacgaataatatgatcctgaaaacgaaggaaattaattaagtaaaaaaaaaaaaactaaaataggatatatatatatatgtatatatattactttcttactaaataatataaagagaaatgacattatatattgttacatgttatattgtagaaattgatatcacaacaacattactagctatcttggcaaagggaaaaagcaaattaaaactaaattactagctattggcataaaattaggagaagtatactttatcgtcagtggccgagagagaatttgcaaagtggcggggcaaattgtgaagacaaagatttggggtacttattataaataattattatataatttaattttcttacatatttaatatatagatgaatttttacttttttgggtaggactatagcccccactcaataagtgcctccgtcaatgtatatcgtactagtttaatatcagtattcagtaatgtatataatattattttttaatttttatttttgattgtatatattttttaacgttataattgtttttttttattgttattcataa

SEQ ID NO: 259355 - DNA, 718 bp, Cannabis indica
attggtcagtctaacaaagcccgcttaaagcacgatttgggcccggacctagcacgcttttttcgtgcccatgggtcgggctgggcttgacctatggaaatatgggccagcacggcacggcccataattttatacgggccagcacggcacggcccataattttatacgggccagcacggcacgacccatattttttgggctttttcaaaacgggtcgggctgggtcgtgccagcacgaatttacagctctacgagtgacaagtatagaataggttggatagatgcaagacattcgtgaagactattcggaggatgttgggcggaatataggccggacaaagtcgtccagcatcaaacgtgctggacagaatgtgttgactagcattccgagtaaccaaaaagacgccccacagacaaagcatctgactagcgaattcacggagctaagtgtccagatttgtctcaataacctcatcccttacgaataagtcaatcgagttgcctagaagtgtgggattacgaggatcggggttgagaggatttcgtggattgactcaatcaaatattaaatattttattctataattaaatgtaaagatgctacattctttttcctataaatagtagatcaaattttctcttatggaataagaaaaaaaaggggtatcagaattaattgtaaaaaaaagagtgggtgaattgattggagaagcttatg

SEQ ID NO: 259356 - DNA, 962 bp, Cannabis indica
gtaaatgtgattatattgaaatgagttttatttagggcataaaacccaacaacaaagtctctcaattaacaaataaatcccaaaacctctttttctcacaattaagtccttgcttagtgaaaattcatgaataagacatagtttaattttagaattataattgattaattaaaactaattaactaagtctacaagcagtattatctcaactagtgtggggaccatgagcctatataatcaagctttcaataagtagatctagaatttaccgagtgaattctttaacttataaattcctcctgactccactatagattcggaattgcactcttaattatatagaacgctctatatgttccaagatttagatatgctattaattatccattgttataatccaaataatgaaagatcctccatagatgatttacatcgagtatggacaaatttaccgttctacccctcaatatactttatccttaaaacacttagctttctataaatgatatttcaataaactaatataattacttaaatgagagctcttccatttatctctattaagccaagctcaaagaaaatcatcatttcacttttatgtctagatagaagagattccgtatctgtgattaacactcccactcaattgtactaccatgtttctaaaatgtaagtattgagccgatctaattggttagctttaacgaacaagtctaagaacatagataacacaattgagattgaacctaaccatctgaggattaagatcttttgatctaagatcaactaagtgatattgacttagaaagatacaacaataagtttatgatatctttatcaagttcaatattggtccagtccgatgtatactccatacatccaatactagcatactttaccaatgccctagaaaggacataacacttatccaaggtgtaagtaaactttatcactgattatca

SEQ ID NO: 259357 - DNA, 753 bp, Cannabis indica
acaacaaaagtgtctttcaaatccaaataaaaaccagttcctaataacaatctgaaatgcccaattgcttccacttccaccgattgaccatcgcccacaaagatgtatctttcaccatcacttggctttcggtagctcaggcaaccctgcatagaaacacttatgtgagtagtagcaccagaatctatccaccaagtgtttctaggtactgaaactaaattaacctcagaacagaccaaagcaagattaatacctttctttacacgccatgcgtgatatttggcacaatctttcttcacatgtccaggttggttacaaaagaaacaacccttagaatcctgttgtttcttttgaactggacccttagcagcttcattctcaaatttccttttcttgcccttatccttaggggtagtggccaaatgagcactttcggttttgtcctttttcaacctttcttcctcttgcacacaatgagaaataagctcgttgagagtccatttctccttttacagttgtaactaattttaaattggttaaactgtggaggaagcgttaacaaaaccatgagtacaagtacatcatctgaaagctcaatcttaagtgtccttaatcttgagacaatatgatgcatttccataatgtactcccttacatttccttgacccttatacttcatgttcattaaagaaccaagaagtgttgtcatttcaaccttatcgtttttagcaaaacgttcctcaatttgttcaa

SEQ ID NO: 259358 - DNA, 1171 bp, Cannabis indica
tttgagaaaatgagatgcagaattgataaactagcaaaatttgcaaaagtgaggcccaatgtaaagaccacatatgattaatgctttgaattattaaataattaggaattatgtatgagattaatttataattatgaaatgtatattttggaaatatatttattattatatatgttattatgctattttatgtaaattacccaatttctgtgattgtgtgcggaagctgtggaaagcgacgttgggcctttagagagtcgtattttatatgatatagaatagtatcggagtatcattgttaggttttagtggtgttggaattttcggggtttggaaaatgactagttcacccttggtagttagtagctattttaatttagttaggggtaaataggtcttttccttgattttttatttggattttagtggctttggggggctggatatatctttaagtaagataatatgttttaattttaaataatataagagtaaagtaaaaacaagaaaaaggaaattagagaaagaaaaacctagaaatttctaagtcttcttccctctctttcgaacaccaaggaaccagctgagaacctaatttttgcaaagcaattcagtgtgattttagttgaattgtgaagcttcaactcaaggtatattgccctagctttattttcctttgttttctttagttttgttattagttttgatgcaagagttgagtttttggtactgtggtgataaggtttgtttatttgtgaatttttaagttagtctaggtttctaaagattgttctaagctttaatggtaagtattgtatggtttgttcaagattagaggtacgaattctcatctttagtctccaatggtgtttttaagtttggagttgattatggtgttttattgcatgatttgaatttattaaggtataggcaggtgttctggaaagttttggagagtttgggcttggtttgaattgaaggggatcaaatttttgttctcagctcagaaccggtcgaccggttctgagaagccccgtgcaaccggtcgacaggttggtacccaggaactgggattccggttgggaaccggtctgccggttagggctttttcccaagccttagtttttcccgtttttgcgtaatttagggtattggcatcctatttatcgat

SEQ ID NO: 259359 - DNA, 544 bp, Cannabis indica
tcccaagtatccttcacaatctgtaggcaaccaggttcccgaagccatagattttcgaacctaaattgctttttaaaaactgccttagtctcgttatttagcatcagctgcaatgggcagtgatccgaagtcgtgacctccaggtttaacaatttggcaagtggaaacatatctaaccaactttgggacactaaagccctatcaatacgaacttctatccacgaattggtaccccttcccctctcccaagtaaaaggatagccacataaatccatatcaaacaacctacaatcatccaacatactcccaaaaccatcaataagccaattgggataaggattacctcctcttttatccgattgcgaagaaacattgttcaaatcaccaatgatacaccaaggccaagtatacttcgttttaaggctccgaatttgctcccaagtattcttacggagactcctattaggctcaccataaagaccagttagacgccattgaataccttcattacccgtaaccaagacatctataaagttctcaccat

SEQ ID NO: 259360 - DNA, 684 bp, Cannabis indica
ccaagctcaagaccaatgtatccacctccaacaataacagcggtaccattcttttttgctttaattgcttctacaagcgtatcagcatcatcgatttctctcaagtagaaaatgtttttggcatcagctccttgaactttaaaatctgtcaatttaataacctacagaaataataaaagatcttaaatatcattgaaaacaaattttgaggatgatcaaaaaagaatttggataatacttacagtagaaccagttgcaataacaagaatctgatacttgaacgtttccccagctgcgcttacaagagttttcccagcaagatctgctttgactatttcggtgctaaggatcaattcgatacctgtaaatatagttggattttcatgagtaaagaatgctttcaacattatcagaacaaaaaagtgattgtacaattattaagaaggataaatgacctttctccttgtaccattcaggaagcaatctttctcctccacttccaacacacacatggaaacccggtagtcttgcaggagctgcaaaaattgaatcaaagctttagacacaatatcagagaaaaaagacaataaacaaaattattggtggaatacacaaattaattggacgatgcaaataacaaaacttacagtcagggaacaaataagccttgctaagagcaggacg

SEQ ID NO: 259361 - DNA, 1085 bp, Cannabis indica
ctaatgagaagcatttaactctaaaaataattcacctctactctagatgatatcttcttcacaaagtcaggtccttgtgcccaacttgtgtactctggatccatgtactgtcgtacgagcaatcctaactccctcaaaaaatttgaactgtacaaacctacctccttgtatatttttcctttgatgtcccactcgataggtagtggaaatttgagtttttctcacttttcttgtgtgcttaatcccttatggtgtccacgtttctttggatgagctgttatatattcatataaatattaataacataagttaaatatttaaaattatataaggtgaaagactccctcaaatattatcaatatgttgtcaattacaagtaaaaaggtcaaagactcctttatatattgtcaatatattgtcaattacaagtactcatactccacaaaataaataattcattaaatatccactcaaatacctattccttctaattacatgaaatagtatcacaaatacttaactaataaactccaagggtcaacaaaactagcaataattacaagctgcatccaatggaaaaatccaagtgttcaagaatattaaccaactaaaccttgaccccagagaagaatactattgtccatgtcaatatcattgcttccaaaatcactcacaatacatgctctatggtattaacttttactatatatatttttatggtattaactttcattttattatggccaaaggctattttaatatatcgcacattatatagccaattaaaataaaaaatattggaaactcatgttctttaccaacatatactatcgtgttaggcatcagaaaatcactccaaaaacaaaaaaaaaggcgccaaagaaaaaattgaatccatatttttttaaaactaatacagtcattctactccacaatatggcacgatcaatgaatgtaatatatcaactgaatttcaaattaatgcaagtttattcacaaaagacccatttcaacaagaaattaagagaaaaaaatgaaattagttgaagagataataatttattggatcttaataacagagaaaa

SEQ ID NO: 259362 - DNA, 553 bp, Cannabis indica
aattaaaaagtgttaccaaacgccaccataatatttaatatatcaacaataattgatgagattcatgtatttaactaaaaaaatataatttaattaataataatctaattaattaaataaccaaatacggttataaatttaaaattatattctttgctttaatataccaattaatcaaaaaaatttgaactcctcgcaccaaattattttaatgcttcataattggctgtctatgggtcatttaatatttaattgaagattttgttaagatttctatcttaatgattgtaaacggcttggttaacttatttctattgattctactcaatgaataatgtgtacatgtaatcaaagactaaatctcatttacctattaatagaaattttatttacctttaaacagttggaagcaacatttttgccatttttaaaataaccatagataattatatagtaccatcaataacatctttatcaatgaagagtaatcaaaaaaatttacaacttgtagaaactgacaaaaaaagagaattttattttcacctcataaaat

SEQ ID NO: 259363 - DNA, 464 bp, Cannabis indica
tcgttttagaaattcatatttaggatgttaaaaacatacttgttcgtaaatctagatcctagtaaaagatattccaacaactggcctcagagccatggtaattgatttactttcaagaaatatagatgtaaaacgatgtatgtgtgatttgaatgtgattcatgttgatctatatgttgatgattgattgatgcttgcgaaatttttttgtaaaataattggattttcgttctggaattatttttattggatagtatgggaaaaattaagcaattcacttttttatagaagttaattttgattttatttgaataagtttagaatttttaaaaatcggaaaataatgaggaggtgtgacacctccatgcgcgcgcggatgcacgtgacacacaggtgtcacccgtgttcagacaggggctgtttgaaggatctcgcccttgtgctgtctgaagcctccctacgcg

SEQ ID NO: 259364 - DNA, 834 bp, Cannabis indica
atgaggttggattcaatcccatagtaagcgaatctctcagctacctccacacctgaagaagcaaaattttaaaactctcatttttcaaaatttaagcaaaatctcgaatttgaatgggtaataatagtgatggaattttaggtctatactacctatgataaaaccggccgacctccaaccgcctgaagtaaatctgagaacgggagtgcctttgtggtcaacgacgccgtctacagtgtcgtttagcagaggggttctttcgtcggcggtggaggagctagttgagagatccatcgtctttggtaggaacagtccaactcacactcgtgacaagtgcagcacttagctaaaatgaaacaagtaacccaacctccaagtccaacaccgtctcccttcacctttttacactacaaagttgttcttttttgataattaaggaaatttattaagaactaaaccaaatagtggccacagagggggccatttcccaactgccaccagacttgatcttaaagcaactccaatagtaaaagttatatttggtgttaaatcaacactaaaagtttactattttaacattttttttttttatatctcaatcaccttatctggaaccttgaccagctcgagatcttctagttgtgattttttgattctttctaacagatcagattaaagtgtcaagttatgcaactttccaaccacaaactcaatccttgcactaaccatctcggaagctagttgaggggctattataacagtagtggaaatctactcggggacctcttttactcaaagcatcagccacaacattggctttcccgggatgataga

SEQ ID NO: 259365 - DNA, 512 bp, Cannabis indica
aaaaaagatggcagaaaaaacttttccaggttgcacaatgttttgactacctgttcatgtaatccatctaacttatccaattctaattccttcccgcaaaacttacaaaagaaaatgcaaacatgtgtcaaacaccctcgaacattttttggcaagactgatctaaaaacaattggaagcagatgttgcattaacgcatgacaatcatgtgatttcagacccattagtttcaattcagtcttattcaccaagtttttgatgttagatgagtaaccatcgggtactttcatatttgcaagtgattcccaaactgtttgttttttttggacaaagtgaaacaagcaggaggcaaatataatcgttcacctttcttctcaggtgccagagattgtcgtatacccatttcaacgagatctaaacgactatttagaccgtccttagttttgccgggaatatcaagtaaggtaccaataatactctcacacacattttttttcaatatgcatgacatc

SEQ ID NO: 259366 - DNA, 2399 bp, Cannabis indica
taaaaataagattttttgtagtatttagttataagtaatcagtgacttgattcagcataccaacatggatagttcatattggctactttcttttgttttgttatgttagttgggattagtcttgtctagccatgactaatcttgtaacataggttagtcaattcattacaattagagagaaaaacccttgtgagaaaagtcttgatcatagaagaacttgtatcttgaatattggtattcttgttgaacttgatcaatcactttcattgtaattcttgttggtgaataataaagatgactagatgttgtactgcgagatctaactgcattgtactaagttcaaactcgttaaattcttgtgtcttaaacttgttaaatcttgaaatttgttggtgtgtgtttacataaagagttttatgtactaaaagaaaatagtatcaaaatattaggcaaaaatttctattttgaaaagtaacctatgtccactaattatttttattgaacttttatttattttattttattcttaagtcataattttagtttttacatacatcgtcattaaaagtttggtgacaataatatatgacatgaaagtataagtgtcaaatgcattcttggaaccactttcgatgttttcgacaataataagcgatgatcttaaggttgatcgagctcgatcgtagtttgattgagagcttctcgaacactttcataatccgaacatgcatatccactagtcaagagattaatttgccacaaactcgaccacatccttatccttatgtgatcgagttgtggtaaagggtttaaccttaccactcatgtaagttagtcccttctaaccctagtaattaaaaactaactaggctacaacaaataataatacaaataatgacatatatagcttttagatgtaaaaatcttgcaactacataattactcaattgcaaatttgccattataagaccaacacaatttgcttgatttttctttttcttcttataaaaataaataaataaattcatttagtttatttattattccatggaagtcttgtcaacttgtccctgatttcaatactgcacccacatgatttcttttatttattatggattaacaaagaccgtataatatatatatatatatatatatatttgtatattttattttacaacattataaaaactttaaaattagagatgataattaattataacatacacaattaaattaaaaaattaaataaatattttttaagagtatactataagcttacttagtaataagtacatatcatatatttccaaaatttctaatttatcatcaagttatatgtttattatgtaaaaattggtacttttttcttaacatatacaattgaactaaaaaactctatataccaaaatactaatttatagagatatactattgacttaccctataactaataagtacgtaccccattttcagaatttgtgtttatcatcaacttatgtttattattatgtaacaattggtactttttctttgttcctttgctgagctcaattggctttgacagaatacacaaagttacaatccaatttataggtcaaagagtagtgttcaatatacacatagatatatatatatatttgacttatatagaaaagaaatatatagatatatatacattctttactacattgagtgacccctgcaggcctttaggagaccatacatatcacccacttatataatataggtatatatatatatatcctatcaaaacccactttgatataatcttacacctttgacctccaccaattagggcaaccatatcatcatgacatggccagaattcctttctcttttagtgggtatcatcagattattgtgctctcttttcatcaccatccctatttgggacccaacatttttgtttttaatattaattattatgggttgtcttcctacactcttcacaaatatatttacttttattaattataaataaaattattttatatattattttctaactttttttattattgatattacaatttaaattattttaatagctatttccgtaatttttatgtgaattgttgtctaaatttaaattacaatttaagttatttcgttaattttttttataaattactatgtaaatttttgtaaaaataaaaaatactttaaaataaaaaaaaaaaaaactttaaagaatttttttattcattcatttaacaactttgaaattaattaacacaatttaatgtgtaaaatttcatcatccttaaggatataattagtaaattggtttatttttagtagggtacaaggtcccattaactattttttatttttttattcttttcccaaataataaataataaaaaaaaaagaattcc

SEQ ID NO: 259367 - DNA, 667 bp, Cannabis indica
tttaatacatattaaagttcagatgatacaaatcctaattaaatattcatttgtacagaaagaataacataatacaatgatgcagtttggggatttaaacgttaaataccattttggaccctgtgttttacaaaagttaccaattagacactctgttttgttaaatgacaaaatggaccctgtattttctaaaatgatacaaataggatcttgaactaattttttgtcaaaataaaatttaataataatccgatctaaatatgttatgataaaattgtttacattttttatatctgttcgtattatgaattgtcttcaagttggttatattgaagaaaaaaaaagttgtcaaaaattaagctcagagtcctatttttactattttagaaaatacatggttcattttgttatttaacaaaatagagggtccaatctgtaacttttacaaaatacaaggtccaaaatagtatttaccctattaaaaaagttgaggactttaactgcaacattatgggggggaataaattgctctcttttccaaaaggataaataccattttggaccctctgttttacaaaagttactaattggaacctgtgttttgttaaatgacaaaatagaccctgtattttctaaaatagtatatataggaccctgaattgatttt

SEQ ID NO: 259368 - DNA, 563 bp, Cannabis indica
cctctgcagacctttcccttttgagaaatcggagcggacctttcgcggatcctgcacctttttctttttcctattagtggaggtagggtttttctgctggttcccttcagagggataccttatagggctaggttccctagatttctgcttttgggcacttggggaggactttcctggtgtttctccaagtccaacagggatggctttatgatgcacgtggattcctgctgcctccatggccagcatcacctcttgcatctttttgttttgttctttttgggccgtgatttcaagttcgtgatcagcagccttttgtctcaagagtactagctctgtatagctgccttcgtcgtaggcgtcgtattcatcgaaatttcctttgtattcgtcgacgtgggttccttctccttcctcagagcccacgtccactcttgaggccacatcctcatcgtctgggtcttgagcatcttgaggaggatggggttgacgtgtgttgcgagtctccaccattggtgttttgtaatattactgcctacttgcaaatgcttccttcagctctcaat

SEQ ID NO: 259369 - DNA, 787 bp, Cannabis indica
gtgtagccctgagcaagtcgagccttgttcgaacaacagtaccaaattcatcagtcttgttcttgaatagccatttagttccaataacgttaacaccatctggcctgggaaccatgatccaaactctgtttcttttgaactgtcccatttcatcttgcattgcattattccagaactcatcgagaagagcctcggtcacattttttggttccacaatggacacataacatgcaaaggcaatagcattcaggattttcctcctagtaaccatagtagcgttaggatcgccaatgacaatggtgggtggatgtgccttctgtatccaggatggaggaccctttttgtataacctcgaatgagttgagctagtcggggtgctacttgtaacttcagcatcggtggatacttcaggagagattccagatgtatcagatgcgtccgatggggcttcggatgctgagggagttgagttgtcagatgcattagctggaagattgattgggacaaacatggggagggagggatcgagaagttccgcctcagtaggggcaccctctgaggcttccaggtcatcaaaacgaacgttgatagattccataactgtcccacttcttttgttgaatacccgataggctcgactgtttgatgagtatccaaggagtatcccttcatcactccgattgtcaaattttcctaggtgatctcggtcattcaagacataacaggtgcatccaaatgtacgcagatggcttagtcttggagtttttcccttccatagttcatatgc

SEQ ID NO: 259370 - DNA, 1052 bp, Cannabis indica
tgcattttatgtcatatagtgattttcataagtttgcatttccggtgcccggtaacatggaactcggtgtttggctcagtacaatcacaacttagtatgttagtattttgggacgattaattagacattgggaatgtcgggattggccgggaatttagaatttcccaaaatacccccctttagtgctctttatgctattttagtgtgaaggggcaaaatggtcattttgccccatttatgttttgtcctttagtggacttagaaattggaaatttaaatgttatttgatttattttttggctgaaataaaagttttattttgcatgttctctcatttttttcattcaaagtaaaaaagttagaaaaattagaatttcaaagtctttctctctctctctcttttcggccaagcttgggagctgctagggctgggtttctttgtttgattcatgtgattttcagcaagttcatagtaattctagtagaggtaatccttgttctagcttcttttcttttagtttcttgatttttgatgaaaagatgatgtttgcatgcttagtttgagttgttcttgctgctgtgttttgatgttgatttcagaggtttatttataatttaaaatgttgattcaagcatgatagggctggtgattacttgattttattgagatatgaaattttggctcaaaactatggttttcaaagagaattgttgaaatctgttgctgttgttttgttgatgtttgttgtagttttcagaggttataatatgcatgtttaagtaggtttgaactgatttggatgcatgttagttagatttaaccaagtttgagttttgaactcaaagcttggagctttaatggcattttttatatctgtgtgttctggactgttttgttgctttagttgtgttctaaggggtatttagaacaggtctggaagttttggtgtggtttggaattgatttgagcaaagtatgaatttttgaaagtttcctacgaggaaccggaattccggttgtgcatccggaattccggatggggttctgaaatt

SEQ ID NO: 259371 - DNA, 503 bp, Cannabis indica
agggaccaaacggaacttccaagaggccgaaactaggtgctgggcccagtgttacgtgtcaacttggacggtgggtcccagtttctcaaaaaagtgttatgagcattttttcggtcataaaaaataatgaagatataagcaaactcggtaagaaaaccacaaactcgaggacctgaaactgagcccagcgcccaggttgacaatcaacctggtgcgctggtttcgatcattcaaatgccaattttgttctggacattctctctataatggtcaaaagtagagtagaagacatcgtcctcaagttctggtattgggcccatcacccaagttgacaatcaatcttggaagtatcaaaacgacatcctagaagctccaaaataagcacccaacgctaagggtgttcatggtgtgggtggtgcgggttgtagcctttttttcaaatcaaactgcatatacaatttttgtaatttttcaaacccctaaataaatgttaaggaattgaa

SEQ ID NO: 259372 - DNA, 709 bp, Cannabis indica
ctagcgagaaaggagtgtgtccaatggctgttttcacggtagttctatgggcccagagtacctgaggtagctcgtcaacccatctgtctttgtcagtgtctagcttcttcttgatagtatcctttatggttttattgagggcttccacttgtccatttgcttgaggtctggatactgacgagaatcttttgataattttattcctctcgcagaattcagtgaacaagtcaccatcaaattgggttccattatcagatactatcttcatgggaattccaaagatacagataatgttcttgatgacaaagtcaaggactttcttataggttatggagacaaggggctcggcctccgtccatttagttaagaagtcgactactactactgcatacttagctcctcctcacccagtgggtaatgccccagttaggtcgatcccccatataggaaatgggtagggcgaggtcatcattctaagttttgttggtcgtacgtgaggtacatatgaaaacctctgacatttatcacatttcttgacaaactcgtgtgtgtccttattgatcgttggccagtaatatccttgtctaatgatctttttagacaggctttgccagcccgcatgatccccacagaagccttcatgaatttctctgatgatttcatttgcttttgcaggaagaacatacgcattgaataccctcttctatat

SEQ ID NO: 259373 - DNA, 403 bp, Cannabis indica
acgcgagcagtggtgtttgtgagatgctgacttaggagtgagatcaattgctgacattgggcagtgagatcagttgggttggcaggggtatcaacatggttggaagaagaggcttggtgagctttagctttgcctttgtcctgcttctttttatctccatatccgggtgggaagccatgaatcaagaagcatttatcaaccaaatgctcaggttttccacagtttgaacaagaagggcgaggcttcttggttcgagggggattggtagatgggggtttgacagaggaagcaagagtgggattgtcatgtgagccaagagaacgctgtctctcttcttgtatttgttggaaattattttaccaggatcttagatctactcaaaagtatgttgattaacacccta

SEQ ID NO: 259374 - DNA, 910 bp, Cannabis indica
gaaagatatatatatatatatatatatatatggctgcatcgttggatttcgaaccttaacaagacggcgggtaaccaaagccagtaacacctcaacaatggtgtacgacaacccaactgcaaaaccttctgattgtcttcctcttcttcttctctttttcctcatcttctttagttgtaagactccagtaattccaactgatccctccaccgcccttggattctccacgtcaacaggcaatggagatgtcgatggctctaatttcggaaatctgacactggtttggtctttggaatcgttttgggttcaacatccccttttgttttatttttttaatattttttaaatatatatataaaggagaagtatgatacggtgatgtggcgctctaaaattgtttcaaatacctatatctattttctccttaattctctcatttaattaatttttttattaagtttatattatatttattctaattaaattagataacacgttgcttttcatttttcaaagattcttatatattttttaaaaattaaatcttttttattataaaatatttactttttctgttttgaaatgattatataataattacttagtctaatctctcaatttttatgtattctctttttatctatgttaagatctaatatttaatatagtatatctattttataacatgttgcttttcattttttcaaaagattcttacatatttttttaaaaaaattacatctttttttatcatatagattaattttttttttgaaaagattatataataattacttagtctaataattaattggcgctttttcatttttacacttcaaaatagatttttttttttttttttttgtcatttttttacgaaattctacacagaaactcctactgcaactag

SEQ ID NO: 259375 - DNA, 1140 bp, Cannabis indica
ttaagttaaaaattaattttagaccatcttaaattagaatatttttcttataacttaaattagagttaataattaagttgaatttattcaagatacttaattatttatttctattttaaagaaatttaattacttagaaaatatattttagttgaaattaatttcttaattaattttagaccaacttaaattagaatatttttcttagatattaaattaaaattaataattaagttgattttattcaacatacttaattatttttttctattttaataaatttaattaaatagaaaattatatttaagttagattttttttttaatttcagatcaacttaaattagaataattatcagagtttgtattttattttaataattattattttaatacaatttttgaaatatatttctttaaatgtagatgttatactcgaaattcggctggaggacacgtatcaagataaagggaatgtgaatcggtgcaatatctttttatggaataactcattaattacgtaagtatcagagtatatttgtaacccgctaactgtagggtcttaggcaaggaatcaatgtacaaactgacacttagtgtattagcgagaaaccatatgtcgctaaaggtgaatagcgaggcaccgaagaaaaataacacataccttagcttgcaataagcaaactaagtgtaacagtcggattggctcgaagaacaagtatgcgagatgaccatctcgctatgagaagacttcctataacttcatccaactaacaagagcgagactcataaccttggcaagtcaaaagatttctttatacccgtgatcgacgtaagacatacattgttgacctcggaaagaagaacggtcctagctcactattgggatcactataatcaagtttccgtcgagacatctctagattcaataattaaagacgtgtttaatacacgatatttttgacccagtaaaagcggtaaaatcacagctatacgattttcaaaatcatacattgcatttacatttcgtgatatgtaataagaacccacgattttagggataatggctgtaaacatattctggtcaactttgtaattaactgcccaccatgtacttataaatagtggcaaacaatctcaa

SEQ ID NO: 259376 - DNA, 464 bp, Cannabis indica
cactgggaaactcccagccattttttttagatattcttctggtcgcacacttgcgattttatgccttagtgggctgattgggttttttacgagaatccaaattagccctccaagaaaatcttgaattttctttcttatgagggtgaggtcacttgtattatctttgcacattcaccacactaaaaagatcttctatctttcagatgagagatttgtcggatagccaaatgcttggctttggaggcaatgctttcgatggcgactaggaccgggaggatagcttcatcccaaccttgatctcagaagaggagaccccaattgctggagatgcggagctgggcccgttgtcctccgtagatatcgaaaggatggttcaggaggtcgctgaaccaggaaccatcaagattcgtgatagcgagtctacggtgtcagctcgtgaacacgttgtgttggaaattatttta

SEQ ID NO: 259377 - DNA, 1013 bp, Cannabis indica
tgtgtatgccacacccacgtaagttgatccctgagttgagggatagagctggtgactcacgatgtgttaagctgaattcgctaagtgttgctcattctgcacggctcgttgagtattccattttggatatggcagcgaggcatcctgctcggcatatggatccgaacagatgctccaggtagagtccacatgtcaccattctcgtgatgccacgtcagagtgccaaatttgggataacaaacttacattcgagaaatggtaagaatgtgaaaatggtttcagaatccacacaaaacaatgccggccatccaaaaaattattccaatttggataagatttagtcgattttgactgaaatttttttatatcaattattataataaattaattttatttttgaaaaatattattactatttattaaaaataagtaaatcttatcttaatgtaagaattgcaactacaaaagtagaaacaacaaaacctatgagataacttgagcctaggaatccgaatttgtcaaattaaaatcacctctacaaatacattataatattcttaataatgatacaaatacattataataatcttaataataatgataatattatttaaaataaaaactatatgaatagtatacaatataattgaaacttactaaattcctcttccattaatagtaccatagctagcaataccattaattccattacttgcaatgattgcttattgatccacataaactaaaaaaaattataatacacaaaatagcatgtaaattgcaaaaacaaaataaaaaattattagtataaaaagaaaaatatatatataaataaaattataatgaaaatataatttttactttatcaaatattacctaatattaataaaaaaactttatagatataatataattacttaatacaaaaaaacaaacattcatattatatagcagttgttttttttaaaaaaaaaaaaaattatgaaatccgtggatttaaaactaaaacaaga

SEQ ID NO: 259378 - DNA, 1096 bp, Cannabis indica
ggggcactctaggtaggtatatcaggtctcagaactaccttgacgactatctcgactctggttccccgggaacctcttgttctgacctgagccaccagttgcagtggatgctttccttttctggtccattgccgaaccactacctcccctgctatagcctgatgcaggaggcgtaggagccccgccaaccactggagtcctagctgactcagccatacacccaactgcgccctcacctcgcagtgctttttccaccatttcggcataggtggtcttgtcgtcactagtaatcattaggtcatgcctaatcttcgcattcagtccatccagagacttttcctttttactgaaattggttggcacaattcccgaggccaacctcgccaaccgatcaaactgcgttgtgtactcagtatcgctcatattttctttctgggtcaggtgggtgaactcttttctcctggcacttctgacggcctcattgtagtacttcgcattgaaaatttcctagaacttttcccaggtcattgtagtgacgtcatgtatcatggacaccatgtcccaccagccaatgaatctcttgaaaatgaaaagtggcacagaccactctatcattcccggtgacgcccatgaaattcaaaatcttggtaatcactgttagccactgttcggctttgataacgtccggacctcccagaaaaactggaggtgctgcttacggaatctttcatacagaggttccatcaaattcaatgcaactgtaggtttggcctggacaacaggggcaggtgccactggaatttctggaacaggcactgcaggagaaccctgctgtcttaatcgctggatttcactgtcttgttcctcaattcgggcttgcgtttctgcaaacctattttcccaattctgggcttcctgtgtagcttgggcagcctgtggcgggttagcatcaccccggccacgagccctgcccctgggacctctaccttggccccgagcatttgggagaaactgagctccctgaccttcatttgacccgaccgaattgccctgactcctggtatttcgcctggcgtccatctagtctgaacagcct

SEQ ID NO: 259379 - DNA, 642 bp, Cannabis indica
agaggagtggtggtttatatgcagtaccacccaaatatgtggttcaaaatgcagatgggcttaattggggaatggactaccataagaatgaatggtttgggttttatggacttctccaactactatccaagattcctaggcctatcctacttggggcttctgttttgtttggttttgtcctgttgtgttctgttttttcttctagtacaaacaaagaagaaacaaaggttataaatgaaaaactcattctttaggaagattatggtcagtaataaaggcaattttcaaccacttcagctgagttcattctcaagtagagtttgaatcccaagaaagcatgtaaataaaaacctcattaccaataaaattgacaatttgtactgatattcattcatatgacaatattgcttgcttagaagttgtattgtatttacatcaactcaaaaattctgctattgtatcaaccttaaatgtactccttttgtcataactggtgaatctacaagtcttacaaaattggttgaaagtcactactactttgatgtctttgcatttcatcccttaataaatcaagttctgcataaatttccttactctttgggtggttcatatcgcttgctgcgaaataatgaactttatcat

SEQ ID NO: 259380 - DNA, 571 bp, Cannabis indica
agatcctggtaaaataaattccaacagttttagtgaaagatagtcaactacgagtgttcttgagcatgaaggcaaaaatgagtgtggacaacttgttgccactatttgtgactaaggtgaagaagaatgtgaatttggagcagactccccgaaatgtaacccctagaagtgttgttgggacctttgtcccagaaactgatctgggggttggtttgaatgagcaagttggcactaatatagatgatgagagagtgggtatcgcatttgatcattcagatgagttcgatgctcccttttacaacaatgatcctgtggttgatttgggtgtggatgatgatgtggctacagatgtacctcccctgaggatggaactaactccaagcaaccaagtagagcgacaaagagacccccccgtagtgagaatcgccaaacaccaggaactagtagcagtcggccaggtccttctaatagtgctcctgtatctgaatttgaagtttctactaaattcaaacctcttgtgtggacaagggaagacatagaggaaaataatgtgtatacaacatctcttagt

SEQ ID NO: 259381 - DNA, 808 bp, Cannabis indica
attaagagactttattaagtctaattaataaatatattaaatggtaattaataaataaatagtttttgcatttaagtggttgaattggaaaatatggcatttttgagaaaaataagatatatagttgaaaaatggcaaaattacaagtggtgggctcacatcctatggccgactacttggggtctattttaccatttatttattaattttttaatgccaaataattcaaacctaaacctagaaggattcctataaatagatagtaatggactcaaattagttgatgatgctttcacttgcctttagaaaaattttgagcctcttctctctctattttgaatccttcctctctctttctttcttcaatttcgaatcctatagtgatagagtacatgcccacacatagcaagttggtactcaatcatagtgtgtaagactgtgagaatccaattcaacagaaggagaatcgggctcagatcttggtgatactctgctacaaaaagaataaaagggttagagatctgagtggaaggagtcatttaattccgctgcaaccaatgtaaggtttcttaaactttatatgtgtttaatttacattgttttagaaattcatatttaggatgttaaataacatacatggtagtaaatctagatcctagtaaactaatccccagcaatttccccttactttttaagtgtaatcggtttgaattattatgttacttgtttgtattcattatgttagataaccaattctgttttagttataacccgtttttagttatttcgtgttattagtttttattca

SEQ ID NO: 259382 - DNA, 976 bp, Cannabis indica
tttttttaaaaaaaaaatgatatttgtaattttttatattattattatgtggtatttaagctacttaatattatactgatgtggtacttatttctaaattatttattaatttaaaatttatgagagttgatattgaaatacactattaataacagcatgctatattttatggtgcttgacaccttaatgtgactcttaatattttcgttattaatatgtacatatctttattaacttcgattagaattttaaataattttttccttaaagtgttcaataacatatctttattaattaacaatttttcaaattatttattaaattaaaatttgtaggagctataatatggaaatacacaaataacggtatgatacattttgcggtgcttgacatcttgatgtgcctcttaatatttttgttattaatatatacatttctttattaattttgattaaaattttaaattttttccttaaggtgtgcaataccatatcgatgtggtacccaatagttgattagtaattttctaaattatttattaaattaaaatttatgtgagatgatattgaaatgcaccaataaaggttgctattttttgtggtgattgacatcttaatgtgtccccactactatgaaaatagtttttttcgacgattttaaacagttgtttaaagtactcccgtcggtttctataaccgtcacctatacgaccgtcgcaaaataggcaacggttaaaaactgtcagtaaagtggacttcctgaaggtttaaaactgtcgcttataacaaggtataggcgacgattttaaattgtgccttatactataggtgacagtttaaaattgtcgcctatagtataaggcacgatttaaaaccgtcgcttataccctattataggcgatagttttaaattgtcagaaatataaaaaaagagaaaaaaaatactgatttttttgccattaatggcagaaaatctg

SEQ ID NO: 259383 - DNA, 659 bp, Cannabis indica
tcaaaaaacactattactcccatgaagatctttaaagtttagcttttatagactcgtagccaccattttaaagagagaatatagtaattagatacgccaaatcttcatgatttattggcctgtttgtgtttcttctcttactaagtgatcagagaaaggtaattttgttcaaattggttggctaattatcattattccatttaaagattttatttttaaattctctcctctattactattactagcaacacatgaattacacctaaaatctacaatgaatttatatatatatatatatatatgtatacgtgtttgtggaaaatctagttacagattatatcggtagagaaatttgagtgctttagacaaagatttagagagagaaactaaaacaaattcaaaaagaaagaaaatataaaatagacaaacaaagttacgtacatttgaaaattgaaggatggtaacaattgtagttgtaattacaaaagtacaatatggtggagtaatcggagggacgttggcaatggaggacttgcagtggaacttgcgtacgttcggttgctatggaggaataggagtcccctgcaactcaattaatcaaagttaaaacttataatataagggtatattgagcaaatcaattataaaatagggtatat

SEQ ID NO: 259384 - DNA, 602 bp, Cannabis indica
atttataactggcccaaatcgggacttattttcttataacaaattagaggttattcttgaatagagtattcttaaatagaggttctactgtattatatttatttagattattgtactctgtattctaattattatccttaataatatggactcgtagagtatggaaattttaactacaaaatcatgtagaaatatcaggtgttcatttattactataattaattttgtggtatattattacaaaaaaggtttatatatttgattaacaaaaatttgtgttaacagtttggtgctttcattgagagcctttgtaataaaaactcagaagataccctccttatagatacaattacaaacctatatctatggtggctaatacccctcgtaacgaagaaagccatccaaaggagaccacccatcgccctggaaaggaacctcagggatcacaaggaaccaacacgactgaagcctctcgttctggaagaaacaatggaaatttcaaccctacgtgtgaacagatcccaaagagttgaagtgaagatgactatgatcccactagatatgtcctattggtagaagtagaaaacatgcaacttcaacaa

SEQ ID NO: 259385 - DNA, 1888 bp, Cannabis indica
aaaagaagagttagtcaagctgtagagaatgtatgttccgagggctcaatcatatgttacattctctccttggagttgggaaaaccaaaagaataatgtaaaggtggaatgcaaaggatcttggattggtgttcaagggctccctttgaacctttggcatatgagaattttcaggaaaattggagatatgtgtggtggcttaatggatgtggataaggatacggctgaagctagtgttttatctcacttaagactccaattgatgggtgatgagttcggtttagtacctgaaaccttatctcttaaccacgatgataggaattacgaattaaagctcttcaagctcaatgatttaagctacagattccatggatggtttaatacatgttggtatcaagattttgataatagaaaggtatttggtgatggggatgtaattgaaggagaaaggaaaaaagatggagatgaagaacggatagaaggagagaacgtgtgtgaggcaaacctggacaattgtgtgatactggcctatgagaaagaaaacagggagtgttcaaccgaagaggtaggcagtgaagatgatatagatgaggacgcacaggtggagtgcgaggtggcggctgcagacggtggagaaggagggtcggttgaagtggaaaagccagaacagaggaagattgaggacattaatgagattacaaggaccgatgttgggagtcgactctcaagatttgaatcgcatgggattacgattcccaaagtcggcaaaagggatgattgggggacgattaatatacagcatgtatattctcgtattttgcacgatctgaaccgaccctccttaaaaattcctcatacctgtccctttaatctcattagggacacgtgtacaccagggggaattacagctcaaatggatttgggccctagaattaatttgggccgaaaggggttggatgataatagtatttttgaatctaacatggtcttggctggggataatagggagagggggcctttgatttattaccataatgggccatttaatatttttttggcccataaaaggattggaataaggcctgagataaagtcaccttttaatctcaagattcatagaatggatccgtgggctagtaaaggaaaagaaaagatggctatatgtgtaaaaaaaaatccagagcagattatcaatgatttttttgaagggagattaaaatcaattacaccaaagtctcaagcggattttagagctgcaactataatgttttgggcagattttgaagtaataaagaaaacaataagtcttctattctggaaaaaacaacagaggtagaacaagaagaagaaaaggggtttgaacagtttgggaaggtctatatcagaaaaagaaagtcaatgggacacaccagaagtgaaacagcagcatcagcagaagaagaattctactttgagggggaggaggctgatgtagagtcaattgaagatgaaatgttggggctaagttcagagagtgaatgttcggagggggaaggagcagattctgaggccgagaatagtgaagagaaagaagatattattggtgatatcaaataattgtggagacagaatgaacatgaaaggcagttaactactgagtcacacgaggagggacagatcacaagaccaaactatcatgaggatcattcgtggtctaacattgttcaatccatggcggagatgggaatggaaatcctgcaatataatgatgacaacaatttgatcaaaggagaaaggaagccaacgagaaagaaaagtagagaattgaatagtctgactttcaatgtcaattatgatagaagcttcaaaaaatcaaggttggtcaggaaagtttaatgaagatcctctc

SEQ ID NO: 259386 - DNA, 513 bp, Cannabis indica
attactgcctttattcattttttttttcatttgtactgttgcacggtcattttaacttttatactgttttttatttttaaatatttttggcagtatactgcctttggtaagttttattaataatgattttatggctttaaagtgtcatgctggggttattccacgttttttttctctactgtgtcattcatttttccaaaacattttataataataataataaaataggaaataatgagtagttgtgtctccccacatcaaaatttaaatttttttgttttattagagtgattgatttggacgtgagatgtgacaactctcacacacactactcaataaagcaaccctctcatcaactttatttatttatttatttttctaattttaattttctttttcataaaactcccttcatatttcctctttgcttgtaaaaaaaatatatttctctctctctctctctcctttaagcctattttggtctaaaccaatctcaactacttctgccaagct

SEQ ID NO: 259387 - DNA, 549 bp, Cannabis indica
atttgaatcatagattgatgcctccattaactactcatggtctatatcccactagggaatatcaacaatttaactcatattgtcatctttctaatatgtctatcctgttaaataggctaacacatataacatacatgcacagtgcattcagatttcttgatgtctctaactaaatgtacaatgtttaatatcaataacaattataatattgcccataattctaacttgagtcggccgaaggaccgatattcaggtccccttgaatcataactggcacttgggaaccgtacacttttcttcttaactgtgggcaggttcttttcagatgacccactactccacaatagcaagatctggctctacattatcccaaatggcgcctttttgcatcttgaacactcaagataaggtcaccatttcttattctcacaatgaccgctatcttgaccaccttggaacctttttatcttgtcccataactagtggttcatttagttttcgtttcctgatctactaataagttggcttcatatattacaccacatctag

SEQ ID NO: 259388 - DNA, 2094 bp, Cannabis indica
aaacacactcatgatttgattctgagtctccatcatttgttgttgccactcgttccgtgcttcctactctttcacccttcactttattgccttatattcctctaaagtgacagttggctgcccggagggatccgcccagggagttgctctttttgtccctatcttatgtctcggcaactggcccagacctctcaagtggcatgactgctcacccaacacatgtgtcataacaggcatatctgtaagaaattgggtggggttgacattatactggcgcaggacattggttggtgctgtttgagtttcacgaatatcaaccattttggccttcaaaaaaattcatgaaactattagagttaaatagaaattaaaatataccatgagtttaataaaaatataaaattatttacatgcagttgttgcgtgtgctcatcgcgccatttgttgtacttgcagtggaacttttcaaaagtatccacaacacttccaaggggtaagttatacaggactaagataacatccatgtcttttctaggggcagtgcgccctggaatcaacagagacaacatcaacgactcagctttcatgcacttccaagggggtaagttataagagactaaaataacaggccagatactgtaagagttactcatgttaccaaagggattgaaaccgtcagtggccaaagccaacctcacatttctgggttcaagtgcaaaggatggatggcatttgtcaaattgcttctactcttctacatctgcagggtgcctaagcacgccatcctctttgggtctcttatagtagtgccatcgcatgtcctcagctgagtgtcttgaactgtataaccactccagtctcggaattaacagaaagtatcgtaaaacatttcgagcaacttttttcccgtctccctttttctttttccaacaactctccccacaaataggacaaaaatcttttttctcattctctttccaaaacaaggcacagtgatacttgcatacaccaatggatttataacctaaaccaaggttacgcaacttcatcttcgactcgtaatgagacttaggtaattatgtaccctccagaaataactcaatcaatatggagagtaacatattaaaagaatggttactccacttattgagaactttgcagtgcatcaacttcaccaaagcattgagcgctgattttttgcaatccgggaacaattcagtttccatatcctttaataaatcgtcgtacttaccaccatcattcaaagggggctcactgaaggaagcagtggtagaacttgtatcgtcaaaactagaatttctcttaaataccaaccatcgaatctgccatttcttattcattgttgtctactatttctacagccggttgcgtgaatgactccctatgaaaataacatgtcgtgtatgatcgttggatgccatgcacaaatggatgtacccttatattattgggagtcttgaagttcacatttagatatctcttgcaagagaatcgtgtaactccgacaaaatttatttgcattcgagcaactcaaacaaactcatccacacccctaggactctacagatcatatgtttaaagtcatccagcttctgtcgctcaccatatttctacataatataaaaaaaggaagttcaaaataatgtgtaaagaccacattattttgaaatcacgaaccagccagggtctttgtctgagacaactaactagccagggttatgtgtaaagaccacaaactgaccagggttatgtgtaaaggccacgaaccggccaacgtcacaaacaaaccctgtgtgtcagccagaagctcaaacgagtcacaataatatttttcaaaaaattcaaacaatgttcttcgtgttcttcgtgactttaagagtcaatagtcaaaatggagttcaaaattcaatcttttttatcgtaaagtcatacattatacatcctaaagctatcaagagaattataatgtaaaaaagactacactataatgtgagaatcaaagattttaaaaatcttgaaaaagcttaaagtcatcaatgacagattcaagaaaataatgaaaagtagtagatt

SEQ ID NO: 259389 - DNA, 582 bp, Cannabis indica
tcatacggaattttttacaaaaacactatctttttatatttagaattaataaaataggaaataaagtgtcccactcaaaataatgtatgaattatgatcattattctttaaattattgtctagactaccaaaaaaaaaaaaaaaacttttatcaataataaagcttaatctacttttcttattcctttttcttcccaactattcatcttgaaaaagtaaacaacgttaatataaacaactaaagcaacttcataatatcgatttattattttggttgaatgaaatgaaatcttcattaagccaatgtgaaaaaaagtcaaaaaaaagcttacacaaattcaagtaaatttggccaccaaattctaacatagtcactagaaagagtcatcttagcaagattataagcaataaaattagtaaaacaattacaaatcaaatatttaaatgatacataacaaaattacgataaacattgtaaatatcttacaatatcattctaaattccaactaagtaaaattcatatttttttataccaagaagcaaagccatcctttcgcaatctattttcactttattttctc

SEQ ID NO: 259390 - DNA, 582 bp, Cannabis indica
ataaaaagagataaactttgccaaaactttagtcgaggttgggggggcatttttttgtgaaaaactgttcaaaacaataaataaaggtatttattcatgtctacgaaaacggcttttttctggatctcctgtcaactgctcaatcaattacttcttcgtggaataagaacaagaaaattacttgattttcttttattatattatccacaaacccttattttttccttcatttatttgatttttctagtctcaaaaaatactttagtaaatgaatggaaagataatctactttcattaagtgatttattagtaaccacctaggtttaggttagatttaattagcattaaaataatagaaaaataaatggtaaaatcacactaagtgccggccatgtattggataatgagcccactttataattttgccattttgtcatttttccatcctattttctcaaaaacgccaattttctaatttaaccacttaaatgccaaatccaattatttaataactaaaaattaattattaaataatattgtcatttaataaatttattaattagacttaataaagtctttcaa

SEQ ID NO: 259391 - DNA, 914 bp, Cannabis indica
ttacatagtccaaagttcgaacaaaataaaatccatattatagtccataataagttagagtaaaaaaataataaaatatatataaattggtaaccgagttttgggttttgagttttcaaaattcttaaatctgaactcagcccggtgccaaaccggattacacctaaaccccaccccctatttttgtaaacctatttttttttcttcatgttttataggtttcaggccgggtgggtgggttttcgggtgaaaatgtgacgccctactcccaacaagtcttttgatagtgttttcacatctactaaacttccttggcaaatctcaccaagcttcttgttcagatcaataagagtgtctattggacaacactcactcattcctgaatcttttaacagatcaagaacatatttctgttgagaaataacaatcccttgtttggactgtgccacttccatagccagaaaatattttatttctcctagatattttatctcaaatgcctcggagaatctgtttttcattgcctccaattcttctatgtcatccccagtgagaagtatgtcatcaacataaatgattagagctgcaattttcccactattcgagtgaccagtgaacaaggtatgattagattatgcaacctcaaataaaattaaacccccaaattcccaaaaatcacataagagaaccaagcttaagattttaaaaacaataaggaataaagtatctaaggcttaccttttattttggctcaaggtttctcctcaaatccttgctgaaaatgacctaaatatggaagtctaaccttggtcttccttggttcttttctagggacgaaggtgaatgagagagagaaaatgagataactttaatttttctcctactttcttttttttctatttccttgataaact

SEQ ID NO: 259392 - DNA, 1675 bp, Cannabis indica
ttgcaacccaaactttattcatctaaataaaattttctttgtttctgaattacacactttctttcctaaaaagtttctgtgttgtgtcctccagggttctgaagttacatgttcgcagctaaaaaattggtgagaaaaccgtatgatgtcgtatcatatcacaaatttgaatattattgtagatatattagaagttttgttcaactttaaagctacattttccacttgtatgatttacaggctgaacaacagaaaagctaggcttgctcggacgggcaaggatgttcgtgcatcatcagaggttgataattctttcccagagaagcaaggtggcccgggaccaaggtctagtgcctcacctggaactcctgccgaagatgcttctacccaacccaatgtggctagagatcaacaggtagtgacatggagtagcaatacaggtgagatatccgaggcttccccaatgttagctgttgccggtcatacagaatccattcagatcgaacaaggtcaacatgttgttctcgtgggcacagctggagaggagatagccaaaggaaaggtattccaggttcatggaaaatggtatggaaagaacttagatgaactaaggacatgtgttgtagacatattggaacttaaagttaagagagggacgaggcttccacacccgtctgtatccaccggtgtatcgtttgaggaggctgaaacaagaattggtgtaatgagagtgatgtgggattcatcaagaatatttgggtcgggttcgttaagtaaatgacggggatgttaaagtggctgcatttaggttttttttttctcttttccttttgctgttacttgtagcaaagcaattgtagttagactgtcatttttatagaatgaatttatcagatagtttagagcacatccctcaaataaaactgttcaatcctcaaaaaccctagaatctgccccaatctctaacatctcttattctttctctttctctcaattcaatcctcacatctcagaaagagttattatttttcatctccataatccttcatttattttatttttttatttgtgaaggttgtagatgttttacttcaccctgacatgataaaatactgtgtggacttcagtgattattagtcggaaagtgttaatctaattatgaagctttttcttcattaaacgtatggctggtagtagtgttcaaatttatgtaatttaatcgtatttttttcagatctaatcacatgaaacacagttatattcatatactaaaactaacggttaaatatatattacagttttaaaaatattacctagaaatgattttattgttaaaaaaaaaatagtaattttacagttttattcttgatgtcttgcatttttcaaaattggcatatatatgtttaacacaaaatctgttgtgaagggctattgaaaatagactcaactctaaaaaggagagaataaataaaatagcagttagataaggttcaacttatgtttgtatcactgatagtatcaataaaaaaaattagcaatactcacttttttttatcaagaaaaggatatgattaataaaaaccatcaaagtttacacaaaacgtgctaaacattagccaggctaaactaaaaatatgacataaaaagtaaatgccactaaatatgacattatcta

SEQ ID NO: 259393 - DNA, 706 bp, Cannabis indica
tgggatttagtgaagcctgatttagtagaagctgtttgttcctttctaaactctggaaacattttgaaagagattaacactactactatcacattaattcccaaggtttcttgtcctaaaagtgtggtggatttcagaccaatatcatgctgtaatgtagtatataaggtggcaaccaaggcaatctgcaatagactgaggaaagtgcttcctgatcttatagcagaaaaccaagggggatttgttcatggaagattcattgcacataatgtgttggtttgtcaagacttggtgaggttctatgggaggaaaaattgtagaccaagttgtatgataaaaatcgatttaaggaaggcctatgatactatcgaatgggaattcttggaagaaatgatgactgcattgggatttcctagtcagttcattaagctcattatggaatgtatttgtactcccaaattctctctgctattgaatggctctatgtgtggattctttaatgcaaaaagagggttaagacaaggtgacccgatgtctccccttctctttgtgttaggaatggaatacttatccagaatcttcacaaaggtaggagattggccaggttttaaatatcatgacaggtgtgcatctttacgattgaatcacttgtgctttgccgatgatttgttagtcttttgccatggagatttcatctctattatgc

SEQ ID NO: 259394 - DNA, 1350 bp, Cannabis indica
atttattctcatcttttttattacattgtgaacaatcttactgacttgaccgtcggagtcccttcggccagcacaatcccggtgtcccaaggtttcccggttactctcttctttgttctacaggttgtcggtgcccgcatacgatcatcttcaattgattgtggattttaccatctacaatttagcgtccaccgtggggccctaacaagctgcaatcgagcaaagtgtttcgacctttatcattcagtcaacccacacaagaacaatggcagagcacatggaggaaggagagatcaatgaggaactgactagcttccgtgaacaactcgcgactctcacagctcaaatgaaagaaaacttggagcacactcaagcagtggaaagagaaaatgcagcgttcaagaaggagaatgtcgcactaaaggtccagcttgagtcattgactgcttcgatggcaacaccagacaatagtcgaaaaagagtcaaagttccaattgatccaatgcaatcacttgacgataccccaataggaggatcaagccaagtgaccggacaaccatcaacaacaggggtaactaacgtcacggtcggacaacaaacacccacaatcaatcagaatatgggttcagcagtcaattcatcagtcattcctctagcagtcaattcatcagccattcctccagcagtcaattcgtcagccattcctccagcagtcaattcgccaaccatccttccagcagtcaacttgaccaacctgactgctcctgaaggctctctaaaccaacaatcctttactagagcaaataatgcaatacttgatttaacaccttctattgtgaatgcatgagtgaatgttgcatctacccaagaggagttgattgaacaaataattgtacgaaaactggaaggcgtggaggccatgatccaaagaatctcaggggtgccaactccaatcaaaaagagcctacctagcagctttgcagattcaccctttgtagatgccattgccttggtcgaaatgccaaagaagtttgtgttcccattgatgaaaatgtatgatggaaagactgatcccaacgaccacatagttagctacaagcagaggatgttcactgccataatactttgcgagttacgcgaggcgtgtatgtgtaaagggtttgggtctcgtctagtcggcccagcccttcagtggtacccaaacttgtctaataattctattgcttcttttgctcaattaactgatatttttgtagagctatttgctagtatcaggaagctggagaagctatcagatgacctctatagaattagacaaagaagggacgaatcgctaagagactatgtagc

SEQ ID NO: 259395 - DNA, 1027 bp, Cannabis indica
tttttgaacaaatatgggtctgtgctattacaaagtagtgtcatttggtgtgaagaatgctggagctacttactagagactagtaaacaaaatgtttaaagaccagatcaaacaaaatatggaggtatatgtggatgatatgctcgtcaaatcaaggaaggctgggggcacatagaggatctggaggaatgcttcaaaatcctcaaaaaatacaacgaaactcaatcccttaaagtgttccttcggggtcaagtcgggtaagtttcttggtttcattgtcaatcctcagggaatagaggctaatctagagaaaatagacgcccttttggatattaaatctccaacaaagacaaaggatgtccaaagcttgattggccgggtagccacactcagcagatttatttcaaaatcgataaacaagtgtgttcccttcttcaacatcctctgtgataataaaaagtttgaatggacggaggaatgcgagaatactttacaagaattaaaaagacaacttgcaaaaccttcggtactctcaaaaccctaaacagaaaagaattaagaatatacctagttgtcaccgaatatgatgtaagcaacgtgctgataagaaaagaaaacaatgtccaacatccagtctactatattagcaatagactcgttgaagctggaggtcgatatcctttaatagaaaaactcacttactgcctaatcttagaaacaaggaagtcaaggccctatttccaaggtcacgttgtttgggtatacatcgaccaactatagcgccaagtattacaaaggcctgattccactgggagattacttaaatggggaatagagttgggtcagtacaaaataatctgtcaaccccgtacaatagttcaaggataggccttggtagactttgtagttgagtgcacaggcaaagaagaaagcaacataagggacaatccagagctagtacaagagtccctactagaaaagaatgaagacagtgttgggttttatgccctaaataaaactctgtttc

SEQ ID NO: 259396 - DNA, 692 bp, Cannabis indica
tgtaggtttacacattgtatagtactttacagtgtagtgaagaaatttctctctttatgctcatcctttaaataaattccaacccctcttctaaaaacagactaaaggccctttagttgattcactctcattcgttacatcttttttgatgtttttttggtgaagtttcattaaatgtttacattaaattttacttagaaagaatcaacatgtcatgcgatctctcaaaaatcgctctttagagcactcacaataaactctttgtaatagggattctttaaattttttagctaaatgtgataaaacaaaaagtctctatcaactcctttatatcatatatgtataataatgatgcactcaaaccaatgcaacttgctctacatatagagaatcaatagttcattctctaaacttatttcaataatatataaataatattttatttatgtatattgtatatatgtttaaaaattattattttaatagtgtagaaaataaaaataatattaatttaatgatgtagaaaaaaaatataaagaaattaatgtatggtatgatgtaaaagtgtattgtgaaataaaaaaaagtagagttttgatgatgtattttaaatggtaaaataatgaaactgttaggagtgctcttagtaaagagaagggcctctagttgagacatcccaattggcatagaca

SEQ ID NO: 259397 - DNA, 569 bp, Cannabis indica
aggaaattttgcgtttttatgatgaatgaatctatctatttaattaaaaaaaaaattactcatttttacattatatgggctaggattggttcatcagctaaataaaataatcataaaaaaattcagcaaaaaagtgataaaaaaaaaaagttgacattgacttaaatatttttcatataaacatatttttgatatagagtaaaaagaggtattttttgatattttctttaattaagtaactaaattaagcataaaaattcaaatttctttttattattcgttatcgattggaccaaaatttaatggtttaatatttttaaattaatatttatagttaaatttgtttagtacctattaatgggcaatacccattgagaagtattccatttatatatataatatatacagtagaacctctgtctaaaaatgctatatttaagaataacgtctaatctgttataaaaaaatgggactttttcatttttacacttcagaacaatttttttgcatttctgtgaaattctacatagaaacccctattgcaactggcgctacaacctaaattgcaa

SEQ ID NO: 259398 - DNA, 1206 bp, Cannabis indica
tttttttatacataattttcttatgtatattatatatattacatgatgacaacaaaagctatcccaaaatacaatatgatcgaaacccttcaggttgcattgccgcgatatgtacaatcattgtcgagccttcaactcactgttcctccgctttagcctttcccttcctacacaaggtagcaaactgatgagtcaacagactcagtaagatatgcataaaatatatatacaatgcaataccgtcttgtacttaggccctcctgtgcttaattacaagactcaccaaatggtcaagaacactcttaacggaaatacgacctttgtactacatgcactgaagtaccacctccgtactagtgttggtaggattaaattgtacttccgggtgctactaagtgttgtaccacatgtactttgtacccacttgtactcgtattggtaatactgtaacatacccttaaacatcatacattgtaccaacatatatactcagtattacaactgttccagtgttggtagtgtaaacattataattaaaatgcattcatacacatatacacatactttatgctatttttactttgtttccgaattcagatgtgccggtcaacttgagtggaacagcagctcaacgctttacaggcccctaaatcataatattcgtaaatctaatgagtgacacgctaaattattttttaaggacttaaaatcaaaactcaaattttccctatcgatggataacatgaaaaactagggtttcttaaacaccaaactccacccaaacaattcaattcgaccccaaattgcacaagaattttcagaacacctatttacaccacaacaaatccaatccaagaaaaactcaataattaactcagaatctaaaaacaccattaaagagcaaagcttgagttcttaaactcaaaccttgcccaaacatcataacattcaacaaatctagcttaaaagcagctcaaataatctcaacataacattggaatccaaaatcaaacaattcatacaaccacaaaaccctaattctaaaattcatgcaataacttatgagctcaagaaagtaaggagaaagatgctaagggattataccttgaattgaaacactaaattccagctagaatcctctaaaatgaagttgaaaatccaaaatctctagtcgggttcttgatgatttgagagagagagagagag

SEQ ID NO: 259399 - DNA, 520 bp, Cannabis indica
aaaaacataaattaaagacgatttagcaaaattataatgccgagtttctgttttctgtttttagtttttcgaaaatctcattttgtaaaaattactaaaactaattttgttacagttaaaaactaaaatttattgatttaccaaccaataaaaatacttttggagcttaaaaaatggaccaaccaggaccattaatatgttgtaacaaaatcattacataccaaaatggttccatcaagtgagagagaggtgaaaatattagagtgatttggattaaaagccacttcacttgcatcacataataatgagaatgtcccttttcccaataccaagagctgaagaacaagacagtgaaacaaagaaaggagaaaacaggttgaagagcaggagagaatttggtgaagatgggtcggacaggttgaaaggagtcaactttagagattttgactccactgagctccgaagtgacgaacccaaggtcggaaacaccgcaagcattggtctttagagaaactctaat

SEQ ID NO: 259400 - DNA, 1557 bp, Cannabis indica
ttgagaagtcttaatgaatcgtcgatagaaaccagcatgtcctagaaaactcctcactccttttacagaaactggaggtggtaaattttctattgttgaaactttagccttatccacctcaattcctgctttcgaaattttgtgcccaagaacaattccttctgtcaccataaagtggcacttctcccagtttaacaccaagttagacttctcgcacctagttagcactttttccaaattttccaaacaatgatcaaaggaggaaccaaaaaccgagaaatcatccataaagatttcaatacaagattcaatcaaatctgaaaagatagccatcatacacctttgaaaagtagcaggggcgttacacaaaccgaatggcatcttctgaaagcaaaggtaccgtaaggacatgtgaaagtcgtcttctcctgatcttcgggtgctatagctatctgatggtatccagagtagccatcaagaaagcagtaatattcttgccccgccaatctgtctagcatttgatcaatgaagggcaaaggaaagtgatcttttcgtgttgctttgttgagtttcctgtagtcgatgcaaatcctccaaccagtgactgttcttgtaggaatcaactcattcttttcattcttaatcacagtcattccacctttctttggaaccacttgcaccgggctaacccacttactatctgaaatgggataagcaactccagcatccaaccacttgactacttcttttctgacaacttccttcatgggtggattgagtcttcgttgagcgtcgattgtcggtttggcattgtcttccattagaattcggtgcatcactgttgaaggactgattcctttgacatcacctagtgtccaagcgatggccttgttgtgagctcggagtaccctcagaagtctatcagtttccacatcagaaagagaagctgaaacaataactggcagctttttatcttgacccaaaaactcatacctcaagtgactaggaagcaccttcaattcaagttctggaggcttttcagtagatggcattagctcttttggaactgctcccaattcctcaaaatatcttctgttcaagggcccataggaatcaagccacttcacataacccatgacctcttgtccctcttgctccgtcaattcatcttcagttaaacttagttcaagaggatcatctagcagctttttctcacccacaatttcatcaatcaaatcaatgaagaaacagttatcacttgcctttgggtatgtcatagcctttagcacattaaagaccacttcttctccttggactctcagctttaattcacccttctgaacatcgatcaaggcttggccagttgccaagaatggtctcccaagaatgattgggacattgctatcttcttccatatccaaaacaatgaaatcagctggaaagatgaacttgtcaactttaactaacacatcctcaatgactcctctaggatgggctagtgatcggtccgccaattggagagttactgtggttggctttgcttcacccagctgcaat

SEQ ID NO: 259401 - DNA, 883 bp, Cannabis indica
actcaagtacaaggaaaaaggttcattttcttatagctcttacaacagtatctctgaatatcaattcttagacaatatctcttaagtaaaatccttcgaccatttgcccagtgaatatgcatcactatttatagggctatgagcttggagaggaagtatttcccttctcattacaatggatataagcaaaaagattgcataataaatacagaatacaccgatcgtgggatttggacagcttgccatatctctgcaatctgatccccaagttatagggatttccttgatgactcacgatgcgaaagctgaattcgctaagtgttggttgctcagtgcggattgctaattgctttgcctcgagcatgcgtatgaagtatcctgttgaactatatcttgcgagcagatactcggagttgattccacgtgtcacaatcatgtgatgccacgtcagagtgcaaaaattgggataacactaccaataaagtaccaggtcggacgaccatattaagtactaaaagaacatttacttttaagtgaatggcctgctgagcggactacgctcaaaggtttcgaaaaaaatgaaaaagtactcaggtcggatgaccaccatttaaagtacaatttctaatttttgcaatttgttttctttcatgttaagctaaaagatcaggttagatcaaatagctctgatgtaagttactacgacaacaaacacattttcaatcaataaatgaataaagatgtttatttcaaaattctaattgattcgaaattactaacatgttgctaatttaccatccagtgcgtacaaaaggtttggttgaacccaaaatcctgaacaaataaaaaagtatacttgtaaaaaataagtgaccaagagtca

SEQ ID NO: 259402 - DNA, 586 bp, Cannabis indica
aaataagatggaaaaatgacaaaatggccaaattgcaaagtggggcccattatccatacatggctggccactttaaagcatgtttaccatttattttttcgttattttaatgccaaataaatctaacctaaccctaggtggttccctataaatcggtagtgatggctttagggaaaagatgatgcatctcattccttcagataaaatttgagcctccactcctatacctagccgaaacctctctctcttttacctctcttctaaaccgaagccacataatgaaaagagtgagttcccacacacatgaagtagtactcaatcatagtgtgtaacgctgtgaagaatccagatgcaagagaaggagattaagacttagatcttggttatactctgctacaaaaaggatacaagggttatattctgctgcaaccactgtaacatttcttatactttatatgtgtttatttcatatcattttataagttcatatttaggttgttaaataacatacttgttagtaaatttcaaatcttggtaaaataattccaacagttggccttagagccatggtaattgatttactctc

SEQ ID NO: 259403 - DNA, 2180 bp, Cannabis indica
aagaaaaaaaaaagattgaagctcttatttgttctcctcaatcagagtatcaattatgctatacaaataaataaataaaagggttcttaccggaccactttttcccctagccttgttaacaattagctcgtagaaactatgctgctgtacttccacaaaaacaagagatatcactttgttaacaaaagagagaaatcttatgcagggattgcatttaaatactttcacaaatgtaaatcttacatgtggaataataagatcttctttcacataaagcaagttttccacagaggtggttcgaatttctcgaaattctggtgcaagttgttgctgaacaccccgaagaaattctcctatagtgtcacccttgcgtacctgaatggagggataagaatatgaagataaacagattagaaaaaagaaccaccataagagttaaaccaatcaaagttggacagcttctatacttgcctggatcgttcgcctatggcctgccccatcccaataactgtaagtaatttcaaggggctcatctgaaattataaggggtcaatcagtattaaattaaattttaaaacctgagcaccaaaaaccaaggtaataaacccaattacttcgtatttgctcttgctcaagttgccactgtttccgcaacctttcacgctcagcttgttcctcagcctcacgctcactgaaacagcatcctcaacaactctaagctcaaatgttagaccaaggtcacaaagagatagacaacagacagacaaacaaagagggataccacacctgtctggtagaaagctagtttccacagtgggatcttttcccaatttaccacgaaattttgctgggtcagaactttctgcggaaagaatgtgatgaaccaattcattaacatgaacgcgagcatataaattcaaacaataagaggtttagatcacaagtaatcatcgtactagagcccaaacatccattcaagctcaaattgtagagggcgaaaaggttcagaactacaattcacattcaagaatacgcaagtgaacctcaatgaatgcaatcaaatatatacgtactgtcaaatctctatttactttagcactctgctaaatcattttggattttaatgctttttttcacaaagggtaacaaagccataagagagtccactaacactaattagagagagagaggatagataattactgtttctcccatcttcgtcttcacttccattctcatagtcatctgcaaatgacaaacgagaagtccctttgatctttctctttttacgcttttgtaattggagctcctcctccctaagaaattaagagcatcaaaatcaaacgatatgaattttaatgtagttcacttatttaaaaaactaactttcatgattaaaaataaaaaaaaaaaaaaaaaaaaaaaataaaaaataaattttagactataaatttacacaaacatatcaaagtcatcacttgaaaaactcactcctgttgtagtttctgaagtttctccttctcttcctcctcaattttgttccgaatgtttactctctgcaatgcatatcaacggaaacccttgatccattaatgacttaacaaaaataatagtaataaaaaaaagcttaaaggtaaacaattaccttctcaacatattgctccctcgtaaccaaaccaacagtttccttcttaaacgcggtctcaagaatctgaaaaacacatgagccagaagtgttaacaaaaaaaattactaattgaaaaagagaagtggaagattaaaagccctaaactttataaaaaaaaagagtagtaggaacctcagaggtactagagccgaattggaggagaccgggttggccctgttccgattgggacttggtcttgagctcttggattttctggcgctccgcttctctctgcttctcgagcctacggatcctgacggcgtcttgggcggtgcccacgtagccgtctcccatgcccgacatcttcttcacaccctttttccttgttctccctcgctatttaaaactcagtggccaatttggtatataaatgataataatagactacgccaaaagatttttctattttttagaataaaaaaaataattatcatttttgtttggataaataccattttagatcctgtgttttgcaaaagttacagattggacc

SEQ ID NO: 259404 - DNA, 905 bp, Cannabis indica
ccccaaataacataaaaacgagaaaaactagggttcctaaaaatctcccaaccggcagaccggttctgcaaccggaattccggttctgggaattcctgaaacccccatccggaattctggttgcataaccggaattccggttcctcgcaggaaacatgcaacaatccataactcattcaaatcgaatccaaatcacaccaaaccttccagacctgttctaaataccccaaagaacatatccaaagcatcaaaacaacccagaacacacagatactaaaaatgccatgtgagctccaagctttgagttcaaaactcaaacttggctaaagctcacccacaagcatcaaaaccagtttaaatctactcaatcatgcatataaaaacttctgaaaacacaggaaatcgaccccaacaaacacagcaacaaaactcatcaatttaccttgaaaattatagttttgagttaaaaattcacaaacttgagcaaggataactagcatgcatcaaaacctatctcaactcacttaattaaacatttttaatccacagaaaacaacaacaacaactaacagcagctacaaccacaaaacacaagcatgcaatactcaacttttttctaaaatttcaagaaactaaaagagaagctagaacaaggattacctccactagaattactctaaacttgatggaaatcacttgaattaagcaaagaaacacagccctagcagctcccaagcatggccgaatgaaagagagagagagagagagctcttgaatgaaaaagatgaaattttgcttttctttgatttttgataaaatgaagaaataataaagctacaactaataatcagcatattaatcacatagaaacaacttattaacttaaaataaagtccactaaagga

SEQ ID NO: 259405 - DNA, 535 bp, Cannabis indica
agcttgacagatgccctaaaaaggataaatactattttaaactctgtattttataaaagttaccgattaaacccgctattttgttaaatgacaatcattttccaaaatggtaaaaataggaccctgaacttaattttcaactaacttttttttttctttctaaataaccaacttgaagacaattcctaacacgaactgatacagaaaatataaatagttttatcatgacacttttagattagattattattaaattttattacaacaaaaaatcagttcaaaatcctatttgtaccattaaagaaaatacaaggtttattttatcatttaataaaataaatatttaaattagtaacttttacaaaacatagggtctaaaatagtatttgcccccttaaaaaaggtagataaagcataagaaatgcagtccaattgtagctagggacaccattgctttaatagaagtgctaaatatgccactataagctttcaagagactgcaaccgaaaacaaagatgaaaattagtacatccta

SEQ ID NO: 259406 - DNA, 523 bp, Cannabis indica
atcattgggttgcagccaagaaagttttgagatatttgcaaagaacgaagagttttatgcttgtgtataagcatgttgacaattttcaagctgttagttattcacattcagatttggtggttgtgtagatgatttaaagtcaacttctggctatattttcacttttgttggtgctgctatttcttgaaaaagtgttaaatagactttaatcacatcatctactatatatgttgagtttgtcgtatgttatggggcatctttgcaagctttatggttaaagaatttgattttagagatacgactagttgattctatttcctctcctatactaatctattgtgataataatattgttgttttcttttcaaagaataatgagattagtagtgcttctaaacatatagaaataaagtatctcactattagagacttggtcaagaaaggagacattgtgatagaatattgaaagaccaagttgatgtttgcagatcctctaaccaaaggattaagtgccatattgttt

SEQ ID NO: 259407 - DNA, 593 bp, Cannabis indica
tgaacttgtgcatgccatcaaaaataaaacagactggtcggtctggtattgccactttgaaacttgacatgagtaaagctttttatctggttgaatggcgcttcattcaagaggtcatggttaaaatgggttttgcaacaaagtgggtaaatctgattatgggctgcctcaccaccaacaccttcacttttttgttaaatggtgaagtaacgggatctctaactccttcccgaggtttgagacaaggctgttcgctttcaccataccttttcctaatctgttctgaaggattatctcgcttgcttcaccaagaacaatcaatgggcaatctgaatgggttctagctaaccaggcatgctccgccaatctcacacttgctgtttgctgatgacagcctccttttttgtcaagccaatgaaaactcatgtctagccatcaaaagagtgcttgatatataccatcgtgcttcgggtcaggttcttaatccggaaaaatcagttatgtccttttctcctaacaatacgctagttgctcaagtattttttcataggcatctgtccatgcctatttgtgaatgccatgaaaaatacttg

SEQ ID NO: 259408 - DNA, 983 bp, Cannabis indica
aaaacgtaggctaaaaatagcctaacatgcagccggatgtgaacaacagagtagcactcaaccaatttgagctgcagccgacatatatcaaaattcaaaatcaaaaggatgtgaacagggtttacctatgtgatttactctatatctccttcaatcgatctttgccttcaccaatcacacactgcaaatgctgtcgacggtaagaaatggccatgagggagaagaagagcgtaggcgttttggattttaggggttggggagctccatcggagctgagtagagggaacataaaatgggaatgaacacacaaatgggtttggagtttttgtcatttattttttcctcaatatgatttttttttagaaatcctgaaatgggttttagactttttagtatttaaaatttcaccactattgactttaaaaaaaattatcattatttataaaatgtagaaaaaaaattaataataaaaaacataaatattaattattaaaaaaaataaaaatgttactaaaataatattaataataaacaaaaaataattttaggagcgacaaaggtcgttcctaaaaatttaaaaaggcacccctaataacaattatttccacaaagtctttttatataattattttacatcaaatatttattgtccaattattaggggtgataagttggccctaaaaattttaaacattgcccctattaaatttttaaattgaaataaaaaataagaataatcatttaagggcgactaatgaatatcgtccctaataatgagttattagaggcaattatttctcgcccctaatactatcttttgttgtagtgctagtcctcctccaaaaaggagtcctagatagtcatctcctgttggctcgttcctatccgggaaggtctttaagcgagtgcattcatctgtgactttgggagccctcatactcactctcaaatgcaccctttttatgctgacgtggagatctcac

SEQ ID NO: 259409 - DNA, 647 bp, Cannabis indica
atttctatgagatggttcgggctaatcattttggttttcagggggaggctcaatttccctaagttgctcgttttagtgggtccctcagtttccccaagtcgttcttcctgagcattctgagggttctcctaagcaatttcttgcctcttggttcatgagccgcaaggcctacctcgtggtcttctcactctagggtcaggttgattttgattgttattcccttgtgcggccctagctgcggctgcctcacgctctaattctgtattctgtcagtttgcctccccaagacagcacccaagatgccagttttctaattcaatgatgggcatgtacctgtaggatcataagcactgtcatccatgggctgagcacctccaagatttggttcctcgtcccgtactccagtgttttgtccatttcatgactcagtgctccttgaacgtttggattgtgtattcaggacgccctcaggttgagtcctcctagggcgagtagtacgaatgcgtgggccaccctcaagttgggtcctccttgaacgagtggtctgagtgcttgggccagcttaaggttgggtcctcctggagcgagtggtccgtttggattgtgagctagaaggacttctacagcccattggctcttttccagga

SEQ ID NO: 259410 - DNA, 1128 bp, Cannabis indica
gtcccccctttttgtcctcttgagataaaacattgttcatgtcaccaattacacaccaaggaagagtgtttccacgagccaacgtccggagttgctcccaagaagccccacgcaaaattctcttagattccccgtagaaccccgtaagacgccacggcccaacatcagtaggccgcacctccacatccacaaaattcgtggcatagttcaaaactttgatgtcttccttattcctccatagtaaagcaacccccccactcctaccacatgcatcaaccacaaacataccttcaaacttcaatttagctcgaactcgctccaacacatccttacgacacaaagtttcacataaaaagatataatctggtttcctatgggctacagtatcatataggaattgtatcgcccgtgggttgcccatcccacgacaattccaacttaatgtactcataatgcccggtgggcctggaaaccagaacccacctcgaactcgttttttgagagtccattaacatccatatcagcactatcctccgcttccatatcaacatagtcaggcccaccaaccccttcatgttggcgccttcttttggactcagtagaaggcccacggcctccttgtcctccatgtggaccgataattccaccaaggaaaagtgaaggttgacctttcccgcttggcacatgatttccaaacacaactgactttcctctttcattgacactagacttggaaacattagtcttgttgccattatgattcaaattttcattaagaggaatattcccatcatccaccaaatctggaatatcatcaaccacctttgactggggattattctcaaactccaaacaaggtaacttcccagtttgcatggctggccgatcatcctcctcctcatgtcgcaccggggatgcatggtcaaactgctcatcggcctccgtacccgtacgcaaatactgagagctcaatagataatttttccttcgtggttgcgcacgcataaagctcccataaggtttaacaatctcatcctcaggtgtatcaaataacttaggacaaaagttttccgaatgacctatcaaaccacagataaagcaaaacgtcggagcaaattcgtatttaaa

SEQ ID NO: 259411 - DNA, 272 bp, Cannabis indica
ttgttgttgttgttgttatcatttcgtaaggtatctgttcggatctgactgtccggctctcgagtatcggagacatacatttggatttaaatgagagaacataattctttttttttttttcaagtgaacgaattgagtgttttccttagtatatatatataagtgtacttattgatatatatatataagtatatataagtatatttatatatatataagtatatacgaactatttaaagaaaacgctctccaacagagtcgccaaaatattt

SEQ ID NO: 259412 - DNA, 731 bp, Cannabis indica
ttttttttttttctagtggctaaatctatagaagcttttcgactctagatttagatttcatttatctaaggaaaagtttcaactattctagaaaagattaaggccaatgaaagaattccttatgatcaacaatgagaggtctcaaatatgctttagtatgcattagaccagacacctactgttgagtgggagtaatgagtgggtatcagattaatccaggaaaggaacattggaagacaatcaagtgaatcttaagatcaagaagaggaactatatgttagtcgataagggtgtatttatactcttagactacaccaatcagatttctagacttgccttagtgctagaaagtctgctgatgagatggtgattactctggggtggagtagtgattttggagaagtgtaaaaacctatctgaagtctctaagtctaccagagagactgaatgttaaagttgcaggaaagatacttattcagtctaaggaaagttctatacatttttggcattgttccaacatttattaactactagtgttacttcctgactaacacagaagtagttgccaaaaagtaaagaatccagtatccctagaggagtagacatatagagaggaatttcacaatatcaaggattttgtgattaaggaaatgtaatggtggaggaaaggttgtattgaatacaacctgtcagatcctattacggagagaatactacatactacacttgat

SEQ ID NO: 259413 - DNA, 432 bp, Cannabis indica
ataatctcattgatgtaaacattaaaaaaaacagagtattaagagatgcgctcacaatatcgcaaaaatagagtctgatcaagtaagaatatcccttatcgacattaaaaatacaacggaggttgaaatttggttccatggtaagtgggtcttgcatttcttgagccaaggcgtaaaccaagcttggagcaataaatggagtcaggcctttacttttctggtactccacagtttcgggaggaactgaaatgttcctcgacccctatttgaacttattgaaagttgcattcatttcccaaacccagccgagcttcgtgaacttaaacccgaccttgcttgtgggtcggtggagatctagtgggtttcgccgagggaacccgtggtgtgggggccagtccgattgtgcggtgtaacacaaagaagaagaagaag

SEQ ID NO: 259414 - DNA, 586 bp, Cannabis indica
ttaaaaaaaaaaattacatttatggcatagagagatttggaatcggtatcatctccttttcgaatgtgaatatagttttaaatgttttgaaaaggtaaatgttggctaaattagagagttatgaacactcttggcactattccaaaccatttcaagatccaagatgtccaaagtgaagaagaaaatggtactagcaactataacaagtttgccttatattaaatatggatgaatgggaaacaaaaattacaaactattcatacttaagcataatgtcaagaatagaattaattgtgttagacttaaggaattttcaattgaagataaagcatgatttgatgcttaatttaattttatagatgtaaatagattatagtcaagccttgtgaggtggtgaatagtttgtaaagaatgtttaattaatgcaatataatttttttgatttatcaaaaaagatattacatgtaaaatataattaaaattaataataaataatttttaattttttatatgcatattggatccccataaatttttgacttgcgtcctcctaatttaagaattaattaagctttatgttttacat

SEQ ID NO: 259415 - DNA, 1058 bp, Cannabis indica
ggaataaataaaacattttctaaagttaaagttctattttgaaacttgagttttgctttttcctctagctctaactgacaccattatgcctttaccaactttaagtttcaacgttttggattttaaagaatcccaattatcaagcagccgcaatgaacaatagacatggttagtagatccagaataaccaatcaaaatggatttttcattctccaaaatcacatgtttcaaaaactaaagcattaccattgttcttagtgttgaaaagtctgggacattttgatttaaaatgtcccttctgttcataatgagaacattgaataatatgtctgcttaaatgttcttgtattgttctaattgttggctcaatctattgtgaaagataatctaaggaagtgaaattactttctctattcttcttaactgagcgtgaggtagtaggactgtcaaaggaatcattctcaataacttcagctttctttttgcccttatctacattactagagacggacctccttgcaagtgacaatgtcctttcataagcatgcaatttagcctccaacttgtctatgtcggatgagttccaattgttaattataaaagatacaataaattagttaaactttggtgataagctgttgagaacaaattgaactttttgctctcttgataagacaattcccagtatagttgctttttggaatttcaagttcaccatgagcaagtgtgaagtgatactctgaccatgagtcatcttcgcactttggagttcatttgcaaaggcatatactaattgaggattgaggtgaggattgttaaacaacattttgatactacaaacatcaataaacagaaataaattacttggttcaaataaattcatacacaagttcagaaaataacaagtatagaaaaatgtttgaaaaaatactaaaaataaaatatatttaattattttccaaggtttccaacataatgaaatacagtgtctcggtaggccagagtcaaagataacattagttcaatagagtagttagctcatctaaaatagacaccat

SEQ ID NO: 259416 - DNA, 644 bp, Cannabis indica
atttttctctatcgttattctattctataactagctactgataagatatactaacaaaatattctttctttccaagtagtatttgtgaatggaaaattctgcaaggatcccaagcttgctaaggctgaggattttttcttttctgggctcaatgttccaagagacacacacaacccagttggatctaatgtgacccaattgaatgtggacaaaattccaggactcaacacactcggaatatcattggctcgtattgattatgcaccatacggccaaaatccacctcacacacatcctcgtggctctgaaatcctagttgttgctaagggaaccctctacgtgggcttcgtatcgtcgaaccaagacggaaaccggttgtttaccaaggttttgaaagagggagatgtgtttgtattcccaattggtttaattcactttcaattcaatccaacacatgctccagctgttgcctttgctggtctcagtagccaaaatgcaggaactatcaccattgcaaattcagtatttggatcaaatcctgctattaatcctcatgtccttgctaaggcttttcaagttgacaagaatgtcattgaccaactccagaagcagttctggtatggcaatgacaattaaacatggtt

SEQ ID NO: 259417 - DNA, 915 bp, Cannabis indica
taggtgtatgtgctgtctctgtcgttgtggtttggcctttgcgagtgtcttgatggtcagtctgatccaggccaattgcctactcctctcgcattatgttgatagaatccttgattcctaggttgtgtttttctggcatttgcattcatccgagatgattttggatttttaggttgtacattctgataactctagaaattagagttattttcacattttttaaactaaaattggtttagttcttaagtttgtaattaattagtgaagtttttaattatttttgaatttattagctttatgtttattttatagtttattgtgtgttttaataattattttgttataatatgttatgtgttatttatttgaaattttatttaattttataattaattttatgtatttttaggtgcgtttgtgagaaaaagattgggattaaattgaagaaagtttgaagaaatggggccaaaaatataaattgtgaaaagaaaatcagatttggccaagaaaagacccactcttggtcaactgcttgctccaatcggagccgttctttgactgatcacacggcccggatgggagagtgtaactcaccccgaggtagatgcaagtgacgcctggaaaacctgccagccttccttccacgcgggtcccgccgtcgtcggtttcagctccaaccaacgcctgccacccgtccacgcgtcagcctctctccctaatcctagctcgccaagtgtacctgcagaaggaaaagaagaagaaaaatggctgattaaatgtgttcagccgaaaattacaaaatatcaatgtgcctggtgtcaattttaaaactattaggaatggctgattttaaaaatattaatttaaaatccaaaaatccatatttttctcccacacttaacacttaaatatcaa

SEQ ID NO: 259418 - DNA, 922 bp, Cannabis indica
ttccttagtgggagttatcagtcgtcctttaaactgtactccgagtttaaggagggcaagtctgctacctggaatctagacgagttttttgcgagatgtttcgagtttaagaaggatgaagatttggtggattcttcctcggagtccgacgaaggcagcgagggcgaggatgacgacagagcctaaagagatgggagggaattttccctaccactattttaataaatttcttaatgccctctttttttttcttctctctctttgttttattatgcgtgtgtgacaagtttgaggaacaacttttcttgtttatttatttcgtttttgtttaaggacaagtttgaggaacaatctttttattcatttgttttgtttattgtttaagggcttgtaaggattttttctctggatttatattttcagctgatttttcttatcatgtttgtttacacgtgggtggtatattatttttttttgaagtgttttgacacctgggaatgcgcatttattgccatttaatgccttatatgcgggtggatttaccttttttccttcctttaatctttccttggccaccttttgtattttatttgaacgaacactctcctttgttcatggtgtccctttagcgtagcttctaagtttctctttttatacgtctacattttttgttttcctttcccctgcttcagaaatgtcaaactccccaggttctcctcttcctaagtcttcaagcggggatgagttccattccgacgtcggggatcgatacccctcgagaccttcgattttttctcgttactaccggcccagtggcgaagctattgtcggaaggatgatgagggcttacagggctaggtgcaacgatgcgtcctcatcttctgatgaggagtggctatagaatttctttgagaacgaagga

SEQ ID NO: 259419 - DNA, 881 bp, Cannabis indica
ccaaggaaagtgcactcttcagacctaaaactgagcttgtgtttattatatggtctagtgtttgggaaacaagaacaaccaaagactcttaaaagactgtaatcgggttccaaattgtgtaatttgtgtaaaggtgtatcacctttgaggactggtgatggaagccgattaattaggaaggctgaggctcttacagcttcatcccaaaattttaatgggagagaggcatgagcaagaagagtcaaggctgtttctataagatgtctatgctttctttcagccacgccattctgttcatgagtggttgggcatgaaagacgatggtgaatgccatgttcaaccagatatgaagtaaaggcttgaaattctcctccccagtcagattggagatttttaataggtaagcctaattctttttcaacttgagtcttgaagtttatgaaagtctgaatagcatcagatttatttttaagtaaatatacccaagtgaatcgtgagaatgcatcagtgaagtgaacataataataataaccattggaagaaatcatgggagaaggtccccacaaatctgtgtggattaattgcaatggttgagtatatatagtttcagaattaggaaaggggaatttatggatttttcccaaacaacaggcagaacaaaaatcaaatagagttttatttatattgtgaatgttacaactgttcaacacatgcttgacagtcttggcagcagggtggcctagcctagaatgccatagatgaaacaatggatcattgtttgaagttgttacagtttgaacactgttacatgaattggaagtgggtaaaatctgaatgttgttgcaggtggcttttagtggaacatggagattgcaggcttg

SEQ ID NO: 259420 - DNA, 514 bp, Cannabis indica
tactctagccatattgatgtgacaacatcgatcggtatttcagccaacatacatttatcaataatcagtacaactctaagtatactattactgctatcaatgtattctaacaggcataaactacatgtatgctaacacatataaaaacatatgcatgacattatgctaatcttactttaattttgaaatcaggtgtgtcggccaacctgagtggaacaactgttcagcaaattaaaggctcctaaatcacatcgataacaacacgaataagtgacacgctaactcacaaccagggacttaggttttaaaccaacttaacatagcaataccctgaactagcagggaattaatcaaccaaggctttgaaaataacacgaatcgacaacatgaatttttcagggaacccaacaacaaatatccagataaccgattttacaggccttgtaaaaccggttagccggtttagccagaaaacccaaacaattccaaaactcaacaaaatcgattccaatcc

SEQ ID NO: 259421 - DNA, 923 bp, Cannabis indica
gattatgatatagtgacacgctacgtgtgtagggatagatttacctagtcgcgtttggcagtcactataggccagcatttttttatattaataaaaaacagaaaatttagattttactctttagtgacgttccatatttttagtgacacatattaaatgagactaacaccaaatatttagaggctaattgtgcatgtcactaaaaattactcctaactctttagtgactcacacttttttgtgtgtcactaaatagtgtcactaaaagactaaattggagtagtgaatataacaaaatactggcacaataaaattgcaaaaaaacaagttatgcactagacaaattttaagttaaggtatgatgtaaagaaaattttaaagtgatattttaaaaatattttcaagtgaaataaggtttaaggaggattaagtttaaacgataatagcttttagctatggttggttcatatttttaggaattattagcaaaaagggaaagtggtggaatttagtattcagattctaatattattatttaaaattaatcaagtaatttgaagaataataaatacgaagatattgcaataaaaggaggtgggaatattaattgtcaaatgcgaatttattgtgttcagatatatttgggaagttaaattttatggaatttggtttgtaatctatgtcgtataagaaagtatcattataaatgttttatggtaacttaaaaggatacaatttttggaagttttacaacttgtctttggaaattaaaataggaataattatgtcataataactgaattagattattttaagtaatttcaattcaatatagattgatttgattataataaagttttaccataaataaatatgtataaaaattattttttggggataagtacaataaagaaaattgtaat

SEQ ID NO: 259422 - DNA, 1461 bp, Cannabis indica
agcaaatgtgtcgtccactcttttctcatctcgtccatcttagcttttgaatatgactttttgtctattagctacaaaatataaaagagaaattaatttttttaaaataataaaacataaatttatatttaataattattttataaatatttatgtacctctttttttatatagtcacactgattaggcgacttaactagatctttcatcattctcatagcatagtagccacactctacattacttagttagttggtgaggacactacaataatttgtaatttaaatatttacattaataatttattaaaaccttaaattatcattaaaatttatatatacttactaggtgctctttgatacttaaattttttgggatctccatgctccttctcagtctgtgccatatgcttccttgatcgtttttagaattacaggataatttgttatgggtgcattaacggggtccaagtaatatacgtggtatgtctcaggtaccaatatagcacacacccaatgcattctataagaaaaataaattatatacaagtaaagaagaagcgaaagggctattaatttgggagttttttttattattatttttaagagacatggaagaaacaacttgtctcatgcaagttcagcctcttttttatgcttctacttttgctactaccactctattaaacaaaatactagactacaagtcgaaaactactactataacattcaaccataaatctaaacaaagccttggactttgattaactcattttacgaagaaaaaaaatctcagtataatctctattgatatatgtacaaagattatgttgttcaaggcttcctaaacaatcagcaatctcaaataaactttcacctaaaacacacttaaataaactcaattgaataaatattttttttctttttcttttttcattaaatatggctgaaaaatatttttagacaattagtaaattgtcaaaagcatccttgtttgagctatcacttaaaagttattttaggtgccattaccaacttggtaaagggtgattcttagatataactcatctagttcaagtaataaataaatagaaatttagactatattgccttcatatcaagcttatacaaaatagaatcaattagatacgagacttccaagtttaacattaccatatcaaaccaatataaattctaaatggaaatccaaatgaaaaaacattgaatatcaaaagttgcaaaaaatatttagtttcaacttaactgtgttgtaatacatcataacgcatttcaagttgccaatctgtcataatgaaacaatgaaatatttagcaaaataaacattactacctcaatctcggtagccttaaaatcctcctgaagaattgattgcaaggcagaagttgcagtctgcaaaatttcaataattagacacaatacaattctataaatataagaacat

SEQ ID NO: 259423 - DNA, 750 bp, Cannabis indica
agctcgtgttattagggacacacactcgcgctttaaacaatatcgttccactgtcagagattgagaaatccttagctttgcctgctaagacatcttctcgaatcttaaccaattcaggatcttctaattaagccattttgattctttccaacaagtctgactgaagtgtcagattatgcaatttctcagtcaccaactcaatgtttgccctagacatatctgcggctaactgaggggagatcattaccaaattaaaattctgatcaggtccttttcgacttaaggcatctgccacaacatttgcttttccaggatgatatatgattcacagtcatagtccttcaccagctctaaccacctcctttgtctcatattcagatccttctaagtgaaaaagtacttgagactcttgtgatcagtatagatttcacacctttcaccatataagtagtgtcgccaaattttcaaggcaaacaccactgctgcaagttctaggtcatgagttgggtaacgctgctcataatctttcagttgtcgagaagcgtaagctatgactttatctgcctgcatcagtacacagcccaaaccctgccttgatgcatcacaatacccacaaacttctcttgatcagatggcaaggctaaaacaggagttgtaattagtcgatgcttcagttcttgaaaacttttctcacacttatccgaccatataaaccactgatttttcttagttaactcggataacgacatt

SEQ ID NO: 259424 - DNA, 973 bp, Cannabis indica
attaggaggagtagtagtgatgagttggtggtggtgagtattattatgattatgataaacagcagcagcagcagcagctagttggtgttgttgttgttgaagttgtttataaagctttctcctaagcttttgtctatctctagccttgtgattttgaaaccaatagaagacatttttgccttctatttttccataaaaggagagatgagctgtgatttgttggatttgagaggcattaggtgttcttgtcccagctctgtacatttcttcaagtatcataagttgttctggtgttggacaccatcttgatgttgatgatgaagaatttggtgctggactcataatatttctcttttcaattatttcatttggggaaagacaaaggtatataaagctatatatatatatatatatataagaagtgagagtgagagaggaagttattattaattactatacaagtagtactacttgcttcatatatatatatatatgataaaggtgagattattaatcaagaataatcatgatgagtgggagagacaaagagaaggaaaaaaaagaagaggttaaaattaacttattaaaagagagagagagagagagagagaatagtagtatagctagcaacagttttgtcatgctgatgcatatgtctccctctgagaggcattcaattctaggggtttcagtccttcaattattattcattataatgccaattttatttatttattttctatcaacacaacacataatatatattatattgagggagatatccaaaaatgctaacggatggtaactggtaactaattgtaaggtatatcatgttggtgttataaggggtgttcatacaaactaataaactaaaatccaccattaaaccgacctgaccgtaattgaatttttggttctacatgctcacagaatttggcagtcggtttcagtttcggttttttttaacatggcg

SEQ ID NO: 259425 - DNA, 671 bp, Cannabis indica
tagagtccaaaaaaaaattgtcacttttaaatacagaatcaaataaataatcataaaaattcccataataaactttaatagctcttacttagatgcaaccagtataaagaaaagaaataaagcataattacaaatgtttcagtaaatataaatgattactcatttttaaaaatcaacataaatataccaaagataaaccaataaagaaatctaactcaaattgaatgacagttaaattattagaagaatagaacaaatagcattgacacaacatacaaacactcataattgtgagaaatgactataaagcttcacatatacaagtacggagtaatactatcaaatgacttttatccaatcctcattagaactttgtgtctaaaaaataataaaagttgtcactttaatataaaaccagataaataaacataaaaaaccttcataataaaacccttacttagaagaaaccaatacaataaaaaatcaagcataatcattattgtttgtgcaaataccaaagattactcgttcaaagatcaatacctaacaataccaaacatttcaatataacaatgaagatgcaaccaatacagtgaaaagaaaatcaagcataattatgaaataatgcgtgtgtttagaaataatgtaggtgtgtgtatggaaataatgca

SEQ ID NO: 259426 - DNA, 876 bp, Cannabis indica
cgacgtcgggggcttagtcacgatgaagaactgtcggaaggccgagctgatcctgccgcaccaatcagtggaggactctaacctttctaaggttatctgtccgaatgtgagggttcctgccgcggagaagaccttctgggatgagcttattgccatcgcggagaagaagtaccaggagtacctctaccggaaggcccaagagaaggcttacaccaaggcccaggcggcttttgggaggccccttcgcgtggggagctcggtcgagaggagaagccaaacgattgccaggaagtcccttcgcattgggagcccgattgagaggtgggctcctaggccaaagccttcggttcaggtgccgaatacaggggctcctaaaaatatagatataccatttgaaccatatcgtgttcagcattaagtcgaacaacatcctaaaaaatttatacaaccaaacaaaccaaaatattataaaaataacaaataaacaattaaattgcaataaaaaataatccaaccataaattatataaatataaaacaaaaaaagaacaatatcacaccaaaatgaaacaacaaaaaatcactaacagtcctataaaaatatgacactaataaaaaaaaaaagacaaccaaacagctaaaaaaataaacaaacagttctaaaaatactaaaatgagccaacacactaatcaataaacagttatagaaatactttagaataataattgaaaaaccgtgtttttgcaaatgtcaattatatataagaaaatataaaacagtatgcgtctgcagaagcagaaagtaattctgctacagcaaaacagaacaggcagaatataaaatatttgcggaaaaataaataacttgacacaagag

SEQ ID NO: 259427 - DNA, 1201 bp, Cannabis indica
gaaaggatacaagggttagagaaggttaactttgaccaagtctcccaaatgcaatgggagttggcgcgaggaggagaattgtgcatggaatttggaagagaaggttttccatgaactaaactttccaagagccaacttgaaataccagtgctgagcggcttccgacagagtggcagggaagattctgccgcatacatctcctcgtaccccttgcaaatccatttgcatttcgaattacttgagatgggaaaggtgaccttctctccaggtgtacatattccatgttagcattttgaacttgtggggcagtggcaggagattgatctccggtgagaaaggagttctgcgtgctcggtccagctcaacatcattgtttctttgtccagccatgctgtgaaacatattttgtagttcgtctagctgagcctgtacggctgggctaatctgctcggcattctggtcaatttgattacattgcgagattgtcgtaacattctgatcgtctactccccttcttctgttcagatcattccttaggtcatgggtttcgcctaacctttcgaacacaaaagtgcctggctgcctcagcgattgatttgcttggttgatgggtggaatggcaccatttatctggttggaaccattaggtatgacttctcccgatgaattactagacaagctctgcacgcctactgcttggcccacatgtggaactcgtgactggggattgggcggctgaccattttgcaatctgagaagcattcattgctggatctttgtctgtttcacccaggggaatgacgttcggcggctgctgacctacagtttggtaggcttttcgtatcagcacggtgagcccttaatgcctccatctctctatgtctccattcggtgaacatacgcctttgttcatcgaacatgagatttactgcagcacgcagttcgttataatcatgatgtagggtattgttatgaccctgcatgagtccgagagcgtcacggagattttgcaattcagtggcatctctgatggtcgtctgggcgttgggtccaggcgacacagttgtgttatgaatgcccttgttttgtgcagaactgttattcccagtctcttgcacaccaggcgcaatttcatctataggaactgtcacaccattccacacattcgccggctttctaggattaacagctagcgaaaccc

SEQ ID NO: 259428 - DNA, 937 bp, Cannabis indica
aaaaaaaaaataaagtgtccaccataacacattatttttgtatcaaacaatcaagttttataactttagaacaacaaataatggaaagatgtgaaagaaagaatattggtggagattacatagtcaagataaatcaaataagagagtgactatatcttatggaacgagaagaaacccaaaaaattttctatgatttacggattttgaaaaatcatcaaaaattatttttaataattttttaactgcataattatcattaaaataataataattattaaacggcgtcaaaaaattaattaaaaatcaccaaaaaatcagaaatcaaattctaataatgctggaaaaaagaatcgtcgaaaacggagtcacgaaactacctcactctctctcactctccggcagccgcgagtgggcttcgtcccagcaggttgtcttcaacctccagcagcctcctatggctgaaaatgggtttgtgcgacccggttcagacccgagcgggtcgggacgaaattccggccaaaaaagtgacgaaacggacgggaaaaagagggattttgattggtttacaatttctaatagatctatggtattaatttcatgcaacaacacataaacttaggtagatctaaattaaaactaatccaaaaactaaagaagcaaagtaacccgaaaatttgatccaattcggaaattaaacttttagaaacattttaaatcaatgattgatgagatatgcacaattaatttcagattataatcaatagaattaaaaaacacaaaattaatttcataaagaaaatatataaaccctaaaagtttaatcttaaaattctcctaaatcactcaataattttatgcaaataatatatcaaaagaaagagaatttaatgaggaataaaacccctaaacttttaagattgaaaaacaaaaaattcaa

SEQ ID NO: 259429 - DNA, 903 bp, Cannabis indica
ataatctcacttcaaaattacaagggtagaaatgaagacgttgtcataagttgctacagcgtctcattaaattggtgtgagaagagtaacaacggcctcaatcttaaagcttgggataatatctatctccctaaattttgtggtggccttagtttccaaaaaataatgaaaatgaataatgctttcttagcaagtgaggttggcatctcattaatgaaagtaataattctttttgttgtagggctctcaagggtggctcctttttatgatgcaagtccaagagcttgaactcgtgattttggaagaatgatgcgaaaaaaaaaactttaagcaagggtgcttgtaaatttacagttaatggggaagatatcaacatttcagaagactcgtgggtggcccatgggattttgtatgtccaaaaccgaatggcgagcctcaggttagcctgagtactgtgcactactaaaattaggtttctccaatagcttaaatagtcgactaatgtattgccatcagactctataattgtcggctattcgaccgtctcaaaactagataggcggtggtggaaaatcatcgacgaaaaaacttactaaaaaattaaaactgtcgacaatagtgaaaactatagcttacagttttaaaccgtaaactatagtattttagcattttcctcatcttctgcctcttaagcctcccatactcctcatagttggacattaagaacacgacaaagaatcttcgaaagaagattaagcagcggaatcctttgattcaactcttgatttgtagatgcttctaactacaaacaaaaaaactcaacaatataccaaaaataaataattactttttttgtaatcttctttataactttttagtcaattttggttgtctttttttagg

SEQ ID NO: 259430 - DNA, 1299 bp, Cannabis indica
tttcacccatcaatgtattttatccttaaaatacttagcttccttaaaatgatatttcagtaaactaatataatcattgaaataagaggtcttctgtttatctctattaagctaagctcaaaggaaatcatcatttcacttttatgtctagatagaagctatagagtccatatctatgaatagcgctcccactcaattgtactatcatgttcccaagctgtacgtgtgacccgaaccaaatagtaagttttgactaacaactttaagaacacaaataacactcttgagatcgaacctaaccatgtcaggattatgttcttttgatctaagatcaaccagtgatattgacttacaaagatacaacgataagattataatatctttaccaagatcaatatcggtcacaatccaatgtataatccatacatctgatactagcatactttgccaatattctggaaagaatataacacttatccaaggtgtaagtaagctttatcgttgactatcacatcactgtaaatccagtgcactgatgaatcatgggacattatcttttgaagcatataatcacaattaccttccactgtgttgacatcattgtaattgtgaatacctatatctttaggacttaacataaattgtatactttaaatcataaacatgaaaactacatgtaaccataaatgatatctaatcttctattgataacaaatcagattatattgaaataagttttatttagggcataaaatcccaacacgacaatgataaaaaatcaagatactgctataacgtttataaagatcattggtatgtatgtatgtatgatgacaaaaatgtaccgtcatcgtagtcccagctagcttgtttactaaaaccatttgtgcgaatggttacaattctatgagggctagtatcaaaaatcattctcctcgttactctaacatcgttccaaattagtgaaggaagatttttgtcaagcacatatctctttgacacctttaaaactatttttacacgtaaataaatatgcatactttttaataccgagttgtattaacattaaactattgttagagaagttcatgttattagtgttttgagttgttactacctagtcactgttcttaagcatgaatatagtgagtgttagttaaaattagttgtaggtggtaagttatgtgtataccttccttaaattgtaatcagttctccatgtagaataagagtaatatatgactcttattataaagaaggtaaactaaaaaataatctcatgacaactataatacaact

SEQ ID NO: 259431 - DNA, 805 bp, Cannabis indica
tttggaagcatttgtattgagatgccaagagcatagacgacgtgtaacatttggcatgtgttccataatggcctttttcatggccacatcttggtcagcaactacaatatttggcttcttatctctatggcattcgagaaatttttgaagtagccaagaataggatggaagcttctcatggaggaggagagcaaacccaaagattcatgtgttgaaatggtggttgacgccaatgagaacagtgagaggcttattgtactcatttgtcatgtaggttgtatcaaaccctagtacatccctaaaagccacatagtccacacgtgagtttccatctgcccaaaataagttagccaatcgattctcctcgtcaacctgatagacaacgaagaaatttggatccttctttgcgagacaatcaagaaatcccaatgccccttctgaatccgtccctatcttttcttctcgcttagcaccagcaaccctattgtacacatctcaaagttgacatggcattctctcgtaacctcccctttgcaaagcaacatgatgttgggaatattttaccaagatctagatttactaataagtatgttgaattaacatcctaaatatgaattctctaaaacaatgaaataaacacataagggtttaagaaaaccttacattgattgcagcagaaaataatgactccttccattcaagatctctagcccttgattcctttctgtagcagagcattatcaaaatctgaacctggatctctttctctccttcaggtttggttaccaccgtcttactcactatg

SEQ ID NO: 259432 - DNA, 4294 bp, Cannabis indica
aagaaactgtgtacatgaagcagcctgaaggttttattaatttccataaaccaaatcatgtctgcttgcttcacaaggctttatatggattaaagtaggaacccaaggcttggaaggaaaagctcaaaactacattatttcaattgggtttctaagcttccaagtctgatatctctttgttcattcatggtacaggggactcattagtttatctgttgctgtatgttgatgacatacttctaacagggtctagttctacagttattgctcaatttacacataaactgaacatagcattctccttgaaatcctatccattattttttgggagtggaagtatacgaagatgccacatgaatgtattttagtcaaaataaatacattactaaccttctcactaagctacatgtggaaggagctaagagctgtcctaatcctactagctcaacatccaaattaagtttgaaagatggagaaccttttgaagatgttactctttacagaagcacattaggagcattacagtgtttgagtctcacgagacctgatgttgctttcattatcaataaactaagtcaatttattcatgctccaaccacaacacattgggaggcttgcaaaagctttcgtaggtatctcaagggtaccttctctaatgatttgaagctccaagcatcaaacactaagaatctacaaggcattgagccagctatattgatgatagaagatctagatggagatatgtgatgtttttaggcaataatagagtctcttggtctgttaaaaaatacaagttgtgacttgtttcagcactgaaagcaaatttcagtctttagcaaatgtacttgctgaacttctttggattactttccttttgaatgaactttcgatccctaattcaaccactggtttaatggattgacaatcaaagtgccacaactttgtctgccattctagtgtttcatgccagatgcaaacacattgagatttatctacattttgttcgtcattaaattcctgctccacaactttcattacgttatgttccttccatagatcgaattgctgatgcacttaccaagcctttgactactaatcattttaactaccttaaaagcaaacttcaaatggccccttcgccatttcatttgatggggttgtaagctaataatactaatgacatgtttggtttgttgtaattattattgtaatagaatcatgattacaattctaatgtttggtttacctttaaactcttgtaatgatattctattgtaatcactattatatcacttgtatgaaaaatgattacactcctatatctcatgaatcctcattacaattacttaaaatgagtatcttacctttattttatacattttcttactaaagtaaagataattttttcaatttactacctattccaaaatttattccaataacaaaacaaacataacaatcaattcctattataatttttatcccattacattactatcactatcactattacaattacaattccattttctgttaatttttctgttttgctattatgtactgttcaataagtataaataagatgaaggctaactaattggttaaatttatttggcatttctcttatttctctaaatgctctacttctctcttatgctctgtattttcaaacacattctatttttctattgttaagttttacactaattaacaaaggaaaattaaagatatcaaattcgatataggaaaacggcagccaacatttttgttttttattctagaaattgtataagataattaacaaagaaaaattaaaaaaaaaaaatcaaattcgatacaagcataattgaaatgtgagcctaaatagtatctaaaggtgtaaattgataataatattatctctatcttaatgtaaaactaaattacaaattagaagaaaagtttcaacttgggatccatataattagattaaataataagccgttagggcactaattaacaaaactgtaatgtgttaggaagaacaagaatgagaaagaatgaaagtgtgtatattattcattcatggaaaatgtgagcatcaaagctctataaatacaatcgtatagttaggttgttagagaagaagactaacagaattagttatagagaaagttgtactaaagaacaaaaataactaacttgtcctaactaacaactgcacagaaatgcctaactaacatcctccctcaaactgagattggttaagaaagccatgctcagtttctctcttagaagagcaaatcaagtagacgaaaaagccttggtcaatatatcaacaagttgatcttgagtagaggtgtgtttgatagaaaacttattgttgatgattctttctcgaacaaaatataagtcaagctcaatgtgttttttctgattatgcagaacatgatttgcagacataaggagcatgctttggttgtcacacaaaattgtaggaatagacaaatgtgaaagaccaacttttgctaacaaagattgaagccaaaccacttcagcagtggcattcgcaaggctacgatactcaacctcggtactagatcgagagatagtcttctgatttttagagctctaggaaatgagattgttgtcaaggaatatgcagaaaaagttgatctccgatcatcagagtcacatgcccaatcggcatcacaaaagcctgttaaagacagagtatagcactttgtcaggtgaagaccataatcgagggtgtctttgaggtatctcaaaattttcttgaccactttccagtgagcttccaaaggcttgtgcataaattgagataccttgttaactgaataggtaatttctggtttggtgaccacaacatattgtaatgcccctacaatacttcgatattgatgtggatcttggaaaggatcactgtcataggctgagagtttttcacctccagtcattggagtaggcagaggattagcgtgcataaattgagataccttgttaactgaataggtaatttcaagtttggtgaccacaccatattgtaatgcccctacaatacttcgatattgatgtggatcttggaaaggatcactaccataggctgagagtttttcacctccagtcattggagtaggcagaggattagcacagtccatcttggttcgaaccaggagatccattatgtatttggtttggcacagatgtagagcatcatccaaccttgtgacatgaataccaaggagtctaggggacctatatcttttagagcaaaagaggcattgagatcatgaaccagggtcgatataacctgactagtactacctatgatgagtatatcatcaacgtagataagaatgaattagtatgtgaggtagtgagtcgagtgaacaaggattgatcaactctagctgaagtgaaactaaaagagtaaagaggagtcttgagtttgtcaaaccaggcccttggggcctgttttaatccataaagagtcttgttaagtcgacacactaaatgaggattgcttttgtccacaaaactacggggttgggtcatataaactgcttcagtaagctccccattgagaaaggcattattaacatccaattgccttatttcccaaccatgtgaaagagcaagtgtgaggatgaccctaatggttgttggtttgactacatgactaaaagtctctgtgaagtcaaaactatattgttgcaagaatcccttagcaacaagtcgtgcgttatacttggaaatcgaaccatctaaattttcctttagtttatagacccatttgcaactaatttctcttcttccaagaggcagagcaaccaagatccaggttttgtttttaattagtgcacaaatttcatagttcattgcagcattccaattggaatcaagtaatgtagctgcaagagtaaggggttcttttgagagcatgggcactgtggttttgtatgttcatgctttaacttgagtcaccataggatgattatttacaagtggtgggggtagggaagagatgacagttgttgacttggggaaggctgagaagtaacagctggtgtggaagataagggtgaattatttatggcaatagttgggatgggaggggacggagcagtggggataggtggaggttatggaggtatatcggtggatgtaggtaaaggaggttggtcatttgtgggttgtataggctgagagattgtggtggtagtgttgttgttggtagcagatatgggtatagtacattgtgttggaatatctttaaccaggacctagatttact

SEQ ID NO: 259433 - DNA, 5844 bp, Cannabis indica
taaatatatatgatgaaaaaaattatttattaatcaatttttgaaacaactaaaatatattatatatatttcactatcaaacatatattgaatggaatataaaagattaaaaaaaacaataaatagtaaactaccataaattggaagagattctaggtataaagaggtggttcattaattaaaaaataaataaactgaaaagaatttaaattaaaaaatgataaaaattttagtttttatttagttgggccctgtgcaattgcacagcttgcacagggttaaagccgatcatgaatattattattagtgtaattaagtattaagtttttataatttaatttaataatcattatagaataattgtagtaccacctctaaatagtatttgtactaatacataataacaatgctgttttataaaaatattgactcattttttgaaaataaatttaaaacaaagtttgacacattaaggagtttgttaccacatgtcgtattattattggtaggtaaaaacatcagttaacagtaacaaatacattacaaatagaagaaagcggacaaccaaaaataagcaacgttagaccaaaaaaaaactactcacatatactaacaaattacgtatatccaaagagaagagaaaactaaatataccacctcatgttatcacatttagttttaagttttgtcaattaatccaatcaattcagttagcggtgctatatttggtctgcgctgtactattaattattatgactaaaatgtagttgaaaatataaatacaaaaattcaattttgggtcttagaaatagttaatacagatcataggtggggttagaattagaatcccaaacaaaaaataacagaagggcaaagtgtgaaaccctgcgtatatataaacacatcaaaatgtgtaagagtgaaatcattaaatacatacacatgacaaaataaaatataagagaacaaaccaaaaaggcccaaaaaaaaaagagtattggttggtggttacgtttattaaagagaagaaccaactcatttctcattttcccactatatcttcctattcttgctccccaaaactaaaatttcaaaacatatagctctctatttcttcaaactcaccaaataggaagataaacaaaaaacaaaaataatggccaaaattacatccaccgttgctaccatattcttcttggtaatgacttgtgcgtgggcgcagcaggccccagcgcaggcaccgatggatgggagtatggggccaacggcatctgcgccggggcctgactgcatgaccgtgttgatggggatggctgactgcctgtcttacgtgcagacaggcagcaacctcaccacaccggataagccttgttgctctgagcttaagtcattggtggacaataacccaatatgcctttgtgagtttttagcccatagtggtgactctggctttcagatcgatatcagtaaggctaaaaagcttccttcagtttgtaaagttgatactccacctcctagcacctgtgcctgtacgtactctatctttttccccttattattagtttattgttttatttgaattaaagtaaaagtaatataatcatgaaattagagtgatttacaaaaaaaaaaagaaaacttttggatacaaacattgaaggtttgcattaattatgtttggtaagaactaagaagtaatatttatggtagtttcttgtattgatataaattttattagtattaattgtttagtggctgtttaacattaatttccacatagaaatggaatatatttagttaagaaaacaccaaaatttgatcagtattatttgatttattagatctattcaatctaggcgagttttgcggtcttgtgtttgttaattactgcaacacacaaataacattttcttttaataaattaaatatagtaaatataaaactaacaaagaaaagaaatcaaataagtgactcaaatgcacatgtttcttaaaatgcatagattttaaagtagtttaaaagaacacatatatacgtaaattattaccctatttatgtataatgtttcttaaattaggattattataactctattgtcgtccacataaaaacaaaaaaaaggtaattgttttgatttttggtttttggtaagaacaaaaatagtaatatgtatgggcccatggagcggtgtgtagcggtgccccataactcaaatctcaaaatgtataggagaatgaataaatgagctgccaactgcctgtgatgaaagccatgtgtaaatgtatctatatatatatatatatgttattatgtaaaacacttgtataatataaatgacctcacctactataccattaccagcttccttatatacctctttttgacatttaaggagggatttactagcttttctctacttccaaccaaatttttaatgtttagaaccaccatccttaaatatatgagtattagtattaagtattagtagtgcctcacactttcttgacatatcgcgttgcgattggctagcgatattccctaaaaactattacattaaattatatgggatctgatacttagttagaccaatagcgatattaacacataagagggtgcgaggcaaccctggtgcctttagcatctctctaaacatattcatcaactaaagtaggaaatgtttaactttctatactaaaaaaatagatagaaaattttctaaatataggaagttcttattttttttaataaaaaatattgttattttataattattttatttatatttaaaaaatttaaattataaaatattattaaaaataacgctttattttaattttttaactatttcatgtttatatataataataataataattttattttaatttgacagtggtgggaataccagtgggaagtccaacttcatcagacggtccaagcgcttcatcaccaagtacgtactcaaatatatttctcatttataaaattaaattactttttctttttctcatcccttatttattaaatacctaatatatcaacctccaataaattaatatttgtgagtttttatggtaggtgttggcattaattatgtaacaaaaaagtgtacaattgttatgaaaattacacggatttttaaaatatgatctcttttatttttcaaaagtgttattttataagaaaaaatagtataaattgttactttaaggagttaagttaaccattaccatttttttttcatttttttttttaaaaaaaaaatctttgtaaattttgccccccaaaaaaccataaaaatgaatgaattctcctttagttaatggtttttttttttttttgagattttttcaaaaatatacaaaaacaacaaaaaaaaagttacaaaaatacaattttatagaattttaaatatttttacgatttttttaattttatttatagaaaatacggtatttttatattgtactcttgttaatttattattaattttttattatctgtatgttattttttattattgttttaatgttattttcatgatacttttatgtagtttttttattatttttatgttatttttatagaataccattaaaatgtaaaaatgtattttttttacaaagaaaatagtgcattatgtaattatatatctttttaatgtagtgggtacagttagtggtcctacagctgaatcgcctggagccacaaaagatgatggaaatagaggttcaaccagctccattgtagcagtgcttcttgggtttgcagtcaccatatcattcttttcttctatttgatccattttaattaattaattgttatgtgtttgtttgttatctttaattactatttactttcattttcaatatccattgttgggagaccacataattcatcacttatgtactctttgtacccagaattataacatttatataatatgtgtaggatttattataaaataatttattatttttccattcactctcaagtcttaaatctcaatgcctttctccaatgaaaacaaatctactgtctactttatgcactaataaagtaaaattattagacttgttcaaagaattgtaaattcatcaaataattttgttcaactaattaagttgctgaatacggcaaggaaatctaattacatggtttgtttgttttttaagaaggcgtttgtacattaaaaccaaaaccagacctcgttataaaggatattatctagtatagaagatagctcaatcataccggttatactattagcaaaagctcacttagccacgtcatatatagcaaaattacataatctaggaataaaaaaaaaattacaacataacaaattagtagataaagttttacaatgccgcacatagttgtcaatcccccagctagaacaagtgcccttcagagtcttgataactgtctcggaatcactctccactagaacaaaaggatgatacaaaaagacagtcgtctccacggctaacagacaagctgtagcttcactaatgagaggatcagagaagttgagcttgtttgtagccacccacaaaacagattatttatggtctttagctaaagccacaatacacatggtgtcgcctccaactttaacatcacagttgatcttgacccaatcgagtggggacggggaccaaataggtgtcaaaacagcctcagaagaggaaaatagacaggactcataatctgcgtgacaaaaagatatagagttgatacagtgcttaatgtcatttagaaaattattatgaattttgtcattacgcacctgtcaaatcgtatcaaccacaatcaaagcgtagaagaatagcttatcaccatctacccctttataacgtaggttccacaaaaagttaacctaatcccaaacacgagcacctgattccacactggcatgacccctcaagaggaagatcgccatagatgaaaagcaaaattgcaatagagaaaaagatgttccatcgtctcttctcccccccccccccccacgagagggcaagggaccacctcaatatgcattctattagcgagacctgctcggataggcaacacatttgaaaggatgctccaccaaagaagtttgtgccgctccaacactttagaattccaaagcttattccaaagtgtcggtgccacattgcaaaaaggagctcgttcaagggcttagacaaggtaggcagatttagtagaaaataaactatttgactctttcgtccagacacatttttctttccccttgccacgaggcttgccacctttgatgatgttattgatcgtttcctagtcaaaaaggttatgaagcttagaaatgtcccagtccccattgggtaagagtaggcctgccaccttcctcaaaccctcttggggatgagaattaggtttaaggtagaaatccctaccatgaataatccacgggtcatcccaaaccttcatctctttttcgtctaaaatcagtttgcaagcccttttcttaataatatcttttgatcatacaatattcttccaaaaccacgaatctgagtttttaaaatcacaatctaagaactggcaacctatgagagggttggccctcaacacccgacaacacagtgaatgctcctcattaaggagatccaaaccccatttggccaataacgcctaattcatctccaaagacttacgaaatttaaggtcgccccgagattttgaaagacataggtgatcccaagccttcaaacagataccgcgattcccttgttcacatccccaccagaaatctcttaacatgatatcaatcttagatgcgagtttttttgacagctttgttgtctgcatcgtgta

SEQ ID NO: 259434 - DNA, 7085 bp, Cannabis indica
tttcctggaaaattctcacgacattctatacccaaataagtcttttctcaaccaaagaaatatatatttatataaaagattcctattttatttcttttttcgtcgtgaaagaagagcaaggattttcttgtttgtttccaaagaatatattttacttttttatttttaatttgagtgatatttgttcttctctgagctgggtttgtttatttttggataaccagtgacaaatcttgattttggaggggaaaaataaataaataaataaataaataaaaatctgggctttgtgttgaaaggttctggtgtttcctattttgattttgttgttggaagggaaagaaaagaaaaacacatttggggtttgagggaaaagctcaagattctgaagctgtttccctgacattgacatctgagataggggtttagtgtaaaatttctgatctgatctgtatttcatactgttgctttgtgatttcttatatacaacagtgcttttgtccaagtaagtatatttatttgaagtggagttttgagtcttgcttagtttgggggtctggatttagtttgtactgtattgggactcagtttcagtattttggtggtcatttgttttcaatttttgtttaattggattagcttttttgaggttctggtattctggttcaaagctaggttgagaggttttttgatatggggaagcaaagtgggaagaataaagaaaagttaggtgatagtagtggaaagcagagcaaaactggggatagtgtctgtagcccaaaagcccatgataaggacactgaagtattcatttccatggctcaagaattgaaggatgagggtaacaagttatttcagaagagggatcaggaaggagctatgttgaaatacgaaaaagccctgaaacttcttccaaagaatcatatagatgtgtcatatcttaggagtaatatggcagcttgctatatgcaaatggggttgggcgagtatccgagggcgattcatgagtgtaatctggctcttgaagttagtcctaagtacagtaaagcgctgctaaagagagctaggtgctatgagtctctgaataggctagatttggctctaagagatgttggtagtgtcttaaccattgagccaaacaatgtcatggcattggagattgcagaaagggttaaaatggcacttgaaaagaagggtttgaaggtgagtgatacagtaattgagttgccgccggattatgttgaaccaccaatttcattgcctccacaaaaagttgcgaaagaaaagttgaaaaagaagaagaagagcaacaaagttgtggataaaaaggctgtggagtttattgaagataagaaggtagaggataaggttgatgaagaaaaggctgaggagaagaaggctgaagacaaagttgttgtggaggagaaaattagtgtaatggaagcacctaaaagaagtgtaaaattggtttttggggaggatataagatgggctcaggtgccagtaaactgcacactcatacaactaagggaggttgtctgtgaccggtttccgaattcaagagcaattctcattaagtatagagaccaagagggagatttggttacaattactacagatgaagaactgaggtgggctgaaagctcaggagaatcacaggggtctgtcaggttttacattgtacaagttgatcctgaacaggacccgttctatgagaaagggaaggatggggaagatctgtgcatacatggttttctggaaaatggtgtagctgaaaatggtaatgtggatagaggaaaagaaataaagaggtcgtcttgcattgaggactggattatccagtttgctcagatgttcaggaatcatgttggatttgaatctgattcgtacttggatctccatgaacttgggatgaagctctattctgaggccatggaggagacagtcacaagtgatgatgctcaagatattttcgaaacagctggaggcaagttccaagagatggcagctttagcattgttcaactggggaaacgttcacatgtcaatggcacgtaagagagtgtattttacagaagatgcttcaaaagattcagtactttcacagatcaaaactgcttatgattgggcacggaaagagtatatagaagcaggaaacagatatgaagaagcattgaaaatgaaaccagacttctatgaaggctatctggctatagggcagcaactgtttgagcaggcaaagctctcatggtactatgcattaagcagcaatactgatatggattcatggccttctacagaggtactactgctttacaataatgctgaagaaaatatggaaaaaggtatgcaattatgggaggaatgggaagaacaacgcttgagtgaactctcgaaacaaaacagtgttaaaattgagattcagaaaatgaagttggacacactttttaaagatgtatctccagatgaagcctctgagcaggcttcaaacatgaggtctcagatcaacctcctatggggcacaatgctttatgagagatctatagtggaattcaaacttgggttgcctgtatggcgcgaatgtttggatgttgcaattgagaagtttgaacttgctggtgcttctccaacagatatagctgttatgattaagaatcattgttctaatgatggtacactgcaaggtaatttatttgctctcctcagaattagactacttgtgtggcagtttaacaaattaattgatgtttctatatggttcaggtgtaggattcaaaattgatgagattgtgcaagcatggaatgagatgtatgaagctaaaaagttgcttagtggaataccctcatttcggctagagctcttattcagacgaagagtctcaaaactttatcatgcattggagcatttatgaattgatgattccaagttctgtaaaatgtccctttttctgactcaatcgcctgaaaatatgaatcctatgcatactgaggtatgtaacactgacatttgtttatgttttactaatgagaaatgctaaagagcatccaccatagggtacccaacaccatataccattagcagtgtaaatgaatatttgaaagcatcataatgtaaccccgttatgaacaacaataattgaagacttttaagggctcctcactttcaagtagttcacatcattgattatgcttttgctcatttcatttgcagtctcgtggtagctataattctgctgatcattagctttttctcttatgcaggttttcttttgttagagatacctccacagtgaatgctctcccacttaacagtgaattatatcatacaatacttgattgaagactagtatttcagtttcatttcttatattttgggcacaagatgaagtcgcgggttatttcattctgccttcactttagttttgccttcctagatttacagttacccaacaatgtcttcttcttttttttttctttttagaagaatttcagtagttttagtcatttgttatattcttcttccttttggtttgtaatttagtgtttgatctcagttcagtgtgtaagttatatcattttggtttgtagggtgatctttggcaaaagagaatgtattgaattaattgatcttttgttactattgtccttttttttaataaaaaagaaaaaagaaaaaaaaaattctacctttaagagaaacatttcaggtgtggtgttagctgaattgcttgagaaacttatagaagtttgctatgttgtacaaattcctaccttattaggtggagcctcatgctttgatacacctaactaggctaaagagttgaaatgtgaccttgatgcacgttacacaagcattgaactttttaaagctttatttttggttaaatagtcataaatctaagctctttcatgcatccaaatctgacatctctccccttacataaaaaaaaacaactctgacatctctccaataaatatttttttaaaacatttttgaagcaaaaaaatatactaattgctcgtaagatcttgtaagcccttcatttcataaagggtttgaactttgaagacttctaagagcatccaaatcttaaagcttttgtcactcttttcattttctttgagaccaaagtataaatctcaaggcttcctacttctctttggtctctttatattaagagcatccaaatctaaaagttcttgtcactgtattcattttcattgagaccaaagtataaatctgaaagcttactagaaatttgttgaaaattaacggaacgacataccatatatattcccaatatattatatataatttattgtcatgccaaacaaaatcttataatgttttgactcggaaaaaggagatgagtaaaaatgtattaccaacgatttttttttttggacaagaccaatttcatatatatagaaaaaaaaagtgtagtaataatacatcatctaaaaatgtgcaccaaattataaacaagatgagaaaattttgcaccaaatatattcaatcagccacacgtagtagcatatataaacatatggttcttaaagaggagattcaaacaaacagcaaacactatgtacttgcatcgaaatttaggccatatgtacatttatggttaacggttttctttcccatatataccataataacccttttttgcagaattcataaacctgtacaaaaagctatgcaggtccaataaatagctaagactatttacagaggaatttccataaatgcttccaacctattccggacggaagctaatcagattagggagggcaacacactgaagaatcttgatttcagatgcagttaccttgcaagactccaaggttagtgatcttaaattcttcagaggttttaagtgctgcaaccccgcattggtgacgcgagaattcgatacgtttagagagactaatgtggttaaccctgcaattggtaagaaagatgagaaatttagcaaaattacaaagaaaaaaaaagtagatatctagatgatcacttgttccatctaacttagattacacatagaaaaggttgcagcagcagttatgttttaactggaaaacccgaaaggtaatacagctaaagcttgatcatgattcaaacaaaataacttaacttgttcaagtcgagactttctcattttgcaacgaaattatcactaaaagtaaaaaagaaaaggttgacattgaatggaagcataatcttgatatgggataaaagataccactgatgtcaagtggtagggtgagtatgtgtgggaggtttcaaaccccatatagtactaacaagggctaaaatcaaaaagtatactagagaaaacttttcttttatttttcttggtgccccttctcccaaaattcgatgcatattataatctcaatcaagacctttacttcaaatgattttaagagatgaagatacctgaaatcaattccaaggtcttatttgtcaagtgacagttttgtgacaaattaaggcgtctcagggagacgagatcttggatacttttaacacctgcgtcagttattcctccaccacatatttcaagggattgcagcttcttgaagcctgtttagcacgaaaacatattgggacaacaaaagttagcatatcataacaatatggttaagctaaaaaaaaaatcaattgaagccgttcactatcatcaaatttggagaacacctgcttatgtacttaatggaaccagagttgcacaatcactagcaaagaccataaatatgggtgttttcctgtctactcattagatcattgaaaaagaatatgctaagctaattttatgaagttagatttattcttcgttagctgcttcctagaaaacttagttagatccaagcaaaggacttgtaaattaacaagtgaacactgtactccttgatgttagattatagttaagttttaaattcagtctgcaaacaacttgaactgagaagcttccaacatttggcgagtaactaatgtgcataaaaaattaaagtacgaatatattatgtaaatatataaagcgcatttaatatccatgcatgttatgccaatcgaaaggattctcatgcatgttatgccaatagaaaggacctcgtctaattgacgcaaaaccagagacatgatcatatgcactgactaaacaaaaagggatcattactgcaattcattaacatacatcgtaaatacttcatcccagaatctgtgattcgagccccaaaaagatccaggtgtgtcaattcagtaagatctgcattcacaaagcacccaattaattgactgacattactagcatcagaagccctgcttactcaatattttgaattagaggataagaataaagaaaagagtaaagtcaggagacttaaacttggcctaattttaatcaagtatagagaaaacaccagtcagagaaacagtgggtctagagactctaaacttacactaaaatacttacttgtaagattttcaagtccttcgtcagtaatttggcgtgcatccaagttaagagatttcagcgtagtcaatttcgacaactttctcaaaccaccgtcagttactaatgtgaatgacagattcaaattctccagttttgtcaaacctaaagagcaagcaagaaattcataaatcaacagatgcctttcaaaccatatattctaaacacatggggtccaattatcatagcaacaaaataaatatcaactaaaataacaaactctctcaaacagagcttttgctcaacatgaactgtacaaatcagtactagcgtttcgagaaagaaatagagaaaattagaagcagaattcatcaactgttattccgagaacacagtcaaataagctcacagctgtctcttcacagttagtgactttttgcagttctcatgtcataatattattttgagtatttgtggtcaaacctattaatagcatgaataaatagaattctgacctgagagataacgaagcccattactcccaacctctgtatcagacaactccaaacctcgcaaaagtgtaaggcctgaagaaggaatcaagatacttatgtcgtattttgcaaaa

SEQ ID NO: 259435 - DNA, 944 bp, Cannabis indica
tttaaagaccgctggtcgatcaccttgtcttaaaaggaggcctattggccgaacagacataaaaaaagatagtaaaaggaaagtacttaaacagcaggagtcccaagttctttgtacgagtcagttggatttgaaggagccgaaggattatcattctgggcggaaggagcctcaacattctgatcggtaggagaggtggaagtggttgcctcgggttccccgtaggccgcttgagcagcacagtagtcgcgaaacatgtctttggaagcgcccagataatcaaagtttgccttgggattggccttctaaaagtcataaaatatctcgagaccagctgtctctaaggcattcaccttctccccgagcctcgccacctcagacttctggttcttaaccttagccttgagttcctcctccatagccttcttatcatcctccaacctgcgaagaagagtccagagaccctctctttcgtcttgaagactggtaatgtcccgtgataaagaagcaatatcagcctcaagctgctcggttgatggcgtctcctgcagttccttggtcagctcggcaactttagtctcagccgctagaagtttcttattgacctctcccagctctatccgcacagccccaagttgaaccagcgcattctcggcatcttttttggccaagtccccttccgttcgcattgcgttggaaatggcaaggtttttagcagcagccgacttagctcgggaaaatcttcaaaccagtctgtgcggaaaaaaggcattaaaaatctgaactagtcaaggaataataaaagaaaaatatcagaaaagacttacccccgaaagctctttcaagactcctcccatgaccagctccagagacaagtcattatccgccccaaccaactgttcgttcacctctaggatcgatcggctcacatagtggttgagcat

SEQ ID NO: 259436 - DNA, 2389 bp, Cannabis indica
tcggggaacccaagcactagtcggctgagatgtgttctaagtgcagatgaagcttgtaaatctttgtgtgctttactgatttattctcaattcaagtctaaaattaatatgttgaaatcaaactactcaaagataatcaacttggtaatctgaatcattaaaatcaacaagtaatactttcatacaatgtactgttttactaaaaagaatgatagataaagttggagcatagctcgagatagctaggaaagtagagttgaatgagcatatcagttggaaaagcgcatgaagaaatagagtgaatggatccatgtggaccaattcaaaatagaaagggatcactcaacatgtgttcccacctacaaataggaaaccccatcattcaagaaaggggaaattattgatcacacaatattattcgaaattctaccagaataaatctacataatacacgtctgcttgacaccaaaaattgaagaagagaattacactcgatttaggaggaattatgtaatctagcactaggtttatagtttcaattgaatcaatcctggtgtaaataattttaagtggaaatacaattttattgttgaggtaatttttagcatggagccatctatgggagtcacatgaataaaaaactaaggactaggctacaggtgagaatgagatctaataaagcatcaaaaaatgtgcaaaagtagttgttacatatgaaacggatacaccaagtgggataataaatcctactggtgctatagtgacaaaaatgaaagagataaaccaaaggataaccgcgtaggacaaacacatataggaactgtgatgactgatggaagagaagttccaataggaccatcaatattattatcatcatcaagacatcacccaatgtgtttatgcaagaaatagcatatatgtgtgtgaaggtgaataggacacaaacaccgcacgatgttagggcaaacaagcaatatagatccgctgaggattgaagagagacttctagagcaactatagaaggctaaaatctactagagtacaagagaggaaatgagatactagccagaaatattaaaaatttgatgagaatggcacaaagaaaaaacaataacaactacaaaaaatagagaatccttttctttactgatattaagaaatgttgcatgtaatgatcagacatctacaaaatattttcactagataggtgcaaatgaaaaaaaaaaggagttacacagaataaaataacatagaagtagccagaagttgagatccaatcttgaactctcaatcctaagcaatatggtgatgagtttttgcaatgggaagaacaaatgatgaaggaaatcatggctaatatcgaagaaggcaagattgcagaactagacgatctaaacagaccaaccatgaggaacatagcaaaacctccctttgggaagtggattgttgaagaaccgatgtctaagcatttcgtaatgctaacctttgcaatgttcgatagcaaaagtaatccattagagcacatgctttagttcaaataaagaatggctttaggaaaaataatcttggaatcaggtgtaaggccttctccacaaccttgataggatcaagtggttagtagactagaagaaaagtaaaatagaaaagttcaaacttcacaacatggcgcattagtcacctgctgattcctcatccttctctggagtagtttgagtggaggtaacttctccatcttcatagtctaagaacacagatattctccctaaatactatttgtcattttgaactaagatcacattttcagacattgtttgagacaagatgacagttgcactttcagtttcctcctcatcctacttgagtggcaatttctaggattcatcaaggaagcaagtgttagcatacgcttgctagcaagacattattagtccattattttggagactctcagtattgaatagagttttcccatctatcacccatgtatcactcttaatcaacatggcatcaactctccttctcatgtcaattaagcactcacattcatgtggaatcttcgctattgatatgaaccatggatgctaggataagtaagcacagcactacagtataagtgttctgggagccattgggaccacaagataatagtttcaggaagagagtaatcatctctgattaattgggcttgatttttagtaagagtgttaaacacaagaggtcttaacttgaaagcccaatctcttcgatcatcactttgaatggtggctttacgaagtttagttgcccttaccttctcaccacacattttatctaagttcttagacttgggcacaattgacttagctctaatgaactaagctacatggggattatgttgggttttatgccc

SEQ ID NO: 259437 - DNA, 587 bp, Cannabis indica
ttagttggaaatcaaacctaaaaaaggttgttgctctatcttctacaaaagcagaatatatggctgcaacagaggctattaaagaggcaatttgctcaacggattgacaagtgagcttggcatcaattcagaagatgtaacagtgcactgtgataataaaagtgcattgcatctcatgaaaaatcccatgtttcacgagagaactaaaaacattgacatcaagatgcattttattagagatgtgattcaatccaaaatagtctcagtaaggaagattgacactcatgacaaccctgttgatgctttcacaaagagcttgacgagagacaagtttaggctttatcttgagttgctcaacatcaactcaaactagagtctgacattgagatttgcattcattggattttagatacagctctattggttacttttacggcattgattactatgctgttaaagtgtactaaaccaggtggaaattgtgaggtttagaacacttaaataaccaacttaactgccttttcggttgacagttatttcagttaaatggacattaactaactcctatataaaaaggcattcaacaa

SEQ ID NO: 259438 - DNA, 4231 bp, Cannabis indica
agcacagtggaatataatcatgattataagttcaaaaggttaagtcccatgatttgtcaatgtatagtacattggatttagactgacatattaatcaacaataaggtatacttacatcttggataagtgttatgtcctttccaggaaattggtaaagtataccaatatcgtatgtatggaaattacaaaagccttacaaaagaaggttgatatacatccatactgggggcatcttttcagtgagttacttttagaaagatatatacagaggatctaaactgacaacattaagcagttccttgacaaagctcaagacttcatcaaactagaagaagctttccaataagccataggtaggtaccagcaactatgcccaaacatccagtcataagagcactaggatcaagtgcaacaacaacaactcttggagaaaaagtggcaaaaaggggaaatttaaaatttctcccaggccacaaaacaagaaagacaaggaggagaagtgtacatgcttcaatcccctaacgtagaaacctaagacaatcttcatggccactaaaggaaacgtcccatacagaaagccccttcccatcaaaaggtaattgagcaagagggacatgtcaaagttctatgtgtttcccaatgacttcagccatgacaccaatgagtgtcaaaatttgaagagggagattgaattctcataaggaagaacgatccccacatgcatcgttatgtgcagaacgatcagacgtaggcataaggtgccaaaaatggagatccaatgccatcaccagtggcaggtcacttaggggtcatcattggtggaccctatattctaggcgagaccaaaaaatctagggagcgctacactcagacactttgtaatgagccaaaaagtgacatcctggaagtcaaagaaagagactctaagaaaccaaagcttcgagagcccacgatctctttcatagaaggagatgctgcgcaagttagtttccttcacagcgaccccctagtcaccacttcacaaatcgggaatatgactgtggcaagatgcatggtggacaatggagcctcctccaactttcttttcaaatcaacatacgaaaaacgttgggctctagctcactgattttgcatcctacagtcaattgatgtatgtcatctttggccaaggcatcgcaccgactgggtatatcagattacccctcactattggagaaaatacaagcacttgaactttgattgcataattcatcgtagttgacatttccttcgatttcaacgccatgataggttgactagccctatatgacctgaagatagtaacatccatctaccacatgtccctcaaattcccaacaatgcatggagtacgatgtttgaggggagaccaacaatttagtcatcactgttacaacttagccctatccaaagttcagaaagagaagatgcccgccaagagctatgaagaagagcctagaaaatcaaagaaagcccaaagtggggacgcaaacatataaatatcctcactttgggatcctgtagacagctttagacctgtagaaaagttggaggaagttgaggttgatcccacatctctagctagaaaactgaagatggagaagggtttagcactagaaataaaatcatcaatgataagatttccaagggcaaaccttgaccactttgcatggtaacatggagacatggtcacaatctaccctatagtgatgacccatgctcttaacattgatcgaaacatttgacctcttcaacagaataagaggttgtttgacaaagaatgcacccaagcactcaaagatgaagtctagaggctatgagcccataacttcaaaatagaagcattctatccactttgcatatccaaccctgtgctggtacccgaacccaacaaatagtggagagtgtgcatcaactttaccaacctaaataaagcatgtccaaaggactcctttttgctctgcaaaattgacaagcttgtagaagccacaaatggccatgaaatcctgagtttcatggacacatattcaaactacaactagataaaaatgcatccatcagattaggagcatacaagcttcatgacatacttaggcctatacttctaaaaagtcatgccctttgggctaaaaaatgtagggaccacatatcagagtcttgtgagaaaaatgttcaaagatcttatcggttgcaacatggaggtgtacgtggacaacatgcttatcaagtccaaaaagactagggggcatgtggaggacctagaaaaatgcttcaaaatcctctagtactacaacatgaaactcaaccccctcaaatgctattttggagtaggctagagtaaatcccttggcttaacaatcaatgccaggcgaatagaagcaaatccggacaagatccaaggccttttggacatgaagttgcccacaaccatcaatgaagtacaaagcctaacaagacacattcttgcactcaacagatttgtgtcaaagtatacaaaaaagtgtgtagacttcttcaacattctgacaggcaataagaaatttgagtggacaaaggaatgtgaaaaagcattccaggagctgaaaaacaatatgcttaaccacctatgttgtcaaaacccctagacaataaagagctaggtgtgtacctagcagtcaaagagcatgatgtgagtgctttcctaataagagaagaagacggtgtacaacaccctttatagtacagcttgacactaaaagtcaatacccaatcatggagaagatggcctacaacttgctcttggcttccaagaagctaaggctatacttccaagcacaccctataaaggtgtacactgatcaactattgcggtaggttttacaaaacctgaagcattaggctgactactcaattaggccattgaacttggtcagttcgacatcacatatcaactaggaatggccctaaagggtcaagcccttgaggattttatggctaagtgcacaaactcgtctcttgaaatctctgaaaattcatgaaaaaaacaagagcttgagatgcagcaagagcaagagcagcaataaaaacttaaaaaactaacatggaaactccatgttaatggaagttgtactgaccaattatccggtgtagggttgcccttataacacctaggggcaacagttgcacagaacaataacatttggcttcaaagcctcaaataatgtggctgagtatgaaaccctaatagccgacctcaagctgccacatgaagtatcggctaaccaccttggcgtatccagtgacccttaattaatcgtgaatcaagtcttaggtgaatacacaacttaaggttaaaaatggtggcctacttaagcaagatccaacacttgctaagtcagctcataggaaacacaatcaggagatccctagagaacagaatgctatagcagatgcactttcccgtctggcaagtagcaccattactaacatggcaaacctagtgcgaatacatttcctaaaggaaccaagcattaccatccctaaagaattcgataggttggatgacaatcgaacatgatgacacctattgtaacttacctccaaactggagccttgccagaaagcaagaatgaagcaaaaaaagataacaagaaaggctgctaggtatctatcccagacagactaatgtacaaatggagcttctcaatgtcactcttaaggtgtgtcaccaaggctgagtccgagtgactgatgagagaagtgcatgaaggcttttgcagcgaccatgttgagggacaaagcttatcgaaaaagatactctgataggggtacttttggcaaacaatgatcaaagactcaatggactacagtaaaagatgtgaaaagagacaaagattctcaaaaactctcagagctctaccaaatgagctcatgatgatgcagtctccttgaccctttgttgtataggggatagaccagattggtcaactcccaaggggaaaaggaagggtgcagttcactatagtcgttgtagactactttagcaaatggggagaagctgaacccctatcaacaatcaactccaaaaaattccttgactttgttattaagaacatcatatgtcgattcagacttccacggaagattgtgtaagacatgttcactatttctgcaatagtcatggcatcatcaaaagcttctctttcaatgcccatcttcaagaaaatgggcaagt

SEQ ID NO: 259439 - DNA, 833 bp, Cannabis indica
atacgtctcctatgacggttgcgtaccattttatacaataataattgcaacatcatacacatgctcatcatttgaaaatgccatgtgaaaagaaatatcataatcttcttttgttgcatatccatatctattaatagcattccatgtacataaaaaatgtcatataacaatcatagacactaaatcaaaaactatattatcatgaactatattgaataacaaacaatatcacagtctcttgtaatagtttctacctaagcataatcagtgaagagaactaataaagcataacttcaaaaattctgctatgcattaaagctataagccataagcaggaaacatatcaaggtgacaattttgtcataatgggtttgtttgcttagaaagtctgctctgcattatatattgatatgatttccatcaaagaagatgaaagaaacagtgcatttttatgtttagctaatgcatatacatgtaagagaaagatacatctgttttgttcatttcctcactgctttgagaatctttaatcactcatataagggagaaaatattatactttaggccaattgggcaaaacaaaaagcttcctatttccaaagataatactattacttcacatttgattttagaagaacaaattgtcatacatatttacaaataatgagacaagacaataagaaaagaaaagaaacgaccccatgatgttattttaacaattaattcccacccaacaaggtatcaaccaaaacatattacattacttaaatgggaaaaaagaaaaaaaaacatatgtttcttcaatcttaataagtttctcttctatttttttt

SEQ ID NO: 259440 - DNA, 606 bp, Cannabis indica
aagggctagagatctgaatggaatgagtcattatattccgctacagccaatgtaaggttttcttaaactcttatgtgtttatttcattattttagaattcatattaggatgttaataaaacatacttggtagtaaatctagatcctggtaaaatatttccaacactaacacccttaataatcacatttccgttagtgttagtagtgtaaacaattaataataagcatacattcaaatatattttatttatgctatcttacctcattccgtgctcaagtgtgctggttagcttgagtggaattgcagctcgacgctttacagggctctaaaccacaatattcaaaaactgatgagagacacactaaaacacttatcgggggtttagaatcaaaactaagaataaccctatcgataaatagaatcaaaactatcataggtgacattttattttagcaacctagtccatttatctacctagaaataaatgggcttcctatatgcatctaagcccaaaagcaaacatataggctcacacacattcaattgatctggatgggccctatcatgtttctaggtttacacagatgaaagaactacaaaatttac

SEQ ID NO: 259441 - DNA, 1385 bp, Cannabis indica
ttgtgcgagcagatcatgtatttttcttagatatgctatcatcttctcccctcgagcctcgtactccccagatacatgatttaccactaactgtgagttactactgatctcaatgtgttcggcttgtaattcccgagcaagttttaggtacggcgataagagcttcatattcagcttcattattggatgtcttaaatctgaatttgaccgcagcgtgcagatgttgccccccaggtttgacaaggacgattcttgggccagacagctgatccgtggctgacccgtccacatgtagcttccaagttgacttgttttcaccattgctcgggtgaggtacttgtactggctctaggttactttctaaaatgctctcttctttacccgtacattcaaccacaaaatctgacccttaatcgttgttgggggctgaaagataatttcatactggcctaattccacggcccatttgagcaaccgactagaggcgtctggtttttgcagtacttgacgtaatggttggttagtgtatacctgaacaggatgagcctggaagtaaggccttagctttcgtgtttcaaagattagacaataggtgagcttttctatcaatggctaccggccttcagcttcaatgagtcttttgctgatgtagtagactggatgttgaatattgtattaaccacaatataagatcaaattagaagaatgtagggataaagcataattagtctatacaacaaggtaacaatccctgatacacttaatattagtactagggatgcacagatcttgtagaataaagagaatcatacctgcccagaagcctttgaatatagattaaaaatattttgtaatgcctcacacgattggacagaagctctattgaaaagtaaactgtcatctacaaagaataaatgagaaattgtaggggcagatcgtgccactttataactcaatataaccttatttcgttctgcatagtttagaagagaagaaaatccttcagattaaaataggaataagtagggtgatagtggatctccttgacgtaatcctctagtcggaatgattttaccaccaatatttccattatgattaaagaataatgtaccgaacgtacacatttcatcaataaggatacccatgggacaacaaatcttaatttcaacatgacggcctctagaaattccctttctactatgtcatatgctttactcatgtccaatttcataactaagaaacacttcttccctttatgcaatgctcttagattatgtaactcgtaggcaaccatcacattatctgttatacattgtcttctaataaaagcactttgcaaaaaatgtataatatcatccagcgaaggttataagcgcttaactaaa

SEQ ID NO: 259442 - DNA, 660 bp, Cannabis indica
actaacatgaacacatctaaatctcaaaattatcgtttttaatccatatttcatgaaagtaaattattaccatggctctgatactagttattggaaattattttaccaggatctagatttactaatgtgtatgttgattataattctataatttaacactctaaatatgaatttcctaaaataataaaataaccacataaaagattaagaaatccttacattgatgacagcagaataataataactccttccattcaaatctctagcccttgattcgtttctttagcagagcattatcaagatttaaacatgaatattctctcctttagtttggttagacatagtcttccacactatgctaggtattactttgagataagtgggcatactctcaatcaccatgagattcgaattatttagtaaaaatgaagaataacttttgaaatcggaagaagaagaagctctctctttattttctagttgtctgacaaaagagattgaagtcaattaagaaaactagggccatcctattctatttataggattccttctagggttaggcttataatttaaatagaattaaaaaggacaaataatagctttattgaacttaagtggccggccatattatgggcctcactagttttaattttgccattt

SEQ ID NO: 259443 - DNA, 946 bp, Cannabis indica
gaagaagaaggaggtgaaggaaaagggatacccagggagtttgagagagagttatggggcagtgcgtgtcttgcttagacgaagagaagaagcaacaaaggaaagaagaagaaaggttagccgctgccgaagttcgtgccagagctgccgaagctgctgaaaaacggtttctttccctctaattctactcctatctttattaatcaaaattttttaatttgatatcagttttttaaaaccattaaattcagaacttttttctgtagtctcaccgtttgtgttaaccaaaagggtctatgactttccccaatttagggattttaatatttataatagacatatacatatacgtgtatgtatatatgtactgctgatatatgagttttgttagaacacattatttttattagccattgatcatccatgtttaattatttcgtaaatggattcactaaaataatttagtaaatgaaattatttcctacaatcccaattatctgtctttagggtaaattattaagatagtaattgtttcaaaaaaataccgagcttctttataagtaatggatcattgtttggcttgttgaatttggtgttgaccctttttagcaagccttcccaaacactatattccttaattgctcaaattttcatttgttctataatatctttgtcttaatttatttgattcatgatggattatggatacatcatttaagtacagtttaatatgctctggctcgaattctgcctactttaaattcaggacttgctccattttgcaactcttttgtggattagtctagaaacaaaaactaccacataaaagtgctaacgcttagtatcttagatgcaaatatatagtcatcatgtggctttgactggaattttctctaagcattttcttttaatggcggagtagatgttattctattttatttatttt

SEQ ID NO: 259444 - DNA, 737 bp, Cannabis indica
atagcaaaattgcaaagtggggaccaatatctatggccgaccacttggggagcaatttaccattatattttttcattattttaatgctaaataaatctaacctaaccctaagtggtttcctataaataggtagtgatggcgtcaaaggaaaagatgatgcaaactctttccttcagtaaaattttgagccaccttcactcttcctactttgaaaccctctctctctcttcctctcttcaaaccgatacctagagtaattagagtaagttcccacacagatgaagtgatactcaatcatagtgtgtaaggctgtgaagaatccaaattcaagagaaggagattcggcctcacatcttggggatactctgctacagacatgatacaagggttagagatctgagtggaaagagccattcaattccgctgcaaccactgtaaggtttctaaaactttatatgtgtttatttcatatcgttttagaagttcatgtttaggatgttaaaaaaacatacttgttagtaaatctagatacgggtaaaataattccaacaggtaaatatgatttgcttttcctcctgccttaataaacaacaatggattaaattgttctaaactactgacattattttctctcttgcttagagattcgcgaacagaagacagagatgattcaaagaaatgatacttctacaaagttcgtgaaggaagaacattttagaagagcaatgaagaagtca

SEQ ID NO: 259445 - DNA, 503 bp, Cannabis indica
ttcaagtatttttatcaaggcgtcgtgatgcctcattttgtactttcctagctcgagagaaccgttagtattcaattttatatgcgagttataacttttgatttttctttctcgtcggataggttttaaatcaaaaattatagttgtttgatcccttcttcgtcaaaaaggtttgatcaagatgttataacgattcgacccctctctcgtaaaaaaggtttggtcatggagttacaacggtttgactccactttcgtcaaagaggtttagtcgagaatctttgaatttcaaaaaattgaaatgggcgggtttgaattatattatgaatttctagatggattccggttaatcatacataaatgcgccttaagtaattttaaagaataaaactttataattacttaatataaatgattctctttattcataactaaaaagattacatcagtaatgcgagttacataatttatttattggtagtagagtcacaaatattctacgtt

SEQ ID NO: 259446 - DNA, 2954 bp, Cannabis indica
cattcgatactggtaaactttggcaatgccctggaaagaacataacacttatctaaggtgtaagtataccttatcgccaactataatgccagtctaattccagtgaactgacaaatcatgggaattatacttttgaacatataatcatgattatattccactgtgctgacgacactataatcatgaacaaatatatacatatttatatatattttggacttaatagaatttatacattaagataatcatgaaataaatcatgtgaaccatgcaacataaaagtgatttctgatctttattaattagtaaatctgattatattgaaatgggttttctttagggcacaaaacccaacaattgttccgtctgggctattcgtcctcaatcgtctgccttctagcttgctgggaaaattgttggatcagattctcttaccctacagattgacttcttcttgttggtctcgtatctccttggttgtgccatccatccactattggaactcctgtcgctgctaattgaacacttggttcaccgtagcgtgagtctcctatcgattgtggtggagggcgttggtatacatttaaactttccccaagacttctttgaagttctctagctccaaatcgcccccatgtcaacacaaggcactccatcggctggtcaacccatccttagtctcgtctctctagcgtatgcatgaaaagggaatcttgcctcttaggcactaggggtgaatccagtgagtgcggtcatgacctcagtgatatttttagtgttcgtctctgtggggaatgtgtctccacttcttgctcccataatagagttattgcgtggtagtagtcaagcattagggttgtccatccctgtgttcactagtgcctagacattatggcctgtgaccatttggtcacatggctctatagatgtcgaccttcttgtctaaaccattgttcttgaaatgatgatggtttaggaatctttgaaatgttggtattcagtagagagcaagaatggtttaagctcccaatgaaagcactaaaatattgaccttgcttttagtcaacgatgcagagtctataaaataatgatataagtgaataaggaataaagataaataataagctataaataacacaagatttataaaggttcgaccccataattggtaatgacctactccttttttgttgaatatttctaaagaataacaagatcacatgaacctggtgaactaagtttcttgctatttcaaaatattacaaatatttttctaacacaataacgctcttgagaatatagaattcggtccctgaatagtagatatgatttttacaggaaaaataatgtagaatatttacacttaattatagaataaagtgtttaatgtttaattgagccaatcctatgaaatcctctcttttccctaaatctcacaatctctcaattgtaggagtgttgattgacctatttttaaggaaacaagtgttggaatgaatttagacatttcctttataagggttgttggccggatatttatccttgtgtgataactcttttgttgttgggtaaggtttgagatatgtttctttcgttgcttgaagactactggaaaggcttgccttacatatcttccacccaacatatttcaagcatcattatttcatccaatgccttgtactcttgccatgtgtcactttattccatgccatgtggccaagggtgatgtttcgggcaacaattagaaaaatcaaatttatagaaacaaaatatcaagtttattattcacaacctcaaacgaccttacaatgaagttgtatgatgtttaagagtcaaaggattccgtgtaggtaactctaaaatgactaagcatcaggaggatcccaagttcattgctcatgaagacatggagcaatcttgccaaggtagctgtacatctacaattcaaccaattagcaccacaacatgaaagcttttatgagctatcaaggtacgtgtgtctaaacttacaaacatacactatgaatttatatgttgccatgcatgaaagctcatttcactaagcaaaggaagacatatcaacactagcagtacagtttaaggaggatttcgagttgagctccaacccagtaggaaacctgcctcaacccgataggtaccattttaaccctaatattttaagagaccatgaagttgtgaaaagtaaaggcacatttaattcaagagaagtggtgaatgaagaacatgtccaagaaactcaaggcattgccgcatgcgtcactccttaatccatgactagcgtaggtgcccaaaccataacaactaaagcaacacttctcaaggagtagaatcaagcaacaatcaacaaaggatggagacacataatgagttcacatatgcgtacataccggatcctccatcaacacaacacttgtaccacaatgattacttccactactagttcattattctctttccaagttaatttctaagttatgtcaaaaaattataaacattacttaatttcattcctaaaatttacttttatattacactttcattctattttgtataacaaatttcctatgactatttttaaaatacatggattgttcatagaaggtgatattgacatattaagtgctaaaacaatgattaaaggataaataattaactgtaataataacaaatcatctctataaataggttgttaataaaaaaaatacaagcaagaacaagtgaaaataacaaatttatattctcatgtctcatgcattttagatgggtgaaaaaatattcaaatgtactaaaacattaacttggcatactttttttaatagaacgctattcattgatagaaggaaaagatgggtaccacaggggggtccttccccttggaaaatactagccaaatgacgagagtatctagctctttttgccggtccattaacaac

SEQ ID NO: 259447 - DNA, 582 bp, Cannabis indica
ctcgcaaacctcccgtcctttctaaacctttttacggtgaggaactggggatatacctagcagtaacagagcatgccgtgagtgctgtactaatcagagaagaagacggcgtgtagcatcaagtctattacatcggtaaaagactcatcgaggccgaaggccgatatctgttgatagaaaagctcccctactgcctcattctagcaacaagaaagttgataccttactttcaggttcatcctgttcgggtgtacactgacaacccactacgacaaatactacaaaagccagatgcctctggacggttactcaagtcggcggtagaattggggcagtacgaaatcaacttcaaaccccgaacagctatcaaaggccaagccttggccgactttgtggtggaatgcataggcaaaattgacagcataccagaaagcgatcttgaggcaataccacaactgagtaatactgaaaacaaaccgacctggaagctacatgtggatgggtcggcaacaaatcaattatccggtgcaggaattgcccttgtcacacctgggggcaacacctgcatgcagcagtcaaatt

SEQ ID NO: 259448 - DNA, 815 bp, Cannabis indica
aaaacaaaccgacctggaagctacatgtggatgggtcggcaacaaatcaattatccggtgcaggaattgcccttgtcacaccggggggcaacacctgcatgcagcagtcaaattcggattcaaagcctctaacaacaaggtcgaatacgaagccctaatcgcttgaccaaaactagcgaaggagatgaaggccgagcgcattgagatatgcagtgattcacagctaatggtaaatcatgtatctggcgaatacgaggctcggggagaaaaagtgatagcatatctgagcaaaatacatgatctgctcgcacaattcaaaagctacagcctcagacaaattccaagagaagaaaatacaacagcagatgcgttagcccgattggcgagcagcaatataagtgacaaggcaaacctggtcccgatccagtttcttgaagagcctagcatcaccggcacggaagaaatcgaaatgatcgacacatctccgaactggatgacgccaatagcagcctatctcaactctggggaactcccagataaccgaaatgaagctcagaaaatgagaagaaaggcagcacggtacatcatcgtagaagggatcatgtacagaagaggattctcaatgccattactcagatgcgtcacaccaaatgaagctgcacggcttctatatgaagttcacgacggattctgtggaaatcatgcagccggacagagcttatcaaagaaaattctaaggcaaggctacttctggccgacgatgattgaagattcgaaagcttatgtcaagaagtgcgacaaatgccagagatttt

SEQ ID NO: 259449 - DNA, 1615 bp, Cannabis indica
gtgcctgcataaatgtctagtcaaagagatatactgtaactcttcctcacctaattcacttcaatattacattttttataaatatatatatttctgttttttcttcttttctttattgtttagttcaattttgcaaagtagtaatgaacttttccttgaaacaaaagcaaatgatttttacccatttctacatctctatttgttcaattatttaccctattttcggagcttggtaagattcttttcttcttttggatttcttgtgactttggctgacatgattatttttatttttttgtatttttttaaaagttgtagtaatataatttactggagaggagagtgtgaggtaaagaagaagcatttcgtgttttacaagtgagtaaaggaaaatgccgataaggcaaatgaaagaaagctcagagcaacacctggtgatcaaaacccatctccaaaactccatgaacccatctctgaaacaacccaaaactgcccaaaatggcaaaggaccaccaacccaagaaccctataacgctaaaaccaacaaccaaccttcgcctccgaccaaaaacagaggtagaagaagaggtcgaggtggcaggaaatccgatcagggagacgtttgtatgcgacccagttcaaggccctgcacggtggctcacaaaccagtaccggagaatctcgtcgtcggtactccgagtggctcctccgtcgaaaatgttgtccacgcgtgtgagatggacgtgggttttccgagttcaagtaagtctttgagtttcgctcgaagacctgggtttggtcaagttgggaccaagtgcattgtaaaggctaaccatttctttgctcagttaccggacaaggatttgaaccagtatgatgtaagctgtattcttagttttttttttcttttttaagaataataagattgcttaggaatgagctctgatggggtttattcttcttctgataattgggcccattacctgacattcaatgttgtatgtgctttgttttttttttttatattatacttggttgctatagtgcattgaagatcattaacaagaggggcatctgattttacttgtccttttcttctactcatttatgagattttaactttttttttttgggtctctgatgagatttgaacatggccttcaattttgttcttattgttgtgatgccttttcactatcgtctgcttttgttgcaggtcaccattactcctgaagttgcatcaagaaatgtgaacagggccatcatggcagaactggtgaggctgtacaaagagactgacttaggaatgagactgcctgcctatgatggcagaaaaagtctgtataccgctggtgagctgccctttacatggaaggagttcaacgttaagcttatagaggaagaagatgcagttcatggtcccaagtatgacattcttccttcccatttatgccatctagatcaaaagtgttttttcttggtatattataatatgtcattggtgacacaagttttttttttttaacagaaaagtgttgactaaaagactttatttttgatgtgtatactgtggctaagtactggttttaataaatatatgatagggttgggatta

SEQ ID NO: 259450 - DNA, 1119 bp, Cannabis indica
ggtaaaatatttccaacacatagtcgactggtttactacgtcagcgtactttttacctgttcggacaaatttctccattgatcagtatgcagaattatatgttagagaaatagttcgtctccactgtgtcctaaagtccattgtttctgatatggatccgaagttcacatcaagattctaggagagcttacatcgagtcatgggtactcaattgaaattcagcacaactttccatcctcaaagatggacagtccaaaaggaccattcagatcttagaagacatgctacgggcatgtgtgttagattttgaaggatcatgggtatagtaccttcccctgatcgagttctcgtacaacaacagctatcaggcaacaatcgggatggctccttatgaactactttactaaagaaaatgcggatcacctattcattaggatgaagtaggtgagagaaagttcttgggtcccaaagctgttcagaggacaagtgaggtagtttataagataagagcgcgattactcgctgctcagagtaaagagaaaagttatgcagatccaaagcgatctgatattgatttctaagttgaagatatggtatttcttcgaatatcgcctatgaaaggtatcaagcgctttggtaggaagggaaagcttagcctgaggttcattggacctcttaagatccttgagagaatagggcaagtagcgtacaggttggctatgcctccaacactggcagttgtacatgatgttttccatgttttcaagcttcagaaatacgtctcagatccgtcacatattctgagttatgaagcattggagctacagtcagatctttcatatgaggaacaaccagtgcaagtgctagacagaagagaaaaagtcttgagaaacaagaaaattgcactgatcaaagtgttatggaggaacagtaaagtagaagaggcaacctggtaagtcgagacagatatgtagcagaaatatccggagttattcaggtaaattttgggaccaaatttttgtaaggagaggataattgtaataccctaaggtttatggaaccgaattagcagccctaactagtttaattatgtattaatatggaattatattattatat

SEQ ID NO: 259451 - DNA, 518 bp, Cannabis indica
gcaagaaattacagaagggaaagtcgtctcttgcgagattctacttggcctgaaccccccaatttgtcgtcaattcctcttgctaggcctttatttttacctagagtcacgattgcttttgaaccaggtgacttggactttgaaattatgacttccaagccttgaaaatcaaagactcttcaggaccctaatgtcaccttcgaggttgaactaatagagctgaaagtgcgagccatcggagattacgtaggtaccgttttaaggacctgtggcatcgaatacaagagaaactttcgagttcgatcagtggttactgaagaatttagttgttactcgcccaaatgacttactcacgaagcatctgaggggaccagtggggaggccagcacgagtggctcgacggggataggcgcttggagcctcgaacacatcagggctggagcaatcatccccctgcgggactactttaaggaatttctcaaccatctcggaatttccccattccagttggttcctat

SEQ ID NO: 259452 - DNA, 678 bp, Cannabis indica
tgggaaaagaggaactactgactatagttctgcattttgttttgtattagaccaaagagcatcttatccctcataaggtgatttgtgcattagtgtaatcatgtcaataaatgatactaaaactaattgcttgcaatgttggagcagatatcctcatacttgtatcatgtttactcttattcatttttcaataaactagtgaatttgcttctttttcatcttagttttctgcttctttttatctacaaactgcttcggtgaatgtacgcctataacctgtccaacattgtgtaaccaactgctctaaaacaagcagaacacaccattttgagtaaacattttgttcctcaaaccaagtgctctagctttgacactcagtttgatcatacagtccaaattcacaacagaaatacagcaattttctgcagcagatcatgctgagtcctacttaaccaagctcgccaatccgcacaaagggcaggccacatagctgctccaaaccaagcacacagagttttctttgaacaaatgcaatcaaagaatagatgtgagagacaggcagccgaatctaaattcagattacagcggagaagattaggtgattgttcacagcttcccacacaatgaggtgccgtttggtaaaacttttttaatcagttttctgtttttataattgaa

SEQ ID NO: 259453 - DNA, 530 bp, Cannabis indica
gaaaaaaaaaataaaataaagattgtccaatgattgtgaaaaattcaagaacaagtttcattacaattttaattactccaagtgtgtgtgtgtgtgtgtgtgtgtgtgtgaaatgccttttctcaaaagtttgcttgcaatttagatcaatttatgcaaatatgaattaagcacaaaatctctaaaatggcaaagtctcataggtctatttttcatctatctctccactaatgtagacaaacacaaaaccaaaaatcaaaaagactttttcgagcttgtaatgtaaggcttaggtgaatgtggttaagaaaagtcatttttggctcaaatcacctaaaagcaccataatttttctaagaccaaaatgagacttcacacttacttcctcaaataatatcccacaaaaaatttgaatataatattgccattatttattgccccaaaatttttcaaaataacgtgctcccaagagctatagcaatgccttagcatagcatttttttcatgcgtctctgctccaaaatgctgaa

SEQ ID NO: 259454 - DNA, 561 bp, Cannabis indica
tagataaaattgacatttatagagatagaatcaaaatatggtatttgagaaaagaaagataagttttaataaagtggtaaaattgaaactcataaggcccacaagggaattcggccatagggtttaatttaaagccattttatctttttttattccatatacaaattctaacctaatatagacatcatataaatagataactataggcttttatattcataacctaataacctagtttcactttgtcagacaaaataagagagcaccatataatttttgaaatccctagccttttttgctcttactttcctgccctatagtgaaagtgtatttgcccacacatttcaagtcaatactcaaatatagtgtggaagattgtgaagaattccatcacctgaaggaaaaaccaggttcagatcttggtaatactctatgacagaaaggatcaagggttagagatctaaacggaaggatccatcatattttgctgctaccaatgtaaggttttctataactttatatgtgtttatttaatttctttaagaaattcatatgtaggat

SEQ ID NO: 259455 - DNA, 1130 bp, Cannabis indica
tttttttactattaatttcactttataaaaagcatattattaaattaaaacaagctttaaatgttcacgttctaacgtgataatttttaatttatttattttttctagtaagataagatatgtgggaattggatttttacttggattaatttgatttaattgattggtttttaattatttttctctttatattttcagtttggatgataataatgatgaagatacttggaataatgaacacgcagttgaaaatccagaagaaattgcttctatggttgatatgtaagtctctcactcaatatatatattttttaggtgtagtttaaatttcagtagtgagaattaatttgagttaatttatatttatttaataaacctttttaattaattccctcataattattattattgggcattatttaatatgatggagagtggggacctcagcattgctcgtaattaactcaactcttattagatttccttctgactcagggcacttgccacttaccacttacaaaaacataaagagagagtttttctattaaaaatcattgggtagaatagaatttacaatattaattaatttatttatttccccaataaaaagggttagtaagtagagtcaaaatcccctctttaaccacaaaaaaattaccttatgttgcttcaacagaaagtaattagtctaattaaaaagtctggttagatagagcatcataagcacatggctctgttctgcttctttattaattggaaatctatattttttttaaagatataataataaaaatataataaataaccagattaacttccttttgggacacagtgtgaagaatcaatcacccatgttcttggtctgaaccaatcacattctctcttcgattcttagttgccagctctctttacccacatgcccatgtctccagatccgctcgtcacgctttacaattaatttcttcttgtcattttcgtacaccccttcattcaaatctcattcctttcttaaaataacacaactttttattattagaattagtaattacaatctctattacaatttcttacaatttcttagtttatttctacgcctgagattaccaaatgttcaaaaaactttaaactta

SEQ ID NO: 259456 - DNA, 653 bp, Cannabis indica
atggttccaattttgttgggggtgaaggtgcagctacttttgtacatttgggttctctgttttattttatttttcttatattttcatttatatttatttagagaaaggttaaggatgaaaacaaaccaacaagcaatgtggtcaatgaaaatatctgaatctaatgagtttatatatatagagagagagagttggaggagatctaggagagtgaggattgtgataaccacacgttaaagcaacccaatctacttgcgattagatgccacgtgtactctgtgggtctctagcttcgtgattgatattgtttggtcattgtggcacggaatctaaagaacaagatgagttctttggggacttgttttatcttttttatttttacataatatatcaaaaaatttaaaaaaaaactaacataaataacttaaatacaaaaaaaaactatatatatttttacctagttaccaaaattttgacaatttctaaatcttgtattaaagaaattaattatatgcagagaaaaatattttaggtagttcatatattaattaagagatatgttaattataaattactttatttgatgagtaatattttaatttttttgttaaaaagtaatttttttctttactaattttagtagttcttttttc

SEQ ID NO: 259457 - DNA, 474 bp, Cannabis indica
ttaattactgaattcttaaacaaaaaccactaaaacttttataaaactaatatcgagccacgtaactctcatctagttatattaataagtgtattacaatttagaataaaattattaattttatgtaaacaattttttaaaaaaatatgtatatattttattgagatattattattcttatatagaggtatatttgttaataagggacttaaaaaatgtataattaattataatttagaggttattcttatttataattagcttaacttgggacttgatttttttttataacaaattaaaggtttttttttaataagtcactaaggctagcttagtgagagagggatgggaaaaaaggaaaggtcatgggttcgaattcaaaacctttaagctcataagctaatatatgattgtaaaataccattacactacactaaaaaaaatgttattttttaatagagtattcttaaatag

SEQ ID NO: 259458 - DNA, 573 bp, Cannabis indica
taatgtttttatttgtttaggtattttatttgtcattgatgccgaaaaagtcgttggagtttgctgtccgtgctagaaaaatcaccgaagtagctgtcgatgccgaaaaagccgtcggagttgctgtcgacgccggaaaatttgtcaaaattggtatttttgccgaaaaaataactgaaaaaatcaccaagaaactggtttcttgaagaagaaagaaaccactttcttagtgattttttcggtgacaatgacaattctgacgacttttctgacactggcaggtactccggtaacttttctggcactgacagcaaacttcaaaaaaatcatcggaattcacatagttgctggaaaaattactaagaaactggtttcttgatgaagaaaccagttacttgataaagaaaccagtttcttaataattttttcagtgatttttctgacgataatgctaattctgacgactaaactggcgttggtagcaactccgacgacttttctgatatcggtagctactccggtgactttttcgataccgaaagcaaactccgagaaatttgtcggaattggcat

SEQ ID NO: 259459 - DNA, 564 bp, Cannabis indica
tctccaagcttgttttgcgagcaacgcctgattaaaatgtacaaacgagtgaaaccccataccttttctgtcatttcttttgcacagtaggttccatgaatgccaatggattttagagttattttcatttagaccccaccagaagttagccatcatggattcaagttgattacagaagtaaattggaaagcagactcatagcgtaggtagcaattgattggataacaactttgagaagaactttgtgtccaccggctgagaagattttttcactccaactgtgcataagtctccatattttctccttaatgtcactgaaaagtttctttttatctctcccagagtatgaaggtagaccaaggtacttctcatggcactcacaaatgggcattgttaactgtctgtggaagaaaacttgggcagctagcgttgtgttttgtgaaaatgacataacagacttgtcaaagttgaggactagactcgatgcccagtgacaaatatccaagactctctttattgctagacaagaatattagaatatttctaattaaggaaataaaataa

SEQ ID NO: 259460 - DNA, 606 bp, Cannabis indica
ttctgcttctcttcatcctagtcatctcaagttcaataatttaagctacttacaacttatggaaagtcaaacttggtcagaaaaagtcaaagtagcttggaagaatttttcaaggcacaagtaaagtgttttgaatttttggaacgttcggaaaaattatttcaagggttattagaagttaaatagttcttggactaagatcaacaaagaaagagaagaagaagaaataataaatatggcgtcaaggggaaaggaaaaaaattatttttctaacttgaagtgaagaaagcttggagactcgatgaaaatgaaatcttaaaggtgttctcaaagtgctataggcgtgtggaatgaagtgagaagtgtaaaaaattggttctcaactcacttatttatagttgagtccaatttcctaatcctaaagctaattggagtcttttaaatttaaagcttcctaaggaagaggtaaatgaaaagtaaaagatataattatatctttttccttctccttttttaaagctaatttcgaattcctataaaacaaggaataggaatacaaatttaaaaggtaacaacaattcctaaagctattgggattaagaaaaa

SEQ ID NO: 259461 - DNA, 511 bp, Cannabis indica
ccaaagagaaagagaaaaagagatattgaatagcccatccattattctttcatttatccaaatactataaaaataaaaataatactttcaaattgagaaactactaagtagttttactttccaatgtttccctacattttcaaatactatagaataaaaaacatgtcttctgtgaacactgcttttatgaatagttaaattcatttttgaagtctaaatttagtttttaatattttatatgattgatcactaatagaaaaactaacacgttccttaaattatatattcatacatttttatcatttaagcaaaaaaatgttagttttcaataattattctgctggtgtattttatttttaaatcatcatacacataaaaaaacatatcaaaatatacattatccattattaaaaaatgattaaagtgtacctctaattcaaatatgttgcaagcgactaccattgtagaaccccaagttaaaaaatcatcttttacaacctgaacgtttata

SEQ ID NO: 259462 - DNA, 536 bp, Cannabis indica
ggttaagtggcctcttcgaacatctataagtgcaccaccagttgctaagaaagggcgcccaagaatcaatggcatatccttgtcttcttccatgtctagtaccacaaaatcagctggaaatactaacttatccactttaattagaacatcttctattattcttcttggataagtgaatgatcgatccaccaattgtaataaaattgttgtaggctttacttcaccaatacccaactttttgaatacccaaagtggcagtaaatttatactagtcccaagatcacataaagacttctcaaattttaaaccaccaatctcaaaaggaattgaaaagctacctggatctttaagcttttgaggcaacttcttctgaattatggcactacattactcaattaagctcaaagtttcataatccataaatttctttttctttgtcaacacctccttcataaacttaacataatttggcattttctctaatgcatcaatgaaaggaatgttgatgttgatttttcaaaaatttccaagactta

SEQ ID NO: 259463 - DNA, 1357 bp, Cannabis indica
ccctttcctgcacagtagagcacccatgaaccaagcccatcaagacagtatataacatgccggtttatgtctacgtggtgtagacctatgtgttgtgctcacacgtctatttaaatctacgtggcgtagacctacatgttgctctcacacatctaaatacattaaggccttagaattggttcatctcagttatggttaccgagtccaacctgattatgccttaagcgcataatccttgaaactcgttacatataacatggcatggcattttcacacatatatcactagggtaataaccctaggctattagaccgttcctattatggtaataaccctaatcctggtcattaaataattatacatatcactttcaatataaggcgactgcgcatactctacgtgctaaccactgtcttgccagttgtcccaccatgacagagattatgaatcctcgggtactcctgatcaggtaccggtaatcctaatcacacaatccaggatttcacaaatagggttaacccatgattccatactcataaaatataatcatggcatttaaaactgagataatcacatagagctcggaacgagctttccaacgatataaagaactcccaaatcggagttcgaaatcaaaagttatgaattttcaaaattcgaactcaaaactgcccaaaaactcaagggcaggccgcggcatgcccaagtcatgccgcgacacctgggacgaacccccaggttccatcaaccggggcaggccgcggcatgcccagagcatgccatggcacctaggttgaaaacccagaaaccagccgcaaagaacacgaaaattcagcaacaattccatccatttcacttcaaattcacaaaccaaacttctaaatcaacaagtaaggttgttagcaatcaataaggaattaaaattcatgtttcaaacaccaatttccaacaataaactcaaactttcagattgcataaaacacataattcatgctttaactccacaaagttcaagctcaaacacaagatgctcaacctaatcaagttcataagtccagctgcaaactcaatcaattcacaaagatttgacctagaaaaatacttaataatcacaaccaacaactcaaaactatatcttgcaatttctcactcaaaatcaacaaagttaaacaccaattcacttatcatgcaagtctaggaacaacatcacttaatccatatttttccaacataattcagctagaattaaagagattaaagttacggaaactacctcaaaatcacaccaaaggcaagaacaatgattttccccaaaatcatgttggaatttattttagcaggatcttagatctactca

SEQ ID NO: 259464 - DNA, 1262 bp, Cannabis indica
aagagaccacaggaccaaacatgacatttgaaagaatcccttaaggccaaatattgggaaatttatggatgtacgtcgggaaatttgtggattttgaaacaggccaaagactccaacactggaaattggcacacattggccagaaggtcccaaatggaggttcaaggggagacagcggaagtatcttttttggactggcagcactttggctcacaacggataacaagtggctttttggatcggtggcactttaggctcacaacggatcacaagtggctctgataccatgttagaatttagggataagattaatgtggtttcatctcaaaaccaattggcaatgggaggagtagcccattcatcttatatatcacaatttatttccacacattagcaatgtgggactaactcttaataattctgtagtgttgaacagaataagaaaaatatcatgttctatcattccaatcttctatattcctttgttcttccaaacacgccaacagaatccctccatcattgaaagaggcaggttagctccaagcacataacactcaagtgttgaagcccattaattcacctcttcaattatatcttcattctgaattttcacttttattctactagaaattcctacatcacctccaatttatccatatacaaaataggacagggatcacagattgtactagacatagcttctgtatctgcaattcctgagactgcttctttttctgaatcaacgacataatcgtagcaaatttttcccatatctctaacttcttctactcacgaattaaattatgtgctaatcgatctagattttcagcttcttcatctgattctgattcagagatctacaccgcttcatatcccacaaatttagccatagattttgttaatggatctgacaaatcaaggcattccgccctccatcctgagccgaaaccttcccagcctttgctgccattctagggtcttcccctccctcccatggttccaactaatgttgaagaggagaacacatcaatatcgcaaatctgcaatcgtccattcactgaaatctccccgccctattagagtaaaggagaattttaatagaaaaattggtactataatatattttgtttatttttaattttttttgaacaattaataaacatgtgtttattcaaaataataaatcagtataagtattttatttttgaagttgttgatgaactaacataaataatattagtaaatatgtttatatattttct

SEQ ID NO: 259465 - DNA, 842 bp, Cannabis indica
tcgaacatgggggactggaaatcaaagtggttctacgtctttaaagtccctgggattagaactgactttaatcgcagacctagtatgtcgcgtgttttttaactttgggcattttctgatttattttgagatcttatgctaactcgcttttccttgttctcgcagatagaccagctcgaccggcacttgacgcgactcgcagagagacagctgaaatcctcgggagccttccggtacaagatcgcgactggcgattactgtgtacaactgcgaagctgcgagaacaccagctgattccagagaacgcaagtcttcaaagggagccagtatacaaagaaccgtctgagagacaacaagagcggatagacaaacgcctctccaagcaaacttctcgaccagtctcaggtaatttatctcttgttataaactgacgccttgagttttatttatacttatcttttatttatcctcgcagagatgacttttttgaagtccgcgcccgtccttaaaatcaagccgaagagtggaacagcgacgacatcgcccgttgtcgcccagaagaggaagagcgatgtggtggctactcttgccgcagattcttccaagaagctggccaagaccacgcaggacaaggggaagaaagtcctgatcgagccaactgtccgagctcgcgacttcctggctatgcaggagaagttcgtgggcgaggagttcatatccaaggcggagaagatcccttctgaggagcttgttccgcgttctgtggagttggcttcgcagtcgatgaccctgttcctgaaagctgttgccgctggttcgaaggaagctgactcgctgaagag

SEQ ID NO: 259466 - DNA, 673 bp, Cannabis indica
ccaaattgcttaattttttttttaaggaatccaaattaatattttcaaaacgaaaaaaaactatttttcaaagaaaatttcataattcacaattcaatcatcaattaacacataaaccaacatgaacacgtctaaatcaatcaaacattattttaaatccatatttcatgaaaataaatcattattatggttttgaggtctgttgttggaacttattttacaaggatttagatttactaacatgtattttttttaattataattccataatctaacatcctaaatatgaatttcctacaataatgaaataaacacataggagattaaaaaatccttacattgatggcggcaaaatataatgactccttcaattcagatctctagcccttaattcttttctgtagcagagcattatcaagatctgaacctggattttctctccttcaattcggttagacataatcttcctcactatgctaggtattgctttgacatgagtagacatactcttaatcaccaaggcttcaacaattttgagaagaaaaagaaggaattcgaaatagatagtagctctctttattttttaattgtctaccaaaagagtctagagtcttatgaaaataatgttgggttttgtgccctaaaaaaaacccatttcaaaataatcagattt

SEQ ID NO: 259467 - DNA, 1216 bp, Cannabis indica
ggtcccgggcaagtagctagcatggttcaaatttcacctcagttaggaaaagatatggtcagatcaagcatcaagtttgttgtaggcaaacttcataacttgacgctgcaatctgacctgttagaacgtattatagctgctcagctaactgatccagagctagtaaaagttagagaagaggcttcagctggtcaagccaaagactttacagtgtcagatagtggaatgatgttgtttaagaccagagtctgtgttcctaataatgtggaacttagaaatgaaattctcaaagaggctcataccactccatattccttgcattctggcaccatcaagatgtatcaagatcttaaaccctacttctggtggagcagaatgaagaagaatgtggtagaattcgtatcgaggtgcctaacttgtcagcagattaaggctgaacatcagaggccagcagggttgttgctgcctttaactctacctgagtggaagtgggaggatatcacaatggattttatggttggattacctagaaccacgggtttatttgattcaatttgggtagtggtagaccaatttaccaagtctgctcactttttaccatttaaaacaaccttctcagtggatcagtatgcagatctgtacgttaaagagattgtaagactgcatggtgtgccaaaatccataatttcagatagatattcgaagtttacttcaaaattttggcagagtttacaacgggctatgggtaccaaactgaagttcagtatagctttccatccttagacagatggacagttcgaaaggacgattcagatactagaagatatgttatgattctgtgttatggatttttaaggctcctagagtaagtacctaccgttgatagaatttttgtacaataacatttatcagagtacgataggaatggctcccaatgaactgttatatggcagaaagtgtagatctcccattcactcagatgagacatgggagaggaaatatctaggtccgaaatcagtgcaacgaactaatgaagcaagtgagaagattaaagccagaatgcttgcttcttagagcaggcaaaagagttatgcagatccaaaacgtagagatgtagaatttcaagtaggggatcatgtgttcctacaggtgtctcctatgaaggggatcaagcgtttcgggaagagaggcaagttatgccctagatttacaggac

SEQ ID NO: 259468 - DNA, 586 bp, Cannabis indica
tcagccaaggttaaggtattaacctttatttccacttagggaaattaaaagtaaaatcaaggaaaagcaaaaatagaaaatcctctatctctttctctctttcggctgaagcaaaccaagggggatttgttgctgaaattggtgttttcagcaaggttggaggaggattcaagcaaaggtaaaaccctagaacccttgagcatgtttttgaagctttttctttaggttgaatgtgtgaatttggtgaaataggggccgttagggttaggtttgtttagggtttgattttctaggttcatttgagttgaatatagctttgagcaactggttttgatgtttggatttagttttgtgcaagtttaagctttgatcattaatggcaagttgagtttctctgttttgttctgtgaaatactggttggaaaatgttggttaaatgttgtacaggtatactggaaagttttgcaaagtttggtttgattttgaggtcatgggggcatttttcgggttcccagtacagaaccgaaattccgattctgggggacctgtagcaaccggtcgaccggttggtcccaggaaccggact

SEQ ID NO: 259469 - DNA, 1109 bp, Cannabis indica
agttgaagagggcttaaatggattgattggtactacctatatcaataaggtgcatcttattttttgatagcccatcacaaaagaactccacggttaagcgtgcttgacctaagataatttcaagatgggtgacctcctgggaagttttcccaagaagtgtgcgtgtgcagacaaaggacactaaaaatactcatgttagtttgtagggtcagtcatcattccatgaagcagccaaagtgacgtactcgtgtataagagccatcattccatgggtgtaagggcccaatggaggcttgaagtggggacattacaattcggtatcagagctgtcaggttatctttcaaagatcgtcacgacatgtacaatcatcatcaaagataagctcgactcacggttcagtaagcctttattgctttagtagtttattttattagtatgttataaaaaagcctgatatgaagcattttagtagcctgatagctaaataggcgcgtgttttaatttataaaataagcgacaattagtaatttattcttgatcaagatctgactaggctagctcttagttttgcaggctattctattagaatggacgccagacagaacatgagaagccagggtaacttggtcggatctagtggcaattagggagtttagtttcccctaaatatacgtggtcgaggcataggcccaagaggaggcagggtacgcggtcagggagatgttaactcgccgcaggctacccaggattgggaagataggtttgcagtaatgcaagccaggattaatgaacaagacaaagagatcagacgtctgaggctccagggtgctcctacaatgcctactcttgagatgcaggtggctcctgcccctgttctgcaggcaagaccgggtgatgctgtgaactggatggaactgttgtacgaaagattccacaagtaggcacgtccagtctttctaggaggtccagatgtgatgaaaaccgaacagtggtttgactgttattacacagattctaaactatatgtgtgtcaatggcaacgacagagtgtcttgtgccacattccaattttagaaagatgcccaggtctggtgggatatggtggctt

SEQ ID NO: 259470 - DNA, 674 bp, Cannabis indica
aataatggatgaataatggatctgtaggaaattaaatgcaacccgaaatacccagattgccccctacaccaacaccccaacgttcaaaacctaggggcagatttgtccttctctctttgtgcggatccaaagagaatatccctttaccaatccggatatgccccttttcaaaaaccatattttcctttaattaccctactgccattaatggcaatataaaagcttatttttcttttattgaaaaccctagcaaaccactttttcctctcttcaaagcatagcatccgaccctatattcttctccttcctttctcttcttgctgcaactcaacacagccaagacacataattttcttcccttttctttgctgcaaaacaacccagccgagagatacaccttgtttctcttcttctccttcaagctcttcaagagctttctccttctcttaatctccttcttcttcgagctacaacagtagctattatggccaagcctattactcctcacacctgcaaaacacacaaacaaaccgagagagagagaaacagtagcaacaaagatctaaaatgatctttgttggtttagaagagagaaaccgaaaacactacataaaaaataaagaagaacacaacaaaatttgatttcagagttccccttgaaatcaagagtacat

SEQ ID NO: 259471 - DNA, 876 bp, Cannabis indica
tggttcttcgtctgggttctggtcctagtttgagtcccagatctagacatcgattactagtctgttcaagatctagatcactgtcacgggtctcggtctggttctggtttaggtcccaggtcccatttgtgagtttgggttcgggatcgagactggagtgtcgtctaggtcccgaccctggttcttgtccctagtctggttccatgtttgggtctgagttaaggttcgggttctggtcccgattcaagatttgggttgggatccaggtttggctcccaattcgggtctaggtctcatttggagtctgggtccttgtccggttacaattctggatctaggtccaattttagttatgattccacgtcctagttccagtcccggtcaacttccagttttgtttccaattttgggtcacagtgtacgggttcgggtccacttttgagttttggactgggttcaggtccaggtgtgggtacgggtccttgtcagggttcgggtctagggttgggtcacaaattcagacaccgactacgggttttgtccaagccctgggtccatatctggatcccaatctcaagtcccagtctggttcgagttctagtgccgggtcattagctgggtcctagattcaagttaaggtctgggtcgggaactaggtcccggacctagttctgtctcccaggtccctattcttattctaggtctaggtaccagttattgtgtgggtttaggtcctggtcctagttcagttctagttccatttgcgattctgagttcgagtttaggtttgagttcgggtcggagttcgaaacctggtctgagtttgggttcgggtttggatttcagtctgggtccaaatcaggctccgggtgtggg

SEQ ID NO: 259472 - DNA, 574 bp, Cannabis indica
tttatttttcaaattaaaatttatcacagtaataattaatttagaacactaacatagtagaaaatacaaaattacaataacaaaaatactatttttaaataaaataaaaaaaacataacattaagttataaaactaaaaagaacaacataaataaaaataagcattaagtaaaataataatttaataaacgcgtgattttatttaagttttcttttttttttttttaaaaaaaaaaggtggatttaatagatattttattttactaaattatatcataaattagttatttttgggttattaatatgaataatataaaatacaaaatatatttatttaatgagatatttagtctaaattattagagttgttacaccaaaaattgaagatcttacatcaaaatggtgtagattctacaccaaattactctaacaattggagatattttagaaggtcgatttactttgttctgttattctcttcttttatttattttttttatttttttatttttggtgaaaatctcgtataaaaaaacaaatctcttatcttccacattaatactaaatagataat

SEQ ID NO: 259473 - DNA, 1078 bp, Cannabis indica
gatcacgcacgttttgatgaggcctcatccgtacatttataaaattcttggtcgtctcaaatcgagcttgatctgacgccatcccaaatagttcagtcaactagttcatgatttctgcagccgtgagagtatttgcaaaccttgtcttcaaggtgtcgaccatgctagacaacataaagtattgagctttgttgttagcattctgccaatgctcaaacttttccttaactgccttggtcgcacttcatttaatacaaacagggcattttcacctacgagagcaatgttaatgttctctttctatttgataaagttagctccagagaacttgttgtcagtcaatagtgacaccatggggttgttcatagtcataatgggtactacagatatcaataaatagaaatcaaataaggttcaatacaaaatcatacacattcagaaattattaagcacttagcaagtaggaatgacaagtgaaaatactaaaacaaacaatcctaaataatttctaaggtttccaacaaactggtacagtatttcatattgggtgagagtcaaagatatcattcattgaatagagcaatcagctcaactaaaatggacaccattctagtaaccttttattcgatcgaaaagagaatccgacgttgcttcgttttagtcgaaggtcaaggtcattcttatttcatgagcttctgccattgtttcatactttgtaagtcttactcttagcagccactatttagatggacgctactaagaataaaacacttacaataatacttatctttcgagattctacggtgttaaattactaatgaacgtccatctattggggatgaatctcactaaaacaagaactatgtagtaccaacaatggagatcgaatatccttataataaagttcattatttaaagtgtattttcatctttaatttaatttaatctatttattttaattatatatttattcaattaaaattactaattcagatacgctatatataaattttaatttaatatttataaaattatacttagatagatctgaaaataaataaaattatttttcatctta

SEQ ID NO: 259474 - DNA, 533 bp, Cannabis indica
agagtacataagcattgtgaacttgtcaaaattttgcaaaaaatgagcacacgtagggctcgccaatttgcaaatagaaataaaatagcggctttgctaaataataacgcaaaaatgagcactatattaggctcgcccatttgcaattatagataagcgcaataataaatttgctaagtaattatgcgagaatgagcacatatcgggctcgcaaatttgcaaatatagtaaagtttagcttcgatatatgatagtgtttaccaattaatttcacatacatactagattttctctcattaattcagcatatattaatttaattttcgaaagcatgaactgacaagaagaaaaatatacgtgcacctgaatataatttgtatatccgagacttttcattcgcttgggccaagtattgggctccatgaaactagtccaccaaaaacgaaatgactttcgaatattatatgcttctctactccttgcatacaaagccacgtgctctttttatttatatacaaaagctattgtgcaca

SEQ ID NO: 259475 - DNA, 685 bp, Cannabis indica
atctatcaaagttgacaacgtactctccactcacatgaaagactttttcttgtcctattaaatccaatatgacaaaaggcaaaacacacatccatgggctaacctactagacttggaccgcccatcagtgtacaaaatatcactaagctaactactaggcctcatcatacattgtagaagctagacatggcttctaaaaactaaaacttataaattgaggtatccttaaacagattaaagttgagtaggtcctcaagataaaattacatatggcttgtttacaacaagatatattaaaaaatattcatacacgaaatttggccttcaattattcttgagggcccaaccctttacaattcaatctaaactaactactacaacttatgctgggccaattattctcgatctaaaatcacactataggcactccgagtcaatcacgcacgcctgcgggtaatgctccttaatttgagtataacccaacttaaagagcaagggacaaactgtagtggccaaaaatttctctaagcccaatgaaaaggcccaacgatcgaagtacttacaaagcccacttatataagttagaaacaaagaacccataagcccagtggctcacatgggccacgcccaatccatgccttttgggtcatacccatattcgaatgtccaacccgcaataaagcct

SEQ ID NO: 259476 - DNA, 1076 bp, Cannabis indica
cattaatctcaaaagaacttccccagttcaattgcttatcttatcaatcctctaggagcgcctggttttgataaaatgggttttgatgttcagggtgaatccctaacatactcccctaattgtttcaatatccagggtcaatccctgacatattctggggttccaggtgaagtaatccttgttttagttctgtcttcgactgtcactggttgacgttcagttatggaaaccatagcgagccaatatctactcaggtcacaattcttttacacaattgctttaccggagtaacaaccctttgtattcttgtgacccgctcccttttgagataaccaaagtgtcccttcttctcgcggaagagggttataatcttcattcactcgagttattggaaagatcgaactgatcataggcatcttcctgcccatttatatatcgttgaagatgtccttgcgatatgagactttctatctcatctctcaattgacgacactcttccgtggtatgaccaatatcaccatgatattcacaccgcctatttggatcccttttgcgcctcacatgtttaataggtcttggctcaccaaaaacggcttcctgtacaagtacgaggtaaattttttcccaagtttcattgagctcggtatattcggcataaagaggaatatatttgttgggcttcttatccttgagcagccttttgggatttttttttatcccaaggcctccaaatcaggttttccaacagtatcgtgccccggttgtctcctgggcttcgtgacctgatgccctctaaacttattctccaactcgctcattcgtaaacgggatgaatcctttggccttgaaccgagtcgttcacggaggtcaggattcttcaagtttagatgttctcgtagatcactcttatcatgataatggtcggaccttgcccttcctctcaaggtttgactcacctttttcttcttacaagggtttgcacgagtttcattctaatgagcctgaatagtgggttgacgattttcgtccaatgttccgcgtatttcaggctgggtctctaggttttcctcagttcc

SEQ ID NO: 259477 - DNA, 868 bp, Cannabis indica
tttgggttaggtgaatttgctattattagtggattgttgtgtaagggtgacagtagtatggaaaaatatataggaaggggagatacttttgtggacaagtattttagtgacatgactgttaactatgctgccattaaacaacgattcttgaatagtatcttcaaagatgatgtgtttgcttttagaatggctgtgctttattttgttacgaatttcttgcttagtaagcctggtcgcaagaaagtaagtagtgggttacttcatttaattggttctggtgagtttaacagttttccatggggtaaggttgcgtatgatactactttgtatagcttgaggactgttttgaaggaaaaaaacaagaagaaagttgttgatgagacgaagggtacagttgcttcgaaggcaaaagggaagaacattaagggtaaagaaaaggattacaatagtaagacgtacaagttgtgtggtttcccttttgcgtttcaggtttggctctatgaggttattcctctttttaagaagcaaggtttatgtacatatgatgcttctccagattataggatgtgtaggtggagtagtgtgggcaatcctttctcaggtgaagtggagaagaaaatatatatgtcaactaaggtatgtttttgtgatatgttattttattatttttgtgttgtgttttgtttttttgttggttatgttactaattttgttatttttattttattttgttacagttttctgttacccgcatgtttccttcagctgaggaaaatcaaaagttagatattgctgggtttgagttttcttatgggtcagaatctgatgatgattttgaggatgtgagacagccaagagtagatgttga

SEQ ID NO: 259478 - DNA, 1649 bp, Cannabis indica
cacgtacggctcctgtttaacccctattttcagtgtgctaaattttttctgagtttctcaaaattttgcaggatgccttaaattataaccacaacgtagacgatcataaaaaaaaattagactaaaaaattttttagatgccgaaacagatagaaaatctatctgtggacctcttttaaagattgtagaatttttctataacctactaagtagccattttacaaaaaaaaaatgttatcaaaataaaaaccaataataataaaaaactaattaaactagtactaattaattattattattaatacctggattagtggcagcaaatcttatggtggcccagccatttttaggcaccatgacagtattttgcaaaggaggatcaacaagattatatcccaattcatctcttttgggatcaaaattacccaaaccataaccaacaacataaaaactaaacccatgaagatgcatagggtggtcaattccagcaaccaaattagttccttggaacacaagttcaacattagacccatactccaaaaccctaaccctagttccattcatcggcgtttgaagcgccaacggcaaaaaatcgcccgtaaagttaaacaaaagaggcggaaaaattggaaagtttgccctaacaatcccattgatgtgaaaatagtaagcttccaaaacatcaattttgttagggaacacaaagcttatgttgttcatactagcagccaaacgtgtcccattgggtccttgacacgtgtcattaacattatagccattagggcaaggaaatgtgttgattgaaatagtggaaaaaatatgtttgttgattttgattggaacatttattggatggtcttgattagccaaactcctaagacttgtcacaaaattgagagctgagtttgtgtcattgtagtaaggaaggtcataataaggaaacaaaggttgaccagtcaaacgacatgccacgtcatcatttacggtgtcgtttaatattttgtattgtagaatggctgttgttgtggtgttatcaaaggtgacattcactcctgttgagtaagccctagctgccatgtagtattggcggttatttcggttggggggcgacatgacggtttgtaacagggcgtcgatggtttgacctggcgagattgttatgaaatttgtggttaagggtttggtgtagctaccatcaattccaaccacagtgagattgtgttgagctatggagaagaagaggatttcgttcattgctgcatttattattctcaataggtatcttttgttttgttccacaactagtttgaatgtccctacataataataataattaattaattatgattagagacttgtttaaaatattaattagtagtaattaagggtacttataataaataaatataacattaatatatatatatataacactataataaatatcttttgttgttattattatttttttggaatttaaataaaaattataattactagtcatagtaaatttagttaattttatggtaatgttcttgctataaaaaaatatttatgggagtttatttattattttagggtataattatgaaattaataagataacaaaaaaaaatgaaagagttaaatcactacaaaaaaaatgccct

SEQ ID NO: 259479 - DNA, 1131 bp, Cannabis indica
tctaaatattcctttaagtcctacttctgatgttgatatttggtattggaataaagaaccatctggtttctatacagttaaaagtaacattatcttcaagttttgaaaggagattggagtttacagatggaatttgatatgcagaaagctctatggaagattaaaagtccttcctaagatgcttcactttgcttgaagagcactaacatgctgcttagctactaaaactcagcttcacaccaagcatatttatgtatagttgcaatgtcttttctatcacgaggatgaagaatcaattcttcatatattggtcacttgctcttttgctcaatcttgttggaacataacaggtattgacttacgcccctcatcggctactagtattgatgtttggttctctgaattttgcaccaaggtcgaaatggtatgctggaagaagtcttgatggtgggttggtcgatttggaaggcccaaaataatcttttatagaacaatcgtaattgttgagttccagatgttgtctctttggcacataaagttcttgatcaatggaattgtgctcaatctcatcgtgttgagcccctactgcaagaagatgttaatgataatagcaaagatttttttggactaaacctgtattaaatatgatttagatttatatttatgtggatggagcaccgtagctgacaatgcgtttggtactagttttatagctcgagattgtcatggtgttttaattgaagctttttctacctattcttttagtggttctcaacttgtcgtggctgagatggtaggtattaaagagacactaagtttgacaaaaaggaaaaagctgcttaatgtgatagtggagtccgattgtatgatggcaaatcaagctcttcataattcagttgagatgtcatttgtgtttagtctcattgtttaagactgcaagtttttactttattttttgattaatcttaatatttgttatgttaaacaatctactaataaagtcgttcattgtgtttctcacagctcttgttattgttcttgttaaaattagacctcactgtaacctttattattacagttttacagatgaagtgaaaattacaaataaaagcaaacagaatacaacagaaa

SEQ ID NO: 259480 - DNA, 548 bp, Cannabis indica
gaatgatgaaatccttcacaaccaaagcactagaaaatttagcaaaccattgtcttgatgcctgctttaatccatatagaggttttttaagtttgcatacaacatttggtggaagctcccccttaggggtatacccaggaggtagagtcatatatacttcttcatgaagatatccatgcaaaaatgcattattgacatcaagctgatgcaaataccatccattttattgctgcaagtgcaagcacaagtttgacagtcaccaacttggtaacaggtgcaaaagtatctgtgtaatccacaccttcttgttggttatatcctttagcaattgctttgcatctctctccagatccatcagcattgtacttgattttgtagactcacctacacccaatagcatggtgttcagctggtaaagaaacaatgatcaaagtgtgattcttctcaagagcatcaattttacaatccatagcattgtcccacactggaatccccttggcttgactgaaaaaatcaggctcataatggctggaaatggccagaataat

SEQ ID NO: 259481 - DNA, 1748 bp, Cannabis indica
taaaaataattttttttgtaatgattataccaaaaactaatatcatattttattaccagtatatttttaactaactcaaatatatatacaatcatcaaaatattaataaattcaaatagctttgtttaaaaatatcaagcaggtattttccttttctctttcgaaattaaattcttattatattctaatttagtctttcactagtttcggagctacgaaactaactgggaagctcagtcctttcatgggaagggtccagtcgacgatctccggcgacattattcttgtttctgtttcagttttctgtgattatctgggtggtattgcggttctctggggttgtattgcgatttgctgcgatttactgggttacggtacgattatagttgcagttttttctgggttttatttgcaggtctttctggggttttctgcgattctcgttgtgcacaaggcgggttgtctgcgattctccatggatttggagttggtgaatagactctctgaggtcttggttcttgatgagggtgatggccgtgttctttccttgaacaaggatggtattgaggaaggtaagaaaaagatggagttatgtttggtggggaaggtaatcggtcctaggccggccaacaaggaaggaatcaagaaggctatgaatggggtttggaagatccaccaccgatttcaggtggaagaattgagctctaagaatgtatttcggtttttctttggttgtagggaggatcggcagagggtatatggtggtggtccttggaaaattgacaagcaattgatttgctttgtgaaaccaatagggctgggtgaaatttcaaagatgaactttgattttacatcattttggatttcgattaataacgtcccattagcttgtatgactgaactttttgcaagagaatggggggagaggattgcaaagctagaagacatcaagattgttaatggtaccatgaaagtgagggtgcgcattaacattacagagcctcttaagcgtggattacgtgtggcgattgatgatcaaggtaatgaggtttcacttctttttcaatatgaacatttacctgacttttgttttgattgcggaatcatcaggcataaggcattggattgtcctttgagggattttgctggggttaatcctaacactgaccgtgggaggtacggttcgtggatgtgtgctccgagttctccgccgtgtgatcgtttttggtaccagaaaaagcgagagacttctccctctaacaggccgattatgactatgggggaagcttcaaagattgtttcggctgttgagagaaaccgagttcgttactctggccctacgccagaggagttggcccctacctctattttagaagcttgagaacgtgatgaagaactggctatcaaagccaatttggatgaaaatgctcccgtgactgatggggttcaatcagaggtgatcgggtttgagatgggtagacagaatgttgatcttatggtgtccgaagaggtgcccttgccttcttctgcgcctcaggtgtgtataccggcggtgggtagtgtggtgcccgatagtgatattgggaaggggcggtcaggtaaggtgtcttcttcagaagtgaatgttggttcaactaatggtgaggtggacatgcatggtgcgggagagttgagtgacaaccattctgcaagtgtgaaaaagggacgtttggatgagcaatctgacatggttcctgagtatgagaata

SEQ ID NO: 259482 - DNA, 100 bp, Cannabis indica
cactctcagctatatagaacgctctatatgttccaccacatagacacgctattaattatccattgttataatcctaatttgatcaatgatcctctatata

SEQ ID NO: 259483 - DNA, 509 bp, Cannabis indica
tgctattacaggtaaaaaaaatgtaaccatcatggttacaataaaaatgtaaccattgagtagtcaccaaaatatatatatatatatatattgttatgaaatattatttatggatgtccaaattactaaattaattatcaccattaatgtttggttgtatttttctttattacattgatttagtttcccattcttaattaacacactaggactcaataaatatatacgagcattctggacaaataatgacagaaggaaagagattgtaaataaaaacaaacttaattaacactactacaaaagtcagaattcgcgacagtcttaaaaacgtttttttttaaagacagtcgctaaaaaaaattaaagtaattatttaaaatacatcggaaaaaattagtaatctccgaaggtttataacagtaaatcaaaaataaggcgacgattttaattggaattcgtgaatttattgggcccttatcccaacgatttaaaactgtcgggtatagtat

SEQ ID NO: 259484 - DNA, 532 bp, Cannabis indica
agttattgatccttaagggagcgctacggacaaaaagaaagaaaacgataaacgacaagaacaagtaaagaaagcaccgatggaagcggaagaaagaacgggagagaataggtaaccgacggattgaagatcaactgtaagtgaaacgataaaccagaattcgatgaggcacccagataacttgccgacggaggaagtacctaaaacacaacgaagggagggtaccgaggtaacaccactagcaaaacaaaggcccccgatagaggagaactcggatcccctcagacgagagctccggcgaaaaaagaaggtctcaagcataaagtaagaaattgatactttcaagaatgcgatgctgacggacacgacaccgtcgaatttaaggtaactaatagcattaaaacccactaaaaacatagacacgtgtaacgctggagttatctattagaatacgaacacgtggcagggggaagaagaataaaagaaagagagcacgtgtcgataagggaataggaggatgatagatcgtcca

SEQ ID NO: 259485 - DNA, 987 bp, Cannabis indica
attggaaaaaaaaacaaaaaaagcaatcataatgagtaaaaaaaatgctccaatatatatttatatatataagtaaaagttaaatacctttaagagacatggaataaccaacttcacaccctgagcagtgagcactgagttgcaacattattgcacggcagcgcacattcagcagcatcacaataacctgatccgagaagaaaccacaagtaacagtaatagttgaatcacataaaaaaacatataaagaataaaagttaacatttataagtatatcatgaaatatgaaggcagaattgtgtagccactcaattgcaagtgttgcacaaagatactcaaatccaaacaaggttccttcaaaacatttataagctaaaagaaaatgttaattggtgttagaatataataaatcaaaatggtaacttaattattacaaaaatggtaaataaaatataggggcaaaaatcaaaattacaagcaacttcccatcactttttttctttcctcatcgtagaaaaattgctaaaactactataatgagataattatatttagtagacgaaagttgctccacaatgctccaccactccatttgagcaactattttcccactcaatgttacaattgtttttttgttcttgcactcacagtcacatttgatgatgatgcactcatcgattatctcactatcgttgtcgctatcgaaagccaccaactccgtcgcagtaaaatgatcgcaagacattgttgtgccccttacagttccattgggcctccgcgcaagccatgcaacctgtaggattgatagagaccaagggagcggcagatgcagaatgcgaattgtaatacttcaaattaagtttaaatcgaattcggtttctaaaaaaaaaaaattgagatatttttaatagatgtgttaagaagtccctgatttcattttaatggcgatacaaacctgcaaagaataccaactccataatatatttc

SEQ ID NO: 259486 - DNA, 841 bp, Cannabis indica
tctctaataggcgcattaggtctatgccagttaggatcgaggataaggagttgagtgttgatcttattgaactggaattaacagaatttgacatcatacttgggatggattttcagtccaaatattcggacagtatagattgtaagcgaaaaatggtgacttttcagccagaaggtgaagatccaattatttatgttggatcggttcaggggtctcggatcccaattattctgtgctaagggctagggatctactacacagtggatgtgtaggatttttagcagtggtgattgactctagcagatccgaaacatttgggcctgaggtagtcagggtggttaaagactttctcgacgtttttctcgaggagttgccgggattaccgccgcaacgacaaattgactttgtgactgatttggcacctggagcaaacctgtttctaaagctccatatagaatggctccagcagaacacaaggagttgaagcttcagcttcaggggatgcttgatattgggtttacccgacccagtgtatcgtggggagctcttttgtttgtgaaaaaaaaagatgcttcccttagaatgtgtattgactatcgggaactaaacaagttgacgatcaagaataagtatccgttacccagaattgatgatttattcgatcagcttcagggaaagacggtattttctaatattgacttgcgatccgattatcatcaacttagaattcaggaagaagatataccaaagactgcgttccgaaccagatatgggcactatgaatttctggtaatgtcattcgaattgactaatgctcctgcggcctttatggatctcatga

SEQ ID NO: 259487 - DNA, 1013 bp, Cannabis indica
gtacaaggccagatctggcctttgccataagtaccttgagcaaatacatggcaaaaacaagaaaaaatcaatggcttgcaatgaaatgggttttcaggtacctagtagggacacctaaggttggactcatctacaagcaacagaagttcagcaccaacatagaaggatacagcgatgccgactatgccggggacagagacagcagaaagtctacttcatcttacatgttcctacttggaggaaactgtgtgagttggaaagcccaactccaacctgtggttgcactttcaacaacagaatcggagtacatatcaaccacagaagctattaaagaagccatatggatgaaaggacttttgacagagattaagttacttaaagaggttcctagagtgtactcagacagtcaaagctgtgtacacttatgtaggaaccctgtgttccatgaccgaactaaacatatagagattaaataccactttataagggacaaggtgactcaaggtgaaatacaagtggaaaaagttcctactgaggagaacccagcagatatgggaactaaggtggtcactctcaacaagttcaaacattgtatgaacctgttgggagttgacacaggatggtaaatggacacatattcaagcaatgaccctcaaagacagcaacaagtaaataaagcaaaggcagaaactttttggactgctagtatggaaatttaggtggaatttgttggataaattcccatactattgtcccataaataaagttacaaggaaaataaattagacctctttataaagcctcaacagaccattataactcatagagttgtcggttctgttttcctaggcttaggtcttttatttcttaacaataaaaggaagcaaataaatatctcaagactctaacaactttcagctttacaaggaaaatatctcaacagattacaacaaactttctcagatcagaaacaaacacaacaacaacaacaacattataaataagtggttcaa

SEQ ID NO: 259488 - DNA, 3915 bp, Cannabis indica
tattttattttttttttggttaaaacttaaaaaaaccgttatatttttagtgatctaatttttttttaattttcttgcataataccacaattggagacactttaacataactttgtttttttaatctaggactttagttgtgaaaatggcacatgtctggtcggtgtttaaagttttcaaatcacctcttttgaaattaattatgctataaaatctgtgttgtttggattggtgcttatttagggctgttgagcgtatttgtagtgtgacactcaaccgagctattagaaaatgactcgagtaattttacccaaatctttaaccaacctttgaatgtatgcatgtattgtgtacgtattttttagactttaaaatgacttatatcgatattcaacagggaactgtgaaacaatttcccagtagaccttaattggtagctaagataccgccatgttaaagaaagactcaagaattggagtgattttaagtcttcttaattaatctaatatgtccaagtacgtacaactatacgtggagatggggtcctgactgagcgttttcatcaagttttggtgtgaccctccctcttgcctcctatcctaagcgtccttttactgacatttatagttttggtgcacttagcttttagcaaagctagaaatttctgctcattttctcaaatggaactgtgtttttttttactgcattcttttatcattaaattattgtgggaataaaatgattctcacttggttttgttttgttgtggattcccctctccccaccattacattactggttaaatacaatatatgagttcatataagctgctggtgtcatttctctcttggtcaataatacacgcctattacgcgtttctggattttaaaaaattcagattgagtgaactcaattgctctaaagaagtttcaatgaagtttccttaatatagagctttagatgatagactttaattttgccacttgttatttttatagtcaatgttgtgtgatggggattgtgtggctctagcttggtcaaggtaagtgtaacccatgctgtattattaaaagatcatttaataatcctccaatagctgccctgccgtaaccatcatttcctaagtaactgaaatttttatatgtttccaagattatgggactcttgtataattaatgtaaagagcaattgctataaagcatcatttatgcatgtacgtttttaatcatttatatgaaatttaatatttaattactctaataacattatatcataaatagtagtaggtactatttgtatcctttagcatttgtcttaatataacaaatgatgttttaataaattaaatctatactcttattagttcatttttaatgtgttaactttatttgtaatgtaaaatatatagtcttgaatattaatgtgtaaacctaataaaatatttattgaactcatttaaattagataatttatatttagcccaaagttcaaataaattatcttaatttgtaagtccacatattgaattattgaaaataataacctaacaatctcttacttgagctacaaactaattccaataaaaattacatttgataactttatgtgcgcacatacttgttaattattcttaaaacatcccctttagacaatccggtgcatctccaatacaaatatgagaccaaagcgaccttcattacatttatcgtaattggacccttcgattatcaccatatcaaatatattcattgacatagatcaagtatggatgtgcaattggaaattatatgcaatgtgatcttaattatgtctatttacaattagtcctttattccttagtgagatcaattattagtttttcaaactttatatcgaaccacaattgaaagataacatattcaaataaagataataaaactatcaattttattatgcaaaaaattgaacctacttaaagtagtgtaatagtgtcaatcaacaaagtaactagtatagaaaacaaactcccactaaaactgcacttcatcaaataaaagttaaaacaacatccatatgagcagtatgttcatgaaagaccttgggtgtcaaagcttcagttaataggtttgctagcattaagtttgttcctatatgctcaatagtaactatctaacctaaaccctctctttaccaattaactagaaacttaatgtctatgtgtttaggctttgataagcttctattgtaatccgaatataaaactgctgatagatcatcataatatacctttagtggtctttcaatcataacttgcatctaagtgaccaaattacacaactatattgcattattggttgtctcataacaagatatgaattatgttaccataatagaattagctatgagtgtctgcttagcacttttgcatgatatagctcctcagacaacaagtggacatagccataagtggatctcttagtttcttggcagcccacaacatcaaagttagaatacctgatgattttgaaattttcaaacttcttacaagtgagcatataatcattcattctttataagtacttcatgacctttttggctgccttccaatgatccatactgaggtcacttaagtatctgtctaatatagtcaccatgtacgtcaaaactgggtgcgtacatacctgagtatacacaagatttccaatagtcgaagcataaggaatcttcttgcatctttactctttaaatttcgttcttggagcaatagttgagactaaacttatctcttttctcaacatgagttagattaatttactcccattgaacttgtgaatacacaactatcaacaacattaactttaaatctatatgagacaataatttgatgaaattgtgataccattaaagggaagatttcttgagaccatagattgattttgagtttacaactatagactttggataacctgatacaaaattttctagttgtatcatatatatggtttcctcaatgtcaccattgaaaaaaattgtcttaacatccatctggtgtagctctaaatcaagatgagctaaaagtgacataattattctaaaagaatctttcgatgatactggagagaaagtttctttataatcaacgccttccttccgtataaaatccttggtgacttgacaagatcctaaatgtcactatctttcatggatttcatcttatcattcatggcatcaatcaacttttgataattaacactttatttgacttgttggaaattcattggatcatcttccattgtccttatgtcgaacacgctctttaataaacataataaaataatttgaaattgcacttcttttctccctagtggatcttttaagtggaacttcctcttgaggttgttgagtttgctcttctggaacaacatcttgaaattgagtatcctcatttttatcttcgaatatgtcttaacaatgtcaaaaataggttgattattgttaaaaaaatatttggtagaagaatttatttctctttaaaaaactacattccttactttatctttctcctcaaacacaacatcctcaaaaagtctcacatttctcgtgtaaacaaaaggacttggcagatggatcataaaacttaaaactcatcttcctttcaggatacccaacaaaatagcaagtaaatgttcttaagtccagtttattttcatatggcctaaaagaccttaccttagctggacaatcccaaatatgtaagtgtttactactagaatttttccatgtccatagttcatataggagtttattagataccaatttgctaggtattctatttagaatgcagactgtagactgctagacaatcccaaataaggtttattatttattttattaagggaaatttgcggcaaaagtccccaaaaagttcacgttgat

SEQ ID NO: 259489 - DNA, 1329 bp, Cannabis indica
ccagctaaagtttggaactaaacatgatgggggatatatgcacttctcagtacaatgcatcataaatattagaaagcatatagaacaatagtatgctaattctaatacctccaatgagagaccttgctatttcacgctctgcagcaatctgaagtgggatttgaaacttcaatgaggggtcttcataatatcctcgcttcctcacgtaagttgaattggtctgaatgccatagctaattacagtagcattttcctcctcaaaatgcaaagctcccggacaggtcataggtttatcaaacagatattcatctacttcagctactgttctaaatgatttaacctgccaaacagagcagttttataaccattaacaatcaatccaaactactccttgtagatttttgcttataaaaaagttgtgcaattaaaaatcattgtaagaacaacgctatactagtgtactgtatctgttgaggtaacgattatatttaattaaaaaaatttagaaaagaaaaaataaaaaattccccagaaccgaatcacccaaaacgagtcaattagtcaaagacggaaatgccacgcggcaagtaaagtatagttaactttacatgcagagacacacttgatattaagtaaatcaaagattttctgtcttaaattaaattttctctccctttctttttctttttctcggcaccaaaccaaacacgaggaaaagaggaattgtcgagcgaaaagtatcaaggtaagcaggcgttaactgtagcttaattaagagtgtaccttattggaaggaatcggccttccgggattattaatcaaaatggctcggacaatttgccgaaccctagcgcttccattaccgctccagacgaagtcgagacaaggaagcttgacatagaacttgtcttcacacggggggattggaaaagagagctgaggttgaggattaggaacgctcctgaaagcggtggaggaagagaagcgagcctcgacagctttctggattgcgaagatgaggaagatgaagaagaaagaggcgaatatttggaggaaagtggccgtcttagtccgccatgaaagcaagaaattcttgttgaaaagggacttgtactgttggaatagtaatggaaaaccgctctgtaaatccatcagatcagaccgtaattttgaacaatcttgtttggtatggacatggagatgagatggagttggaggctatgatttatcatttatgaagaagctgttgtttagctgttaggtactgttttgaaaaggcgcgcatttggttcattttgctaaaaggcactactgtgcctaacttggtct

SEQ ID NO: 259490 - DNA, 978 bp, Cannabis indica
atatgtgagaattttcaccctcaggaagtgatagctgtatacattttagaatgcgtacacgcaacaccaactcttaaaccaatgaccttttatgaatttgaagatatggtttcaggatataaagccttttctaattgattgaaaagattagaaaaagagaaatctatacaaaaaatggaaatttaatgtggatggggcctggagtatatccggagtttaaacactagtcatttagttttggttcttgttaacactttgtttttttttttcagttgatgggaaagaggtgggaagtatccagagcaaactcctgtgtaagtcgattctggatctttatattggtgaagatccatttgataaacaagccaaagaagatgtcaagcacaatgtagcctcactccttcaggaataggggaaagttactataaattgattgaaattttaatgaaatttgtagattacagaataaggtttcaagaattctttttagaagttttggaagagaatttatttctttattgatattgaactctgaatatacactggtataaaatatatggtatatatagaatacaaaggagactaacagctaggagaaaaatatacaaggaaataataatacaatctatttctagaaagttgcatgtaagtaacgagtaatttcatgaaacttaatgaaaaaaatatagggttaatattattttgactattttataaaagttattgatttaatattcatttttcgatattgagttaaatttttaataattttttttttagtataatcaactgaagacaatttatagcacaaacaaatttatattttttttttataaaactttcatattaggttattattaagtattgtttatatagtatcagttagaaaatatagggtttgatttatcatttaataaaataaaaagttcaataaataatttttgtaaaatacaaaattcaagatagtatttatttaaa

SEQ ID NO: 259491 - DNA, 1082 bp, Cannabis indica
ggacccaaacccagacctgggacccaaaagggaaacttgaaccagaacgtgaccaggaccctggaacaagaccgagactgtgaccaggacctggacctagaccgggacccgaaactaaactagaacccagcctcggaactcaggctcggacccgaagctaagacaagaactgaacccaaacaataacccaaacttagactgagacctggactaggactgggacacgagacctgggacccgaacctggaccgggacctagacctgacctggtcctaaaccctcgtcgggacctgagacccgcaacacagaccaggatctagaccctgacaaggacctgaacctgaacctggactaggaccgagacctggacccaaatccagaccaagacctggactaaaaccaagacttaggacccaaacccgaacttggacctagaccaggacctaagaaccagacttggataggggagctagaccatggacctaggccccgaaacccagaccccaatctaaatccaggactcgaacccaacccaggacttgacctagacctgagaatccgaagtcagacctagacctggagccgaaaccttccctgaacccaaaaaaggataggaacttagacacgaacccataccacgaccaaacccgaacctggactcaaacccaaaattggacccgaacctaggacctgcacccggatctgaacttaaacccagaccgggatcgaaacccaagacttagacccggaacaaatcccagactcatatcgagatcaaaaaatgggactcgaaccagaacctagaccaagacccaggaccctaacccacacccggagccgatccagacctagaacaagatccgaacccaaacccaaactaagaccaggactcaaacgccgacacgaacacgaaccctgacccaaactcgaaccaaaacttgagcttagaatcgcaagtggaactggaagcagactaggactacgaccaagaccaggacaaggaccaggattgagacacgaacccaaacccaaataacaacccagaccgagacccaaacccaaaccgcgactaggacccaaac

SEQ ID NO: 259492 - DNA, 1394 bp, Cannabis indica
aaatccttttaatggggggataattttaatgaccacatgttagatcatggattagtaaagacaattagcattagttatggacattttataattatatatgattttatatttgttgtgggtcccatttttagaaataggcattagagttataatttctcaatttcagagattttattaaacttttagagtattatttatgctaaatgagaattgtgcaatttttatgatttttgtttggcgacggctgaaaatgtgatggatggtcattagagtcacatgagtaagtttagaaccttgtttttagcgggacaaactattgagatatttagaatgccgtgtttaagcgaggttatagttttggaccattttatccctaagcttaaaactacttaagttggaaggaagaacaaaattttgggaatttcgttattaagtttaggtggatgattagttgtgtgatagctgaccattggtgttttcagcctaagttattgtagtatataatggattaataaaaaaaattagagaaagagaagaagcaactagaacctctccctttctatttctcttttagaaccaacaaggttagggttcaattcagtttgttgtggttgattcgtgctgggaaattagtagcttttggaaggaggaaagtgaggtatggccctaaattcttcttaatagttttctagtagagttgttggttctagcatataaattttttaattaaagtttgttttccgggtttaatttaagttgattagagttggtttgaggttgtcttgatcttgattcttgtgttgagtaacttgagtttaagaactcaaacttggctcaacaatggcatattgagtttttgtgcattttggctgctgttttttgttggtatctgttattggatgttggtacaagtgttctgaaaagtttaatgaagtttggaattgatttgagggagtgtcgaacttgtttgtggaacttgctatcaaccggttgaccggttctagaggtattgtagaaccgattaaccggatcaagggcaggattcccaaaaaaatctattttgtcaattcatgttatttttagagccatagtttgttatttccataattaggatattgtcatgttaattattgatagcgaaacttgtagttgtgagtttagattctcatattaggttttggcttgttatttaactatttgcgtaaatgtgacatagagcattcatctagcacgtgattttccgttaggttggctagtgcacttgaattcagaaacaaagtaagattagcatagaacgtatttatatacgaatatgtgtatgtgtgatatatgcattttatttatgattcgtgcactaccaatactagtacggtataggtactgagtgcattggt

SEQ ID NO: 259493 - DNA, 555 bp, Cannabis indica
tgtgactaaaaataaattagtgacaaacttgtgtctaaatactatgttttagtcacaagtagttttttgttgtgaccaaaagtcacatttagtcacaaaaaatttatgttgtgactaaaatattgtcactaaaaatagttgtttttgtagtgtaaacttgttgagcatttaggatatttaatgtcctcatctatttcttttggatcagagattaagtgagtctaatcaggtagaattgttgggattaaactcacttaatctctcaagtcagtatgttcatctatttgctcatcagatgaatttgaagaaaactgctgcaatttataacagttggctttaataccaacttaaaagggacccaccagcaactatatataggggttcctctattctcaaatagaggactgagttgagagagttctgatctctaatctccaaagctcatactttagattcagtttagtaagtagagagtctaagatcgtagtgagtgtgtgtagagggatggtaaaaaaggagtatcactcttgaggtgatttccctcaatgtgaggca

SEQ ID NO: 259494 - DNA, 2067 bp, Cannabis indica
aagcctaaccgtcaagcctcataccaagaaactaaaacagctgcaaatccaatcaaattttacgagaaaaacttacatccagactcgctatatggcactgaatgaacccttttccctcgactcataaacgggggtatgataagagcatgcttatcagaagaaatgccagtatcctacacaacaatattaaccataatcatcagtcatttcagttcataagaaccatattcatgaaaagaaaagagaaaagcaacaatcaattcacctcttgtccataagtcaagagagggatatcagcagcaacagaagctgaatccacctctgatggtgtggtgatcccagaaccattgacatgagaaccaccacggccaacattgaggcgagcagcgagcatggcctcagcaatgttgtttggatctccaccaccattagcaatatgaaactcattctccaaatcatcaatatcatcctcctcttcatcaccttcaactctaggactccctaaattcaaagtcaaaaccacaattcagtaacagtaaaccaatccaaacttacacacactgatctgggattaacttaagaaacaaaaacagatcaactgaaatgggatttctctaaaaaggaagaaatggtcaaaaaattgtacctttgagacgtttgtatctggttttacactgagggcaggcttgatttccttctcttctttcatactcatagcaaggtctgcaaactggaaatgcacattcattgcaagcaacaaatggctcaccatctacagtgaactctatctcatctccacagatctggcaaatctgtccacttagttctttcacagaagtcacctgaaaatcacagtaatcatatcaatatcaatctggatacttttcagcttcattatgcaaaaacaaaattagtggaaaagggaaagaaaggaagaaaagaaaacagtcttttagagcccaaaagatagaagaagtagaaattttcttggaaacatttcaataattgaccagctctgaaatcaagagaaaaaaacagcaacactacttaataaagccgcataagagtccacaaaaagtgataacaaagtcacacaagagtataaaaaacaaaatctaatcaaacttctatcgaaaaaccagtaatgacagagattcaaccgaaactacgaaaaataaggagaagataagatattgaaggtaagaaataattgggggaaaaaaacagttacaaagttgtttttcacttggtgaatttcaggatctaagcacaaaaaatcatcagaaaggccaaaagggtactcattttggaggacttgttgaagctccattgccattagagcaaggtgttaagaaagatgagaagacttactcttgaaacctcatcggcattgataataacaaactcattcctattatgagaacccgcaatgagtgttcctttggtctccatagcaaccgaaaaaacttgagccaaatcaaaaaagctaccaaaatccaaagcctaaaactttcagccttgaaattgaaaccaaacgaaaacccacttcagaaaaccagtttctcaacctctcccatcactggggaaaaaccaaacccaaaaagaacaaagctttcctcttcttcttcttcttctggttcttcttacaagaagaagcaccaacccaacattatagaaccaataaaaaacagagctttatacagagtgtaatgaaagagagagagaaagagaaataaataaataaattaattaattaaataaaaagaaaaaaggaaatatattaagtgtagaagggtaaatgattctttgcttgagagaacccaagtttcaatttttatttattttctcacaaatgggttctctgaaaacttggttaactttcgatctgtaacacgggttgatgccaaattatagagagagagaatctaagaagagagagagagagagttgaaaattcaacggcccaccagtacgagagacaaagacagaaacacaggaaatcaagattctatttttatatattattatagatcaaagaacaaattgttagctgtataattattatta

SEQ ID NO: 259495 - DNA, 548 bp, Cannabis indica
aaaaagaaaaaaaaaataactagatcacactatgtataattttattttctctgttcttttttagcttttctttacttttattttttcattaaaaattaaattttttattatttcattttttacatatgctttcataaatgtatatgcaatatatatgcgttaaaaaagagggttaactcaaccaaaccaataaatgagttaacaattaaacaccactccaactccaactccaaccgatttaacatcttaatttcaatcacaaataaacaccactccaactccaagtgcacttctcctcacattatttcttattttccttttgggaacattttaaagtcacataatttcatatcattagttgacacttctaaaaataaaaaagttaagataagagaggctctttcaaaacaaaaggaaaagaagaaagaaaagagacttctagtaaaatatacattttatttttttaaaaatgtgtatttatatacattttactaaaatatgaattttagtaattgattgggatttttgttgtattttttacttttacg

SEQ ID NO: 259496 - DNA, 734 bp, Cannabis indica
tgacattggataagatatcataaacttactgttatatttttctaagtaaatatcacttagttgatcttaggtcaatagatattaattctgagatggttaggttctggcttactacaaattactctttttctgtcctttttttatgtataacaaaaaatgtgttggacatgaaaaaaaaattgagaagatttttagtccaacattgatggactagaaaaagaattatcatgtccatcaatattggactagaaaaataagtggggatgctaaacatggcccatgattcaagtccaatacggctacttggttgagcagctagttgaacgtattgttcatccagacctcttcttctgttcagattagccctgaggtcatgggccacacccaaactgttgaatactgaagtaccaggtggtctcaatgtctgtctgatttagctggtgggttggccagaactacccatttggatgaagttattaggtataactccacctaaagaacggtcaggtaggatctggccttctaccgcttggcccacaggttggacttgtgatcggagattggacggcagaccattatgagtttgggcagtatgcccagtagtaatttcttctgtactgcccagtgggataccagacgcggtggcgggttgctggtaagcaacttgataggctctccgcctagtgagatgttttcatctccctgtccctccactcaatgaactggcgtcgctg

SEQ ID NO: 259497 - DNA, 583 bp, Cannabis indica
atgcaaaattatgaaattctatatatgacatataaaatgcattccgaattcaaataaatcaccataaataaataattcaaggctaataaacaagtttcataattaaaccctaattatctgctaatttctaaattaaagctaagcggtctttacaaaaactcccttcatcgaaggtacttttcctcatccccctattaatcatccgtatagatctgcttgggatcaatgcaatagtatggttatggcatggattttgcaatggttctcacgtgaaattccagccaataatatgttcaaagaattgacccttgctatgtggaataatctccacgattggttcaatcaaaataatggtcctcagatttttcatctcaagacttctctaactcgcattaaacaaggtgccaattccgtcacgacctattttactcagctacagtcgctatgggacgaactcaatgaatttcaaccattcaccccatgttcttgtggctgtatttgtggtgcgatgcaacaaatccaagatcattatgctcgtgatcaaatcttgcaatttcttacgggtctcaatgaatcctatgct

SEQ ID NO: 259498 - DNA, 702 bp, Cannabis indica
ttgggtttgggactgggttcaggtctgagtgagggtccgggtccttgtcagggttcgggtccagggttgggtcccaatctcgggtcccactcttgttccatttcttgtgctgggtcacgagctgggtcctcggttcaagttcgggtttggttcgagtactatgtcccgctcctagttctatttcccaggtccctatcctaattctagatccatgtcctagttattgtgtgggtttgggtctaggttcgagttcgagtcctagtctcggttcgggtttaggtctatgcctgggttttgatctgggttcgggtttggatttcggtcctggtcctggtcctagtcctagttcagttctagttccatttgccattcttagttcgagtttgggtctgggttcgggtcatagttcgagtcctggtctaaatttgggttcagttccggatttcagtctaggtctatatcaggctccggttctgggttcgcgtcctgggtctttgtctaggtttggtctcagtcccaagttccaatcctgatctgagtctggattcagttcttggtctaggtccttcgttcagatcctggtctgggttcgagtttgggtccaggtctgggtctagctttgggtctgattctaggtgtgcgtttgagttcgggtttggttcttcgcctgggtttggtgctagtctgagtcccagatctaga

SEQ ID NO: 259499 - DNA, 4756 bp, Cannabis indica
taaacaactgctaatttccaaattaactaagcgggctttacacaaatcatgcccctcaaactttgacatgttcttagttatggcctttgaactttcatccatgttagacttttttttactaaaattggaaaaaaagtctttaaatccaacaacctccatagttcagtgggcatttttaacgatcttaaaagttcaggggacatgatttggtacatgtcaaaattcaggagacaaaaatcctaattaacctatcttttatcttttcctttgaaaacttaaaattttcatgtatttctcatgccattaggattaattagattaaatcctgctcctctttggatatgacattcgaattatagaaaaaaaaaaagaataagagaaaagatttttgatctttttcctttttaactctaaattctccttaatcttattggcattaggaattgtttaattttttaaatttagaattcttattctcataggaattttaaaattcattaagcaaaatgaagaagagaaatgattattgattttttcttattatttatcttttccttttaagcttaaattttaaaagactcccaactgccttagaattaagggatttagctccactaagacagctttcaatcaaattttctcacattccacattgcttcccactcacaagccttttcgagagtctttgattttttttcttcatcaattcatcaagttttctttatctgctgaagtagaaaaattctatttttttggaatttttttccttcttcttcctttgttaagcttgttccaaggattctagaactctctagaaatcattgaatttcatatttaagactttcaaaagttcaaaacacttgaatctatcttttgaagaccaagaataacttttcttcagttgtaagtaatcaaaattttgaagccaccatccctcagacgaagagaaattgaagaattcttgatgaatctgatgcacatgtgtctcagttcattagattcaagcttattatgccaaaatctaaaaacttagacaaggcacgtggtgggaaagtgagtgcaactgagcttcttaaagctgccattgaaagtgattacccaagagattggtgtttcaagttgagacattttgtattcaataccatccctgaacatcaagttcaattgattagagatgattatcttcttcctgaaatagtcatttaaaaaccacgatctggatgtcccaatagtttctagaatccttattgtactgctttgttgaagtttgatatgaatgtgggtgcttacttacctttacacccaaaatttatattaatagaaaatttcttttggagttagtccctacaaaataaattcaaatagttacagaatcctatcaaccttcttaatattttaccgcttaagaaattggcctttcctaactccccttgaaattaacttcctctatgactagaaaagaagtccaaattgaaaagaggatggattttaccacttccataaattcagtccatacacagaaaatatgtaaccaaaattaactgcaatctttaccatcaagaatacttctacaccccagtccttccaccaagacatattaccttccaaatgtctggccctcttaagagaccatctccattgattgacatgaatagaatagcagatatcatgcttactgaaattgatgcatgttagagagatgggaagactttgtttactgctaaaaatcttcacaaagttgggcagataatgtcttgtcagtgagtttatgtagacactcgcttttcggatcttggtcgatgtctcttgaaaaagatgaagaggatggtcaaagtgaaacactcatcatgtataggttataattttatggtatacaattatttttagtggctttaaacattcaattatcatgaaaagaacaatgaaagtgtgttgtttgttacttcaattagtttttatcttcattttctatttaagaagctatcttttaagtctcgtaaaaatggttatttttagttgtatttatctaattaaaatgttacttgtttgctgttggaaaataagagttaaagtaccagtgaaaaggaaaggtggtgaggacaaagtgggcattgaagttgaaactgggctgaattgctgagcaaatgctgaaacaaatttagcattctaggctaacactcatgtggtagccattcaaattcatggtaactggctgttgtggagagaggagaccaaacttagtgggacaagaatggaaataaatatgcttctattttacggtattacattgtacgctaatgaccgagcaactaatgaagtacaacccctttcatcaattttgtaagctcaactgccatttttagaaggaagtaactgtagagaaaaaagtacaaaaagagaaggagaaccaaaagggaactttgactttaagaaggagaaaggcaaaaggagcccccataattcttatttataggatttgtcttcttcttctcatctgtactctttttattcctctaaatttcataagaactgaattgttgccatggattgtaatactctatttgggattatggtaactaaagtatgtatgagttgattttgttaaggcttgaatggctatgaactcctatgtttggtatgattaattttaagcatgatttaacaattttgcctttgttcattcaagtgagtttgctatcatttatttatacttattggctgtaagtattgctaagctacatttgattctggaaaggctagatctagtagttacaagtttgatgatgcaagtgaattcctaggtttatgattttcttactaaatggaataggaatatttaattaccttgcataacttgagaattgatgtttaacttttgttctgcaattaggtttgatataacaatatattcaactaagtagtaaaacttaatttgtgagttttgaaaaaatctcatagacataagaatttttttttaactctatgcaactttgctgaaacaatgctaaagtaatgttgaaaaattagatagatttaacataggcgagattagatattcatgtctattattccatagatactttttcttgtagataattttccagtatttgttgttttattttgagtttattttcattgtcaccaatttgttttactttaatcaatcatccattcctcttagtttattttcttccaaaagaactaaagttttttattagttggttttacatttatttttatatgtaatccctgtggagacaatactcaacttattattatattacttgttgtcgatagcgtgcacttgtgcataaatgtatttttcacaacactaggacagtgtcaaaatatgagagttttgtttaaaatgacccaagataataagggaaaatatttgtgttcttagattagaatgatggaaaagttacttctgcctgaactattccagaaagagttgaggaatagcaggttgttcatgttccatgttcagtagttttaccatgttatcttgtttttcttcagttgtagtaaccacttatcttttcttcttcactaacaacatgagtttcttagctgccatggtagttcaagggggaaggttcatgtactaaagaagactgaaccactggtcagggaggttgtttagggtatccttgctacttcttttgctcctacaaagaatagacttcagaagaggagtagacatgctaacgatgtttcccctacccaagatcttggcagagagaagtctaaagttgttggagctgatgagggatctctcatttagatctattcggatgaggcagataattttgtttcaaaccctaatttggacctggtggagcaactgcatgttcataggtcctagcttttttctaacggtgatgccttgattagatccaaggttgaatacacgccattacaaaagttagttagctccaaacctccacattttattgcccaaagatgcttcactgatatctttaatgtaataatttttcttgtcatctcttgaactagctttctttcacctatcatcacttgacttgctagaaagctctcaactgtacaggagcatcccgttgtgcagaagatttggtggctaacttgaaagaaactattgatgctctagagaaaagtatggctagagaaaccattgattctttaaagaaaccattgaagaagaatctggtcactggtcgaaagaaaacttcataggttgaagattcttattttttggcacttcatgagaaatatttaggtattactgagcttgaggatcaagttcaacgcctgagagagcaagtaactaatgtggaggagagggatgttgctaatgtcactttttatgatgccctgtattttgatgccatctattgtgtttggtcttctagtggatgggcaaacacattcaactagtgggccttccctgagatagagattccattctttataaagcattgtgagtagtgtttcaatgcaaatgctctctacaggattgattctaacgtgaattggttgaagaagctgcaagggttgaagtctacaaccttgagcttcccaaaattcctcctcctactaattttctagttgcaaggaatgagaaacaagctaaagctgctattttcatagaaaacttctttgcttcataggacattgtcttagtccatttttccttttctgtatttagcttttagcttttgcgtgttagttggtcatcctggccagcctttcaatgtggataagccttagtaaa

SEQ ID NO: 259500 - DNA, 816 bp, Cannabis indica
tatatatatagcatacatataatcactaggcatttttgcccctcaaactttgacatgtaccaaatcatgtctcttgaacatgttaaagttcgaggaacatgatttggtagatttcaaagtctaggaagcatggtttagtacataaacaatcactgaaatagtaaaattgaatgaaattagacaaaagtccttaaatctaacaatcttaatagttcagggagaatttttaacggtcaaaaaagttcaaaagacatgatttggtacatgttaaagtttaggaggcaaaaatcctaattaatctaattactaataacagtgttttattttcttttaattttacaggttgtgaatccatttactaagtatgcattgaccataactccagtagcaatgagtttggaggaacttcttccatcaagtcaatccaagtctcgtcacatttattctatccttattagaactggattggttatctcaactttgatagtggctctctcaattccattttttggtaactcaatcaatctctcattctcttatcttaaatttcaacattttcctatttcaaagttttaatttctgaaacttgattaacaggcctagtaatgtcactcattggatcttttctgacaatgcttgtggtaagttcctcttcacacaactcaattactcatcctactaaattcgatttgctcattaacataatttacaatgcaaattacaattttccctttttctttttccagacattgatacttccttgtgtttgttacctaagcattttgagaggaagaataactaaagtccaggttagta

SEQ ID NO: 259501 - DNA, 665 bp, Cannabis indica
atgagttaactgctaccacatcagtacgattagagtactgagtataggctggattcgcggttagtcgtactttgtcaaggacgttcctgactcagttagggttatggttaggtgtatgggcgcctgattataaccctagatattagtatgtttttatgttatgcttttcttactgagtccgtcgactcacagtgctattgctatgtgtaggtaagggcaaagctaaagttgaggagccgtgggagcgagcaggtgaagattgtacatgtcggggcggttaggtgttaagcgtacgatctttgagacatcagggcttttgctgtttagtcgttaggcaaaaaatcttttgtatatgaataataaacttttgtaactgtattttgtaaacgggatcccagaattttataaatgttttactttatgttttaattaaataagcaaatttaaattattcacgattttcaataacctcgttgattagcaacgagctgcacagtacgttaaaaatcacgcaaacacgcctatactagttagggtgttacaatttggtatcagagctgcacagtcacctcgtttcacggtttagtaagcttttgttgctttattagtagtttattttaatagcatgatttaagaaaagcctgttaggaagcatgttagtagcc

SEQ ID NO: 259502 - DNA, 1177 bp, Cannabis indica
gatgttttgccgcctatgtttttctgaaactcatttttttataggttgatctttctaattattggtatattttggatatctatattatattatataaattctaataaagattttggacgctgactttgtcgcgagaaataatctcacacagtcatggtaagttctgctatgataatatttccatccatggtgtggctctctagaaagcttgtctgatctctacttccgatttgggttaccaatggtgcaggagccaattcaaatcaccgtgaagagtcggaaatacgagccgattgaaattattaatagtttttatgaccatgcgtgattttagccgttatattgagagtttattagcttaaattatgtatttttacttatagtatatatattattttatatttcttttaaattaatgtcatttatttaagttttaatattataattttatattaattacatactgatatataaagttattaataattatcataagaagtggacttttttataaataattattattgtttttcataattttcatattttataaatcttattctgaattcatattattataattatatatataataattattatttattgtcattttctttttgattgatatgattattagaagtttcattcatttttctcatttggttttacgtaattaataatttgcattatatatataaatttttttagttctatggttcattttgattttgtattaccagtttgctttattttttgacttttgtaaagttaaattggttagtcttgttttcaatttgttatttcgatttgttatttgattagattaatttataactgtttaatcttattcagtttttgatgtattaaaaaagttttatcaaaaatttaattttataatgatgctttttgaagaatatgtttctaacaccctactaaattaggcgtattatcgagatttcttaatgttgtccactcctttactaatcaaagagtttataaaaaaatgtggataatttaaaattttcgtgattaacctttaaacttaactaattaaaactttatataatccgagattccgtctttaaaatttacaactgtataacaaaatatttaattacagaagttgtcacctagcgagtacaaaaaaagcctgctgccccaaagatcgaacact

SEQ ID NO: 259503 - DNA, 2411 bp, Cannabis indica
taatgcaagttaaaggttatttttatttatgatgtatatgctttcatttccccctaaacggttctttcccttcttttggcagatctcccagagtttgtatttgccattcatggaaaaagtttctttatttaggggatgttcttccgaattcatcaatcagattgtaagttataattgtttgagttaaagaagtgactttaatctcaattttggcttattgtaaatattcaattcctctatgattcaatgtgctgagttacaatataaacaaattttatttatttataattgacaaaaacgatttcatatcctcagaatttgcataattttggatcattagtatcttgtactttgtaccatggacaaaaacttgaaaataaaagataacataagcttccattaaaattttactcaagcttatgcttgtatgaatgtagttgaagcttaacgcagtgtcttggctcccacaaatatgtaaaagaacaacttctacttcagtttccttgtcctgcttgtaagaccaagatatgccaatacactttctttggatccaaatgagactacttttaatggtagtagattatcaaaatgcaatggaagtagaactaatatgagtttcatgagttgttaaataactatttttttttttgatggcttgttaaataactaaatttaacccttcatgacttgtgacttatgcatcatatatatttgtgttggagtgaacttgggaacaatgaagattttacgcactcaattttcagcttcctgtatttcacaaatatatttgttcaatggagtttaataatttgctcttatttttatgtggtaggttgttaaggtccatgaggaattttttctcccaggggaagttataatggagcaaggaaatgttgtagatcaactatattttgtctgtcatggctcactggtaagattgtaccttcaatgttcctaactgatagcttaacaatcattgaaataatatttttcttttttttttggtcagttttctgtggcatgcccttttcctgtcccgtttaaaatttcatcttttatcactttttgtcctttctctgtttattttggagtgttcactgttttgtgccctgtttaaaattttcatcattcagttattgacaaatacaacttactcatatatattatgtgacactattaatttgttcatagtttttggaaaccttaatagttcacatttgctcatatatttagttatctgtgaatacttgaaagttgcactgaagttatttgatttaaagaacactatattgtacaggaggaggttggcataggggaggatggctctgaagaaactgtctcgctattgcaacctagcagctcgtttggggaaatttccattctttgtaacattcctcaaccatacactgttcgtgtttgcgaactgtgtaggcttctccgtctggacaaacaatcattcaccaatattcttgacatattcttttatgatggaagaaaaattttgaacaaccttttggaggtaatgtaaccatggtaatggcaactcttttaatttattctgtggtcatgataagaaaatgatgaagttattttattggtgctcatagcttttgtatttatttaacacattacaggtgaaagaatctaacctccgagttaagcaattggaatcggacattacatttcatattggaaaacaagaagctgaacttgccttgaaggtcaatagctctgcattccatggggatctgcatcagctaaaaagtcttatccgggctggggctgatcttaataaaacagattatgatggaaggtcacccttggtaagtgtgaatttatgaagaacttatattcattaatgtgtggtgatctgatttgtatggatttatatgtggaggccaatctgacaaacagttgcctatctctttccgcaaagcatcttagctgaaatgtgttgtacagtttctgaacaggaaattcagaatctaatggaaattggacccgtcacacatttatttgttccttttcttaatagggaaaggcccttttactactaaagtttttagataattctcatttcactttctctttctctaatttttattattacttaatatcgcactctctaaattctttaaaaaaagagaggtgagtttgagaaataactcatttttttacaaaagaaacctttcgttttctccagcatctagctgcatcaagaggatatgaagatattacacgttttctcattcagcaaggagtcaatgtaaatgctataggtaatttcatgattatcataatttgtcatattggcagtgttcacttaaaacttatatattaacagctgtaataatactttgtctcttccaatagataattttggaaatactcctttgctggaagccctcaag

SEQ ID NO: 259504 - DNA, 554 bp, Cannabis indica
tcaacctaaagaaacttcagtcatcttcaaccttaccacttcacttttggctaaatctatagtactcagtgtgctcttattcgataaacctcatctcatgtctcttagtctaaacatctagatgtattggaggtatgaaacaatttatttgttcattaatattagaagttgaactaggattcgaacttattatatttttttcgttttcagagaaacatgttttagtaaaattatgatatctctctcgatattgatctgtttctagcgatttttatatcgttgaaaagcttatttgatgatctacaatttttatggagaaacaattcaccaattcggtgttattctatgtcgaaaattgtcatctttatgctgttattgtaattcatttttattcatattttcagaaaagtactttcacttaaaatacaataactctctcaattctcatccatttttaatgatctatatgtgattttaaagattattcaatttcccataagtttcatgaagaaacattttgttaattcaaagtcatactatgtcaaaaagttagt

SEQ ID NO: 259505 - DNA, 958 bp, Cannabis indica
ttcatggctgaaaatccagagaatataaccccacatgaggaaactaaccatcgttctagaaaagaacccttgggctccaaaagatctaccaatccgcagtccagaaggaccacccgttccagaagggctcaacctgagggtggccccagtgctcgaaccacacgtcgccagagaactcaacccgacgttggtcctagtacgcggacaacccacttaaggagaactcatcatgggagtggttagaatcccaaggtgagggatgaagagcgcaactgtggaggtgcccaatctatgggagaaagaacttatgaaacggaaagccgtcgcctgagacgccgtctggaagaggcgcagcgtcgaaatgctgagttagaacgtgaggcagccttggccagggcagcgcaggagatgaacgctcaaaatcaacctaaacctagagtgagaagaccacgaggcagacctcatggctcacgaactaggagataggaaaaggcccgggaagaacaacccagggaaaatgagacaccccctgagaatcagggtgaatagacagaaatgagacaaccagaaactgatgaacgagaaatccctcatgaaaatgaggaggatctttggactcaaccgggagaatggagatcacctgctagaaatcaccaacgttcttcccaaacccatagagcgaggacacatacgtaccctgatgggggaaatacgacaaaccgctctcggaaggaaagaacagagcgtgaagaagcaagtgtgacttccgaggcgattcagaacccatagtcgatcaactcgaaggagagaaagtactcaacgagctaatgatcgagaaagtatagggaccagtatatctgcgagccactcaaaaacaaagtctatgagtaggatgcggtctatgagtaagacgagatctgccagcaattactccaaccagatctgcgagagcacttga

SEQ ID NO: 259506 - DNA, 1223 bp, Cannabis indica
tatcttgatttttctttcattgtaataatatctctaacaatatataaacacttatattttacacttaaataaaatatatatatatatatatatatttataaggaacaaataagccacacacagctacaccgcaattattaatcaaattggagcttttcttttacacatgatcatttgtctccttcttctttggtatcgagaaaaaataaatatcatataatactaataatctccacacaaaagggaccctcctctctctataaataaatataacaccaagctccagcataattcattgatgatcagtctcttttattaattggtttcactgtttttcttccacaactcatgggattttgatcaccacatcaaaatatcacgtcaacgtcatatgacatgattattgttgttattttttcataattaaaagaaaataaataaattctaacctattacttacaattacaaacaattgatattccttaactaacatggctctctctctctaaaaaaaaaaacgaataataataaataaaaaaaaacactaacatggctcgaaataaatatcagccgccttccttctaaacttatggcttttttttttttttgaataattctaaacttatgtttggtcccttttctacttaaattatttgcaactagcttgcttttttattttttcaaaggtgggaaagttttaatgatttattttatttatttatatgtaatcgggaaaaggaagaataattatggaattaattaattatatatatttatgcttgagttatataattatacttgtgtggtgaggatatataaaatagttcgattgaaagtgtgacttctctttcaatcaaacaatcaaaaacgttatcttagtgcaaagacattttcaataggtggggaccaaattaattaattgcatgctttgcttggtgtgtttatgaagttaattaattaatggttggtcaccccaaaatgtgtattaaatggtttattttgtggagcccaaacacaactcaaagcaactaagagcactcaaattagaccatctcggatgagagatgaacatataaaaattgagctatattttgtacaaaaaaaataattttgtaatatttttatattaacttttactattatgttctaatacataatgataaatcttgatgcaaaatttaataatgttatttaatgctcatttaataatttattaaaaatat

SEQ ID NO: 259507 - DNA, 852 bp, Cannabis indica
ttttggggagctccgcttccaagatgtgcctggcgcaaggctcctggtcttcacagttagagtcggagtcatcacctttttgtcttcgagaaactcgggcaatgtcttttcggagtatggcaagctcagccatgattccttcgtttagtgttctcgtggagaccgcgggcatgtgtttcttttggtctaggtgatcccggaggtcaccatgtctcccgttaatctgatgtcccaaatcgacaggaggacattttttggccccttctccctctccctccgggttcttggtgcacagaaacgctctttcggtcctctcgattctgagggtccaagactccctttttggagttttcccctctgcagaccattccctttcgggaaatctaagcggacctttcacggatcctacacctttttctttttcccaggagtggaagtagggttttctgctggttcccttaagagggataccttatagggctaggttccctggatttatgcttttgggcactcggcgaggattctcctgctgtctccccaagtccagcaggaatggctttatgatgcacgtggattcctgctgcctcaatggctttttgcatggccaacatcacctcttgcatcttttggttttgttctttttgggctaggatttcagcctcgtgatcagaagccttttgtctcaagagtactagctctgtatagctgccttcattgtaggcgtcgtattcatcaaagtttccttcgtattcgtcatcgtgggttccttctccctcctcagcccacatttgctcttgaggccacatcctcatcgtctgggtcttgagcgtcttgaggaggacgaggctgacg

SEQ ID NO: 259508 - DNA, 963 bp, Cannabis indica
aaaaaaaaaaaaaaagaaagcgtaattcatttacctctatccataaaacaaaaggtaattccatcatacgacataaactaaatcactacttcaacgattctagaaaaggcatcttatttgacaatgagatctccaatggcgttgatgaatggtgggttgaagatgaagagagtaagctttgaatacgagattatgagtattttagggttcaatttgatttctagaagatgtgaaattaagactatgtatggaaaatttatgtggtttcacgagggccaatgttgcaagcttggagaccactgaactcccacttaccatgagagaacctccattgtcagcgaccaaaatgtaggagttccttgtggtggatattcctttagagtataatatactaatgggtcatctagcactaataggaatgaaggcagtaagctcgataaaaaatttgtccctaaaattctcaactcattatggagtgaagacagtaaaaggcgaccagctaatagccagacaatgttatgatttagaaatgaagaaacaaagggcaacccaccaactactggtaaccatgacaagagaaaatgaggtatgcgagttagaagacttggatcccaagattcaagatgaataaaattaactcaagcaaattaaagagttggaagaagtgaaattagacccaaacgaaatgaccaattgtgttaacattggaaagagtttgaggaagaactaaaatagcaattatcattgttgaccgagatttttggccatcaattaaatgagataataatgagagctttgggataattaatgcagataatttttatgtggttctgacattaatgagccgtagtccatgagtctctattaattaataagagtatttcttttacagagaatgtttttggtctgtttttctctttcttttttccgatccccttcccattttctcaggggtatttatag

SEQ ID NO: 259509 - DNA, 639 bp, Cannabis indica
aaaaaaattcaagagacatgatttgatatacgttaaagttcgggagaaaaaactactaattaacactactttaattttaattaagttattaaggctatagaatcaaatagagactttagctatcaactataagtgacatccataattttcatgccttgaaaatgactaattgattctactacatttcctcctctataaaaaatgaatccactcccactactaccaaattttggtctcttctctttttctttgtttatttattcatttatttgtggatccaatacttgttacgtccatctatttgattggatgagttttaagatatttgaaattaattacttgatttgatatgtgattaacatcaaaactaattatataatattaacgaagtagctatcaaattatataatttattttttgaaaattatctatctgacattgattcagatatgaattcataaaatgattactacttttctactaactttgaatttaatggaacactcaaatcactaattactcttttcaaaaaaaaaaaaaaactcactaattgttattttacttttggagagaataaactatgacttataattttctgttttttaattttctaaaaaaaattaatttttaagtaaatga

SEQ ID NO: 259510 - DNA, 6047 bp, Cannabis indica
ttgtttttttttcctcttttctaatatccgatgacaaataaataatggtaattaattttaaaaataaataaatcatatatgccccattgacaaactgagactgatctttaaaacttgctctgtttgaattaaaacgtataattatttggttcatcctttccaaattcaattggtgcttgtaaaaatattgcggatgtacataattaaataacgcaatctagaattaagattttggcagatctgattaaatttgtaattgtcctaaaagaaacctttttcattttttgtctattttgtattagccgaatctaaatttgggtgatccgatgattgataacactctggttattctggtgaagtaaaaatgtgtattttggagtgaatccttgattgttggctagtccatttttatttgagggaaggtggactcacttgtgtaggagattattgtttagcagataaatgttaaaaatatgttaattgcagttagttagaaacataaaaccaatacagcttgaagtattttttatttttggccaagacaaactatttatgttgtcaaaagatttagaaaattcgaagtcatttacaattttgtaagaattaagatgcatgatgatttgtaaaaaaggagattttttttttgtcgactgtttctaatttaagtcaacgtatcaaaacctgattcacctgagagaaaaagacttaaaattagacccacctactctttttgctcccttcttgattgagatatattttctttttagaaaaaaacgtacagtgctgacagttgtcgtccaaattgcattaagtctatgatgaatgtctttcgatttatgcatgttgtcgtcaaaacaccaaggcttgatcacagtcctgaaatacggaatacacacaagagcaagcactcaatctttgcacatcttcaaacagatctgaaaacagataaaaataaagtcaagaatggaccagagattttacactggttcagctcaatgtgagcctacatctagtcctggccatctctactgtaggaacgacaaattccagattacaacgctcttcaaatatctctctgaatcttgctttaaaaacttctttattgatttgtgatacccaaatgacaactcttccagttatttatatatgcgtgtgtagagatgtcttggcgccaatgtattttaaaaatacagttaaaactgtttagagaggcatgcacatgtcttttaaggaataagtgtagctaatgtcgttttctagagtagaacttaagtgatttgtcatatgtggtccggtttgaggattacctcaacaatgtccaccttttaatccttatagaaaaccaaggaactcaaagagaaaatataactcgaattttggtctttacttgtcaaccagatcaattaaagcttaagcttaaaggtagaactttgctgccaagatcagcagcattctcttcagtaggcaccttatcaagatctttctcatatctttcccctatccaaaacattcttatatcagtatgtttggatctttcgtgatatatagtgattcttattgaggtgtatgacgattgactgtcttaatagacagtaactttcttttccaacatctcaatttccttcagcaacccttgtaccaatattgcttcagtaacaaccataaactctgcgtcggcggtggtagacaaagctagtataggttgcaactgagttttccggtagatgcaacagtcatttagtaaaacacaagtgaggttagagacttatgattatccttgtaggatgcatattttgcatccacataacttccaatatcgttggccctcctttattattcttcaaatgcaagccatattaaaagtgaacctttgatttaccttaaaccaattttaccttctcattgttgacttcctggattggccatatacctacttagaagtgtgttaagtcttgtactcaccattgaggacattaagcaaccaacggtagttgagtatggaaccttttccattagtttttcatcttcagtttaagggcactgctctgcagggaaaatgaagcgagcagctaagagaacacttgcaacttctgatacaaccatgttaaatctatccaacatttcaatggattacttggtttgagaaatgaccgatgctccacatttctcatctcttgaaatatccattacaagaatcttctttgctctgcccaagatccttcatttcaaactcttggctaagttgcttcttgagccgatcattcttcaatttttctttccccataagtagcataacgtatacatatagtaacagaacaatttttcttaacatccatttgttctatttcaaacaccagctgaacagccaatacaaaagtgatccccacagttttaaacttgaccacaaataagaaaatttcagcgtattcgaccccttgtgtgaatccctttgttactgatctagccttctgcctctttggtttccctgagagtgatccttcctcttgggactaacttttaggtactgtttttcttcaagtagtcaatttattcatccttatcttttatcaacaaatcaacttcttgctttgaattgcctctttgtgattgagtggctcattttttcaagctggtttgctactgtcaaggcataggaaatcacatctgcttctcctaggaggttgaatagccattgtagttcgatctagatctagctgatatgttgacaatgatggttattccattactgactggtgttcaatttttgctatgtttcatctactatcctttctccttgatgttgtaaaactggctcaatttcaagctctactgttgatgaactttcacctgttttacttatatcacaagaaacactaccgtctcgatcaagtgaggaaattctttctcattaaattgtattgataatgttataaccaggtttctctactgaacaaagtctatatctttttgcaccaagtttatgcatttgacagattttgaaccaagtttatcattaacatggtgtgtgcgtacaacctaatattttcaaatggctcaaagatgctaaatgttgtaaaaaattataggtatgcatgcaagtgtacaagttaaacaagtcataaagtgctcaaaaaaccaatatcgacccacatagattaagaataaataaataattaagtagggtgaataatcaatcttaattttaaataagcagctggtttcgaatgattaacgacaaaatattaattgcaaaacaatatacgaattaaatagaaaaactcaagatattgacaatcgttatggtttcaacttcactcttaaataattctagtctcatccgtttatgtgactaagtaaatccaatattcttaagaatcataaacaatattttattggtataccttctatcttgtgttgcatagcgaacgtgtaaatgatcacactcctatatttctatgtgactattaaaccttaccttcattaggtttttttttcataccttcattaagttaaattttatattccacctcttgatttcacaatctaggaccatttcactacctagataaatgcttatctcttgaccaaaagacctcacattgttttacttggtgtcggattatttaatctttccctttgagtaataattctcacaatctaaataaagccctcggtataataatataatacatcacaaatataaatcacaattagcaacattaaaccaaagtagaacacaagagcaatattaatcaaaataaacttcccatttaatcctaaaattaagtatcataaatatagatccatttactcctataaccacttaggtagaactcacttccaaaagatgtaaatcaccaactaatcccatacttagtcgatgggatcctaacaataccccctccccttagacgatgtccacgatgatctactctactgtggcccactttgggcttttccacaagtcgcctcttgtatctgtcgtcccttctgcaatgctagtcctacttgaggttgcatggctttgatgccatttgttataaccccttaagtggatttcacttctaaaagactagcctaagagaggaggttgcggaagtagttataaactaccagccaatccaacgcctactcaatatgggttcctaacaaactcttgaatcttctatcgttagttgcctccaatatgttcttctccatattgtagtttcttttttctattcgttgctctagttttggacaatatgacttccttttcaaatttgacttgaaaacatgttcaaaatatcaaattgcgtgttgacagagaggaaatcagattctattaatttagtttcctatagggcttttctttattttgtaattaaggggtgtgattttgtatataccctatatgatattgattctaggttctcaagacacagtcaagaacctaatctaggtgttgttccctcaaacagtcagtcagatctagacattcctgttgcattaagaaagggaattagatcttgtattcaacaccctatttcaaaattaatttcttattcaaaattatcacctccatttaaagcttttacctttagtttatcaggtgttgtgatacccaagagcattaacaaagcacttggtatttctcatgggaagacagatgttctcaaagatataaaagcactagaacaaatggaacttggagattagtggaattaccatcagacaagatggtaatagggtgcaaatgggtgtttacattcaaatataatacaaatgtatctattgagaggtacaaagctcggttagttgccaagggtcttactcaaacttatggaattgactacactgaaatattttctttgattgacaaactcaatactatcggagtattgctctcgttagcagtcaactaggattgggagttgtatcaacttgatgtaaaaaatatattcttgaatggtgagctagaagaagtgtacatgagccaacctctgggttttgaagaatctcctaatacaagtaaagtctgcaaggtaaacaaatatctctacggtctaaaacaatctcctcaggcatggttcaatcattttctaaaagtagtcaaggggcttggatgcatgcaaggtcaaacgaaccatactctctttatgttacactcaagaaaggaaaaatgtcagtactaatcgtgtatgtcaatgacataattgttagtggaaaccatgctgaagagattagtttgatcaaagaatgtttggctaaagagtttaaatcaagggtcttggtgcactcatgtattttttgggaatggaatttgctagaagaaaaaaggggatgtgtcccagagaaaatacactcttgacctcttaaatgagacaagagtgttcggtagcaaacccaacaagactccaattaagctcggagacaagagaaaaatgttttggggaattcagttgacaaaaagaggtaccaccatctagtaaggaagcttatctacctctcacatacaaaacccgatattgcctttgcggtaagtctagtaagtcaatatatatgcatgatccatgttaaggacatcttaatgttgtatataaaattccaaggtatctcaagcaaataccaagaaaatgttttttcttcaaaaagacaaccgagaggtaggttgaagtattcatagatgcagattgagttgggtctgttgatgatagaaagcgtatgtctgggtattgtactcttgtatggggtaatgtagtaacatggagaaataaaaaagcaaacaagcaggatatagagccatgacccatgaagtgtgttaagaaatatggatcaaacgcctacttaaagagttgaagattaactatgtggcccctatttagctttactgtgatatctagtctaccatcaatattgtacataatgctatacatcatgatcgaactaagcatgtagaagtagataagaaaagattgatatgtacatacagatcaacaactagctgatattctcacaaagagattatccaaacgagtatttgattttttataaataagtttggactc

SEQ ID NO: 259511 - DNA, 2115 bp, Cannabis indica
ttattttcttatccgttatatactgagcaattttctcgatcgcctttgctcctactaaatagaaaaatcaataagaaacatttaggatttatatatatttatacacaatcattaaatatgcttgacgtacgtactaatagatttaacaaagtcaacattattttttagagtaatcatagacatcacacatttaaattactcacacaatataagccacataaatttatataagcatcaatttcaatttgttaaccagatatctataataataataagggctaattaatataagacacgagttattgaattgatgtttcttgatgattctataatgtgatcgatcgagtagcataatcttctatatgtagacagtgaatttatatactggttggattcatcacatcaacttttacactaggcacaattgtcttttgtctatatactcattagctagtctgcttgttttaatgggttgttcatgtactctgccactcatgtaatttgtaaatgaaacttaattaaattaaagacactcgttaatatagcagtaacttgtacatttccatcaaaagttacttttaatttaattatttgatcttgaagattccaaataattaccttctatgatatgtctgatcatgtaggacataattttaatctgtccttttttatctttaccctttatatatgcacaacttgtctagcacaacaagtcattattatggcttttatgatttgattatggcttttatgatttgatatgggagtatgggactatatgtgggagcgccttaacttactttttatttgcttttaatgtataaacttttttctttttattcagctagttttcttaattgggattacatgaaaactcgcaacgatcattttctttttgcaaaactacaaaattgtaatagtgattgtgctgcatttaatttgatcggaagttgtagatgtatagtagttcctactgtgatattgcatgtctatataggaactttcatgcacgttagttgttatgtgtcgatatttaaacatatcattcttgacttttctgtgattttagtaattataatcaataaatggaaactctttattatacccagctatatggcttgcatgcatgatgatatttagtaattataattataatatatatacataatgatatattgaatattaatggtgatcctctgcagaagctattaccgttgcacgcaggataactgtcgcgtaaagaaacgtgtggagcggttagcagaggatccaaggatggttatcacgacatacgaggggagacacgttcattctccatcccatgatcttgaggactctcagtctccatctcctttgagcaacttcttctggtagctagtactatcactatatgactaactatatatagataaatattttaaaaaaaaaaaaaaactatatatagataaatatatgttaagagctttgtctattcgaaaaagcctcatcacctgtttgttgcctctttggacgtactgtaagagttcataataatagaaaatatgggattgatctattatcttatatgcatatgggtcatagcgacatcgtacgtcgtaatctctattgttgttttatttagcttaatatcccttagtagtacgttggtacctaagtctgctgaattttgtttaccaactcatatatggcacctaactttctaattatctttctagtttacgttatgtgaatcaagttatctgcttttgatatatttggatatgtaagattatggtataggtctcatgtaattggtaaaccaaattcagcagtttttttttttatgtgtacatgtaattttctgttacttcccaataaaatgaattgatcgcctaccgtttctccatcttttgaatatgtaaaccatgtgaattgcattttaatattaagttatttcgcatattattaatttgattcaattacaatgcgatacattagtaggggccggagccatgtgccctaacagaggctgtgccccccacaattttgtaaaattaattgagtccatatataattatattatatatatactatatactagtgaaattaatttttttaaaaaaattttaaacaagt

SEQ ID NO: 259512 - DNA, 689 bp, Cannabis indica
ttattattgttaattaattgtaaaaaacgactccacatgtaaatttcccttttttttttataaaatatttaaccgatccattccgcactattgcggattggattggatttaaagttaaactgttatgctgatcagattcaaaatatgaaatccgcacttagtgcggattgaatgttatttgatcaaaaaagtgcagattggatcggatgaacgctcctagaccaaaacattcaaagtgaaccctgtgattttcagaagacgacacagcatattctttaacaggtactcggcaaaatcataagaatgatacatttataacacatttgcagctttaattcgcaaacactcaattagctgctatcagtgatagaataaacctagggtttctctgcaaccatagctttggctttcagccagttctacagcaagcttacatccagttttttatcttcttaaaaaaatattggagcaaactacatcatataggtttgcatgttattgtaaccaaaactacaactgtagttgaccgaagaagaaaaagcaaatataaaaaaatgacacaaaacaggcttacaatgattctaacataacaagaagcatcttacgcattcatcaaaaatttggggaaacaaaatattcaactaccaatttggaagaaatataacttggttcagcttgagacaagtcct

SEQ ID NO: 259513 - DNA, 692 bp, Cannabis indica
tgcttatatacaagcataaaactcttcgttctttacaaatatctcaaaactatattggctgcaacccaatgatcatggcctggatcagataaatatcttccaagaacattgacgacaaaagctatgtcaagtcaagtgcaaacctggacatacatcaaactccctactacacttgcatatgggatgttcttcattgcttctctttccaagtcgttcttaggacattgctgcttagtgaacttgtcccctttcagaataggaacagaaccagctttacataaatccatgttgaaccttttgagcacacgattaatgtaagcttcttgagataagccaagaacttttcgattcctgtcacgatggatatccccaaaacataggatgcctctccaagatctttcatatcaaaattggaagacagaaaatttttggtctcatttagtagtgacaaatcactgctggcaagtaaaatgtcatctacataaagaacaagaaaaatataacgactcccactgatcttcatataaatacactgatcaaacttgttctctacgaaaccaaacgatgtcacaaccttgtcaaacttcaagtaccactggcgagatgcctgtttgagaccataaatggatcgtttcaacttgcaaaccaagtgttcttttccattctccttgtagccttcaggttgagacata

SEQ ID NO: 259514 - DNA, 630 bp, Cannabis indica
ttgccgagccacattagtcaaaatgagagaaagaaacgacattaaattaaatataagagaagatagatggagacaaaatcttacgttacagaactaggacctctggtggtttcactgggcttttggacagtctcatacccttctaacttcaaatcttccacctttcgtctggtttcttcctcttcttcattcaatttctcctgcaaatgacatcaaatcaattttatacattctacaagatcaaatatgatataatatgaagatgataaaaggccttggccttaccttagctttgtcccctgtttcagccaccttctgcttagtctcttctttctttccggcaaagaagtcaagagccttccgggcagcatctgcagcagaatccttgagctcaccaagtctaccaacggtggtatctttgccctccttggctttctcagctgtgtaatccttatactctcccaccttctccacagtcgtatctttcccctgcttcgccttatcagcagcaaaatccttactttccacacccttttcaactgcataatccttgcactcaacaagcttctcatttccttgacccgccttctcagctgcataatctctagcatcagccgccttctgagcagc

SEQ ID NO: 259515 - DNA, 1009 bp, Cannabis indica
gagggtacatagcgaacctccaatgttttggccaacagttgatcacgaatgaagtgttgatcgatctctatgtgttttgagcgagcatgaaacacggggtttgctgcgagagaggcagcgccttgattatcaacccagataatgggacagcagggtaaagttattcgaagctcttgaagcagataacagagccaatttacttcagcagccgtattcgtgagtgcccgaaattcactctcagtactggacctagcaacaacttgttgcttttttgcagaccaggagattaaattatctcccaagaaaacagcataccctccagtggatcttctatcatcagggcaacttgcccaatcggcatccgaataagcttggagatccattctagcagctggttttatgaataacccttcatggatggtgcccttcaagtacctgaacaaccttttacatgcatcccagtgtattgatgtaggggcatgtatgaactgactaagcttgttaacaatgaaagcaacatccggtctcgtgagagttagatactgcagggcccctagagtacttctgtagagggttggatcgggaaaagggtctccaatggatagagaaagtttatgagcagagctagtagggcttggacttggctttgctccatccattttgagtcggctaagtaaattggtgatatacttggactgagataaatgcattcctgctggtgtccgtactacttcaatccccaaaaagtagtggagagaccccagatttcttacatcaaattcagtgttaagttcatgaatgagggtggagatgagatgatcactgggtcctgtgattaaaatatcatcgacatatactaacaatagaagtaatgatgcacccgatcctgaaataaagagtgagttatctgactttgaactagtgaaacccttgctgtacaatgtgagtttgagcttctcattcaagctctaggagcttgttttaaaccgtagagtgccttgtttagctt

SEQ ID NO: 259516 - DNA, 1413 bp, Cannabis indica
tcggttctgttcaaacaacaaagcaattggcgagcttcagtaaaaataaatgcttaggcagataaagacaatatcagaataaatcaattgcacttacgcgcccatggtataaactcgtaaaaatatataaatgttggcatatactgatagcatgagaaagaagaacaacctgatataggatgtgtatccagttagcatctctaggaccgggaacatgttttaagatcacgccacatttctcaaactccctaagaacaaaattagtgtcggctggagaaaatctggaaagagaataaagaatcagaagcctatacgttagtgtgtcaaatatataaatatacccatgtatattatcaactgggaacattaataatcaaggcatacacaatggcctaccctcaataaaattctcactatttaggaagatgggtaccaagataaaatggatagtgctaatatagataagtaaaacaacgaacaatcaaatcaagacaaaacggtgaaactaaaacaatacccgtaaacagtaacccattcttcttcattgaggttagcagttggcagagtatttctctgcatctctggccttgcaacttccctagaggggtgaagggtgatcaaagcaccaggctggacaacaccctcaacaggtgaactctttcccttcccatcttgctcactgccactctttgaaggtgaccaccaactaaaacctcctgaaccctgttggttttgctgtgcactcatcaaagcaccagaagtgcttgcctctgatttgttttttactggagttagatagtcgtggctagaactttggccaggagatctgggatctgatctgacttcaggagaaactggataatctggaattcctgattcaggagaaaaatctgagcggtcttccaaggtgaaattcggaggaggtggaagatctgagcccccaaaattctcacgccacaaagcagatactgcagctgcctgacctgaacttgaaaattttcctctccgggatgaaataggtgaagccaaatcttggaaaaacaatgactgcctccctgatttgggagttctgtgtactgtggtactcattctattactttgaggaaactttgtctgcaaagcaaatacaaaagattaagcccaccttcaagtttccacaaaaaagaaatgatttctttttggcaaataagtgacaaaaaaaaaagaaagaagaagaagaaagcataattatgactatgagtatgacatccaatttttggatgtatgctttaagagagtacttaatgaacaatccagaaatctagatatttcattttgtttcggtattcgttgcagcatgttcatagacaataagtaaagaaccaaaaatgttagttagtgagtaaacactcctaaactaagattatattcagt

SEQ ID NO: 259517 - DNA, 539 bp, Cannabis indica
atggtgtttactcttgggggtggagcagtggtttggagaggtgttaaacaaatcgcaattttagactctaccatggaggcgaaatacatagctgccgcagaggctgctaaagaactagtctggcttagaaagttcttcacagaactcggtgttgttctcggaatggaaaaaccacttgtttttctttgtgataacactgagccatagccaacggtaaagagcctcgaagccacaagagaagcaaacacatagaaaagaaatatcacatcatcagagagtatgtggaaaaagtggacattgaggacaatctagctgatacattcaccaaagttttggcgggaactgcatttgaaaagcaccgactgaatttaggattaattgaaatgtactgattgttttatattagtgcaagtgggagtgtgttgggctttctgccataaataaaactgtatttcaatgtaatctctatcatttaattatcaataaagagacagaagtattttcatcacttatttaatgtgtcatttggttcatgtcat

SEQ ID NO: 259518 - DNA, 713 bp, Cannabis indica
aaaaaaaaagaaaaaaaaaggtgagccgaaaataaaattttaatgggttacagtgcttaagaatttaattcaaggctaattaggattttcgccctctgaactttcacatgtatcaaatcatgctctctgaatttttaaagtcgttaaaatgcccttgaactattaagattattgaatttaaagactttttttctaattttaataaaaaagtctaacatggatgaaaattcaagagacataatttagtacatgtcaaagttcgaagggcatgatttggtagatatcaaagtttgaggatcatagtttagtacataaacaatcactgaaatagtaaaattgaatgaaattagacaaaagtccttaaatccaataatctcactaatttaaggatatttttaaccaccttaaaagtttaagagacataatttaatacatatcaaaattcagggcaaaaatcttaattacccttaatttaatattggcaatacagtacatatatacttccatttaatacggagaactatactgtatgtattgtttcacatctgaaaagaatgattgaaattaaaatataaattaattagtgaattttaaaaacgaagacgaaattaaacattaaattaatattacaaagccagatcgaataaaatagtatactattatactagtggatattattctccatggtgaatatactaaataaataaataaaa

SEQ ID NO: 259519 - DNA, 595 bp, Cannabis indica
ctagctcattacaaaaaatctaaaaaaatctagctcaatacaaaagaaagagcgcttttgaaaagcagaaaccaaagctaaacaatcagactccacataactaagaggaagagccacgtgtgaaaccaatccaacactaccactaaggctaatgctcctgcttgaatgactaagaagtaaccaataagtttagatcttctgtaatgtgtgaaatttctacctttgaagtatagataaacaacctacaaaatacaaaaaaaaaaaaaatttaaaaccaaaatttcaatataacaattaaaataagaagaaagacttatctgcgatattcactgatcctccaataatctttaaagtctctaaatatatatctatacacttaaaaaattaataacacaataaacataacacaacaaaaatacactgacaaacagagaacttgtgagaatactatatcaccctcttttaagtatgaaataaaataaaatatggtgaaaaatatagttttgaaaaaaatacaaatttattaagaagagatactataagaaaaacaaaaccgtataattcattaaatagatatgatttctaaattaataat

SEQ ID NO: 259520 - DNA, 2673 bp, Cannabis indica
aaaaactttaacatttgagctaagtactaaagattagagggaagtgttcagaaagacttaccctggtgaaatccttcaagactccgcccaccagcagctccaaagaagagtcattgtcagcaccagccagttggtccctgaactcaggaaccagccggttcatgtagtgggccaacatcttttttcccttcttgacctttggaagcaccagcacaggtggagtaggcgcccgcacctgttcaagatcactcctgaccagcgcaaacccaacattcagtggtccaaactccttggacttagcagcttttggggtagaggggtttgcagccattagctcctcggaaagatcaatgacctccccagtaggcctcttttctttataagaggacccctcaccgcctttagacttgttggccagaggagaggcaatagagcttctgcccattcttttcttcagagcatcaagcatctacagagacatgtctgtacagaacaaagataacttggttagaggaaacaaatatgaggcataaaaatcaagaagctcaaaaataagacaaagtagtatgcatggtgactgcccgaacaagactcagaagtccatcatcatctaacatcgctcttatttcagacatgacaactttcccttttccgaacacgggagggaatggctgaacaggtgaaatgggctcccttatgcgaatcgcatgttcaacaagcctttgcggggcctagagtttcttcttcctcttcagtggagtcacatgctcttcctcggcttcatcttcaggattcaagggctcctgagcaaacttcttggcccttgcacctcccttcaacttagcttcacgcttaagttcaatgagttcattctcttgatgagctcgttcagtctcgccagcaccagatttcctcttcttcctcttcttccccgttacggacttaggaacaaagtccttgggatagagcccgtacttgagaaaattatcctcggaggtcagctggataatattctggtcatccctcggcaacggggcatgtttttgagctctatcactaagagcaagagtgaggggaggacggtgatatgttggaatctgctggaaccgagtgcgagtgatgcccgtgccatccaccatgaagtactcttcagcaaaatgtccaatcttactgatggctgagtcgtctgtgctcgtcaaccacttgaagcctgcttgagagaaatggaagtaccccgacctaccttgctcaagggtggacttcaaatcaaagaaccaggcaacttcgtgaggataagaagtaccccactcctgggaagcgtagaggacgaagagggcagacaaatacttaatgccctgaggagtgaactgggccgggcagaggtcgaaaaagtctgccacatccttgaagtatttacgcaagggcatcaacgccccttgctgaccatgggcacccgaccaggcgcacatccccttttcagggcttgtggcacgattgttatgggcggtaatgtagcaatctagctcgcccaggtatctgccttgtcaagagttcgaaggcgcgcctctgtaaccctggacggagggcttacccacctggcacccaaggcaccctaccttctatgaggaaccgccgcagcaagttcctcactgacgtagtccacgccctcaaccagcacgtctccgtcagcatcgactggctccccagccacgttgtactccccgtaatttggggttcaacctctacctcttcctccgcctcggagagactgccaggacgtacatcatcctacgccttgatctcttggacctcagctcatgatccccctccacctggatggctggatcctgttcggcgttgggcaaagtggcgtgccgagccactttaggaatagatgcgtcaaccagacacgtcgttttctttgtacgagccatcattctatggctgggtacagggtttgaagaatttccttcactacaggaagatcagctagaatgaagacgaggatgatcctcgtgcagaagttgaagcaggtcctggtcgattcgatatttgttctcccaaagctcaatcgagttcatctacaaaagacaacacacaagatgagtgtttggtcaaaatatcaaacaataaacaagcaagtatgccgaccaggagtactcaacagaatcaagaacaagaatattcaaagagaaatcaaaactcaagaagtttaaaattttctcgagttatggaaaaaaagttcatgaagcttagaataagcaagatgaaagacagacgttacacagttcagaaaacatacattatggactgtaaaggtgcatgaagccatgacaaagaagaatcacaaaagtttctggacctaggatttcttggatattttctacaacaaagtctaaggtatattcgaaatgtaaatttgcgaaaataagcataaacggagtcagaaacttactcaagaatcagatgtctaggttcgagcaacgtcaattcgacaagcagccttgatgaaagcactttagcaaacttaaagctaaaaacctctcttttcgctctgaactttcttagcaaacaaggatggtgaaaatgagtttaggtgccaatgcttattgatatttataggcaagtcacgaaaagacgtaatcgactaaaaggaacctgagacgcctcagt

SEQ ID NO: 259521 - DNA, 781 bp, Cannabis indica
gatttttgtgcagtttaggggggcgggccgcggcccgtggtggagtttcactacatggcttcgtttctttaagtagacggtgatttttttactgcgttgactgatggtattttagccataactctctcgatattgctcaaaattagacgattcaagatgttacggaaagataaaatagagatctagaacttttatgtttcgactttttccaaaatctaatcagaagatagtcaaattcaggcttgaagtttcagctttattttcttacacaattttctctattttatatattatcttttggtgagattttttatctttttttcatcttattcatttgatattttctaatcttcttctattttaaatctgtaaaataaaagatagaaaacataaaattgctccaacacacgagtaaaactaaattaaaaatttacaaaacttaatctaaaattagaactaaaaataacctaacaaattccctcaaactaaacttttactcgacctcgagtaaaatactaaataaacattaaacaagtcaatattcaaaacataagtaattttaaagtagcttcaataacatgattatgaaaaattttcacttatgcatataatctagaattgtagttcaagtatatccttgacatgcttcaatttatttaactcatgaaaccatagaatgcaattaactaacaattaaaccattttatgcataccaattacaatcatcaatccactaacccaaaattacatatgcttgccatacttactattctccactaat

SEQ ID NO: 259522 - DNA, 683 bp, Cannabis indica
tgcctttactaatccaaattactaaagcgctcattacaattcaactggatgaaatgaaaataaaaattctttagattttgaaacctaagataaataaaagtattgggaggaattttggacgagagtgaaatagcaaatttgaggtagagagaatgtatctagattgatagagaatgtaaaaaccgcttagctttaatttggaaattaacaaataattaaggcttaattatgaaaattatttattagtattgaattatatgtttatgatgatttatttgaattcagaatgcattttgtatgttatatatagaaatttcataattttacatgttttgtgtctgtcaacattggaacgcggtgtttggctattagaatctcatcttattatttttagtatagcggggcaatatagttagacattgggaatgtcgggattagtcaggattttagaatttcccaaagtacccataagtgaccttttatgatttttagtgtaagaggggcaaaatggtcattttgccaagttatgttttgtcttttgtgagatgagtgagagttctaaatctaatttttgtgttaatgggctgaaagtattattaataaaacaagttttatttcatttattcaaggaaaataagaattaaaaaaatagaagaacatcttctctctttcaaactctctct

SEQ ID NO: 259523 - DNA, 545 bp, Cannabis indica
aatgagttttatttaggccataaaacccaacacccactgcctctattgtattgacagaaccgaagaggacaataccatttaggttcttattcaaaacgtcatggtaccttgtcgtagtgggagggtttcaaggaactcaccctgttatgacttggaagacacttgtgattcaaatccattgttagtttaaataagcaatggattgtcagaataaggaaataagaagtaaagccaagagaactatggttgaaaccattcatatggtgtaaccaaaagctttctattacaaggacaagaaaggaattttttaaattaattctattcaatggactcaacaaaacttcatgttcctactattaggtttgagtttatctaaacctatggcatgtggtatacctggtgatttaattactctagtgcaagcaacttactttagtaagatgttgtaagcatttttttctaatggcaatctatagcaccttctcgacttgtcgacatagattttacttatctaaggaaaagtctcaactattccagaaaagata

SEQ ID NO: 259524 - DNA, 585 bp, Cannabis indica
tattatgatattgattcttttgtgctttatctccatatcttatttatttaattcttcttcatcttctaatttttcttccaaagttaatagtatcttttatataagttcagtcatgcttttcttatgtaagttaggctattaatactttgatatatttattatattgtatgtcatctactgcattctgccaatagtgatattttgtcgatttatgatatataatatgatatgctttcacattagaagtaagatttattaaagattatttaatttgtgcttttattataaacatcatccagttgtaattaatggtgtagaattgcaactgtgttttggattaatatcggtattagaataggatttgcagaactacatctctaccttaacaaactctttatctaatcactcccatttatttaccattttataatttttaattcattcatatttctatctgaaaaaccgtgtttttgcaaatgtcagttatatataagaaaatataaaactgtaagcgtttacagaagcagaaagtaattctgctacagcaaaacaaaacaggcataatataaaatattagcagaaaaa

SEQ ID NO: 259525 - DNA, 746 bp, Cannabis indica
aatctaaatggttgtcagacacaataacacagagatttaaacttgtttcgatcataagttcaatgtgaacttggtcatactccagtttgaaagcattgccaccaatctttattgataatgagaataagagatatcaatctcaggagctacaaggaaatattcatagcaagtcatccatggtgtaatccctcaacactcattaactcactaacccgagccaacataatcaacaatgttgctcaataaaatttcccaatcctagccatctctctccatttctcactctaacttctctctctgctgtattgtgtctctctcttgtgtttggcttgttcttccttgtttttctttgcttatgaaatgagaggagtagttcactttatatataggccaagggacccaatatgcaagttgtcctttttgatagttaagttagttaaagactaactaactaatcgaatcttggttggggatttaaagaataagatgacataataaaaatataatttgtgcgatgtttgttttaatctgtaggtatacttattaagcttgcatatgttcaccaatattagagaaaaatctgtatagttgtatgtataacttatcctctagtttactgtttggggattgatgaatgaattgaaacgagcaacaaatatcaaggttactataatagaatcttttataaagacaagtgagaatgtaaatctcctttgttattgattcttagttcaaaaagaacttct

SEQ ID NO: 259526 - DNA, 657 bp, Cannabis indica
caaagaaataggggaaaaagctccagctcgctatcaaggtcattggactgagtcctgcgagacatccagacgttatggtttataacgtgtttaatacacaattattttgacccagaaaaaatggacaatcacagctgtgtgatattcaaataataaccgcaattattttacgtgatatttaatcaaaccccacgatttcaggggataattgttgtaaagattacagcaactctgtaattaactgcctcactatgtaaattataaatagaggcaagttagactaaaaaagagacgaagaaggatcataagagaaaaggccctagatcagtaccagaaatctaataagattgactcgtagactatgcagaattttaactgcaaaaccacataaaaaaaaccttcgtgttcattcttttctttttatttctctactgtttttattcttcagcgcaagtttatcactattcaacttcaaatttggttaacgaaaatctacgttaacagtttggtgctttaattgagagccttcgtgtaaaagctcagaaaaaaccctccttacatgtaaaaaacaatctccttcgtggctaacaacccagaaaacgttaatacaccacatgaagaaactcatcaccatcctggaaaagagcccatgggctc

SEQ ID NO: 259527 - DNA, 630 bp, Cannabis indica
gagcttaaatggattgattggtactacctatatcaacaaggtgcatcttgttttctagtagcctatctcgaaataactccatagttaagtgtgcttgagttggggcaatttcaggatgggtgacctcttaggaagctttcttaggaagcgtgcgagtgaggacaaagcacactgaaacacttatattggtttatagagttagtcgtcaatccaggaacgagccagagtggcgtactcgtgtataagagccattattctgtgggtgtaagggcccaatgaggcttgaaacggggacgttacataggctcacacatgcactgtaaagaccgcttagtttaatttggaaattagcagttaattatgtttaattatagaaaattatttacagatatttaactaattatttatgctgttattattgaattttgaaatgcattttatgtcatttaatgattttcataattttgcatttccggtgcccagtaacatggaactcggtgtttggctcagtacaatcacaagttagtatgtcagtattttgggacggttatttagacattgggaatgtcgggattggtcgagaatttagaatttcccaaaaatacccctttagtgctctttatgttattt

SEQ ID NO: 259528 - DNA, 612 bp, Cannabis indica
atttactccagttgcacgccttgacactattagggctttaataggcctggccacaaaaaagaaatggaagatttttcaactcgatgtcgagtcagcattccttaatggttatcttgaagaagaaatttatgcggagcaacctcaagggttcgtggtacaaggacaaaaagataaagtccttagattgaaaaaggctttatatggcctaaagcaagctctgtaaacctagtatagcataattgacagctattttaccgaacaaggattaggtaggagcaagagtgagccaactctttacattaaaactcaaggtaaggatgatacactaattgtctctttatacgttgatgatctcatctacaaatgcaataatgagaagatgataaagatgtttaaagaatacatgatgaaaaattttgagatgtccgacctgggattaatgtgttgggttttgtgccctaaataaaaccctttacaatctaattagttatcaatataagaaatttgaagtgatttatgtttgcatgaattttacatgctaatggtttaatatgtttattacatttacacacaaaatcagttaagtccagatcatatgtttattcacaatta

SEQ ID NO: 259529 - DNA, 588 bp, Cannabis indica
aggcacacattcaatttcaaactcttgcctaaatttgctggaagttttggtttaacttagtattcttctcaattcaaggtatgcttttctcttttgttcttttcaaatttttatgacttatctgttctctttctacatatgactatccaaaatttatgagctttatattatttaaatttatatttaatgtatatggtttataatacaggattggcttttatttctgtcaccactgatcctatgcttcaaagcctcgttgtcatatattaggttcccttataatttgaagtattcctctgattaattatccactaagtataaaaattggtgacttctgtttttgaattcattagcttatgcctattattgttcttatatctccctccctattgatgtttatttgactcattgatgaattagaataagataatataattactttgctcaattagacttatttatttattgagataccaacatgtaggtgcgctcccatatttttaagtgctcttaaggtaatcttggtgctttataaatccaaaaaacagaggatttgttttttttatcctttaaatcatttaaattttt

SEQ ID NO: 259530 - DNA, 583 bp, Cannabis indica
agttaaagtcagcatccttttgcttagaccggaataacggaagccctaaatatttaatatagcctaccggagacccaataccaagagtttccttaatcactcttttcatactcgggggagtgtttttgctgaaaaagattgttgttttaagcctattaacttgttgtcccgaccaagcacaaaattgttcaaggcaatgccaaacgcctttagcctccctcacattggccctacccacaaggattaagtcatccgcaaagaatatgtgcgataggaccgggcccccctgctaagtcgtataccaagaatctcacccgtatctagagcattcaatagcagccttgaaagaacctcggctgcccaaataaagagatagggggagagagggtctccctggcggagaccacaggtcggcttaatcgacccaaccttgcctccattcagacaaatgttgagagtggtggtggatagacactgtgatatccaccgccgaaactgtagaggaatcccatagcaagagaggacatggtcaataaatctccagctcagccgatcgtacgcttttaccagatcaatttttata

SEQ ID NO: 259531 - DNA, 608 bp, Cannabis indica
ccaacttcagaccagcctacacatagaaaaaactttaaggtttgaacgaaataaagaagaactaaaggaaactatcaacaaaggcttaccctggtaaattccttcaagactcctcacatcggcaactccagggaagatttgttatcagcaccgcccagttgctcacttacctcaggaaccaaccagttcatgtaatgagcaagcatctctttgcctttcttggcccctggaagcaccagcaaaggtggagtaggagcctgcacctgcttcggtccactcttggccagctcggatctgccctttgattgctcaggcctgtccgagcttcctcctcgagaatttttggactttgcaatttttggagtggaaggatccgcaacagtcagctcctcggaaatgtcgataacctctccaacttgtgccttttccttggaaggggtcgcctcaccacctttagatttcttggctggaggagacgagcttgagcttcccccaactctcttctttggggcatcaagcatcttctgagacatgtctgcacaaaaaaaaaaaaaaacaacaatggttagaggaaaaaaggcatcagaagcataaagcatgatagtcaa

SEQ ID NO: 259532 - DNA, 558 bp, Cannabis indica
acccaatatcaagcatcccctgaagctgtaacttaagctccttgagttctactggagccattttatatggagctttagaaacaggttcggctccaggtgccagatcaattacaaagtcaatttcttgttgtggcgacaagcccaacaactcctcgggaaaaacgtcgagcaaatctttaacaactgtgactacctcaggcccaaatgtttcgggtctgctagagtcaatcacaaccgcaaaaaatcatacacatccactgtgtagtagatccatagcccttagtactgaaataaatgggatccgagacccctgaactgatccaacataaacaaatggatcttcaccttctggctgaaaagtcaccatttttcgcttgcaatctatactagccgaatacttggatagaaaatccatccccagtatgatatcaaactctattaattccaattctataaggtcagcactcaactcccttcttcgatcctaagtgtcatagacctaatgcgcctattagagataaccaactccctgctaggcattagggttccaaaccctct

SEQ ID NO: 259533 - DNA, 698 bp, Cannabis indica
ctctgagaccgagacttgtgcagttttgggtctcgatcccaattgtggttcccaagtcctgttccatgcttgggttttagttcaggtctgggtttgggtcccaagtcacagttcgggtttggattcaagtttgggagccaatcatagggtgggtttgtgtccgagtccgggtcctggtctggttacagttttgtgtatgggttcaggtcctagtactagtcctgtttctcggtgccgatctccttctggttttggttgtagtttcaagtcacgaggtacgggttcgggtcgagtttgggtctgtgtttgggttctagtcttgatttaggttcagggcgaggtttaggtccgtgtttcggtctcggttagggtttgaggttgggtctggttttgggtgccgatccgggtggaagacccagtctctttctaagatcctagtccagttctagttcaagttttagttttggttcccgagtgtgggtctggttctgggtatgtgtccatgtcttggtttgagttcgagtttgggttcgggttctggtctgattcccaaatccaaacagtgactatgggtcaggtccaagcatcgagtcccggatcccaagtcccgaggtgggtcctaggtcatgatttgggtctcggccgggtgccggatcctgatccaagtttcgaggcccaagttttggtcccagtttggg

SEQ ID NO: 259534 - DNA, 2002 bp, Cannabis indica
tagaagaactaacaatcctaatatggtatcagagctcgaattccccccccctcaacgcaaacatggcgactgttggagcttcgaatcactccaatccaccgaatctgggaaatacagccaactcctaccctgcttctcgaggaaatcgcactcgtgcgacagatgagttctctcctgtatatttttctcataatctctctgttaaactcaacgatcacaacttcttgctctggaaacagcaggttcttgcggccatccgtggcaatcggctgcttaaattcattcaagatgtagctcctcctccacaatttctgtcggatgaagatcgggcatcaaagacctataatccggagtttcttgattgggatgtccaggaccagctgctggtttcatggattctctcttcaatgtccgaaagcctattaacaagaatggttggttgtcatacagctcgccagatctggtccactcttgagaaacatttcacacttcaagtttcttccaaaattcttgaattccgaactaagttgcaaaatctcaagaaaggcactcaaccgttgaacgattacttactcaaagttaagcaacatgtcgacttactcgcctcagttggtgaagttttaagtgaccgtgatcacatcgcagccatcttcaaaggtcttccgagtgcctatgacacctttgtcatatctaccaatacaagaatcgaagggtatactgttggagagattgaagcattgcttcttgcttcggaatcgagaatagaaaagacagatcaagaatcggaattacatgtcaatgtggctgtttctgatactgaccaacaatctgaagccaatgttgtgtatcaaaatcgattcaaagctggttttccacctggtttccctcccagacctccgctgcaatttggtactttttccccaaatttttcacattccagaggcaactctcgaggagcttcaccttaccatccaactggctttgttccacggggatatcagtatccgttcactcagtataaccactctccaaatccccaggctcatcgtagcagcagcaatagaggaggccgtgttgtcacaagttctggccgcccccaatgccagctatgtcacaaaataggccatactgtggtcgattgcttctatagattcgacaagagttttactggtgtgcaaaccaacaatgcttcccctactcctcaagcaaatttaatgcacaccaatactcaaagtgacagcaactggtaccccgattccggagctaccaatcactgtacgcccgatgctcaaaacttggctgccagttccaactatgaagggtctgaacagctttttgttggtgatggtacaggtttgcctatcaaacacattggttattcttttctttcaaatgcttcaattccttctcctcttattttgagtaatttacttcatgttcctgcactaaccaaaaatctcttaagtgtttccaagttcactagagataacaatgtatattttgagtttcaccccgatgtttgttttgtcaaagatcaggtttctcgcaatgtactgctgactgggacataccggaatggcctgtattcctttgattcttctcagttacacctgctgaattcagtctcctcaccacctgttccaagcagccccgtccctcttcaatctatacagccacaaacactcactgctacagccagtattcccactttaaacatagattccactcatgtacactccatgcatactatgtctccttttgatatttggcacaatagacttggacatccttctgaaaaggttgtcaagtctgtgcttcatgcttgtaatgttcaaaatgcaaataaagtgtcaaattctgtttgtgcagcttgttgcttgggtaaaattcataaattaccttttccaaaggcttctcacactacttacactacccctcttgagttggttgtctcggatttatggggaccctcctatattccttcaactaatggctataaata

SEQ ID NO: 259535 - DNA, 709 bp, Cannabis indica
aattctctcttctagctcaataatgattcaagcctttggggctgttttggtcaaggagtaagcaagtgattcatcatcacttgttcgaacctcgtaatctggttgtgtttgattctttctccctataatcttgtctataattgttcattgatcaatgttcatatctggtttttagttactagtttattcattaattgttttctggtttgaatcaattcgtgttgtgaataaaattgttagcattgttcttgattgattcgttgttttgatcagagatctcattgtaagagctttaagagagaaaatactgtattctttgttcttaagtcaatacaaatcaaggggagtaggctattaccgaactgctcggggccaaacctctttaaaaaccttgtgttctttatttatcaattcatattatatttgaattatatcctttatcacttattattaagattcactatcgttggctaaaagtgtttgcactctgacgtggcatcacatgctggtgacacgtggacttgattctccatacctgtccgaaagagatgttccgagcagaacacggtatatacctgcacggacgaggtcctcccagctgagcagtggacaatccgagcagcacatcaacacttagtaattccaaaagttgcatcgtgaagcacaagaagcaatccctataaatctaggatcgtatcacaaagatatg

SEQ ID NO: 259536 - DNA, 1188 bp, Cannabis indica
tacaactcaaataaaaaaattacacaaataccatttacacactttcaacctaggatccatgctttctgggcaactatcgcgcaaccacgcaacaacccaacacaatcgaaataaaaattcaactataaagagaaccaccattaatttcggcaacttcacctgagaagacaaccagaatcaatcaaaacaggggctgttttgaattcataaaaaaaagtgtagaaaaactactacgaaactaaaattcaaccagaaatccagtttaatttgcataaaactaatgtcctgacttcaattttcaaatccatgaaaaacagatctcaaaaagttgatctggagttcccaaacaatccaattcaagtataatccaaaaaaaattacatcaatactatagtaaaatatttatcctggtgtattttcgttattttccaaatttttaatggtaaatttgttcatattaaatcataaagagacatgtagacagagttacgtacgtggaaacactgttcagatttttaatgtttcacaacagttgcattacagctgcataaatattttgctaacggttatttcgtttgattaaaaccttcgtctgatacaacttccaggcaaccacccaacaaccacccagaaactttcgtctaattgaaaccttcatctgattgaaaccttcgtctgatgtaactttcgaccaaccacctagcaaccatcgtctgatgcaactaccgcccaaccacgcagcaaccaccctgtaaccattgtttgattgtgtaagtgatagtgtaagtggtattttggtaattaaaattatataaaaagtataaatattgtccacatcttatagaggtatttttgtaaataaagtgtcaatttatattttctatgtaataattcatttatttaaatggttatgggagcgagtatgaggtgaatttaggatgtgggtgtggggtgggggagcaatctctggccccatgccgccccgtttacttccctattaacaaacaaccccacatataccctacttctcaacattcacgcgtgctctcaagtacaataagaactctctcaattttactcaggaaaagttctacaaatctttgttccctcatataatggacattaagtggcgtttagttggaaacaatagaaacataggaatataaatgagaataagaataaaagaaa

SEQ ID NO: 259537 - DNA, 585 bp, Cannabis indica
gtaatgtcgtacgaacgttctagactcagcaccgtgcgggtcacgtggataggattatgaatgggggtatgagcgtctgatcataatccaggttattgctatgttattatttatgcttttcttactgagtctgttgactcacagtgctattttccatgtgtaggtaaaggcaaagctaaagctgaggagccgtgagggcgagcaggtgaagattgtacatgttggggtggttaggcatggagcgtacgatctttgggacatcaaggcttttgttgaacagtcgtctggcaacaaaactttaaaacatgattagcaaacttttgtaaatgtattttgtaatgggatcccgagattttataaatgtattactttatgattttaattaaagaagcaaattttaattaatcacattttttcggtaatctcgttgattagcaacgagttgcacagtacatttaaaatcacgctaacatgcctaagttagttagggtgttacaatttggtatcagagccgccaggttcgctttccaagatcgtcacaacatgtacatcatcaccagtggtcagctcgtttcacggttcagt

SEQ ID NO: 259538 - DNA, 2508 bp, Cannabis indica
aaaaaaaaaaaaaaactattttgcaattaactttttttttttattaagcgtttatatattacaatgcataacctgagactcgaacccagaacctccaacacacgcaccctcctatggccacttgagctagccgcaagttaagttgggtttgcatatacacaaagagcttttggtgaaggtaaaggaataccactacatggaacactttaatactatttgcctactctcattgcaatcaaacagaaagaacaaaaaaaggtacccaaaatttcttcaattggtattattttaacagcaagttcacatacattcttttagatactactcagatatttacataggaggagcaagcagaagttgtggacatgtatgcatttttggctcgtaacagaatcttgaatcctaattttgaaatcctacaatgcttatgtatgaaatgcatggaggacataaggagaaaaatgagtttaagccaaacaccctgactttcctatcagttctggtggcatttactcagtgatgccaatgaaacctgatttggttttgtgggttgctatgcttggaggctatgttctgtgtggtaatactgagtttggagaagttgtactacagtggataatagaggtagagccagatatgacgatgcgaaagagcccgggatgtagttgaattgaagatcgagatgaaactaaatctcacaacagatctaaagagacatgctattgcatttgcacatgtaactggactttttacaaatgatttgtgattacatcaaacaaaataaaaggaaagacactattgtgtggtactactatatgtttacagtttctactgataactaatgccccaattatcaggcattctagaaacttgaatataaataattgaagaaaagaattttcagaaaacaaggagaaaaagctaaaggacgaactcagtacaggtctaaggattcgagcactcttcgagcttggatatgcagtgcagtcaatctctgttctggatcaagagtagagccaaattgactggctgcccatatcaaggaggcagagttctcgcccagaagccgccttatgtcttcttgtatggatgccaatggaggcctccctcgtccgtttacatgcccaatgagcagcaacaaaaattctccacatttcaacctaagaaagcagcagttatctattgtcagcatatggttggatttatgtgacatagacccgaaagggaatcgattgtccagaaactatctatggctaaactaagttcagaccctgacccaaacatgtcgattccagtaactcccaagcctactggcctttacgttgcaactagaaactaacagcagcatgagatataacctctaaaagaaaagggcaaaaataaatagaagaaaaaacctgagattttcatctacttgtttgtctattataagctctgcaacttcctcaatcccattacatgcttcaaaatcctgatcaaatatatcaaacacatatatgcatgttacatatagatcccacaaatactcactcttcaaacatttatcatcatgtattttttatacaacatctataatatataactgtaccatttgattagctgatgattccagcataatggagatcaaagcatctaaacaagcaccctgttcaagcactcctctagttgataatatggtcatcaatacctacatcacacaaggtttgttttagttcttttttcagtgtgaaaatttcttatagttataagctcaaatttcaaatagaaaataagtctatagagacctgaattgccttgtaatgatgagctaacgtagtactatctttatggagaagacagcaaccttccaaaacacgaagagcaagtgaaacttcagaatcggtagaaggactagtgatcttcatgggttccacatcaaaaatatgatccaaagttgatacaatctcatcttcagactcattcaatgaatgttgaaagaggaccggaaccactgttcattacattgtaaaggaattgtattcgaaatcaaatcagcaacaccaattttgatcctctttctataacgaaatgtatcccaaatttaaatctttttgcttagaattcatgcaaatatcccccaatttcgtaaagcacaaattccatgaatgaatcgaaagcgctaacattgaattgggatatggaagttcaaaccttgaagctcggagatggattgagtctgggagaaaagattgatggtgagatcggattgagccacagatcggagaaacttgaggagccttgtgagaccgcggactcggaggaaagagaactcagctcgggcgtccctgagaccgctacggagagcgagagtgacttccctgtaaactctctgttgggtcaagacattgacgaggtctttcacctccgtcgacggtgggtcagactccgactccgtcgaatctttctccgctgctgatattccctcactccacatagccttcttcaggtacattctctctctctctctct

SEQ ID NO: 259539 - DNA, 2684 bp, Cannabis indica
gttttaaaaatatttgattttgggatacaatacttaattagactaatagcgatactaacacataagagagtgcgatactaacacataagagagtgctagacaccactagtaccctttagtatttctctttctataaataatataataataattacattacaaaaagtattacacagctttcaaaactaattcaaataattgaacaataaaaccatctctaatataagaattaaaatttgtgttaaatttagcacaaaaaataaatttgtgctatatttggtccattatttacaattgtactccaatgcaaaataaaggaaaaaaataattgattatattaatggtgcattaaaatataacactacaccatctttttggcactccattagaaataatctactatatatttattcaattgactattgtatttctaatgactacatcaattttatttaacacgcaatttacacactaaaatattattaagggtgcagtcaaaaaattaaagaaagtagtaattataggattggtcatgttggttaatgtaattgaaggtaattaattctcatggttaaccataattacactcagtaaatattttgccaaacaaaacattaaaaattaacccaagtaattaccctattacttccaagcagatataaaacaataatccaagccaagcattcattcaaaataataataaggaattgttattgtaatgcaaaaaccaaacaagacctaacttcgacagactttcgagcaaaaattaaactaactgactcttgtttgttttaccattaacgaaactcatccatagagtactactcactcacgttagactcgacatcaacgcatcactgtttataattatttattctttctaccctctaaggctaagctacaaaaataaaataaaataaggaaccatccaaaccactacttacctggtcctaaccaactaacttacaactaaacgatcataatttcaattcatcataaccatcatatttcaattcttcataaccaaggaagaaaatattagcgtcaatgaaaatattaacgccataattttataaaaaaaaaaatacaaaatatatacaattcatcgaaatttagaccgaacaaaatcaattttacagtggtgcacccaacctattactttagcaataccagggagaaaaaaaaaattgttcaccagttgaccaaaaaagtaattgtacaagttaaagttaaacacaaatgaaataaagagagttataactttattttagttagagaaacacaatgtatagaaaaacaccacacgcacctacagaagccattttagctttagactcattttagaacgaaccaaaaaaacacttgccaaacataagtataactttagtgaaaattgtgtgtgcatatcattactctaaaaagaagacaagttgagcaggaaaccattttcatgcaaaattcacgggtagagaaagtaagatttctatatcaaatcatgaaataaaattagataacaatcctctaaaagaatccaacttcaaaacttcccctgataacataattatacttggaaagtagtgggggaaaccggaaaaaaacacaaaactaacatcagaaataaagctcacaatccagtaaaagccttcttcccgccacctgacgaaccagcaggaaccaccttcagaacattgaaccttacagtctttgacaatggcctgaaaaatgggaaaagaacaaatcaaaaacgcaaacatagccgatgtaattaaatgaacaagccagtgtaacagtcaagtcaatctaatttggcctcaaaactaagattataaaagaagaggctttggaacagaatctatcgatacattacctgcactggccaatgatcacatgatcaccttctttcacacggaagcagggtgagatgtgagctgggatatttgagtgcctcttctcatacctaaaacaagcaacagaaagatataaaaaacttgattgatagactagaaaactctaataaaaatgaaagaaacataagcattcaaaatacatacctttggtacttcttcacaaaatgaagataattccgccgaacaatgatggtcctaaccatcttagcactgtggcaagttccagctaaaatacgccccctgacagagacagttccagtaaatgggcacttcttgtcaatgtaagttcctgtgtgtaaacaaggaagctaaaataagaaatttgcatacgtacaacaccgaataacttgttgcaaagaactaagaaagatttgaaagagaaaaaatgacccaaagtggaaatgatctttctaccaaggaattagtcactagtcagtttccaagttcttgacatttaagccgaaacagtaaacaccctctttgagatgtggactgtttggaaaacgtagtagcgagtgagcacagactcacacaatcaggtgtccgtacagtgacacgagttaggtttcatttacttttctatgagacattgacgagcacatatgttatttccttatagaatagcgtactataatatatattatgtatacgtgtaaactgtttggtgagaaaaattctctgatttattagaaactgaaaaattaaggtgaaacgatctcatgtaaactagtccgtttaccattatatataatagggtttatactacaaatctttgaa

SEQ ID NO: 259540 - DNA, 585 bp, Cannabis indica
acgaagatgctgtccagataagagttctgcacaatgacttgctagtcgtgaaagtccatatagcaaacaaaatggtgtccagaaccatgatcgataatggggcttcttcaaatattttgttcaagactgcttacgagaagatggggctccagctcaaggatttaactccatgccttcagcccgtctatggtttctccggtcaaggagttgcgcccctaggacaaatccgcctacccctcacagttggacaagctccaacgagcataactatcatggcacaattcctgatattggatgttccttcagcctttaacgtaatgctaggccgaccagccttgtacgacttaaaagctgtcacatcaatattccactcgtgcctgaagtttccaaccaaaaacggggtagggtgtcttagagggaaccagcaatctgctcgggaatgttacaaccttgcagtggccaaggctaagaaggaagtatcctccagccagagcccggacaagggaatgaatattcccaagtaggaaaccgcccaaggcgaggatgaagatgtggatcctcgacttggggacccaagcagcaatg

SEQ ID NO: 259541 - DNA, 5140 bp, Cannabis indica
ttatttggccagttaaaagtattgaatttttacttttttttttgttaaaactaaaaaaaatccctgaaaagatgtttttacaaaaatattaaattttgggtaaaaatttataattttattgtacacgaaatttattacaaaaaaaaaatatcttttataaaacaacctaaaataacggtaaaacaacataacagaacaattaaaaacaacaaaaataactaaaaaataaccgtagaacagccgtaaaaacttaacacaatataaaacttacacaatatttttgaaattaataatcctctttgtccaaccatagatcctcataagatcaaaaaaggaaattaaaaaaaatccaaagcatatactaccttttagatattttaatcaaatttaactacatatgtaagtaatgcaaaagccaaaaagatttaagtaataataatgataatgaagcttgaagatagaaagggtgaaatagaaaactaaataatgacatagaaagtaagatagagcgacaatgacactgtgtaaaaatgttttttaaaaaaagttaattagaatttttaccctcttaaattatgacatttattaaattatactcccaatttttttagtccttaaaaaattcatcttgaattattgagattgttgaatttaaaaatttttgtttaattttattcaattttagtgattcagtgattgtccatttaataaatcatgctccttagattttgatatttactaaattatgtctcttaaattttgatatgtactccttgaatttttatctatgttagatttttcttactaatgttagacaaaagtccttaaatctaataattttaataattcaggacgaatttttaatagccttaaaaattcacgtgtgtattttgatacatgtcaaaatctgaaatacaaaaattttaatttgaaaaaaaaaaaaagcagacaaagtcacattattttttatctatttataaaaagtatgtttaaatttactagttttgcaagaatttctctaaacacaacttaatagttttatacacttctttctcataaataaaagttttgcacatgctaaatggtacattccactagctaaaagaactaaacaaaccgccgagctacaccaccaacaactaattgcaattatgggtttataataaggtgattggtatcacgtttagactcgatgggaatgagaatgtaaaatttaaattaaatttgaatgacaaaagatttgtgtttccaagaataggtttcactttttaaactaaaatggtaataatattaattctctcaaatgcatgggttcatattccctctaagtttactccctttaactttacactcttcaactcaaattcacataacaaataccctattagatgacgtttagttagaaagaatgaaaatatagctagaataaaaataacattctaatattttaaaataaaactaaacaaagtaacagaacaaaagttatttctattccattccatttcttctaactaaatgtcacttaagtattgctattgtaaattagtatttagtattatctattaatgctattacaacatagtattttatgaatagtagtaattttatatatatatataataataataattaaattaatatatattagaaccaactctaaaattttatggactctaggaaaaattataattattgatgagctcttatttataagacatgtgatatgtttctaaaaattatttataaaaatgtatttaatgtaatgtaacatatagaaaaatacatataaaaaaataaatgccaaattaagggtaccagtggtgtctagcattttcttacgtctcaatatcgttattggtccaattaagtatcgggtcccatataatttaatataataccttttagggaatattagccatcgcaacgcgacaactcgagaaggtattaggcaccactggtgcctaatagcaatgctcaatttttttggttaggtctcctacttttgtaagtagctccgtcagtgtctttagacctaccgcatcttaatccaatagttgtcctaattatataaaactcgataattatactaataacaacagtaaaacagttagtattaaacatcattctagcaaaattacaaacaacaaacaaaccacaataacacaataaacacacattaaaaaattaactaattaataaacaaaataaataagatcttaaattcccttattcttttttttttggtggaagttcttcttctaattactttcttattatacatatagacaatttgttatctagctaataattatataataaggtctttttttttctcttttcttttctaatctttattatatatattggtgcaaatggtacaaaaagattagaatagaaaagaaataaaattatgataatatataatgatgtgaatgtgagtgagtggggtctgaaaaggtattagggctgcatgtgcaccacgttagctgatgtcaaatacttagaccatcctcatcagtttttactaaggctgaccttacattgtctgcccttattcttcttctcttattatttttattttattataataaataaaataaccaaaaaagaaaaagaaaagaaaaaaaaacatagaaagctcctttgtataaagggaaaaaaccctaatgagcaatggtgacagttattataagccataagaataaagcaagacaccgcccattaggataataaaaacaacaacttattacatctctatatatataacatttttttattggttgtgttgtagggatatctttttcggtaccatactgataggagtgtttctgttaattataatctaatgtttttttaggaccttccgtaaattatgtataaaatgggttttgaaataatttatttttgtattattttgatcaatttcatacaaattaataatgtgtaatgttttaaagaagcgttgagttggattgtaactcatccttgggatagtgtagtgttaaaaacggatagtctggtatgtgcccaaacagtctaaagtaaagtctttatggcctcccagcttggtcttatcgttcaagatgttaggaatttgcttttgtctttatcttttgttgagttatgttttgttaaacgatatgcaaacaagttggctcattgtttggcaagagactctttgtttctttacaggttgtgtgcttcagttagagaattgttcctcttaagtatgttctattgttttgagtaagtttatttaataaattttctgattaattcaaaaaaataatgtgtgatgctttaaataattaggatataatattataaaaaaaattaaattataattttttctagtatgaaaaatagagacattcctatccgtagaaaaaggtacatgcgtcccctgtattttgtatatattaaccagtttttttattttttttttctacactgaggtttttattattttttttagaaaaaatttgttattattataacttagaatgtcatttataacaacagaaaagatgataatagaagaaatattttctaattaaatacaatcattatttaacattaaatttatcgtaaaaaaaatatttgtgcttatattataatcttattaaatttattttattttatgagatttttttacaattttaatttataattatcaaattataagatatatatttaatttttgtaattgtagtactattatttgtttaccctaagacaataagtgggtacgttcttgtcatgccatctcgcgtgttgcgaacggtgtggcccatgcactagcaaagtctgttactagttcgcttagggttcagttatggacagatgcttagtgctcattctctttaattgaatacatgtttttcttcaaaaaaaattaaataaataagtgggtacgtatgtccctggtcataattatcacattcacaaatttttattttattttattaaaataagagaaaagaaaagaaaaaagttaattaggaaagaaatataataaagtgcactgcaaacttggacttaaattaattacaagaaaaacaatatttcctttattaattttttcatgaaaatatgatcttcaggaaactacagttatggattccacgtccaaaaagaacaactttctttctttgtgaccaccaatgaccaatcgaataatatcttaatttaataattaattaaaagtttatttctttaattctctttttcgtctttttttagctttctaataataataataaaataataattaatgacaaatattcatataagaagaatcgattgaaagttaattaatcgagaaattaacaaattgtttttacaataataataataatacattgcacaaataattttactagctttacacaattaaactattattactagtaaaaaaataatgatatgaattggctagctttgcatgttgattaattaattttctctctctctaaaacaagaaaattttcttctagattatagcttgatgaggatgatgatgatgtggcaacgtacggttgagatcaatccttgatcgagggtaaatgaaattatagccgtccgatgaagaagtagtagtacaatatgtatatatttttttttgtttgttaaaagagattaattagaaaccaataataattaatgcaatgcaatttgttttttgaaatgaggatatagtactactactactacttactactctatatataatttgtggccaagaaattagaccccaaattaatctctctctaatttttttttcttaatatgaaagagtaattaattatatatatttatttatatatctatatacatgatgatttaaccaaatattattggcttaataaaatggtcttctcataaaaacttggaaggtcagcaaatacacaaacatgatccacaacaccaggctttgattatccattttagctgcctgtttcaataaaaataatattccatatatagtggaaaaaaatccaaataaggaaaaatcaaacaaaaaaaaaacaatcagatcactgtctatataaaattcttcaataattaaaaaaaaaaattaaatattttattgatcttgtagtacattttattcactttagtctatttacacttttttttt

SEQ ID NO: 259542 - DNA, 1101 bp, Cannabis indica
atcaaagtcaaactcgtagctcactgttgggacccgactttatagagtatgacgagggaccctcttttccaagtaatgaattaatctccattgttacagagttgaacaatatagcatggatgagaagtggtcttgagaatagtcgggctaggatgtctgatcacacaacaattgtagaaatctttcaagggtcaacctctactgcacaagttggaatgtccgaacggaacagaactaaggaccatttgcgcttcgacgaaggacgtaacaaattgatgggcatgatgacagatgctttgtcatcccagatgcaaagttttgcaatgccagctgaagttgagggcttgagctaatacttttgacttgttctcttccttttgagtttctaaacgccggaagaaaggtatataattcactgagttgtcacagttattggttgataatacatgtttttttggttaaggggtttccatttggctgctaagaagaatcaaataagagtttgattatatttagacttggcatgccataggagtgaagcttattcatgaccattgtaaatggttatgcttttacttaattgaacttttattatacgtgtttctttaacactaagcttctagctgtatatgtttttcttttatatgattttacgttatattaaagcttgtcttaaagatttgtcttgatcttaaagaagttccccaacagattacgattgaagccctccaaaattcaaatcctatgctatgcttggtgtttattttacaatgaatacatacatacttatatatatgtacacgtaaagaatgcgtgcttgtttgtttggagagagaaagttaaaagaagttggtataaggagtcatttagatgttatgagagacaaggtgaaagtgagaaaattgagcaagaacaatttgttattattaaagaacaagtttgaatacaacgaaagaagagattggagatggtattttatccaaccaaaattgagcaagaccatgagttaccttattagcagttctatagacatggtttacagaaactcctggaaagttggattaaatcagtatatgctgaaaatgaatgatctgaattctt

SEQ ID NO: 259543 - DNA, 605 bp, Cannabis indica
gagggttttggcttgaaattactttccttcaactccaaagattcaaaggggcctcttgattttggggacaagttgcattggctccacccaagcaactttgatttcttcatcttcactcaaatcttcaagctcttcaagagaacttatcaacttctcatctttccaaacttccgtgtgaattctttcagctacaatagagttaatcttagataggaacattcttctatctcatccgaaaatctcattgcattgaacacattaaaggtgactttttgatcattcaccctcatagtgagctccccattttgaacatcaattagagttctcccggtagcaaggaatggccgacccaatataataggcacttctctattagcttcatagtctaggatgatgaagtcggcaggaaaaatgaacttgtcaacctgtactagaacatcttttattttgccttccagatgagccatggccctgtcagcaaaccgcaatgtaactgttgtaggccgtgcttcaccaatacccaacttgttaaagattgacataggcatgaggttgatgcttgcacccaaatcacataaggctcttccaacatcccgtcccccaat

SEQ ID NO: 259544 - DNA, 849 bp, Cannabis indica
aattttaaatgtatatatagtacgtacgtagtgcatgtgtgattctaaattatattttagtggcaaacacttaatcactttcactgccaaaaaaggtttaataattcgttcgcttgactcagctctcccttttacattgctatatatttagaaactacgatatatatgtacataaattatacattctcatcggaatttttttccaagagatcgatcaaaggtttttgagtatgcatgcatggacaaaaaccattattacttattagagtttttgccttagacaagtgttaactacgagtgttattcttaattatataggtcggattcgttgctatatatgtgtatatttgcaataatcccataataagacaatctgttgcaattctgtatgtcccaatggctttgatcataactatttcaaatatgcattagtagtattaagagatgattatgaaagtaacctcataatcaagtacaaggtagtgaaaattagtgtggatatgcaaatgatttaataaacatgtcatcttttgtttagagactagacaatggagtcgttcgactattaaatttgcaatgcccattaattcctttatggaatcaagagagtgccatcattggaagcaatagaatgttagacatttatatatataaactgaaatgtatatgtttaagtattaagtgcggaattaatcaaacatatatacactatgaataaggatcgaaatacctccagccattgaatcttgagcttcaaacccacataagctttgatctgcaaaagaaattgactaccatgggtaatcgggcttcctcgctctctcaactctctttagatggaatttgctg

SEQ ID NO: 259545 - DNA, 798 bp, Cannabis indica
ttttttttctcctatggcccactttgtttcagggtcggccctgggtacaatagcaccaggcatgactgaagctttagccattaaagagacgttaagttggatcaaggatcataaatgacataatgttgaactcgagtgcgattatctctcaattgtccaagctattcgaagtaacatcaccatggtttcgcctcttgggggagtggtaatggactgtcgaaagcttctatctattttaaacaatgtttttttgttttttattaaacgatctgctaatatgactgcgcacagctttactagagcgtcatattcttttccagatcgagttttcagtgagagggatgttcctattgaattacagtcttattttttgattgatttagcaaattaataaaattctagtttgcattaaaaaaaaaaaattactgaaaaataagtttcaatcttaaaacaaaattaacaaggccggggtataaatataatagtaagtttccaaaacaaaaggtaaaaatgagaaggcctcgtttaaaacgggtaccatgaaagacccatttttttaatatgaatgcagaagaaaagagagagatagatttcatcaacattcaagtttcctcattacgaatttatcagaaaaaaagaaggttttctaatatccaaggagttgtctatttcaatattcgttccctcctttactgagaatagcaaagaattttattatatttttttttaccaaactctctcgatcactaaaactgggttggacataggattcttactgttgtgaacaagagtgggcac

SEQ ID NO: 259546 - DNA, 624 bp, Cannabis indica
aggtgagaaggaacatgaataattttggagtcagaaaggtaccaggatgtagttaaatagagattcacggttattgagattgataggagaaagtttcaggaatcgtaacagcttggaaatttcaaattattcaataattcaagaaagtgggttcaaaatttggatatttctgcagggtaaactctatgattgtcaattatattggtgacagcagcaaaatttcaatagcattttcttctcacacaatgttgatgatgaagaattaagcaatccaactatgaagatagaggatttcgttttgcaaatatctcttttccagatagattcagtgctaaggtggaaatgagaaagatgacatgataacattcaagtacaaaatctcgaaagaaagaaacatggtccatattcttaaatttaaggtagctaaaagcctttcctacaaaaacagtatcaatctggttcaaagattgagttgctttgtccaacttgtattttactcttgtatattatttcttaatgagattgctgtcttcaacaatgaagaacataacaagtagaagcagttggactctttcaaaactgatgttgatgtgtatgcattttagattttaaagagtttctcca

SEQ ID NO: 259547 - DNA, 668 bp, Cannabis indica
atttttataacaaaaaaaataaattaatatggacaaaaaaaattaccatacaatttctatctaaaaaagaaagcaacaaaaaaatattttcaaacgttatagtaaaatataaaaaaaatagaggttgaaaatcctcacacaaaatagagatctaaaaaaatcaattgataaatctataaaaaactcatcatatgattttaaaactgttgtcatcgaaagccgatagtatcaccgtatcttacttgtagtcgctactacattcaaagtcgctatcattatcatatcttatttgtagttatcactattgatcaaaataagtttgctctgtacataaaataaatcttatgcttgagttaattaactaataattttttttatacataagtgaatgattttgttataaattctttacttgtctcatcatataatttgtgatttaaaaaagaaataaaaagaatattatcaaaaaaggtaataaaagattaaatcaaaaccaaaatagagataaaaaaaaagattaaaaattgaaaaatcctcatcaagaataaaaatttcgaattttttttttttgagaaatctgttataaaaaaactcatcatataattgataaaattgaataaaactcactatataattataaacggaatagtacctcaaaatagagattt

SEQ ID NO: 259548 - DNA, 723 bp, Cannabis indica
ggatgggatatccataagcttaaaagcttgtttgataatgagactgtttcggctattttgaatggaggtaatccttcaggcgtaggggaggataactggttctggaccctagaatctaatggtaacttttcatgcaaatcagcttatagggcccaagctacagatcgagtgactccttgtgaggtagccccggccctatggaataagctgtggaatagtaaaatccctgagaggctcaaggttctttggtggtgtatcctctctaaggctctccctgtccgtgcggtcatagcaagaaaatttcctattgaggatgacagttgtccgttatgtggaatggaagttgaaaccatggagcatctctttctagcctgtgactttgcctctcgtttgtggagatctaccccttggggtatctatcctatttgtaatactggaattagaatgtgggattgggtcaagttcttatgggacctaaaaagcaaaggcataaacgatagggaggtcttcctctatgcgtcaataataattgataagatttggcaagcgcggaatgataaggtacacaacaacagctttgctgatatttttaaatgcattgactctattcgcttttcttttgcagatcaccaagctcacttactcccttgccccaagttgaacacgttggatacttggagtcctccccctcaggattggttgaagctgaactgtgacatcaga

SEQ ID NO: 259549 - DNA, 619 bp, Cannabis indica
ctgacatcttgctcaaaagggaaggaaaactcatcaaaaataacatctctcgaaatatatagcctacccttgggatctagacacttgtaacccttatgattgagactataacccataaaagtgcaaggagctgatctgaattcaagcttgtgcttgttatagggtctgatattaggatagcatttgcacccaaaagttctaaaggttgtgtagtcaggcttagtgtgaaacaaggtttccaaaggagatttatcatgtaataagggtgtaggaagcctattatgaatgtaaacagcagccctaaatgcttcatcccaaaatttaaggggtaatgaagcttgagcaagaagagctaaaccattttcaactatgtgtctgtgttttcgttcagctaaaccattttgttgatgagtggttggacaaggatgtctatgatgaatcccactatcagcaagaaaggttgtaaaggatctatattcacccccccaatcggtttgcaaagtttgaatggacttgccaagttgtaactcagcttcagctttgaagtgttgaaaagttttcaaagcatcggatttgtttttcaagagatacaaccaggtgaatctcgaataaacatcca

SEQ ID NO: 259550 - DNA, 770 bp, Cannabis indica
attaaaaatgaaatttcccttaaagaatgtatcaggtttctaatattatgctacaatataaattcatgggaacaaaatagaaaacttgagacaatatatgtagtaacacaaacacttaaatcttttacacattgcgaaattgtaaaagaaaacaaggtaataaaatggactaatgaaagctcgaaagccattccactaacaactaaatgctagaaatccaaataacataacctaaataagtatagcaacaaccacttttctcagcccaaaaaacccaaacccaaaatcccattgaacctagagaaataacatcaaacccaaaaaatagcaatccaaaatcaggctcggcattgagatatcaaatgccaaactaatttgaaagaattaatccaaaaacctaataaaagctaagaacaaattatctcaaacaaaaaccctaaaatcaaaataaaatacaagagaaaagataaaatcatacctgtaatagccaaaaaaatctttctctctaggaaattactttcattgtcatgctcttctcattttttcatttcaaatctgagaatgaaggaataacaaaaaaatactgagaaatagggagatagagagagaggcgagatatatagagagtggaacagagagctatataaatatacagagagagatagagagagagataaagagaggaagagatttacctgtaatggtgaagatgaagccatgaaaactcctctgaaggtggtgataaatgagagagaagcacaagtgataaa

SEQ ID NO: 259551 - DNA, 730 bp, Cannabis indica
aaacggttggttttctttacatttgtataatggtcggtcggtttttggattataaccatgaaaactgaagaccaaatttttgatttttttatgtaaaaaaccgactaatccgaccattgctcacccctattctggcccatcaacctttgttccaccatatataaagtggtctctaaaactatggctaacagacttaaaaatattctgaatgacctcatctcttataaccaaggagctttccttcataattgttgtgaataaaattaggtatacgcaagtgcacgtagtcacaaacaagtaatagaatgataagtaaaagagtatcgtctctacagggattgattagaaattaatcatgcaaaaatcaatactaaataatttaggtaaaacaaacaagaagtgatgatgatttgaactaggctaaaaactaaacaagaaagtaaataaaatgaagaaggaaaatgagcaaaatgatgagctagaacaatcaaatctacttagaatgcaaattcaatgtaaatgtcatagaggaatgcattattaattaaattttgtcaaccggaaatataaatgaacatatgatttttccaaacctatatgttatgggctctcaagattaaattaacatattcctatgcaaatctagacctaaagaacacaaattaagcaccacttttccaagggtcatacaaggtaaatagcaaattcctataccatctacaaatcacac

SEQ ID NO: 259552 - DNA, 989 bp, Cannabis indica
attaggaagtttataactctcctagagacctgagcataaactatgagagaatggattataccttttaccactagaagaatagaacattattagactgaaataaaagagagtgaatccaactaaaatattaataaagaaaacattaaactttttctagaatccacttagacataaaaatctcaaaacacagtgcataattgtactatttatttagttgtcaaattagtctaatttcagtgacacaaattcctcttataccattatgaattacattagccatctattatattctttttaactcgtggagaagatacagttccaaagtatacatgtaactattagaatctagctaccataataattagaattttatgtcattttataacatctttctctataaagatattaaatcaaaaataagtgagtcaaaggacatggtaaatgtcaaactcaaagccatgtaattttgacctatgttgatagtgcactcaattgataaggaaaggaatgattagtaatagtatccctggctcaaatataacttagagaaagaaagtagaaaaaaagaacatctacaattaatgaaaagaatttcctactattgtagccatttacttttggctaaattgtctggttttctatttacaatatctcaccttacaaaaattataacctaatatttttagggataattacataatatattatttttaattttttttttatatttttatgtttaatatttttttttacatttttacagtgttctataaaaattacaccaaaactacataaaagtaatataaaaataacatcaaaacaacaataaaatatagcataaaaataacaaaaaatcaataataaattaacaagagtacataaaattacattaaaaaatcgtattttctttaaatcataaaattatttaaaattccgtacaaccgaatttttgttttttttttattattttatgtatttgtaaaataatc

SEQ ID NO: 259553 - DNA, 527 bp, Cannabis indica
tgctcggtcacttggggggcacctatacgtgtacaaagcattcggtaaaaataaaacaaacacaactgcacgatgattataaatagaggatcaaattcatttttgataacaaaagaacgtaaaactgggattaaagattggccggttagcccgttgtctgaaaaatgaaaaataattccaagtttaaaagaccgcttggccggtcactttttcttaaaaaaggccttgtggcaagacagatataaaaaaagataaaaaaaaaaagaaatattcagacagctggagtcctaagctctttgtacgggtcttctcggccggtaggagctggaggatctattttctgagcgaggggcatgtcaacgttctggccagaggttgaagtggtcgcctcgattctccatattccacctgagaagcgcaatactcgagaaacatgtctttggaatcgcccaagtaatcgaagtttgccttgggattagccttccaaaagtcattaaaaatcttgagacctgctgtctctaaggcat

SEQ ID NO: 259554 - DNA, 547 bp, Cannabis indica
ttaattattaaaataatgttatttatatgttggaccaacgcggctgctggtttgtcctatcaccaaattacaccctgccacgtattttgtcttttcggcctttttcttttgatggacccactttaacatggaccagcctttacaaatatcactttttttcattcaggaaaaataccattttggtatcattttgagtgaaatatgacccttttttcttcactcaaaatattattacaatggattatttttatcaaagtataaactaattcgaagtatgctatatttatttattttttttgggtatgattttacattaaaatataacttaagaagaagtaaacaaatgttatttctatgtaattagttttgatgagtaggttgtaatagtgaattagttttaagggataattataaaagacaccattatttataaaaaaaattatatttttacgttttaatttttttttttactttttcgtaaaaacaacacgaaaataaaaaaaattacgtaaaataacatcaaaacaacaacaaaaaataacatata

SEQ ID NO: 259555 - DNA, 732 bp, Cannabis indica
atatataaccacttaggtttttgagaagttaaggcaaaaataaaacccataattaattggtattttcagtattattaccagttgtactggtggtaataatgaatgctccattgagttttcttggatcccttgttgtggctttgttcatttcctcctatacaaaagcagcagctctaggtttaatattataattaagtttcatgttgaagtttctttaatctaaagttatatattgacacttttttttttatgtgtgattaatttcaaaatgaagatgatttgaatatcaagagatctgattttccaagagatatttcctttttggagctgctacttcagcccaacaagtatgtataaaacatgtttgtttatttatatatatatatatagatatatttgttatgcatatatatgaatgtgattaattatgatgttaatgacagattgaagggtcaggaaaccaaggagggaggacaccaagtatttgggacacctatgctgccaccccaggtttgattaaatatataaccttaatcatttgaattaggtgggaaatgcttaattgcttataggtcactaatcctatttagtattatcaccaagtattatattattattattataattaattatcaaattttatatattttaatttaataattatcgtttattatttacaagatattacattttaatagcacaaattatttttattttttttttcttgaatta

SEQ ID NO: 259556 - DNA, 1865 bp, Cannabis indica
tagccacattgtgagcggcaaaaatacaagttcttgaaacataattataacttatgtattataacttatgtattattaccgccaaaaattaaatttaagtatttatttgtgattgaaagctaaacttaaatatttatgcggtaaattactctaataacatgtaaaatatatatatatatatatatatttgaaggcagacaatttgttttagaacattagataaatttatatcattgttttatgtgttattattattatttaagtacataaagtaaactttagtttactcttgaaacctttaattttaagctctaacaaatctaaaagaatgtctttataaattgtataacttacatatgaaattgttggttgaaatataaaatggaaaatacaaaataatagtacgactaagataagaaaaatttacgtacgtacgttgtttaagaagttgaactatatatatcaaatgtaatacatttagagctaaatataaataattgtaatcattgactcattggaaagacaacgttaacttgtacaaaaaattagtgtgtatgtggcaattgcgagtcaaaaggtgtttgtttcacaaataaaacatggttttttttttgaaaaaaacaataggaaaagtgatttagtgaatgaggggttgttgggtttgggtattaaaatttaaatatatatttgtatataatttgatgggtgtaaataaatataatataagattcttgacccatacaaaaaaaaaaaaacggaggaaagtgaaaggaatttttataaatagaggtcaagaaaggccactagccgcaaaagctggggatcttcacatgtcacatatattatacggtgaatcctacttttcgaacattatcattatactcttataataaactttatcctaaaaatatatttcatatcatttttggtaaaaataaaaaattaagatacatacaattatgactctatggcttaaaaaaagatataaaataataaataaattatgtatatagagagttggtgacaattaatgtagactacaaaatatgaagatcctgaaattgagcgtgttcatcataaaacgacgtagggacatcgtaacttttaccatatttataattattatgtatgtttttatatattaattaatttgatctctccttctcatcttcccagaaaaacagcaacttgctttttccctaactcccataagtacaaacaaatattgttaaaaatgtaaactatgtaatttattggtttttttttttcattttattttgttggtgggggtatattttggtacgttagagcatctcagactcagagtatcaaaaaaaatagtctattattatagtttagcacatttaaaaaaaattatgctccaatgatattttaaaaaatgtattaaatttggcacatactaaaagtttttactaaatttaacacagatataatattgtgtcaaatttaacttataataaatgatattttttacaatgccactaattttaataattcatttacttttactaaacttcatattttttatttaccatagtaccattatttaaataatgaaagaataaaaaataatatattttttttttggtatgttctctataaaatatgaaataactatccgtataattaattaattattttttttttatttttatatattgtgcatttgagtacaattataaatagtgagataaatataacacaaatttattttttgtgccaaatttaatacaaaatttaaattttctattaaaaatggtcttaatcttatatgcctatatggtaagacttttaacttaaataagctttatttgttcacagtgcatatcgaaatatattatgtt

SEQ ID NO: 259557 - DNA, 625 bp, Cannabis indica
tatttcatttaaattaatcaattgaagatcacagacccaatgccggtctcaagcgctgagtaaaacttgtagggttggtcttgagataactttggttatttctttagtgatttcaacaccgccacccacgaatcctcagataagtggagaacatgtaacaccactcaagagtaatgatcaagaaggcccaggggcatttggtatggaaagtgaccaatgaaggcacttccttgatcacttggggcacataggttatgttatggtatacgagatccatatgttacactagcattaaaaaaatttctttgcacgtgtaggtaagtaatctcatggtaaagataactttaagaagaaatgacattacttccagtgattgagtttcttaagacatggtgtattgtgcaagtgttaaacggtcaagcagtaacatataaagtaaaataaaaaagaaaatattggaataacaacttgcttaagttgaaaataatttctaaattaactacaataaattttgataacattttactaaggcttatccacatggaaaggccgcccgggaaagaccaactaatacactaaagctaaatgctaaaaaacaaaaatgtagaaaggactgagacaatgt

SEQ ID NO: 259558 - DNA, 554 bp, Cannabis indica
catgtgatgcttgttaactctgcctggtgcattcaaacagcaggcaacaagaggcaatgcagctggagaagagcagataggaggaggtctagaatctgatgttgcagaacttaaagtaccagaatttagagatgttgaacaaggctgtaagctggttcttgtgacagtaacagcttcagtaccctaattagttggactagcagtagcctcttcatgaacactatcaccacttgctaaagttgcacctgcattacagacagcagtaactcctacaacaggctgcacaagcactggaaattgactgttagagggacaaatatctataggaggatcaggtacagaagtattgtcacacaaagcatgttggtcaatagtatttgggctatttaaaacacctgaaaaattaccagcagtaggtacagaagtaactggtgcagtaagatcatggatggtgtatggatgtctgtaatgagaacatgtaggaattaatgctgatatgagaaatgatttttcagatgcatctgtgggagaagtggattgagaagtttgctcat

SEQ ID NO: 259559 - DNA, 1646 bp, Cannabis indica
tatttttatagtatttggtatgtcatttacatgtaaattaagtttttaaagtccatatttaatgtttttatttatttttagacagttttatttgtcactagtattggaaaaatcgtcagaatttactgtcgaagatatcagagtagctgccagtgtcagaaaaattactggaattattgtcagtgccaaaaaaatcatcaaaattggcattatcgccagacaatcactggaaaatcattaagaaactggtttctcgatgaagaaattagtttctacagattagctagcacacttaactgtagattcgggtgtggatttgggtaagaagagtgaatacatcatgaacatgttgtatgatatgataattatcatctataaaggatagagtcaatactctataaactctatgtagggtacaattgagagttggttactatattaacaactggtaattggttatcttaataggtaatattgggtatgggccgggttgttgttgaggattttggaggattattatgattctaacaatatatattaatggagtatgaacacataaaaattaacaataatgggaatagcaataaatagagtttagaaaacaataatgtaataagaacattattaggaaacacaagattaatccaaaagagtgattaataataaaaattgacacaaatagcataaagatgagtttggaaaagtcaccattgatttctatgaaatcaattctttgatcaagaagagatgtcgggttagaactacgcatattcaagaaatctttactccaagtcccagttggattactaatggcttctttcatggaataaaatctaagacttcaagcatttgatttgtttaggattagcaaaatcctaaacaaaactaattagtctcggagataactactaaagaacatttagataggtttcttgagagagtagaaatgagtggtcaattcgttttactctcataacacatttatagtgtaggaacctttattagtactaacccgtgattaggtcacttaatgaggtaatttgaatcatttcttgcataaactttccatgcaaagtgcaagtagcatcgggaaataaaaaaaacgtaaaactcgaatctcgtcttgttttcgatgagattttacatagtcttgaggtgatatatcacctaaaattgacgacatatctcgtgggactttgactgtggttatttttttgcaattctagaaatgtttcaagcaacatgtcgccttatactgtgcatttcatctgaaacatacatttgacatttctgaacgatccaaatagaacttcacgggcaagtttaatcaaaactaagttttaggatctaaaaataagttctaacacgttctacaaatataaaacttttaatgtgttttgttcttttaacttacgttaaatatatctcattgattcgggtttggcaaatgttatcactagctatttccatgatttattctcatcatctagtgttaacttgggatcggttttggatggtattcggccaactgttagccgtgagcaaaatgaagacctcttgagaacaatttctgaggaagaagttagaaacgccctctttcagatgcatcctgataagtcacctgggcccgatggtatgacaccagc

SEQ ID NO: 259560 - DNA, 791 bp, Cannabis indica
atttgatgtgatttgctcttttgtcaccttttttaattattaggcatatgtaatgtaaaattttattaataatcagcagcaagctcagaaggtttttcaaattgaatatagatgctgtgatgaatcaaaagatagaagaaattgcttacaaggtgtggtggaagattgccacggttgccaaaattgcaggtttgccaattcctacatcatgaataacaaactctactcatgttgaagccttggtcttaaagtaaaccttgcaatggtacaagccacaaagtgctagttaataagattaatggtaacattagagataaatcagctttatcagatactatcatggcaatatattttacactttatcttacttccccaaagtcacttttaggtatgttgctagacaaaataatattgatgctctgttttagctaaaaaggctttagggtgaggtaaagagttggtgtgaaatggtatttgtgcaccctttcatggtttgtaacttgattgttttttattattgaaagttacagcttcaaaaagaaaagaaaaaagttggtaaaataattacaaataatatgggatctttgaaattaatgtcaacgtacggatcacagccatgttccttctacattttgctgtaaatacatctaatacaaataatattatttatttattttctatattgaatgaagacaactttttgttatcatgatctgggttaaaatatataaccacaatatatatattacattcatcaaaaaaaaaaacaatatatatattacaaaggtgtc

SEQ ID NO: 259561 - DNA, 1564 bp, Cannabis indica
ttcgttttgttcagctttttctcaccttctactcgctgaatggcctcttcgagcttcatgaaaccttcgacccggtcaaggaaatcgctcattgagtcgaccggtccgtttttccttatatccttccacagttcgccaaggacttcaatgccccccagtatcgcggataactttccatcctcggttacccgtgataccttggtcgcttccgtcatgaatctgctgatgtatgcccggagtggctcgcctggtcgctgttttacttcgaccaaatctcccagatgcaatgggagttggcgtgaggaagagaattgtgcatggaattccgaagagaaggttttccatgaactaaactttccaggagccaacttgaaataccattgttgtgcggcctccgacagagtagcggggaagattctgcaacatacgtctcctcgtaccccttgtaaatccatttgcatctcgaaatacttgagatgggagagaggatcttctctcccagtgtacatcttccacgttggcatcttgaacttgtgaggtagtggcagaagattgatctctggtgagaagggagttccgcgtgcacggtctaactcaagatcgttgttacactgcccgaccatgccatgaaacatattcttcagttctgcacgttcgttgtagtattcttctcgtctgttcccctttttctatttacatcgtcccttaggtcatgggttgttcccaacctatcgaacacagaagaacctggctaccttagcgattggttcgcttggttggcaggtggaatggctccattattttgcgtggatccgttaagcatgacccctccagatgaattcccgaacaaggtctgtccgcctacctcttggcccacgagtggaactcgttacaagggcttggacggctgaccgttggttgtctaggaagcgttcaccgttgggtcatcctcagtttctcctaggggaatgacgctcggtgcttgctcgcctacagtctgataggtgcttcgtatcagcacagtggcttgccggctacgatcttagatttatgcatggtgagcccttaatgcctccatctctttgtccctccactcggcgaacatacgcctctactcgtcaaacacgaggtttactacggcacgtaattcctcctgatcgtgatgcagggtattgttgtgaccctgcatgagtctgagcgcatcggggaggttttgcaattcggttgcatctctgatggtcgtttgggagttgatgcatggtggaatagccgtgttatgaacgccctggctgtgtgcggaaccgttttttccggtctcttgcacaccaggagcagtttcaataacaggagttgtctcaccattcaccacgcttcccgtctgtccaggattgacagcgggtggaaccctcgaactccctaggtcgtgcaacgtcgaattcagcgtctgtgagttcgctgggtcggagaggcctctacgagtttgtaccatcgtttcaaaagagcgatctgtgattcttctctcaatgaaagcaccaaaatgttgacttcgcttttagccaacgca

SEQ ID NO: 259562 - DNA, 664 bp, Cannabis indica
ccctgaccatcattggatccaactgaattgccctggctcctgttgtttcgcctggcgtccatactaattagaacaacctgcgtaaccaaagctagccttgtcaaatcgtgatcaaaagaaaaaacttaataatgccacttatttggaaattaaaaacatgcgcctattctactatcaggctactaacatgcttcctaacaggattttcttaaatcatattattaaaaataaactactaaagcaataaaagcttactgaaccgtggaacgagctgactgctgatgatgattgtacatgtcgtgacgatcttcggaagacaacctggcggctctgataccaaattgtaacaccctaactagcataggcgtgttagcgtgattttaaacgtactgtgcagctcgttgctaatcaacgaggttaataaaaatcgtgaataattaaaattttgcttatttaattaaaacataaaatataacacttataaaattctaggatcccgtttacaaaatacagttacaaaagtttactattcatttacaaattatttgttgcctaacgactaaatattaaaagccctgatgttctgaggatcgtacactccaggcctaatcgccctgacatgtacaatcttcacatactcactctcacagctcctcagctttag

SEQ ID NO: 259563 - DNA, 561 bp, Cannabis indica
agggacttagtcttttgaatcatataatcacaatcacattccactgcgttgacaatactgtaattgtgaataaatatatgttctggacttaactgattttgtgcatatattaaatatattttaaacaacaagtatgtaaaatacatgttaacataaatcacttcaaatctcttaaactgataactaatcagattgtagtgggttttatttagggcacaaaacccaacagctttgacttcctaaacttcaacaggttttaaaatataatcattttgggccacactcacaaagtaagggatttcattcagcaccaactcattaacagaattattagcagtgaagaggtttgaaaaatagttaacaataacctattcaaggccagtttcccatgtaatccagttaccatcttcattttgcagctgattgatttggttgtttctttttcgggcacttgcagtagcatagtccacaagtcaatcttattcagatttctgattgtttttcagggcctcttttgtatgagttttttcgtccccctttttaatcttgtttgtcactatt

SEQ ID NO: 259564 - DNA, 641 bp, Cannabis indica
tctcttcagtttccttctcggttctgctaaatggtggccctcttaagcaattcaagccctcccgtggattaagacaaggcgaccccctttccccgttcttgtttgttattggaagtgaagtcctatctcggctcttattccgtgcagaggctagtggcctcctccatgggttcaaagtcagtcctcgtagcactcccatctctcatctcatgtacgcggatgacacctttttgttttgtgaggctagtatagatgagatcaatatggttcaagattgtctaaggaaatactctgaatggtcaggtcagaagattaatgcttcaaaatctgctacggtttttttccaagaatacctgttcggaggtcaaaggtatgatcaataatttactgggctttagacccctttcggaggcggacaaatttcttgggaacccgatttccttttctaagagtgctacccgtgacttcagttttgtggtggatagagttaaagcgcgcttagaagggtggagaagcaagttgttatcccaagccgggagaaccaccctaatccaatcggttgttgctagcattccggtgtatactatgtccaccttcctccttcctcggacggtctgcgatgaattggataaggtggtaag

SEQ ID NO: 259565 - DNA, 829 bp, Cannabis indica
attctttccactttgtagtccgtgaactcgtggagcagctcccggactattgttacatacgcggccattcgctcgccacgtgtttggtactctcccgatatctaatttacgaccagctgggagtcgctgtagacttctactcttttggcccctacggccttcgctagtctcagccctgctatcaaggcctcatattcggcctcgttgtttgaagctgagaagtcgaaccgtagggctgcctggagtcaaagtaaggtcggggatataattagcacccccgctccggatccattttcattggaggctccgtccacaaatactctccatgtggggatcgatggtgtcggcgcattcgcggttgcctcggcttcattgcattcggtgatgaagtctgccaaggcttggcattttatggagatgcggggaacgtagtgtaagtcgaagtgacttaactccattgcccatttgaggagccttccggatgcttctagtttttagaggacttgccggagtgggtggttggtcagtaccttgatcaggtgtgcttggaattatggccttaattttcttgaggccatcaggaggcagaaaaccagtttttcgatgatggggtactgcgtctctgctcctatgatgcacttgctaacatagtagacgggatgtttagttttctcttcttcccggactagggtagcactgaccgcgtgcttggagacagccaaatacacgaataggtcctctccgagaacgggttttgataggataggaggcttggccatatgttctttcaactttttgaacgcctcctcgcactcgtccgaccattcaa

SEQ ID NO: 259566 - DNA, 618 bp, Cannabis indica
cctatagtagcattagtagtctagtagtagtacctctaaaaatttggaaccaaaaacttacccactattgtaaattaatccttaggtttctaaaaaagaaagtatatgcatttggttcggatatatatttctttaaaattctagctttactccattgtatttaacttatagaggctaccctcaattttatgtttcaacctctttgattaactattgcatctgaatagacatgttaaagtatatttttatttaattttttttatcacgatgttcattataactataatattaagtttgtaaattttaaaaaactttgaatgctttatagtatcgacaacagagtttttgatattagaaattacaaatctattttcgacaaagtaagttatcgaaactttttaaatatttataaagatgatattgtaaatataacgaataccactatatgtcggcatgtattttaaaacagggagattgattaagatattgtaatagaaggttgtaattagtagatgtgttcgtagttaacatcatttagaatagtgtggaaagcagaattaaaaagattagatgatttcaatctttggaccaccagaagtgcatctgtttctattaaat

SEQ ID NO: 259567 - DNA, 718 bp, Cannabis indica
aattaaaaataagaaaactagtaagaagcaattatttaagaaaattgatagttaataaaaactagggcttcgatttcaattatttctattgattatggcttaatgttaggttatatttagcctatgttttgggtttgaaaagtaagcattttctcgtctattggtgtcttttggagcggttttacgcttgcttttcattgtttcaggttctcggggtatcaaagttcaaattcagtcaattggtgaaaagacgggacaaactggcaaaaaatcagaaaaatctactcaagaggcgtcagtagtcgcaactaccattgagccaggtcgcgaccctttcatgtagtcgcgactcttgtcgcgactttgaggaattggcaaaaactcgatttttcgagttttgcctatagtcgcgaccacttataggctagtcgcgactaggtacagaaaacgcagttttgacctaattctgatttttctctcaattggaggcacacctttcatccctatataaggaatacgactccaaattatgcaggaatagacctgaatagtggatgaaagtggagaggaagctatcttgaagacccggagcgatatcaccttctagtttctttcttttaccctttgttctttcttttatgtctattgttgtttcagaattaatcatggatatttttattgtttttatgagctaaatttcccattaagggaggatgat

SEQ ID NO: 259568 - DNA, 658 bp, Cannabis indica
aacataaaatgttatttctgatctttattaactaataaatttgattatattgaaatgggtttctttagggaacaaaacccaacaaacattaccgcggcaaattctaggtcatgagttgaatatcgttgttcataatctttcaactgacgagaggcataggcgataaggatcggcttgcatcagtacacgccccagaccctgtttggatgcatcacagtaaacaacgaacttttcttggtcagaaggcaaagctaacactgatgttgtaattaacctctgtttcagctcctgaaaacttgattcacatttatctgtccatacaaaacgctaattcattttagtaagcgcggttaaggatgttgaaattttagaaatcccttctacaaaccgacgataataaccagccagacccaagaagcttctaacttttgtcactgttttcggtcttggccaatccctgacggattctacctttcctagatccaccttgatcccatcttttctaacaatgatgccaaggaaggacacctaagattcaaaaattcacacttcttgaacttggcataaagcttgtgttctcgagccgttgcagaaccattcggagatgttgctcatgttcctcttctgattgagagttacacaaggatgttctcgataa

SEQ ID NO: 259569 - DNA, 679 bp, Cannabis indica
aaatctgattatattgaattgagttttatttagggcataaaacccaacatagagacccatatctgttcgaaaactagtatgttcttggtctggcggatgcattttgatctgattgtagcctgaataagcatccacgaagcttagaatttcttgcccggctgttgcatctatgagttgatcgatccttagaagcgaaaaacagtcttttgggcatgctttgttgaggtttgtgaaatcaatacagactcgccatttcttattcggcttgggcacgagtacggggttcgcgacccaagccgggtaaaaagcttcaattatgaagttgttgttgcgcaacttttcaacttcatctttcagggctactgctcgttctttatccaacaatcttcgtttttgctgaactggccggatgttgggatcgatattcaggacgtgggaaataatagaatggttgactccgaccatatccgcatgtgaccaggcgaaaccatctaggcttgctccccgaaattttatcaattctgattttacttcgagcaacaaaccctttccaatttttagctttctggccaggatagctgggtcgatctcgatctcttctaactcttccacaggtccaacattgctgcttgggtccccaagtcgaggatccacatcttcatcctcgccttgggaagtt

SEQ ID NO: 259570 - DNA, 518 bp, Cannabis indica
actgttttacgaagacaacttcaaaaaatgccttaaggtacttcatcatatacacaggctcgttcttacttgtaattttgacaactgatctatgttaatgatgcatattggtattgatgtgttcaaataattcaattcattgtagtgtcacatatctatatggtctgtaatttgaatgtatttatgactttactgtttttcttatcaattgtagatgtttgtgtcggtattgacgctagaaggtccaccattttggtttggtgccgaagttaatatgaagtcgaaggttgtctcatttatggactccctacacactacaatggatgagaagtatcgtgttgacgctatgcaagaaatggtaaatttacaaagtgtcattatttgatgtgaattcatttttcattgaatctaacaaattgtatatgtttgcagctgtcgacgttggaccttttgttcgatgagaataagtcaaagaatgtgagttttgtggattttggaattgatactaaagatcgtgg

SEQ ID NO: 259571 - DNA, 588 bp, Cannabis indica
cccgatcataccccaccatggcccctcatttgtacctgagacgttagcatacaacataccatacatacaaatcatgacaaccataatatacaaccatacacaccataatgtacattgattcacaaactcatattgtgtccataccacacattctcagtaccatatacacattcataatcataatacttcacaaataatattttaatacacaaataatttaaattatacagttcagcataaaaaaaaactacctaatttccttaccttaattctctctgcttaaaactttgttatcccgtcactgctccttaataaatctcagaatgagagcaattgtaaatttgatccttgaaagcttatcgtgaaagagtatcactaacagatcattgtcctttattaaaccaaacaactctatttagaagatgagttagagcgaagttattctaaaccatatacccttgattaaacataccttagttttcttaaatatacattagtcgtccactaccataaatctcgtagaagatgtgattcaaagcttccatcttaatagtcaccgagaccttcttgtggctctctctctctctc

SEQ ID NO: 259572 - DNA, 876 bp, Cannabis indica
caccctctaacccgcttctgaaccttgtcgcatatactagcaaaagttcgcttcttattcctcccaataactgttggcaaccccaaatacttgtcatgagtggcgactgatcccaagcctaatatacccaatacactagtacgatccgcaggtaatacattcggactgaatgtgatagcagatttatcaaaattgacttgttgaccagaagcttgctcataacattggaggatccgacggatagactccgcctctctcccattggctctaccaaaaattaaactgtcatccgcaaagaaaagatgggacacccgaggcccataccgagagcatcgaaaacccatcaagtccccactaacctcagcttgccgaagcatagttgacaaggcttcagcacagaaaagaaataagtatggcgaaagtgggcacccttgccgcaaccccctcgaaggcaccacacaccccttaggcttgccattcacaaggaaacaatattccggtgtagtaacacaatccataacgagatccacccaacgactaggaaagccaaacttacacataatagcacgtaagaaactccactccactctatcatacgccttgctcatgtccaacttcaacgccataaatcccctgactccattattcttcttaaaaagaagagtgtaacaactcaaatcccaccataacattatcatgaatagctcggcccggaacaaacgcactctggaatgaggaaatcagcggtgataacgtacctttcagccttagagacacagccttcgccacaatcttatacatgacactacagagacttataggccgatactccttgacaagagaaggattagtcactttcggaatcagcaccacatt

SEQ ID NO: 259573 - DNA, 552 bp, Cannabis indica
gtatctacacattaattccatgacaatttaatacccttttgatactcataacataattggtcacttaattttgtatcacactttataatagcatatacattatacatatgtgcccacaaaggattttaatgcaacaatggtttgaccgagaagataagggttaaatacttgactgttgggtctatttggtagatagggggccatttagtagtgggtacgattttactgaacccagccctccgccatttaatccaatagctcgggtttatttgccaaagtcggactcgagcgtaatcattttatgtgatttagcttagaagctagttattagttactagtgataaaattaagtttatgtattgttatttgtgtaaatatgtgaatgtacattttagttaagttttatttttatttatgtgactacctgacacacatttccttactgaggttagtagctcactcttatcaaattaccatgtgcaaaccaaagtaactaaaagtctagaaggccagtggcaagtggaacttcagatgcttgtgtgtgtgaactcg

SEQ ID NO: 259574 - DNA, 1050 bp, Cannabis indica
tttgtgaataaataaattcatgatgaattaatatatctacacctagctactactttcacatttttcttcctaaaaatttacaaaaacctaagaaaaaaatagtcctacataataaatgtacaactatttacgtaaaagcatgcatgcatgcagatcgtacgtaatcacatatataatacatatatgtatttatatattagtggtggttggcagcagagaaattattatgagtgttggggatagtcgggttagggctcggcggccggttcttcgattcacgtaaagccctgcctgctgcggctgccggtattatataattattctgtttggtagctgagaaaaccaccaagaaaattaatagcaccaaagcaataaccttatgattgatactattactactactcatgttgtagcaaccttttatatatatactattctctctgtaatcgactatatataaatgtatgaaaaatggaataaaatcgatcaattaaggataataaaaataataaacgtgtatataatatttcatatatattatatatatatagtcatatatataggccaggctagctagagatgagatgatgatgagatgaaattgaacgtaaatttaattaattaattaatttgtaggagtgatgaagaagaatctattaagaaaaagtgggactgtaaattgtagcatcacttcatggaatttaatattaagaactttttgtacgaaatttcttaataagtgttgaagttttcttgtaattaagtcaatgcgtgtatatataaattatttagttatgagttactttttggtgctattataattatgtcaaccccccaaattctttgtcaactactttcagatcatacaggcccatgagcccatcccaagtcaatcaaaggccttgggccaaatagtgtaataattagccttttttcaggaaaaattacataaattgttatttttagaaaaaaaaaaattaggcttttatgttcagtctttttttttttttttttggtaattttaagatattctataaaaacacaaaaaaa

SEQ ID NO: 259575 - DNA, 901 bp, Cannabis indica
aaaattaaaatgacatgaattaaacttgctaaaactaaaactactgctgctagaaaaattgtttgcaagataaaaaatgtaatatggcaaaaatggcttgaatagctaattccttctagtcaggttttttgccaggtgttacaacatcgatttagcattactccagcattttgcacagagataacaaaaattcttgtaggcttgtgagaattttccaacactcacaaatttaagtctaccacttcggtcaatatattcttatatcaaaccagcaagcagaacactattcaaacattaattttataagttatgcaaggtaaatgaaatattcctattccacttacatagaaaaacctagatctaggttttcacttgctccattcaagttgaactactagatctagcccttctggtacaagatctagcttagcaaattgttattcatggcaaaaaaacaacaatcaaattcaatgaaaatcagttaaatgaacaaacgcaaaaatgctaaagtaagcttaaaaattaatcataaacaacatagaagttcatagccattcaagccttaaaagtctagctcatattcaaatcaaaaactagaatccaagctaaaaaattattttccatggctggtacccatttgtttttacagttcaacaagtctaaaatatctaaagacaagatataaccaaaggaaaagatgaaagaaaaagacaaagagaaggtaaaagaaattcaaacacaaatacttgtgtccttctcccttgcactttggtccccttttttcttcttcctcctttgtacttctacaattaattctctcaaaatggcagctgcctcattacgttatggaggatgatggaggtgtactttctttctttttccttttagttgtttggttcct

SEQ ID NO: 259576 - DNA, 1156 bp, Cannabis indica
aaataaaacagctaagtcttcttaaagcaaaggattactttaggcatgcctcccggagaaggcatgtaagtctcatatgctcccggagagcaagatggcaacaaagcatctccggatggtgtcagatgccatccgaacagtcatctcgcatttaatgccgcatgggaggaggcgtattggaactgccacacgcaataaagtctgacgacacaacccccaatctgtacctactaggctatgatcaataaagtctagtgacggctactctgtgtggaatcacatcagtcaaaagggattaaggactgccctcataaaatccctacagaacctagggattagaccatgcattacctatgataaattcattgggaatgtgtggctttactgatagttacagaaatgcatgtaccttaattctagggatcaccccacaaaaacactataaataccccccaaagctcattaaagaggggtcgagaattctgggtttcataagaactagaagagtaaaaactcaccaagaacattctctgtattaaatactatcataaatacacagactcgtggactaaggctcattaacgccccaaccacgtaaaaatctctctcttaatttcttacagctctctaaattattattattttattggttgccgaaaacctcggtcaacaatatgatttcaaaactattgtcaacactgtcttatagtcgcaactattttttcatcaccgtatctcacctatagttgcaattatattaaaaactgttatcgtcaacgtattttacttgtgcatccaattaaacataatgtacaaacttgtatataaaaaaatcactctttaataattattattcatgtaaattttcaataataattattaaaaatattgtgtgttttaattataagaaaaagatataaagaataaggaagaaaatacaaacactaaactatttgcatcttatcaataattgatttcctgccaataaagaaaaaaaaaaaactcaaaaagtctcccaatacttttcagaaaaagtcacgtaattataaaaagtaaagttttataaaaataaaaattacaaatattatagatatatgatattattataagaataaactatatatataatgaacaaactaatagcatttttaaaaaa

SEQ ID NO: 259577 - DNA, 3284 bp, Cannabis indica
tatattagtatcatttttataattttttaagttatattttgtataataattagtatatttaataataaataatatgtaatatttttatttttatgcaatttaaaaattttatatatttaatttttttattttaaaaaaaactttactctaagtaattttattacactaatattattttaaaattacttttagtatatttaagagttatctaaatatgaaaaaaaaaaatattcttgtaaaagtaggttaaagaaaacatatctcataccaaatgataatgtgtgtacgagagttcaaaagaaacattgtactaaaatttaagtagaattaaaaaataagttatatgcaatgatgagaaaaatttaagcttttcgtagaataacagaagatgacatataaaaaaaggttatgtagtgcgaatgagttaggatgcagattttagtttgaatatatgattggatctagaaactaagttgagtagagagcagttagtagcttgaaaatgacataattttttttatatcttaactaattttgtaatgtgaccacttatttttatataattttcgagatcaatacaatgaaacaataagtgaaggcacaaaataaatgaaaaaaaaatcaaagaaagaccgagaatatacatgagttttttaaaaactttaaagaaataacttttggtctggttgtccgtttgagacaatttttttttaaaacttaagtagtttttttgcatcctacacatcccaaatagcctacgacagcttggccaattattttctctaaaaattgctattttttccattgaattcatattatgcacccctttgatcgaattgtttgtgttttgatttgctattttactacacataaactagtgaaatttgtatgatatgtattagaatcaatatttatgatgtattttctaattctactacagtaaaatgtacaatactaatttctttttatatctcatctaatatttaaataaaaatgtagtagctaagttgtaataaattagtcttttagaaagatggtaagcaatgaaaaatttaatatgcatgtcaaaggttcaaatctcaataaagcattttttattctttgttattttcttttttgtttaccctacaacatctattctcataaaaggaaaccaaaaataagcatactaaacattgcaactaactcaaaaaggatatcatcagcgacaccttgggaatctcagctttattgcataaggaaaagtatcatggaaatcctctccttgtctcggtcagaaaaagggaggacttctcttttctaaaggcgaaggtcctaagtcggctagaaggatggaaagccaaatgcctatctcaagctggtagacttaccttggtcaaattggttctttaagaccaccatgttacacaatgtcaacgttttgaataccggtgtcaatctgcaaagagcttgatagtatcgtgtcttgattctggtggaagggaagccctcagaagaattcaagcaaccattacctggccctgaaatgttggttagagatttgccagcctaaaaggaatggaggacttggtttgagaagattcagagacataaacttggcattgcttgctaaatttgtgtggagtctgctcatcaatgacaatcgtccgtgggtcaaaatcctcactgagctaagtattgtgttgattgggatttttagacaattgaaagacatggaaatgaatccttcctttggaaaggaattctggaggctcgtaagttatgtgttactggtgtaggaattctcacaggtaatggagaaactaatatttggaccaagcctgtggtcccggggtccagtccggaggaggttagacgcaatttctcctttgcaattacccacaaattcaccattgtttcagacttgtttcttccagggacgcgctcatggaatgtcaacctgataagagcttgcttctcccatgatgttgctgaagcaattcttcatatcaagcctttgacgatgatggcgatatagtgttttggagagccagtgacaaggggaaattcacagtcaaaaattcctactggttgtctcaaagccatcggttcaagaaagaaaaggactgctggaagaaacttttgaagctgaagctacatcctcgccactccttgctactttggaaagctatgggcggttgtttggcccttaaaacaaatttgatctttcccaattcgcaagaaaggatgtgtggcctatgcaacaatgaactgggaactgatatccatcttttttggagtgcaacttcacccgtggtctttggttctagagcccctggggcctgctaactaggaaccaacgttttgactctgtcgaaaatctcttcacctggctttgcaaccttggtgataacaagttgttgtgctttactgcttgtgcattcgaaggaatttggcaatgtagaaatgatcagtgtttccaaaatgctccctctgatattgttgctacatccttcagagtgttgagatggtttgaagagttttattctagtgtggaattggtccactctcgtgtccaggaggagcctgtcatcaacttggaccacttcgaggcttttttcatggtcaatgcttctgtggtgggtcactctgggggtcttggattgtccaagttggaactgatgatgaaagagttattacttgtcaagcagtctgcagtgttaacagtgttctggaagcggagttggaggccattcatcttgctatggtggtggctattgaagagcgtgtttcctcggtgcaaatcatctctgactcggctattgttgttcaggctttgaaggtccaagagctccctcttgcgtggggctcctatcctatctttcgacaatgtgtgtctttgtttcagtccttttcttgtattacgtttaattttacccctcgtgtggaaaactctgttgttgataggcttgcctatttggctagagtaaacaatgtgtgcaaaaaaatggttgtaagggaggcagttccccttgtggctactctttaaggttttttttttcaataaagaatttacttatcaaaaaaacaaaacattgcaactaactattaactaatcctattctaaattactaactagtaactaattgtagtatactatgttactaagtagtaactaaacctaattctactaaaattttagcaacataatagctataattgaacgtttcaaaaaagtaaaaacaataaagttattaataacaacaaaatatagtataaaacaatcacaacaacatttagcaata

SEQ ID NO: 259578 - DNA, 971 bp, Cannabis indica
ctgatgagcgacaaatgcgacaatatcttgagtttcttgggatctgctccccgtttggttcttcccttggattttccgtacccttggttctcacaacttcggggtctttaataatgttagggttgttacaatatcttccagcttttggcgtctctccttccagattagaactcaagtcaaattcttccttgaacattagtgttagccgttcaatctcttcctttgcacggttatacgagtcctctaattttgatgcatagaaaatccagttataagttagtgaactaagggattcaaacctagccatctcataaatgtgttgttgttgtgcagggtggttaaaatgtaggtggagatttgtcttcgcggttttgctccatctcttcatgagaagagtatcaggtattcttctcatgtataatcttttcattgtagcccataaatgtctacaagggtaaccctaactttcatataacatgcaggtacagtgtagtgctcgttggctttcacagtaatgaacttggtaatggacttctggatgctgaaactttccaatggtgaatatctgccagtctccttcttcctccttacctaggataaaataattattctctaattaaagctgctcagtaaccttgtggtacatatttcttgtgtaaaatttagcacattaggtgggtgaggtcgagtgcatttgcttttgaagtcatttacagtctcattgtgtctgagctttgagactgtcatatctatggttgttacaaattcacgcaagcaataattcttctctaaaaaaatttttaaagcgaagttaatcaattcgcaacattgtgtagttcttattcctgtaacgaatgaaccccttaaataagtttctgtccactattttcttgtatcaaatgttatttggcaccattcattatctgttagttgtaccctttcgatgacatctaaccattttgcttcaaatt

SEQ ID NO: 259579 - DNA, 732 bp, Cannabis indica
aaaagaaaaggtgcaggaaccgcgaaagcggtcggctcggatttcccgaaagggaaaggtctgcagaggggcaaactccaaaaagggagtcctggccctcaggatcgagaggaccgaaaaagcgtttccgtgcaccaagagcccggagggagaggaagaagggggcagaaatgtcctcccattgatatgagaaatcagattaacgggaatcaaggtgacctccgggatcaccttgaccaaaataaatacagatccacggtctccacaggaacgttaaacgaaggaatcatggcagaactcgccatactccaaaaagacattgcccgagtctcccggagacagaaaggcgatgactccgactctgattgtgaggaccgggagccatgtgcccaacacatcctggaagcagagctccccaaaaattttaagataccagagatggcagcttatacctggaactctgaaccaagtgatcacctgtcacggttcaaccgagtcatgacagtcatgagggtcagccatgacgccaagtgtttgtgcttcccgcttactctaagcggatccgtggaggaatggtttaagaaactggaaccaggatccgtggattgctggaataagttgcaaaccagcttccagagacaatttgtcgccgtaaggaaagtcaatttggaggtcaccgccttgactaacaccaagcaactgcctatgaagacactgaaaaatttcatcaag

SEQ ID NO: 259580 - DNA, 1411 bp, Cannabis indica
ctcaatcatagtgagtaagacggtgataaccaaacccaaagcagagaaagagatccaggctcaaatcttgataatactctgcgatagaaaggaacaagggttagagatttgagcgaaaggagtcattatattctgctgcaaccaatgtaaggttttctaaactcttatgtgtttattttaggatgtcaattcaacatacttgttagtaaatgtagatcctagtaaaatattcccaacaactggcctcagagccatggtaatgatttactttcatgtaatatggatttaaaatgaagaatattgtttattgttttgatatggatatgttcatgttggtttatagattatttgatgaatatatgtgaattacgaaatttttacatgaaaataattttattttcattctaaaattattttatttgggttccttgtgaaaaattaagcaattttagtttttatggaactcgattccaatgaaaaacgaagaagttatgggcatttgaaaaattgggtccaaggtgtgtcgagggttgcacgccgcacgcacagaccctcggactagaccaggatgcgcgcgcgtgcctgattccacgcacacgaaggctacaatgcagcctcctgggcgcgcagatgaggctgcacgcagcatgtgtgcacaccatgggtgatttttcaccgaaatccaatttttcggggatttttcactcaattttgaatttttccaatttttaaaccttaatttcaaaataaaatattatttttaatatatttaaacttaaatatcaatttcgcaaattaataatatttaatttttaatagattattattactttctaatatgttgaggtttagatttaaaaattgattattttattttttaaattatggcaagattttaaaaatttgtcaatttctttaatattatatattatttaattataaaattagatattttaatattgagtattttttaaattaaatgatagccttatcttttaatttgaaatattttattaaaataatcttatacgataaattaaataatattaataaatttgaaattaacttagatatttttatagatattctaatcattatattttcaaattcaaaaataggttattttgtgaaatatttaattgttcataaattataagttaggaaaataatgttttatatcattttacttatccaaaatttataaatagtattttaaatatttaaattacctagatatttttatagaaatattaaaaaaggcttaatttgagatattttgacatataatttagataattattatttgtttattattttaatcttaaaataatattttttgttaacgtcagattttcgttaactaaatttgtagcctaaccgtgacaatctcacacagaaaaaataaagctat

SEQ ID NO: 259581 - DNA, 703 bp, Cannabis indica
atttcaatagttcgggggaatttttaatggccaaaacagttcagggggcacgatttagtacatgtcaaagttcggggggaaaaattactaattagcctttattatttatttttttaaatttctaaattaatcacaatcatttaacaatgatctaatggttaaaaataaatgtaaccatgatggttacatatttgatgtaaccattgaaaccttcttcataataatattatatatttgaaatacataaaatatataattttatttctaagaaagtgagatttgatatattttaaaaaaatcgatgtgatgtaaaacttgatgtaaaataaaagtgtaattttgttaatatatttggaagaatagagtagagagagtttatattgagagtgctcgtgatctcaattttttatgctttataaagagatagtaagactctgtttggtaggaaggaatgaaagtagaatggatgagagtttaaaaagaatagggagtacgagcgatagataggatagttgctcttctttgtgttgtttggtaatgaaatgatagaaagtaaaataactattaaaattacgattttataatttttaataaaattatatattatttttttgaagggtagaaaagacatttcatatggcttttttttatgtctttttcttagattcttttactttttgagggattgaaaattgtgtatttg

SEQ ID NO: 259582 - DNA, 884 bp, Cannabis indica
atgagtagccaattttctgaggtgttcagatcattcaaatccttccacaacattcttctatccactctattatttgcagcatatatcactgttaaaaaactattaaatccatcaatagttgttattcttaaatgcattagttgactagtgcatttaataatatcaactatgaatcttgaaggattccaagctatgacaattttccctcccgaatgccaagctatgttggaagaaaaacaccaaccttgaaacacatttgagtataagactcctaattttggagccttaaccctggtctcgagaagaccaacaaaatcaacttgttgtgcactaatgaattgcttaatcaactgttgtttatgctgattattggctcctcggacgttccaacatagcaacttatccattggaaagagagggtgcttccccccctcttgtgttaaccacttccctagcatcaaatccatctatctcatgctcattttccttttcctgatcaaccaagctctcttgattatcttctaaaatctgaaaagaattactggtacttgcccccttcttcccagcaactttagattcagtatactcagccttactcttatttcgagtcaccttcacaaagccctctgcatctgtctcaacctgcttcctattgttctttttcattacccattgtggccttccattagagtgtttcctacattcctctgctatatgtccaaacccagaacagtgagtacaagccactggtttccactcatatttcaacatcactgtagtagttgagccgaatgcaaattccaaaaattctggaaatttctgatccatcatcacctcaaccataactcttgcatagttcagccgttctctctccctagtgattg

SEQ ID NO: 259583 - DNA, 654 bp, Cannabis indica
atgaacttgtaaaaactggctcgagaagcaacccagcactatttcaacaagtactatctggactaaagctgataactcagaggcctctggctcaaagaggaaagacgactctaaggggtcatctaaagacaagaaaaaacaaaagaaacatgacaagtatgtgccagtttataccatttataccgagcttaatgaaacttgggaaaccatttacctcgcccatgagcacaaggttgcctttagtaaacctgagcccatgagacacgcgaggcataaaagagatacgatcagatactgcaagtaccataaagacattgggcacacaatagacgagggccatcagttgaaagatgagatagaaaatgtcattgcgcgaggccacttcaagcaatatgtgaagaggcagggtaatggacataactagcccaatccgcccaacaacccaagcaaccatggattacatgttgggttttgtgccctaaataaaacccattacaatttgattagatatcaatgtaagagattagaagtggtttatgttaacatgtatttttcatgtaaatggtttaatatatgtatatataatatatgcacaaaatcagttaagtccagaacatatattcattcacaattacagtattgtcaacacagtgg

SEQ ID NO: 259584 - DNA, 1405 bp, Cannabis indica
aatgagtaggtatcagattaatccaggacaggaacattggaagataatcaagggaatcttaagatcaagaagaggaactatatgttagtcgattagggtatatttaatactcttagactacactaaatcatatttctagacttgccttagtgctacaaagtctgctgatgagatggtgattactctggggtggagtagtaattttgaatgctctaagtttaccagagagactgaatattagtgttacttcgtgattaacgcagaagtagttgccaaaaagtgaagaatccagtatccctagagcagtagacatatatagaggaatttcgcaatatcaaggattttgtgattaaggaaatgtaatggtggaggaaaggttgtattaaagacaaccggtcagatgctattacggagagtatactacattctacactttatttggatatcaaggtgctagattatttgaattgcactttttgttttatattagagcaagtgggagtttgttgggttttgtgccctaaataaaacccattttgatataatcagatttactaattaataaagatcagaaatcattttatgttgcatggttcacatgatttatttcatgattatatttaatgaataaattctttaagtccagaacatatatacaattgttcatggttatagtgttgtcaacacagtggaatataatcatgattatatcttcaaaagtttaattccctgatttgtcagttcactagatttagactggcatgataatcagcgatagatatgcttacacattggataagtgttatgtattttccagggcattggcaaagtttaccaatatttgatgtatagagtatacattggaagggataaatttaccgtaatatctattgaattcaatatcaccgaattgatcctacatcaaatgatcttagatagtgcagttgagtcggagcactaatcatagatatgaaatctatagctactataggtatttagaagtgaaacgatgatttcctttgagcttgctaaatagagataaatgatagagcgctcattttagtgactatattagttcactataatatcatttataggtggccaagtgttttaaggataaaatacattgaaagggtgtaatggtaattttatccctatgcaatataaatcatctatagagtatcattcattattgggattataacaatagataattaatagcgaagttatatcatggaacagatagagcattctatgtaattgagagtgcaattccaagttctatggtggatgcaatgatgaattaataagttagtgaatttacttggtaaattctacgtctgcttattggaagctcggttatataggcccatggtccccatactagttgaaacaaactgcttgt

SEQ ID NO: 259585 - DNA, 571 bp, Cannabis indica
ctcacgtgggtttcggtggtttctcaattcgagtaggcatttaacatgtgcgtttttatatctttttagtccttggaagcctagataaagggtgagctagagttgattttagtcaagcaatttagagggaaaaagaagtacgaatctcagagactaaagtcaataatggaggcattctacaaaggattttcagcatcattttattctttatcttcttctctttcttaaagttaatatatgtgattttgcttccatgaacatgtgtagttaaacacttgattagggtctagatggatgttgtttgacattgttttatggttttaatatgatttattttctccctaatttctatgtattctatttcattcgtgcttaattacttttaattgtctgatcaccaattaactgttttatgatttcgatgcgagatctgagaagtgagtgtcgattatgcatgctatagtgaaatagaagtgaattttgatataggacgagagtacatgtatggtttaaatagcctatagggtttctgtatttaatgcatgttgcatgttaaatttatcacgagagt

SEQ ID NO: 259586 - DNA, 2067 bp, Cannabis indica
aaaaataaaaataaaaattaacacaatgaactaactcatagaactattatttagccactattatataaactacgtatgtatcgtcccttttctttattaatttatttttctttttaccactgtatgatataataacaataactgttaaacaaatacgtattactagtagtgttttcccagaaaaaaaaataaaaatatgtgttactagatataacttctaatagtgttgatcattcttttcagaggtatttgcagccattttttttaataattataaatattacttatataaccctaattaaaataaatatcatcaatataatattaaaccacattttcaatacttattatttagtttttttttaatatagtttacgaagatagcagttgttttcaatatgtttaatttttttttaataatttcaatatgttttttttaattattatttaattatttaaaaaaaatagcttttcgttcagatttatttcattactttgattattatgttttttttttaatcgaaccattaccatgtttattattattatttggctataatgatttaaaaattttcacaataataaatttgacatgtcactctaccccatgtgcaccaatcgagtaagttcaagaaatgtgacatctcacttaacaactaaaatctaacaactacaacaaaaataataaagtaaggcacttttgcctccatttttcttaatgaggttttttaaaaaatattagatttttgacaaaatttaaaattttatgaattttttttacaaaatactttcttttcataaagtaactgtaaaataacaaacagaataattaaaacaactaaaaataacactgaaataattgtgaaaacgtaatactgttacagtatacaatttatacagtattttgaaaaaatttggctccacaataaaaaagtaaaagaattaaaaatttgagtatgtagtacaattttcttacattttaatttggatcatgtgtgtaacaataaaaaatattaatagggaattgccacaaatatctcttcattttattcaaaacatcactataattttctcatttagctatattttcaattgtgcatttaaactcattttatttctcattttacctaaattttatgggtgtattataaaaatttctattgcaactaccgctgcaacataaattgtaatagaaaatcgtacagaaactcctattaaactagcggtgcaatttagaaacccaaactgtaaatttgaaaaaaaaaaactaatatataaagtaattctccttatttttaattagctctcccaaataatttttatataatttgcccgcagtctgtatatcttccgttagtgagtacgtactgtataattatgtatgttttgattaagaattatttatacatatttttttttgttatatatcttacaatatggaggatataaatagtttaagactgacaatttatatgtccgtgattaagattaatatatgattttaacacgatacatttatgcataacacatataatacaattaaataatttctcataaaatttaaataaaacaacaaaagtagcatgatatttaaacatgtcatattaatataacatgatatattaaatattttgatatgttaaaagagttattttacccacgtagataagaatatgaataaatagatttaaatttaggctgattatagtttgactaatatattaaggacattgttcggtacaccatcttaagtcatattatattatattattttgtattatattgaactaaattatataatattttatataatattaaattttaatttttactaaaatattatatatttcggtgctcataaaagtcaatatccactactacaaaaaccctctttagaggcagtttttaagctctttcaacgtcggttttcgcgaaatccggacactatacacatacaacacaacaatattactattaaaattaaaaaacccaaaaaataatttataaaaaccaaaaataaaacaatgtacattataaaaatgaatagaaactatatttataccttaa

SEQ ID NO: 259587 - DNA, 1744 bp, Cannabis indica
aatgacaaaccaaacattgtaattgtaacttcaattccattacaattttcattccagtgaaccgaacttgctcactgtcatttcaatagaataacttttctattattttggtggaatgaccattccattttgaaagtgatggaaattctgtctattcctatttttatttccattctcattcggtgtttctttcctccctaccaaatgtactctaatttaacactatcgtgtttgaaaagaggattggataatattttgttagatattgaaaatagcaatccaacaatttagttaattcagctatcgtgatgagataataacttagtatcattgaaatactttagattttatacaattgaaatctcaattttcatgtatcctattacaaaagaaattacagtcttgtatccaattttctttctgacaatttattgtttggaaatattcaaattaattgattctctaagaattttttcttatattccttaaactaattcaatcctactttctaaatgtgacctaaggttcttttgatgttactcttgtaataatgaacaaccttactcgcttgtcctattgttgaaaaagtatgtgccaggaattttccaaatgcttttgttcggtatcttaatcgtattaaaaggcgtttgtcatgtcttttagtacgggaattacgggaattgtatagtagtagctctatattgtattgttttacttatcagtataatgctatttaaacatttgacatagtacaaactagaaattattgataattgcccaaatgataggcaagaatattcttgcaaagatgttattttgagttggttggttcatgaattagtcattggaaatcttagtgcatgatgcctttcaaatctcctagatttcccttgaaagtagccgatgttttagttttgttttctcttttcctaaacttccagctttacgcaaaagatgcatcgaagaattggaagcatgttggatcagacggaggctaccttttgacaacaaaagagccatcggcaaatgtggtcctattggattatatctcaactgaaaaatggcaagacgtggtagatttcgatgaccaccttgatgacataaccaagtaagtcctatgcatttttttccctcttatgtatgccaattgtagatttggtttaaacactttacccttctgaccaatctttgtgtgtgtaatttccagagattggctaaacccagaactcttcaattgatttggccatgttgccagcaattttcgttgcttcgccaaccgtttaaagtatctgggattcatgttttaaggctctatcaagcttgacttgattgatcctattatgggaaatgattgctttgagataccatctcttcagtgatctcccaacttgaccttttttctcttctgttatgattcattaaagcatttcaagtaatttaatagctgtagaactggaatgaattcaagttcaatgatttttgtgttttgtttgttaaattcctaggtaaaaatttctgtaagagtggttagtaaatgaacaataattttatcatgttcaacaagagtttgaagatgtgctagcatttggatttaggagttttaaagcaaagtaattggtccaattcttgtaagattctttgttttattttcttgaggacattatagtatttgcctttttcttcttataaccctaatgatttttttaataatacgacgagttatgatatgtgcacacaaaataat

SEQ ID NO: 259588 - DNA, 639 bp, Cannabis indica
attttaaaaaataattttcacttaagtttatttatatgttacactatttatatgtatacttttaaaaaactggtaatattataaatatattgtacatatattggtcagtctaacaaagcccgtttaaagtacgatttgggcccgggcccagcacgattttttcgtgcccatggaccgggctgggcttgacttatggaaatatgggccagcacggcacgacccaaattctatacgggccagcacgacacgacccatatttttcgggctttttcaaaacgagccgggctagactgtaccagcacgaatttacagctctaatataaattatataattatagtgaatgtaaatttatttataaactataatatataacttatattttttgtaatatttgtctcatctaatttaatcttgtgtttcactaaaattattcatttaggtttatttttcttttgaaatagcattttcacaaaatcaattaaatcatataagagcaatttgcggcgaaacccctttatgttttgatttttatacacttaacccccttatctttatttttggtggcaaaacccccttatgttttaatttttatacacttaacccccttatcttttttttgtggcaaaacccccttatgt

SEQ ID NO: 259589 - DNA, 1795 bp, Cannabis indica
cggttatttaagtggtttagagaatggaatcttgttgccctaaaggtggtttaaaacctctagaggtggaataatagataagtataattatgtccatccgagatttgaggtagccagattggagattatgattaagtgagttgtgctatttcgtgctacagaatagatgttcaaataatagaggatagatcccgaggagcatgaattgaattatgttaattaatgaataatttaattaatgatttataaggagatggtgatgagaacactaatgttgctaagataaagaagattatctagactgatagtaatggtatgatgatgatggaaaatacttttaaggtctgatcagatggtgaatcttgtatatggagtggccatagaaatcttggtaaaggtaaggctcacttgaaaaatggatgagctcagaacctgtgaataaatgagatacactcaagtggttgagtttcacattaatgagatagatagagtactagttattaatgataataacacttggaaagattcttggaggtctccattctataactagtaaggtaggggttataacctggatgattgaaagaaggaatttagatgatgttctagatgtggggatcaactagaagtattaatgtatggaagtttccattgaaatggaaataaggctaataagcttaccagaacgtttgatagtgaaagatgttttcctagagagaaagagtattgttatttgttaaagaattgattatctcctatgagtgagataaatttctctagtcagtatagagaatacagagtaaacatatatgggttgttttgtttgacgactagaagtaggattactttattaagtaacaacgagagtaatagagttattattctataaatgtctggaactagtgttcttgcccagccactaggttgggtcttgggttctggtcagccactaggacctggagctctggttggcaaaggccaaggctccaagtgggcaggcaatttttctccctcttttgagctcggctagggtcttgtgatggccttagaagcatatacaactgtggccttatgcgtggtttctcttggaaactctatataaggctaggtaatgagtcctttatagtcaattttaaaacttaggccctactgtatgtcttagtgagtgtatttaagatggtacttggtcattggttgaccttgtacactttgttttacttggaagatgcccgtgggtgttgttgacttgaatatatttgtaggtttgtcaggttgctcacctccccttattttttccatgcaagtagtgttgggtgttgaattggggaggtgacagatgtgtagatcttttgcttacatcgtactcatggctagaatgaagcaaactctgcatctggccccatatatgatccttatctggccatggtggccataaggggtcaggttagagtggaggggaagactgcccaacccattgtcaaggctgagccagagattgatttagagtttgagagttttgatgcaaaatctgagctggaagaggttgcgccagtgaggaggaggaggtaaaggacttgctctatcctccctgtccgtcctttgggccattatgacgcccgaggtaatccactaaacaggtttggtgagcctttagaattaggattggaccatgtcatagagcaggagagagctggagatactggatgtgaaagccacttaaagcaagttgtgtttttcctgcttctactttctctaatgagtcctcgtaacgatgcttaccagtggtctgatgggg

SEQ ID NO: 259590 - DNA, 1376 bp, Cannabis indica
tgacatttaaatggttaaattagaaaatttacatttttgagaaaatgggattgaaaaatgacaaaatggcaaaattgcaaagtgaggcccattatccatatcatggccgaccactatgcaaatattttaccatttatattttcattattttaatgccatacaattaaaacctagccctatgtggtattctataaatagaaagtgatggcttcaggaaactatggacatgcatcttatttctttcagagaaaaacctgagcctcctagccgccactcctcttctcttttcttctcttcaatttcgaaataccctagtgatagagtagtgcccacacacatcaagtggtatctcaatcatagtgtggaagattgtgtagaatccaaccaacaagaaggagaatcagcatcaaagaaggagagaaagagatccaggttcagatcttgattatgttctgctacagaaaggaatcaagggctagagatatgaacgaaaggagtcaaggtttcctaaaactttattatgtgttaatttctattgttttagtaattcatgatgttaatgaaacatacatggtagtaaatacaaaacccgggaaaatatttccaacaactagtatcagagccatggttactttcatgaaatatgaattaaaacgatgttatgtgttgatttggatggcttcaaggggtttgtgtgttatttaatgaatgtatgtattgtagagaacctttttatataaatatattatttttttaatttttgaaaataatttatttggattccttgtgacaaattaagcaattttctttcttacgaaactcgattccaataaaaattgaaagagttatgaatttttgaaatttggtggccatggggtcgagtgggtgcatcgatcgcaccagccactcgaacaaccaagcaatccgcgcgcgtgcactcggacacaacccgtgtcttcagacacgggacactcccttcaaatacgcccgcccagacgttgcaatccgcctatagagatgctgcagatgccgaatttcctcggcttcgtcccctcgtgcgcgcgcggaatgcaatatttgcagcctccttggctgctgcatgcagcctgtcttgacagccacaattttttttgcgatttttgtgggatttttcccaaaaaaatctgatttttccaatttgtaaaccctacatttaaaataaaatattaattttaatatatgtgaacttaaatatcatattttaaattaataatatttatttttcaatagattattattaattttgatattttgaggtttaaatttaaaaattgattatttaattttttaaattatagtgagattttaaaatttgttaatttctttaatatttatat

SEQ ID NO: 259591 - DNA, 499 bp, Cannabis indica
tgcaattgtgattgttttatttttaccaaatgctttgtagaggtataggtgcccccaagtgaccaagcacacgtacgactcttggtcacttgtcttttacaagtatattgtttatctattcagtactttgggtttgaccacaccttttgtacgcactggatagtaaattagagacatactgataattttgacttaatttgaattttgaaataactatctttattcatttattgatcgaaaagtgtattgttggaatttattttaccaggatcttagattcactaacaagtatgttgtttaacatcctaaatgtgaacttctaaaaagataataaaaacatataaagtttaggaaaccttacattggttgcagcgaaataatatgtctccttccactcagatctctaactcttgtatcctttctgtcgcagagtatcactatgatccgagtccgaatgtccttcttttcaatttggaatcttcacgatcttccagactat

SEQ ID NO: 259592 - DNA, 512 bp, Cannabis indica
atagcgaattttttatttaaccttggagttaaagtacttagcaccttcttttgataagccaccattcgtatttgagactcatcccggagttcctcattcttatccaacgcttcttttaatagagccttgtttgttgttggatcataagtcgttctcctgtgggatggaaataacatttccaccgggaccatttcctcacaaccgtatgccattgaaaatggcgtgtggccggttgtggttcttggggttgtccggtaagcccataacactccttgtgattcttcgggccaatttttttttgcaggccagtggctttttctttagggtcacttttaggattttatttaccgcttctgcttgtccgtttgtttgtggccttgccactacggagaagcttttgatgactccgtgttggttgtagaagtcggtgaattcttcgcagtcaaactgctttccattatctgagactatcttgggaggcaagccatatcgacacactatgtttttaataa

SEQ ID NO: 259593 - DNA, 645 bp, Cannabis indica
tggattggattggattggatccatctaatctaagaaaaaaagagtaaaattttaatattaatctttttatatatacatatatatcttacgtataacaatataaaatttaattactcattcaaactaaatgaaaatactaataagttcgattggatgttggatgtattagattttcggacacctcatccaacatctaatccaatccaattggatattcaaaaatatcatctgatccaatcacaattggatattcaaaaatatcatctgatccgatcacaattggatatccaatgtttagcggtctgttgtaattggatcggtcggttgtcattggattggatcgatttatgcacactcctaaccgaaaccgtaaaataaaaaaattaaaatcaccacaaccaccacaataacctaatatcacaaactcatattttcctcctcactatcacccaagccaccacaactaccacccgccactcgctaccaccaaaatcaaaaacaaatcaccactaccacaaactagatctaactcattcaaacatccaccataaattttgaacactgaaaccacaaataaaacctagaggttacaaggaaccatgcatagcactgaataaggaatcgccgaatacaccagctacgcct

SEQ ID NO: 259594 - DNA, 739 bp, Cannabis indica
aattaatataattagtaacgtaattacacttataattaatttaataatcacacattcatatatatacctatatacccaatgcatcaatgaaatgcatgtggtccaaatattggcatatatataatactatatatatatatatatatatatagtacaaactgtcaggcacgcccatgcatgcctagacaatgatctatcagtcaaatgttatcacatgtaacaaaaattaacactacatatatatatggtcgcaattaattaactaattgataagttatatgtagatatatatatagtaattaattgttttataaatatatattatggggtgggttaatactaatattataaaatgatgagtagcttaattccaatcgaaatttgttctagaaccaattaagaaaattataaagttttggtacatacattgtattgtagatacgtatacgtatatgctaaattaacatcatcatcataatcataagaatatatataaattaaggcaacttaattaattgatgtgtgtgtaatatttataggattttgtaaagctaattatatacaaagttataataagtcatgaggttatattataatgtatagggctggcaaaacaggtcaggcacaataatacgattcgaaatctacactaaaattaatggtttggatttatcttaaatggttcagattgtattcgggttgattcgatcaatacgaaacttactagttaatgatctat

SEQ ID NO: 259595 - DNA, 865 bp, Cannabis indica
taaagaattttttgatatttatatataaattattcaataataaatattaataatttaaaatttatgcatatatcaaaatgctgaattctttattaataattaaaaatatcttaataggctttttcaaggcataaaccttaacacaatgcttagattgccctaacttctcttaataaaaccttcaaacacagtgaaagggggattcgcacacagaaccatacaaataattgctgactacttcaaattctccaattgactgcttcaccttccacctccgccacatccacttgtgctatcctctttccccctttgatgagagctcataatgaagcttcgaatctaaaatcatcctcttgtcctctgcaaatctgtgcaaatctctacctctttagcccaggatgtcttggacgaaacaccctcaacctgttgaatttcacagccagaaccagtcgtagggatctaattcgaagaaccgttctcagtaattagacaagaccctggagtaattgattcaaaattccccaaactctcaacattaaggtaagcgttagcaatgatttttacattaattagttcattttaaaaacaaaaataaaagtgtgttttataatgtaactattttttattattattatttttgtttatctgaagaataagaaattaaggttagagaaagtgggtcgaggttgggtccgggtctatggttttgactggggccgagtccagggttagagtctgattctaaaatattaataatagaaaatatattaaaagtatatctttttaaaataaattgtttaaataaattttgaaagtgatttttttttttaatttttaaaattttaatttttaatttttaaaattt

SEQ ID NO: 259596 - DNA, 499 bp, Cannabis indica
caaggtggattacaaagggttgcggcaaatcactagagggagtctaaatttgtttaagtcaattgtttttgtaatctttgatactttactaattgatttgattctctaggtgtggccctgtggactagtagtgtttgaaagaacactgataccacgtacaaatctcttgtgtgaagtgatttaattttttgcaattacttttatattctgccagttctggtttgtttatgcaaaactagtttctacagtaacaaaattacattttgctgctgtagacttatacagatttatacatatatatatatatattataatttcgtatttattattgacatttgcaaaaaaattggattttcaattggtatcagagtgggacattaaactcttatagcatgtttactaataagtaatgggaatcaatagtaagataatcattcccttacatttgtttacttgcattattaaaattaggaaagagagaagttgattaaataaggga

SEQ ID NO: 259597 - DNA, 398 bp, Cannabis indica
aaattgggaattatattttgaacatctgatttgttcttaagcatatagatccaagtgaaccttgacttgtcatcaactatagtgaggaaatatttataaccttctatagtagttatatgaaagggatccccaaatgtccatgtgaaccaaatcgaatatgtttttggaaaaatggtgattagaaataaatggcaatcgtttttgctttgctaaatggcaaatgtgacaatgtaaagtggaattaggatgtgaaatgttatgttctttattgaaaaaacttgaaatacacatcgatggatgtccaaggtgattatgccattggtttacattatttttattgaaagaaaaggaaacagtagtagcagtagctgctgtagtaggagtttcttggtgaagca

SEQ ID NO: 259598 - DNA, 1225 bp, Cannabis indica
cgggagatgaaggccgaacatattgaaatctgcagtgattcacagctggtggtaaatcacgtatccggagaatacaaggctcagggggaaaagataatagcatatttgagcaaaatacacgatctgctcgcacagttcaaaagctatgctctcaggcaaattccaagggaagaaaacacgactgttgacgcattagctcgacttgcgagtagtaatgtaagtgatggagcatatctggttcctattcagtttcttgaagaacctagcatcaccggcacggaagagatcgaaatgattgatacatccccaaactggatgacgccaatcaaaaccaacctcaacactagggaactcccaaataatcgaaatgaagctcgaaatatgagaaggaaggctgcacggtacatcatagtagagggaattatgtacaaacgaggattctccatgccattgctcaaatgtgttacccaagaagaagctgcacgacttttgtctgaagtgcatgatggattttgtggaaaccacgccgctgggcagagcttatcaaagaaaattctaaggcaaggttattttcggccgacaatgatcgaagattccaaggcctatgttaaaaaatgtgataaatgccagagattttcgaagatacctcgagcaccgcccaatgagttaactcagatgcaaagtccttagcctttcgccatttggggaattgacttgatcggacaattgcccaagggcaaaggaggcgtgcagtatgcagtagtcgcagttgattacttcaacaagtggacagaagccgagccgttggcaaccattacgtccaacaaagttcaagactttgttatgaagaacataatctgccagttcggattgtcgtacaaaatagtctcggacaatggcaaacagtttgacagccagtccttcactgatttctgtgcaaatcatggtatcatcaaaagtttctccgcagtggcgcatccccaagcaaatggtcaagttgaagcagtcaacaagacattgaaggacacactaaagaaaatacttgaggatgctaaaggaaactggcaagaggaacttcctaaagttctatggtcgtaccgaacaactgagaaaacggcaaccagacagactcaatttgccatggcattggatatgaagcaatgctgcctgtagaacttaaaccgccatcccacagaagattgacgtatagccaagaagccaatca

SEQ ID NO: 259599 - DNA, 530 bp, Cannabis indica
gggtgtgaagagattgttcgaagttgttgggagagaatgggaagtcacgacattgaagaaaaaattgaggagtgtggccgtgagcttcatcgttggggaaaagaagcctttgggagctttgcctctcgaatcaaaagctgcaatcgggaattgaaaaggtgtaaaagtaggcgggatgatgaggggaagcatcttttttatagtgctaagaaggagttgtttgccgtgcttaatcagagggaaactttttggaaacaaagatctaaacaactctggttgaaagaaggagaccaaaatagtaagttctttcattctaaagctagtactagaaaacgcaacaatcagattttttgtttgaaagatgatgatggaattctgcgccaatgggatagtggtttagataatgtcattgttgatttctattccaagctttttactgctgagcctactagatgggaggatgtgctggattgtgttagtccctcagttcgagaggaacataatgatttcttgcttcggccgattgggga

SEQ ID NO: 259600 - DNA, 988 bp, Cannabis indica
cccaagaccccacccatgcggaagaaaacaaagtttaattaacaaaatacatgaggggatggataagataatagactgttggaattgtttattgaagtcacatgagaagtacatagacctgatgcatggtctcaacatgccacatgtccaacgtagtctaagagcaaactaggaacatttagggtatgtcagggtagatgaggccgaaagatatgacctactcatgatgaacctagtggatcagtacaaaattactgacaccatatatcaccctgatggttctaaagaagaaatatatcatcaacccaataatgttgttaggtttgaattccttcaaaagttaccaatctcatcaaacttggtgtacttagaactcgactacgtagatttgagagaagatatgttagaggaagggtcagacatagaagagtagaaaagtcaagttgcattttattttatgtgtttatttgtttatgtaataaggagttttagtatggctccattttagttaggagttttagtgtaactcctttagcttgttatcttttggaatttataaataaataaagaggttttattttgtctgttaaatatttatataaatacatatatctacttatgataagtcttattgaaaagttaaggaaaaattgttgcggatataagagatatgtcttttagaattaaggcgtcaaacaaaatagtacttgcacaaataaaaagcattctgtcacttaagattgaaaatatccgtcacgaagaggatacgattcttagagccctacgagaggttatcgcgattaatgaagaaatcaaaagagtagcagaggtgaggggagcattcatcaaatcacgagaaaagtttatagtgctaagggctgctttgtcacatgtccccgaacttctctactatatcgatgacgtctcgcaccgggtcttggaccttggtgattcaattcgatacgcagcattcatatgtgaactaacg

SEQ ID NO: 259601 - DNA, 723 bp, Cannabis indica
aaccaaagctttactttaaccaatgctttggaaagaacataacacttatccacggtgcaagtaaactatgttgtagattttcatataagttaaaccctgtgttcaactagacaagtaaacaagaatataaatgtgaaaagggtttggatgaatttataaatcaactagacaagtaaatgataacatgaaccaaaagacacacaaaagagttataaatacttctgtttctttattgatatttaaaagaatagagattacattgaaaaggagttatatttagggcataaaacccaacaaactcccacttgcactaatataaaactaatcagtacatatcaattaatcctaaattttgacggtggtttgggaatgcagttcctaccaagactttggtgaatgggtcagctagattgtcctctgtgtccactttctccaccagtacatcccctcttgccacctactctctgatgatatggtatttcctttctatatgtttgcttctcttgtggcttcgaggctctttactgttggctatggctccagtgttatgagaaagcaaaacctgtggtttttccattccaggaacaacaccgagtcctatgaagaactttctaagccacaaaagttctttaccagcctttacagtaactatgtattctgcctccatggtagagtctgaagttgcattttgtttaacacttctccaaaccactgctccacccc

SEQ ID NO: 259602 - DNA, 454 bp, Cannabis indica
gggcataaaacccaacataatggccatgtggttatggtagccagccaaaattgatttaaactctaggttgtcctttattgataataaaagaagaagaatgggcttaagaaaaaaaaattgggctcaatgaaacacaaatggtggagctgggccgtgggacaagtattcacaatcagggtgtcaaaaacatggatatttctaacttagaagagaatgatgatgcaactcaaattgatatactcaaaaaacttgatagaggcgggtgttggtttctaggcccgccaagtattatgaatgtattgagttagaattgtcgggggcttgggaaccaacggaccattcaattcctaaaaaaaattatatttcaaaagagacccgattttatatttctgtatgaaactaagtgtcgtaaatcaaaagtggtaggcctagcccaggctttgaattttgatgg

SEQ ID NO: 259603 - DNA, 1553 bp, Cannabis indica
atggcagtttatcaaggttgatcccaaaacagtcgtacaaactgccaaacaagcattcttttataccaatatcaatagtaagaaaaacaaacagtaccctaaaatcagaaggtaataacttgtttgtacatgttaaatgtcgtgattttggattttttttttaacaagtacaccacaaatgttagtaaggatctgaacgttattcttatcagaaatattcaccttaacaaatatagctaagaaaccatttctcaatctacctagcagagtacagaattcactttgtaatccctcactttatatacgcatcaagaattttagctcggactgcatttcagaagcataatatcatttttcacatcttgaccgattgggtatattagattccctcatttttggataattcacaagttatcagcataaaatctgaagctaccattctctgcattgtcctatttacagatatgatgcacttacagaacaaactgtaagaaatatcacactttatctggcaaacaaaatcagcctaattttaagtgcattgaatatgatgggtacttgcaactaaaatgtattctaaactaaagagttaatattcacaccttggcatcaactcctggtgatgctgtgaatgcattctgcgacttcttaacatcatcatcggatgagcattcggaacacacaaactgctccaagttttttgcctcttcaatagtcatgtccacacaagcaggatggtacctaaaatacaataataggtgaactcttggttcatgccacagaatttaaaggagaaactgacttcaatattaaggaattctattctccttttcacttaatccagtattcattataagaacaaccaaagaaaaatctatatctataattaaaaataaattaaagtagtgggcagaaatttaaaatatacatgaaaaaaatcatttttggaacttgtaaaattcagaaactataacccacagcactgaaaaacagggagcaatacatttaactatctcagagcaatacaattaactatctcaaaagtactatgcaaatacccagtggataatgtgtgtatactgaaaaaaaaaaaaaacagataagttagtttaatctatgtgatctttcaagtggactataggaacttataaaaataataaaatcctttggaatttggaagccagagttggaagcatagaagaaagaaaagtcctactacaccccttgaatcccccatctttcttagtcttttgtttttctttgttggatccctcagttggcattcatttatactcaatgatatctttaatgccgaaaataaattacaatctattccttgtccaatgctaatttattaaacaatttccaattcaaagaaaataaacactgaacttaccagtccttgcacccttcacattgcaccatgaggtcgtcagggttgtatggcatctcacatttgcagtaacttcaatacccaaattcaaattcaaaataatacaaagagttagaaacccatcagcatcatcacccaaaacaaaaaacaattaaaaaaa

SEQ ID NO: 259604 - DNA, 2111 bp, Cannabis indica
gctgaggttgagggttcaagtccttctccaagaacattctctgtataagaactctcattaataacaaagactcgtagactacggctcattaatgcctgaaccacgtaaaaatcacctacattaattatcccaaagctctcattattatctcatataattgattgccgaaaatctcgatcaacatataactatattagaatttaattttataaataagaggtgaaaaatatttacataccacattaataagagatgctcttataactaacaaattgtcatcgataacatcttataagttactgactggtataaatatatatatatatatatatagattttaataactcacgacactttaaaatttataatttatcaaacactttactcaatttatttccacaattttgctgccgttatttttttccactagcacaactacaactacttttcttcatagcacaactgtatcagccctaaaactgcaattgcctggcttcacgagggttagtataaattagtttgatcctagttcattttataatgagttgtcattttactaatattcattgaaaatatcaattcttcggcccttgatctaaataaaatgaaagcgtgctttatcggattttgcatgaagcatatattttattattattttcaacattccaaattactttctaccatatttccaccacaaatttcccatatactttataaaggcaataactttacagtttgacaatgtctctactctggcataattttatacaaaagctattcaactaacaaattacaagctcacagctcttgactcaatctctgattctccttgtagttgctcaccctcacctacacacccttctacctgaaattcatctccacaaccttttaaatttaatatcgaaacaaaaccaaataacagattataaaataataaataaatgcaaataacagaatataaaataaataaattgacatttttgttttgaaagtgattactctgaaaatagaaaaatatttaatgcataccgttggttcttttgactttgttttctgaagattttgctcaaatgcactgtggcggcggataagttttgcccctttgcatggagaatgaactgatccaactgcttcttcgtcaaccaaaacagtatcaacaacatcaatgtctttctcagtgtctggaacctgtgcaaacaaaaatgattggtacaataggcttacacaaacataaattaatctacatttattcatttttatgtatattacctcaaacattgcctccataagaatattttctagtatggatcttaaacctcgagcaccggtgttctttgccattgctttctttgcaatcaatctcaaagcacactcagtaaaatgcagcttcacctgaaatgttacccagaatagggagctactttaaaaatatatatctccacaaatgaagtgtgatattaggaaagcaaaacgacaaacttacactgttcatgctgaacatcttcttgtactgtttgccaagggcattttttggttctgtcaggatctgttccacaggggaagtagaatgtaaatctgactatttcttacaagcgacataaaaaaaattaaacaaaatgttcatgattttgatactttcactagttaagcttcaatgcttaacaagtttggacttggttaataaatgttcagtaacaaacaagccatgcgtgagctcactacatataataatactaaacttatgattatgattctgaatcccttgacaactggtcatgaaaatatgttctttcactattgcaatgaatagcaagaacccacctgcacaagctgatcctcgtttaatgctgacaagcacactaatattggaagtcgtccaataaattcaggtatcaagccatatgcaataagatccccactttctacctgtaagtttatcaataataataagtctctttgtaatttaaataacatgacacggactgaaacggagacagaatgagaaacccaattgaatgtcaactcaatacagaaagcaaaaaaaatacagaaagcaaacattttgaaaaaaataagatgcaaactcaagtcttagacaatggcctctttct

SEQ ID NO: 259605 - DNA, 5835 bp, Cannabis indica
aaaagaagcatttttcaacttacccatggtttgatgcctaaagtacgtgtggaagcccaactgaagagagttgggttgggcctgtgttctggtacattcagaagcaatgggaaaacgctgagagagaataagagagaaagagtcgtcttggtcaggggtctttgcaatctctccttttctcgtcttctcctccatccattctcaaaattactattctgccctttctcgaactaaacccagcaacccccttctttccttctacgtcctcagttgcagactctctctctccctctccctccttccctctttctatttctctctcctagattcgacgatcgaacggcgctcaatctccacccatgactctgatgactcctccaccgctcgatgtaatttccaatttcccactcaacctcatactcttctttcttttcttttatttccatttcaattcaattgtgcgatccgtaaaccgacttggtttgttgcatcggtagtgttttagggtttcgttggcagatccgacttctcatataagctttgggttttgtctttgattgtttgtttgtagcagcagcagcaacaggaggacgacgagatgctggtcccacacaccgacttcgcccacggtcctcagccaatggaaggtcactattgcttctctctctttcttctcacttctatagttttctttggtcacagctcacttaattttttttcttggagaagaaaatttgagctaattttaatcgctcattattgtgtattgaattgtgtgcttttctacattttgaatcaatattccgttaggttcttggaaaaaagtgcaaaaagttgtgctgtaatttgaggtatttacgcttgtagagtagaaggtttgcatttagctccaccaagagcgttgatttacaaatggcccataagttggagtaggctttttagtcatttttgttttgaggaacggcattagttaatgtttttgtaagttcatttgattttcgttaggttgataaggaatatatgtaattcgaataatgtttcttaaatatgctggatttgttttgttaatgagtgccattttggttcttccgtttccgaatacaatttaattcttttatttactaaaaattttattgtaagtacggactgttgatttatgaataactattttttagtagctcaaccggaaaatacaaacgcagtggaggctcagccagtggatgatccaccatcagcgaggtttacgtggacaattgataactttacgaggcttaataccaagaaactatattctgacgtattttttgttggcggccacaaatggtaatttaattaatctcaagcttatatgttactgttcgtatatgagtaatagtaaagccacatattaaatcattaaaaaaattacaatttgcattgtatacaatattgaaatgtgcaggaggatactaatattccccaaaggaaacaatgtagatcacttgtcaatgtatttagatgttgctgattcgacagctctaccttatgggtggagtagatatgcccagttcagcttaagtgttgtcaatcaacttcagagtaaatattcagtaagaaaaggtattgtctctgctattgatgttgctagttagtaatgagcttcgtttggtaatcattactttatgagtataagattttaaaagtattaatgcatcttcctcgctcacgactttgtaaatatttttgaaaatttatgatgcatgcatcgcttttatctgcttttgtgacttacttgtttgtatatggtgaaaaaaagagctttgatgttagtgtatgtctgtagaaccaattagtagaggcacggagtggtagaagggagaaggaagaacttgatgaatgaatgaaagtattatgactatctgctggtctatttggttagaaaattaataggagaatctttgaagacatgagggttatttgaatttagtttggacaaggtctgttgtgtattgggttggtattggatttaggataataaaatttgtaagaattgtttgctttcaaatttagttataagtttgaactcttctttgtatactatgatatcttatgtcatctttctgaattttccacatattgatatatataaaaaaacaattctcctcttttatttaaaataaataagtcaattgcagtatttgaattttgaagtgaaaatataaaagaaataagtcaattaaacccttttatatataattctttcacaaagtgaagttaagctattcataattctacaatggtattgcaatctccattctaagatagcaatgcgactttgatatttttagttgaaaattttaatcaatcataactgtactgtattttgcagaaacacaacatcagttcaatgcacgcgagagtgattggggtttcacttcattcatgcctctgggtgaattatatgatcctggtagaggttatcttgtgaatgacacctgcatagttgaagctgatgttgctgtacgtagagttgttgattattggtcacatgactcgaaaaaagaaactggttatgttgggcttaagaaccaaggagctacatgttatatgaattctctcctccaaactctgtaccatatcccttactttagaaaggttaagcatatatacttattaatttttattttcaaattgtctgattcatgctctttttaataaagcatactttgtattattatttcaggctgtgtatcacatgccaacaactgagaatgataatccatcaggaagtattcctctggctttgcagagtttattttacaagcttcagtatagtgacactagtgtagcaacaaaagagcttaccaagtcttttggatgggatacatatgattcatttatgcaacatgatgtccaagaactaaatagggttctctgcgaaaagcttgaggacaagatgaaggtatagaaaaggttttaacaatagttaactaggctgaaaaaattctgacattgttctaatatatgttttgtcttgctttattgctcagggaactgttgtggagggtaccatacaacagttatttgaagggcatcatatgaactatatagaatgcatcaacgtggactacaaatcaacaagaaaagaatcattttatggtaaatgaattggggttgctctattaatttattgttaccatttgtttatggaccttatggtttcttatttatttaaatgtagatcttcagcttgatgttaagggctgtagggatgtttatgcttcttttgacaaatacgtggaagttgagcgtcttgaaggtgacaacaagtatcacgctgaacaatatggtttacaggtagatttggtcaaactagcagagaactaatttgatttagtattagctattgaaatttgttgacttgggttgagaccctctttttatatagaaatatgttcttaactgtttaaggatgtttattatatatatatatatatatgtatttatgtatgtatatttgctgtttgtatttagaaatgctcttcgttgtttaaagatgttcattctttcctgtcttttttttaggatgctaagaaaggtgttctattcattgattttcctccagtccttcaacttcagctaaagcggtttgagtatgattttatacgagataccatggtgaaggttagcaactgatagatataaattcttaacctatattgtgttactattttttttgttttatttttcattttgtttttctgtctttctattattattatttttattattattattattattattattattagttgttcatacatgttttttttcttagtggttagtaatttcattaacaaactgttataaaattagtagagactcctaaagtgacccaactcctaagcttccaaaccacaatgaaagataactccagatgggccaatacgacaaatactttgctaccttacttggggttggggcaactaaaaatctgctgttacttttaccggtttagattttagagttggctgagtctcaagcaattccttcaattggctttgctgttcagttcttgcggatattatgcagcctgatatgtgccttatttaccaagtcattgtattagttggatgattttttcctgaaataaattgtgcactgacttccaacagataaatgaccgctatgagttccctttgcaacttgatcttgatagggaggatgggaaatatctatcacctgatgctgacagaagcatccgcaatctttacactcttcatgggtattgacattttcatttctttttctctcatattatgttcacgaatttttatctgtgttggatcgtatataaggttgtagtgaaatacagcaaatgcttaaaaaattgatagttgcattggtcatttcatttctcatattttatataaaatggaggtgtaacccctttttttgaactatttttaattggtgtaaccaaattgggaagcacctttagctacttacagtttctatctgtcatatgtttctctagataatattttgatgtcgtgaaactccaacttctgcattatttatgttaagcatttcttatttgggtaaatactcatttggtaccctgtgttttatcaaaatacaaatgtaccctaccttttttttcttatatacacttctctgtaatctgaaatcatacatatttggtatcctgaacccaaatttgatcaatatgatcaaactgccgcccttaggtatttgggttttaaattcaattttaattactaaatttcaattttatcaatgcattttgagcctcttgtttttactcattgtaaaattaccatttcctgttaattttaaaagcaagatgcttgtattggcctttctattttttgaacaaaaaaggaaaaagcatgcttacttatatcatatcattgtttatctgcagtgtcttggtgcacagtggtggggtgcatggtggacactactatgcttatataaggccaactctatctgatcagtggtatgtatggtgcacttttcttgttgtggtgtattgacttttgattgataagacttgggacttttttgtctagttatttgtttgtatttttttaatgagacattgtcaatttttcagatacaatttgcagtaaatttttttcattaagaactatttacataaagaataaagcaaatctaattagagtcattcgtcttgcaagttatcttgaaataatcttcagttgtcgtatttggtcctgatttttgtagtatgtcttaattttaggttgtggttttttgatcctccattttatattcttatgcacatcttttttttttccaactttgataaagttttgtttcttattattaaagaggaaatagtgttttagtttcagttatccaacatcgcttaggttttcaaaatgaactgtctttgaggacaaaccgtttacattaaatgccttaaatcagttttcaacatatattgttatttttgcttttaaggtttaaatttgatgatgaacgggtgaccaaggaagatgttaaacgggcgttagaggagcagtatggtggtgaggaggaggtaaatttttctacggatcagtcttattttctgtttctgtttgttattttactccctttattttatggtgatatttaaccttttactttcaacagttaccgcaagcaaatcctggcttcaacaatgctccatttaaatttacaaaatattcaaatgcttatatgcttgtttatatacgtgaaagtgacaaggagaaaataatttgtaatgttgatgagaaagacattgccgaacacctgagggtaagtataaaatatatatat

SEQ ID NO: 259606 - DNA, 1338 bp, Cannabis indica
gtcgaagtaaagcaacgaccaggcgagccactccgggcatacatcaggagattcatgatggaagcgaccaaagtcccgcgggtaactgaggttggaaagttatccgcgatactgggggcattgaaatccttggtgaaatatggaaggatataaggaagaacgggccgattgactcaatgagtgatttccttgaccgagccgaaggcttcatcaagctcaaagaagccattcaacgagcagaaggtgagcaaaagccagttaaaacgaaggctccttccactggaacattcgcccaacctcccaactattccaacaattcaagtggcaagcgttcaagcaacaaccacaagcaaggaaacgagaaaaagggaaagttcaccgataaatctggacagactgcccgtgatcatgccaaacacaatgcgttaactatactaactaaagatatggagaatgtgtatatggcagctcagtcgttaatcccgtataagaagcccgggcacatgaagaaagataccaaaaaaagggacatgacaaaattttctcagttccacagagactacgaccacgacaccaacgaatgttacactttgaagcgggaaatagaatttctgatcaagaaaaacaacccgcacctgcagaaatatgtgaagaaaaatcaaggtcaaaacaaccaggatctgctacctccaaccgtagatggacacttgcaagtcattattggaggcccgcacatcgctggagattcgggcaaagctcgagagaggtatgcccgaacagctcagtacgagcaagaagaagtcatcctggccgtggaagaaaggaagcccaaagttccacgagcaggagagccaaccataactttcaacgatgaagatgctgtcaagattagagttgtgcacaacgacccgctggtcgtggaagtccagatagcaaacaaaatggtggccagaaccatgattaataatggagcttcttcaaacattttgttcaagactgcttacgagaagatggggctccaactcaaggatctaactccatgcctccagcctgtctatggtttctccagtcaaggagttgcacctctaggacaaatccggctacccctcactgttggacaagctccgacgagcataactatcatggcacagttcctaatattggatgttccttcagcctttaacgtaatgcttggccgaccagccctgtatgacttaaaagctgtcacatcaatatttcactcgtgcctgaagttcccaacaaagaatggggtagggtgtcttagagggaaccagcaatctgctcgggaatgttacaaccttgcagtggccaaggcta

SEQ ID NO: 259607 - DNA, 804 bp, Cannabis indica
ggtgaaattctcccgagtataatctctgtattaaatacatccataaataataaagactcgtggactaaggctcattaacgccccaaccacgtaaaaatcctcctctcactttcttacagctctataattttataatattttattagttgctgaaaatctcggtcaacacacctcatgtagattatccacatacctaaagagacaacataaaaattaaaaaaatacaaaatcaaagtctagtcaaaatataagtaacaaaaagattgaatctttcaccctaaatcattctcttttttattatttcacccaaaacccaacaagtaaataatggaaaagtttcgaagtttatagtatttcttccatttccttataaatctaatttttgttttttcaaaaaatatacaaaaaaaaaaaagaacttacagagtcattaagctcaaggccacccttaattacttctctaccacttcgtgagattacgttcaccttcatcttggaaaatgcccatttccttataatagaatcttcgagcgggagaatggcgagaagaggttactaatgaggaaaataattgcaatggaaaaatcaaatcttctaatgtgatatatatatatccaacctcacatttatacaaatatatataaatacatatatatacatacatataacattaaggtaatagaaataaacaaatcaattaaatatttaacttctaataaaaaagtcattctttatagctcaagttggataattagaaggattatttatttgataacttcttctacaagcaattaaagatgaaaa

SEQ ID NO: 259608 - DNA, 730 bp, Cannabis indica
aaatatatatgaaatgcatccaatagataaaccgatccaatctagcatccaatgaatgttagattgataagaagactgaaattaattggatcagatcggatagtaaaatctaatattcaatatataattggatcgaatttagatatgcttaaaaatattgaatgtggtctaataaacacccttagttaagtatataaaaattaaaatataggagtttcaccgctaattactagcgaaattttaagttaaatcatttttgccccaccacgtttattattttctataaatatatacaaccttcttttaaaaaagattgaaaaataattttttttagatcctgaaaatagaaaatattagtacggtaagagtaaaaataatgcatctaactaaaaaaaatttgtgtgagtttgagtttaaataattgaataaatgttagtttgttgttattaaatctatcaaaataaataaacttgagtgtgctctgattgatttgtggaatttatattacatgagctatttgtagaatttatattacactaaactttaactctaatatacttcatatactacatagattctatttttgtgttatatgtaattaataagtggtctttttgtgtgtattggtttgtttatatgtggttgttcttgtttgttttgtattgttgttactgatatttcgcaacaccaaaaagtacaatttaactggtaaaagagagaattatttgag

SEQ ID NO: 259609 - DNA, 644 bp, Cannabis indica
tatatgtaatttgatgaatgataatatgttataatgatggttattagtttgtgaatgattatttgtgtctaataatttacgatttctaattctcttgttgtctctgtttttactgtgattcttgttctcttgttatctaagaattctcttgttatgatctattagttttttctattgctacttatattgttatatggctattgtaaagactctttattaatctttgttctttgtttttttttatttattgataatgatgtttgactatattcataagagtgagatatattcttatttattttgtgattacagatttattctcacttatttatttacattttgtttactgtaatgataaatagtagtactaatattgtttcaatagtcattgagatgacgacaagcactataatgattataaatcaagtgaagaattaataataaaagaatgactgcaaataatattacaggaactagctacaatcctgaaacaactcaaaacaactgaaatacaaatgaaggaaggttaccaaccactctaaatcaaggataataaaaaaatttagctattttacataaagttattaacaaagaaaactgaattcacacgatattcattgtgtgtgatacacattcaactacac

SEQ ID NO: 259610 - DNA, 723 bp, Cannabis indica
ttttttttatgcggtgatcaaaatcacacaagattatcaaagcaacaatccacaatcggtaacgacatctcctcgaactaggatagctcatcgtctaaccgaagggcatgctttgccaaaccatgcgctgcagaattctcatcccgagtcacatgggacaaaactgctcccggaattttagacaataaaactataacgtcttcaaacagcaccacatcacattgaaaaaacacattcctattattaactaattgtcttcagagcacagcgaaactgaaaaaattgcaacaccaaaacaaaaaatacactaatattagaatgacaatcttcaaaataaaaatcatataaaaatttaaaaattaacacgcacttcataacactagctctcagcattactaaaaaactaaaaaatcaacaaaatttctaagaataactagccaaaagtattaccctttggctattaacaacaaactagcactctaatataaaaatgctgaaaaacaatatcaactaaattatgtttaaaattaaaattatgtttacctaatttagtaccaaaattgcaaaacaatcaataccattaaaccagataccattaaattaacaccaatgaataaaaacttttaaaaaattttgctaaacaactcctattagtttttaaaaattattttttgtttttaaaaactaaaaacaatttttaagttattaagccaaacaacctct

SEQ ID NO: 259611 - DNA, 541 bp, Cannabis indica
aaagattggtcaagaaaattagatgatgcattgtgggcatatagaactgctttcaaaacaccgactggcatgtctctatatcggttggtgtttggaaaggcttgtcatctgccggtggagttagagcataaagcttttaattccatgttagggaggagcaacgcctccgaattattgaggaggaggagcagtttgatatggtggatgtggctgagacggtgggatttccagggttgaggttccacgacaacgatggcacagaggggtcaccaaacatcttatatcggtgtgaattaaacccggtggcaaaaacatggttgtactttgtaagtgctcggttggtgccaaataagcacttctccgatgtccaaatggatcgcctgaaatatgtgtacgccattatgaaggggtacaacataaacattggacaagtcatccagcatagcattgatcagattgtacaaggagcacgggaggtggttttggtttggcgggagttataacagaactctgcggggcatatgaagttccccaattggag

SEQ ID NO: 259612 - DNA, 938 bp, Cannabis indica
ttttatattgtactcttattattttgtagtttttttatatgtatattattttttatgttgtttatatttttattattttcacgttggttttcttaattttttattattattttataaaatactataataattaaaaaaaaaaagttaaagtaaaagtgtaaaaaatttactatatatactttatttatttggtaatatgtattatataggtaccacttgaaggatgcaatacttgatggaggaatagctttcgacaaggctcatggaatgccagcatttaagtacaatcaaatagataaaagattcaataagatcttcaacaaaggaatgtttgaccactctagcattaccatgaaaaaaatcctcgaaacctacaagggtttcgagggtcttaactcgatggtcgatgttggtggtggcagtggagctgttcttagcatgattgtcactaagtacccttctattaaaggcattaacttcgatttgcatcatgttatcgaagacgcgcctccatttcccggtatgtacaactataagagtctcaccatttcaataaaaaaaaaaatagaatatcaatatatttatgaagttgtcatgtaagattttttttaccaattgattttgcacttgaatttatgattttgagtttcccctaaccataattactactaaattgtgtccccaaatttctacttcattttacattttcctcaactgttataactaccaaattatgcatacatcttaattattcagggcacatatatatgcaactcatcaattcaataacaattcaagggcacaactttgtagtaataatatacttctaggttgtaaaatagttacaacaaatagtggtaatagttttggagacaaaaatcatatttatttaattaatattattaattgttattaataggtgtagcccatgttggagg

SEQ ID NO: 259613 - DNA, 546 bp, Cannabis indica
atctttgggcacaaattcttcacttgaatcggacaagccctctgaaccatgatcctcctcagttcctttttcaggttcagaatccgaggacgagacgaaagggggattctccttaagatttttggcctttgaagatgaaatcgccacctttttccaaacctttttccctttggaaataattttgggcagaaccactttgggcttttgaggagtggatactttggaccttgttcgagaactcaccgtgggcaaggtcactatagctttgtcaacattaggagcaccattcgaagaagaagacttcgaaaatgtgtgatcagatgaatgagattcatcatgatcaccaaacccaggtgttgaagaagcaattggagaagcaaagactggtggagatgcgagattgatgactgattttcaagcatgggtctttgtttttctggcagattttgtcggagcagaagacgaaccaggaactccggtcactggagcaggcggcacaggtggggtgatcggagatgcagaggcagagccacgagagggcttctt

SEQ ID NO: 259614 - DNA, 735 bp, Cannabis indica
attaatcacgatttccataaacctcgttgattagcaacgagctggacagtacgtttaaaaatcacgtaaacacgcctatgctagttagggtgttacagcgcaagttgcggttgtccaccctggtctgctccagctctgtgaccaccacactggcttctccagcagccctctctgccaacaaagccacctattgtaataagcaaaaataaaagagttgaataccatgacaaaggtccaaataaaaaaaatagggggaaaagaaaaaatcttttggaactttaccccaactgcatgttgcttagcagtgtaggctaaggtaaaatagtcaacactgctgctgctgaatgatccaatgaccattgacaaggaaaatttaaaaaggaagaccttggacgacatgtgtatgatattcggtctgtaccatttgacacccttaaataccatatggtaaaatgaccacctactaaacaaacggttagatctcgtctaaatgtaatcaatccaagccagcgcatggaggaagctggcctataatacccctgcgttcaataagatagcggcaagactctttaaagacaaaaaagagaaaacactatataatacttactcaaaaactctacaaaaaattcctatgaagcttcttcttcttcaagacaaacgagagagataaagagttttggtccattgcatatagatttgtattaatattcatcgaacgaagtgcctaataaaatg

SEQ ID NO: 259615 - DNA, 829 bp, Cannabis indica
gtcacgactaggctttatgtagtcgcgacaggggcgaaagacgagatttttgagcagttttgtaatttcaccattcaaagatatctgcattattttctacataaggattgtgtattttagagggaagggaggcagaaataaaaccctagagatgaagaaggaggcaaaggaagcaattgtggcgatccggaatgcaatcaccaactagttctttcttaaactcttagtttctatgttaatttctgttttagttttgattatggatgttattatggattttatgaactaaactcctatttagggagatgatgaatgttgattgaaattacttttggttaatgataattgctatttctcctttcttgattgtgaatttatccatatttgtgtttaattacatgtttaagattgatcaccttcttcatgttctatgatcctaattcaaaatctgaaaagtgagaattgggaatgctaaaattggataaactaggttttgatgtgaaacgaaagtatttgcatagcctttgtgacatttagattattgcttaatgctgattatatgttaatctatcccagagatgattagataacatgtgatttaggacctaaaagatctgaaaagagttaggttaattttataatctgtcattcacattgagaaagagaatagtaattagcattaacaattgggtaattaaatcaacaggattcttttccctaaatattcatccataattaaacacatttattgctttctttaattttcttgtttctctttattttaaactctgtcaaaaattatttatctaccaaatagaatcataagtct

SEQ ID NO: 259616 - DNA, 960 bp, Cannabis indica
tcaagtagctatatatagctactagggttttcagcagcaaatctcacattattaagttttagggtttcaagttttaaggcatcaatcaaggatatatttttcaacacacacaagaagacttacagttacagttaagcctatatacttttactaatatttatttatttatttatttatttattatttatttttgctctctctatatatacatgctattgctatatacatatataataatactgctcaagctcaattattgagtcttggaatttttcatttttgcttttcctctctgcatttatatttagtattattatatatagagagatggattatatgtacagctaggaatgctagctctcttactgaaaccattctcatcaagggtacattctgatcagatcagatatattattatttgttttcgtttttgatttcatattcattgtgctttcgctatcagttatctaatttgatctatctatatatatatttatatgtaaggtatgtgtggggatttaagctttccttttaattaatctaacagaaaatgggtttgttttgtgtctgtttccttcttattattgggtcaataattgttaaagttcagtagtacttcactgaatcactgatcagtttttctgaaaaagaattaaagcagattttgatgttactgttataaattaataagctatttctataaatatatttcttatttcttaaactatagtcttatatatatagcttacattaacctgttattaattaattaagtgtaagaattttctctgatcataatcattaaatatatataacatctctttttctctaagttacttaatttaagaaaaaaattaatattaatttgaatcaaagcaaggaatatatgtgtttatacaatatgatgattagtctattcatgaggcgtagtactggtattatttttctggaacatatatc

SEQ ID NO: 259617 - DNA, 610 bp, Cannabis indica
aattactgattggattggatcggatgaaaaaaaaatgactatttacataaatatactgtagtttacatatatatggcaaaaaaacttaacgccactaagggtgtgtttggaaagtcacgatgtaattaaatttgtgtgtaattgaaggtaattacacaatttggcatgtttgtctgaccatgtaattacactgtaactgtgtaattggaagtaattgagtagttccaattacactctccaattctcatggccccccatgagaattgaatgtaattacactgtgtaattactaaaaactttccatattaaacattagctactaaaaaatattattttctcatgtaattactaactattttaccaaacaagatattagaaattcatatataattaccacctcatatccaaacagaccttgcattttaaaatatagtgtaattactaaactgtgtaattaccaccctagtaattaccctacctagtaattacacagttacttccaaacacaccctaaatatgtcattcaaacaaaaaagttaacaaatatatgaaatgacatgtctaataccataaaaaacattaaaaaacaaatcagattttttttccttta

SEQ ID NO: 259618 - DNA, 617 bp, Cannabis indica
aaaaaataaactactcagtaaatagaactcggaaacaaaaaaactactaaaaaaaccaagaaactatactaacatataaaatattcacttaaaaggctacacatagatctctaaacaacacacaaacaaaatgtgaacaacttagtatactaaacaactctgtatacaaaaaaaacaactaccatataaatgtgcatccacattaacaagaatcaaaatcagaatatagaaacaatatactaaccttcaatttttttggcaacacaataggtgcttcatcacattctgaatcaaaatcatcctcatcttcaacaacactcttcaatttcttagagcgccgatcgtcagaggtagcttcagaaacaccactcctcttcgaaatggagagattcttgttcttcttctccttatcagactcaacgaccttcgaaccagaaccaaccatgtttttcgaaacctcctctgctttttcaaccttcttcttcgaaccagacacctccggtgatggagacattgaacccctagtacgcaccattgaatgttttaactatgaaacgaaatgccaaaccctagcagagagaaacccttacactatgataaaatgagggaaaataaga

SEQ ID NO: 259619 - DNA, 1785 bp, Cannabis indica
tcaagtgattcggcaaggagtatatcttcttggttgtacgtcaatctcctgggggatggtggctcgagctctaagggtagcatagcttcatatccatatgccatggcaaatggagtctgtccggttgccattttctcaattgttcggtacgaccacaaaacttcaggaagctcctccggccagtttcctttagcatcatcaagtcttttctttagagtatccttcagggtcttgttgactgcttcaacttgaccatttgcttggggatgcgtcactgcggagaaaattttgatgataccatggttcgcacaaaaatcagtgaaggactggctgtcaaactgtttgccattgtctgaaactattttgtacggcaatccgaaccgtcagattatgttcttcacaacgaagtcttgaacttttttggatgttatggttgccagtggttcgacttccgtccacttggtgaagtaatcccccacaaccactgcatactgcactccacctttgcctttgggtaattgtccaatcaggtcaattccccaaatggcaaaaggccacggactctacatctgagttaactcgttgggcggagcccgaggtatctttgaaaatctctggcatttgtcacattttttaacatgggcctttgaatcctcgatcattgtcggccataaataaccttgccttagaattttcttagataaactctgtccagcggtgtgatttccaccaaatccattgtgtacttcagatagcagtcgtgcagcttcttcttgggtaacacatctgagcaacggcatggagaaccctcgtttgtacataattccctctactatgatataccgtgtagccttccttctcatctttcgagcttcatttcgattatttgggagttccccagtgttgaggtaggatgctattggagtcatccagtttggagaagtattaatcattttgaactcttctatgccagtaatgctaggctcttcgaggaactggataggaaccatgttcgctttatcacttacattactactcgccagccgagctaacgcgtctgcagtcgtgttttcttcccctgaaatttgtctgagactgtagcttttgaattgcgcgagtaagtcatgtattttgctcagatattctgtcatcttttctccccaagcctcgtattctccaaatatgtgatttaccaccagttgtgaatcactgcagatttggatatgttcggctttcatctcccaggctagttttaggctggcgatgaaagcttcatattcgacttcgttattggatgccttgaatccaaacttgactgcagtgtgcaggtgttgccccccaggcgtgacaagggcaattcctgcaccggatagttgatctatagccgacctgtccacatgtagtttccaagtcggcttgtcttcactgttacttggctgaggtatttgtactggctcggggtcgccttctgatatgatttcttctttgcttgtgcattctaccacaaagtctgctaaggcctggcctttgattgctgttcggggttggaaaatgatttcatactgacgcaactccactgcccatttgagtaactgtccagaagcatccaacttttgcaatatttggcgtaacggttggtcagtgtataccgaacatgatgagtttgaaaatagggccttaactttcttgttgctagaatcaggcagtaattgagtttctctatcaatgggtatcagccttcggcctcaatgagtcttttactaatgtaatagactgggtgttgta

SEQ ID NO: 259620 - DNA, 671 bp, Cannabis indica
atatttacatagtgggcagttaattacaaagttgactgtaatctgtttacaacaatcaccccctaaaataatagggtttgattacatatcacgaaatgtaaatgcggttattatttgaaaatcatatagctattattttcccgcttttaccaggtcaaaataatcatgtatttaaacatgtatttaattgttgtatatggggatgtctcgacagaaacttggttctagtgatctcaatagcgagctagggccattttcctttccgagatcgacaatgcatgtcttgtgacgattgcggttcttatttacaaagatttcttcaaagctcgtttgaatgttagcttccgactcatcatgattataagcctcactgaagttaactggatgaagttacaggaagccttcccctagcgagatgggcacctcgcttacttggtctcgagccaacccgattattatacttagtttatacattatacactaaaggctttcgtagttgatatgtgtcgttgttacaaaaaatttgaacaatatgcaagtgcacacaatcaagtagtaaactcacgcaagtgaggtcgaaccacagggaattggattcattaccactaaattatacttatgattctatttggaaaatcgataatttttaagatttaaacaaaataaaagta

SEQ ID NO: 259621 - DNA, 685 bp, Cannabis indica
aaaacttgtgactaaaagtgaaaaaaattgtgactaattataaatcgtgatttctatgttgtgactaattaaaaggtccgtggataaaagtattagtcacaaaaattataatttgttgtgactaaatgtatttttagtcacgatacttgttgtgactaaaactaaattagtgacatcttataactaaatattatgttttagtcacaagtaacattttgttgtgactaaaagtcacatttagtcacaaaaaaattatattgtgactaaaaaattgtcactaaaattagcagttttttgtagtagtccataataaatttcacaaaaattttgacctcatcaccttgacatcattttttacacgtggacttcatttaaccatactccactaaaatatataaaatatgtgaataagaaaataagtgaatttccttcatatatatttccacaaaatgcttaaaataagtgagaataattgaattatgtgaatatatgtgagaaaattcaaaatacttaaatgatgatatttccacgaatgtgacaaaacttatatggttttactgtcgagagtgcgtatacaaacggaaattccaccacttccatttctataaatacctctacagatgaatgctcttaccattcactcatatatagttctatatacacaaaaaatcttataatattatag

SEQ ID NO: 259622 - DNA, 1012 bp, Cannabis indica
ctatttgccttagctgcaatccataaatggcatttacatcatatggatatcaacaatgcattcctacatggggacctcaatgaggaagtatacatgaaacttccccaaggttacaagcctaaatctcccattccaaacaatgttgtttgtaaattacagaaaagcatatatggtcttaaacaatcttcacgccaatggtatgcaaaattgagttccacattgaagcaacaacaattcactcaatctccaaatgatcatactctattcataagaaaccaatcaggggtctttatggctttgctcatatatgtcgacgacattgtcgttgccacaaataacaccactgaactacaaaagttcatcacaactctcgacacaaggttcaaattgaaagaccttggttctctgcgcttctttcttggcctcgagatagcccgttgtccccaaggtatatcagtatcacagcggcccttcaccatacaactattaaaagaatccggttgccttggttccaagcctgcatcaaccccaatggaaccaaataacaagctcagcaatgacatcggggacctgcttcctaatccaacacaatatagaagcctcattgggaagctcctttacttgaccattacacgaccagacatcagttttgccgttaataaacttagtcaatacctccaatccccaagacttccccacatgcacgctgcaaccagaattctccaatatctcaaaaactcaccaggacagggtctctttttttatgcttccccaccatcatctctcaaattacaagcttttgccgatgctgattggagagcctgccttgacaccagacgttcgataacaggctattgtatattccttggccaatctctcatctcatggaaatccaaaaagcaacaaaccatttctcgatcttctgctgaagcagagtatcgagccatggctcacgcgacttgtgaactcacttggcttacttcaatcctcaaagacttcaacgtccacatta

SEQ ID NO: 259623 - DNA, 682 bp, Cannabis indica
ctcgaagagatggccataactaacaacattggtcaacaaagagaggcccaacgaaaaaggtcgcacgaatgcatgaagttgatgaaataactaagttgacagcctaggtagaggcattaacaaagctggtgaatgcacaagtaaaacaagctcaagttgtctgcaagttgtgtggaggatctcatgccactgacacttgcctatagatgtcgacagtttgccaatgggacaagcccacaccattggaaactatcagaatatttatggttgttagcaaaacttctagaagcagttttatcctcaggaaaatcaatctcaacaaagccaacagtattcacaacaataacaagcctctagtggagggtctaatcctcaattagacacattactgcaattcatgacagagattaagtcttccattaaggttttggaaactcaagtggggcagttggctactcaaaacatttacagggctcaagttaacttgcctagcactactgaagtcaatccaaaggagaactgtaatgtaattaccttgagaagtggtaagacctatgctgagctaaacaaagatgagccaaaggaggaagatgatgtagagacaacacctacactagaaaaaggagaagactactgatggtcttccaaaaaaagaaactccacctcccatcagcattgacca

SEQ ID NO: 259624 - DNA, 921 bp, Cannabis indica
tgggtacaaaccatgttaaaaaaggtaggaatgacattttgaacatcggatttattcttgagcaaataaagccaagtaaatcttgatttgtcatcgacgatagtgagaaagtatttgtaaccttctacactaagtatatgaaaaggtccccaaatatccatatgaaccaaatcaaacacattctttgagaaattgtgattggaaatgaaaggtaagcgcttttgttttgccaaatggcatatatgacaatgtttagtagaatttggatgtgaaatattatgttctttattgaaaaaacttgaaatacacatcgaaggatgtccaaggcgattgtgccattggtttacattgattttattgaaagaaaaagggaaaatggcagcggctgtagcagaaggattgtcttgttgaatcaagtacaatttcccacttcttttagctgtcccaatcaccacattcagagtaagatcctgaatttcacaagaattgcgatgaaacacaatatcattagagttatgaagcatgaaatcagtaatggaaaaaaggtttaggtgaaactgtgggatatacaacacattatgtagggtgatgttgttattaatcttgacagttccaaccttttgaacagggacatcttgtccatttggtaatgtgacaaccttagggaaagtaacattagtaaatgaggaaaaacatttaatgttgaagcacatgtggtgagttgcaccactatcgattatccaagaaaaggaatgagaatttatacctgcatgattcgaaattgcagggttgctggctgggttttcagcattgctggtatgtcctagctgctggcttagaagtgatatgagatgctggcagtgagaagtaatatcagcatgtgtaagctggtgatcattctcaggtttcgggttgtgtgtg

SEQ ID NO: 259625 - DNA, 823 bp, Cannabis indica
tcttcagttagaatagtgaatgcagtgtatttggcatgattctcctggggagcttgttcggattttccagtgaactttcctttcttcccattcccttgcttgtggttgttgctggaacgcttgccacttgagcttgaattgtttgggtagtggggaagtttggcagatgttccagtggagggagcctttgacttgccaggcttttgctcaccttccgctcgttgaatggcttattcgagcttgatgaagccttcggttcggtcaaggaaatcactcattgagtctaccagcccgttcttccttatatccttccaaagttgactgaggacttcgatgccccccagtatcgcagatatctttatctttagtcacccttgaaactttggtcgcctttgtcatgaatctgctgatgtatgcccggaatggctcacctggtcgttacttaacttcgaccaagtctcctaaatgcaatgggagttggcgcgaggaggaaaattgtgcatggaatttcgaagagaaggttttccatgaactaaactttccaggagccaatttgaataccattgctgagtggcttccgacagagtggcagggaatattctgcagcatacatctcctcgtaccacttgctaatccatttgcatttcgaagtacttgagatgagaaagggaatcttctctctcggtgtacatcttccacgtcagcattttgaacttatggggcaatgacaagagatttatctcaggtgagaaaggagttctgcatgctcggtccagctcaagatccttgtttctttgtctagccatgtcgtgaaacatatttt

SEQ ID NO: 259626 - DNA, 541 bp, Cannabis indica
ctttattcaacctccattgaagaaaaccttgaagtttttgagaaagaagaagatgaatagtgatttttgaaatttgggtgaggttttagggatttaaggttggatttttagaggaaaagagtgtttaatgaagggaatgatgatttagaaaggtttgggatgaagatttaaggttagatttgagagaaaagggtttttgagtgggattagatgaaaaaatatggtggaggagaagtattttcggtgtggaggttagggttgagaatgagggaatttgattttgaaattatgtggtattggctttttattcaagtgtcagaccgcctcgccgcggctagaaatgggctcgccgcggccaaacaggcccaaaaaattggcctttctgcctagaccttttggccgcggccatacattccctcgccgcggccagattgcttcgaaaaatggcatctctgtaagacccttttggccgcggcggcactacacctcgccgcggccactgggtcgtacccaattttttttttctatgcagtacaaaaat

SEQ ID NO: 259627 - DNA, 641 bp, Cannabis indica
attggtaaaatcagcttgtcttggatatgtattgttatacatcgaaccagaccaatattcacatggataagataccataaacttactgtaatgtcttttaagtaaatatcacttagttaatcttagatcaatgatctcaatcccaagatggttaggttctagttcaagtatattatttatgttctttgacttgttcgttaaagtcaaccaagtggatcgacccaatagttacatcttaggaacatggtagtacaattgagtgagagtgctaatcatagatacagaatttatagcttctataaatatataaaagtaaaataatgatctccttcgagcttggataaacgagattaatggtggagtacttatttcagtaattaaattagtttattataatgtcatttacaagtagctaagtgttttaagaataaaatacattgaagggcagaatgataaaattgtccctactcgatgtagatcatcaatagaggatcattgattatttggattgaaacaattgataattaatagcgtatctatatttgggatatatagagcattctatataatcatgagtgcactttcgaatctatagtggagtcagggagaattaataaaatagagaatttatttggtaaatt

SEQ ID NO: 259628 - DNA, 714 bp, Cannabis indica
tgaacaactccggatatttctgctgcatattcgtctcgagtttccaggttgtctcttcaactttactgttcctccacagtactttcaccagtgccacagccttgcttctcaagactttctctcttctatcgagtatttgcactggttgttcctcgtttgacaagtctggctgaagttccaatgcttcataactcagaacatgggacgagtctgagacatatttttgaagcattgaaagatgaaacacatcatgtacagataccagtgttgggggcatagccaacctgtacgctacttgccctatcctctcaaggatttcaataggtccaatgaacctcgggctaagttttcctttcttcccaaagcgtttaattcctttcattagagatatttgcatatataccatgtccctgacctgaaaatcaatatctcgacgctttggatcagcgtaactcttctgcctactctgagccgcgagcattcgctctctaatcttgtcaactgcctcacttgttttctgaaaagcttcgggacccaagaactttctttcacccacttcatcccagtgaatgggcgatctacactttcttccatataaaagttcataaggagccatcccgattgttgcctgatagctattattataagagaactcgatcaggggaaggtactttacccatgatccctcaaagtctagcacacatgcccgaagca

SEQ ID NO: 259629 - DNA, 652 bp, Cannabis indica
tccgtcagggagatcctctctccacatacctatttatatgtgctgctgaggtgttttcaagacttttggaagaggctctgggactaggtaatactcaaggaataaaactaagtaggggaggtccgacccttacccatcttttctttgcagatgaccttatcatgattggtaaggccaatttaaatgaagctaattgtttttggaattatttggagaggttttgtgcttggtctggtcagaaagtgaataaacttaaacgtcaatctttttcagtaaaaatacccctgatggtatgaggagaggtattaaggaagcgatgggtattaattctccgaaaggtgttataaattacttgggtttgcctctattcagatcaagacagaaggatgttgattttaactttattttggataatctcacctctaaattacagggttggaaggctaagactttgtccaaggcaggccgagctactcttataaaatctgtgagtctgtcgatgcctatctatgccatgcaaaccacgaaactctctagtcagatggtctcaaggatagatggtttagtcagggatttttggtggggctttgaaaaagggaaccgaggtcttcatcttaaagcttgggataagttgtgcctgtccaagtcattg

SEQ ID NO: 259630 - DNA, 499 bp, Cannabis indica
ttaatttaaaaaagattgtttaattttttgggtttatttatttgttaacatttaacgtttaacagtctgttaagttaatcgtgtaaggctaaaggaatcgttaaaccaagaatcgttaaaccacgaattaccgttaaatatttatatatatactcatttaactaaaataatttcaagaatcctttttttcttttatctatatatctatatattatatatgtatgcatatgtttttatatatttattattgaattcatatatatatattgtatccttttattgtttatctatgatatgatagagaaaatctatataaattatgcatatatccagaattatgtattccggataaatattgcatatatcctgaagattatgcttcctcaataaaattcataatataactgactgaaatataataaaagagatgaatatatattcacatatatgctcttgtattctttgaagacaatgaaaagtaatctaatatcgatatata

SEQ ID NO: 259631 - DNA, 1038 bp, Cannabis indica
ctctcaagagtttcttatatggccaagcctacactacaccttttgagtcaccagaaaaatggggcaaagaaagcatttgattttaattaatagtcattattaccgatacatgtcattctttagttctccaatggtgactcaacatatttatgggataaggccaattattactaatcctctattttcactttggttatgtaatgataaaggtggttatccactaggaatgttgagacaaatcatccagcatttaatttcaagtgctgttgctaggaatgtttatgttctcatctggagagtcaacaagacttctcctattcttcttattcatcttcaacagtggcttcaactttctttggcttacgatattgatataaaaagtggcaaaaccacttttccctcgttagaaaaagaatttaaaaaatactcagcagggttggagtgttttgttaagaagaaaactacagtaggcaagctcatcaacatcaattttcaagggcataacaaggagttgaagagaaaaatgcatttgttggactggtttttcaatagaggtcgacttgctaaaacttggtgcttttctcacagcttgctcaatatgagatttctgctgggttcttggactgagaatgagcaaggttggcggttgaagcttcacgttcttcaccttgaggacaaggtgaatttcgagcggccggtattgttaggccttaataaataaagagggtaattgtaatggaaagaattgatgctatatatatgagtgagtagtgagggtaagagggagataattattttgttaaagtgagcattagctctttgggagagagctaggtttctcgaatacccagcaacttgttcttttgtcactctaatatcaatatactagctattttccattgttgacactgtttggctctattttcttctatcttgctactggttgtacccaaaatgataggaaattcctatcagaaagatggacagaagttgtgtgcctattaatttttgttttaattactcaatgacatgtgttat

SEQ ID NO: 259632 - DNA, 834 bp, Cannabis indica
cttgagaggtcgagagagagagaaagtatttttctaattttctatttgaattaatggagaaaatgtaatgtttatcaataatatcagaaaaatcatattaatctcccaagattaatcaaataacccgctaaaagacaaaaaactacttttgggtaaaagatcattttaccccttgtctccccatgagataacattgccacctaagggcatttcggtcaaatctaatacctcgaatattcccaacattcccaatatttatctaaattgccccacttttactaaaatactaaactataataaaatgtgactctatcggccaaatatcgcgtcccactattaccgggcataaatatgaaaaacataaaatttcatatataacataaataacacacctagaatttaaatgtatctctataaattcataaatcataattaaaagtctaattctaaatcaaactctaattatcttctaattctcatactaaaattaagcggtctctacagttatattctaaataatcaatgatcctctatagatgatctacatcgagtagggatgaatttactgttttacccttcaatgtagtttattcttaaaatacttagctacctataaatgatattttagtaaactaatataattactgaaatgagcactccattatttatcattattaagccaaactcgaaggaaatcatcatttcacttctttgcatttattgaagctatagattctgaatctatgattagcgctctcactcaattgaactaccatgttcttaatctgtatataacaagaagatccaattggtcaactttaacgaataaattga

SEQ ID NO: 259633 - DNA, 1304 bp, Cannabis indica
aaaagaaattacccggaactagatattataatgaaaaccataattaatagtaagagtttaaggagaaaaaaaaaactataatgaagaacactcaaagtcgcaatctccgtcttttccttgctctctctttgagtttctctctcaatttcgtagctaaaaaattctaaaattcgtactttagaagtcttatttataatgcttgaaaatatctcactaaaaaaaagataaaattcgaatttttcctcgcctcctcgccgcgatgagcaggacccttcgcttcggcaacagagtccttaacgcgacgaagccttcttgtggccacgacaacaacccatttttttttctttttgcttgctgcggcgaaccttcaaccttcgttgcaacgacactccacgggtttttgactcttcatggacttatgaaactctaagaaaatgttattttggcgcgtcatttcatccgctaacatcacctagccttaaaaatactaaatctattaatttttactcataaaaatcaattttcttccaaaactcgaataatttaaaaaagataaaaaaacactaaaattaccaaaaaaaaaaaaaaataaacatcctctaattatgaaaaaaaaaattaaacaattttagagcctaaaaggttcttatcaacatttaggagcggtttgctattttttttaaaaaaaaagacaaaaaaaaaaaaaaaacaaagaatttttttattgtttttatttttctccacattatctcacattatttttcttattattttctatcacatcactttctctcattattttctctcattattttcacacataattttttctcttattattttctcacactatctttacgttattttctttgtcatcactttctctctttattttatctctcaccactttctctctcttcaaggtcggggttaggggtccgcgtctaaggtcggggccagagtacgagtccaagtctagggctagggtttgggtttggggtctagggccaaggccagggttcagggtacagcgctaggatttgagtccaaagttataggtccaacatcgggctttgagccttgatttggatacaaaactagggtatgcggtcaggtaagggtctagattcggggtttgggttcgttgtcgggatccagatctgggtccaaggccaagatttgggatccaagtctaagttcggatataagtccgagtcaggtcgagtcttattcatataagagtctaaaagtattgaagtgcttttaaaaaaatacatataaaaataaaaattatttttagaaaa

SEQ ID NO: 259634 - DNA, 700 bp, Cannabis indica
taaattactattttctttacattaaaatattatttgtatacataattttttaatattttttataaatatatgtggattggattggttacttttacatgtcaatcaacatccgcacaagtgccctatccaatccgtaaagtgcggatatccgcactttgcgatttagattggatcgactattttatgaaaaccctagcattaaacaactttacagttttttttaattaagtaattgagaattgtaaaaaattatttcattcaatgagtggtgtttctttcgtttttatttatcgatttactttttttttggtgctcatagactaatatttaaagtatcacgtatgccacatggacattaaaaatgccccttgaacatgtcacatatgtcccaacttgaaatttaaggataatttttcaacgaaaagcacgatttttgtatatgccaagtgcagaaatataaaataattaacttttatgtaaaaaaaaagaaagaaggagatagaacttgtttaggaaaaatttgtgtctttcaaacatgacattaatatttttcggaaaaatttcacattagtacatataatataactttattacattaatctcttaataattatttgttgggttttatgccctaaataaaactcatttcaatatattcagatttacttattaatatagatcagaaataacatttaatgtt

SEQ ID NO: 259635 - DNA, 605 bp, Cannabis indica
tttgtactattttagaaaatacagggtccattttgtcatttaacaaaacacagggtctaattgataacttttgcaaaacacaaggtccaaaatggtatttacccatttatttatttttaaatctctaactttgattgaaagagcaataatacaaagttacaagatttgaataaaacttggagtaaccactcgaggtcagttcaagttagcggacttgcacataggcgggttaagcctgtgattaagattcacctagtccaattttttttttctccttataaaattgtgtattttgttattgactttgcaaaataccacattttttctaacataagggctcaaaataattttttttttctgtgacccaatttgtttcagggtcggccctgctcaagtggtcttaggagagtgcgtgtgtgttagatgtcttgggttcgaatcccggtattgtgtaatatataaacgcttaaataaaaaaaagaataaaacttggaatatttttaaacaaatttatcatctaccgttaatcccaaaaaatagagaagtggtcataaacataacttactggttccacacttttttttataaaaaggaggtccaagttc

SEQ ID NO: 259636 - DNA, 1237 bp, Cannabis indica
ttcttgtgtttctgattcattcgcctaatgcattgaactacatgagagaatgccaattttttaaattcctatctcctagagtctgtagctcgatgaacaaagtaagattttctccggtatcaagtatctaagaacaaaaagacacatcaaactcaaataagaaactattcacctacaatcaaattatatccaaacattttaagaatctaaaaacaaaaagaaagcactgttaacaagcacaaaattgactaaattagcatcatatttaccttcctattgatcacgaagaatgagagcctgaacaaggtggcaccgaaggcctgagggagggttcgcgcagaggagcggagcaactcagcaagctgatttgggaattctgcgagttttttacggtaaaaaggtgtaacgtgagctaagaacatggcccaatcgcccagatccttagccacagttgggtcattaccaacgccactgatggatgtgaacttgaaagctgcttgctgcttaaacatctccaagaacgacttgaactggctgtacacagtcgccagttccgattcatacccttctgggtcacacttcatctttgattgtagcaatggtaagctaagcttctccgagcctctacccgacgccactatggattccgccgagaacccagtagcttgagaagccatagttactactagtgaattcaaggttaaattaggtcaatcaaatacatatttcaaacccaaagtaaagacaacgattttctcctaaaatataaacattgaactctttccctgtaattgtaaacaaatataatcaaaatcctaagaaaattcctatccacacaaattaagtggactcaaaattaattctttgacaatcccttcaacaataagagagcattataatatccatgaaggaagaactgaagccaaaattgatctacatataactttctgacattctaaaatctaatgaagaaagaaagaaactaatattatttcaatataaaaaagaaacaggcattgacttaccgaaatctgattttcaactttgattatgaaccttcacaaaaactctcaacgaaaattctccgatgaataaaatgtgattttgtgagtttggcgctaaccttcagaaagctaaggagagagagaaggaagaaggaatgagttgcagttataataataaaacgattgtttgaagtgagtgagttgaatgaggccactggccggaaaatgctggg

SEQ ID NO: 259637 - DNA, 659 bp, Cannabis indica
ttttttaaaaaaaaaattcctttaattgaattgtgttttatatttgttaggaaaaagtgtgcgaatctaatgttgctgatgatgagaaactggttaatgtcattgaaaaagatcaaaagaaaccattttccaaatcccatggcaagaagaagagtgagactcatgttgatcttgctcccttggtaatttttcttataaaaagaaattggtttcttcctttatgatttttcttgtttttaggttttctgtttatagttttatcgttcgtaagttatttttgttttgtgtaatcattttaagcttctgtattttctattgtttattttttttattagcgtatttttaagtaactggtttctatatttaattttgaatttagttatttaagtaattgatttatgtgaattaatttttaatttaattattttacgcaactgatttctctatattagatttttgctaagttgtttattgtaacagatttttgttatttagtttataagttatcgttaaaaattattttatggtatgtattttttcttttttaagtaattgatttttataattgatatatctttttattactttaggcttcatatgtttgttaactttttatttaattgtaatatgaaattagtttctgtattaaattattattt

SEQ ID NO: 259638 - DNA, 837 bp, Cannabis indica
ctgacttgaaccaaattcatcttcaaaatagacagctctatctgattctatcaccctggtggtgtgagaaggacaatagaatctagaacccctcgaaccaatagtgtagcctacaaaatagccactgatagtcttcggatcaagcttcttagattgtgggttatagggccttacttcagctttacatccccaaacatgaaaatgacgcaagctcggtttcttgcctgaccacaattcgtatggtgtctttgggacggacttgctaggcacttgattcaagatataagcagcagtccttaatgcctcaccccataaaaattctggcaagctagaatgaatcaacatacaacgtaccatgtcaagaagtgtgcgattccttctttcagcaattccattttgttggggtgtccctggcattgtatatcttgcatcaataccacattccagcaagtatttggcaaaaggcccggggttccttccagtctcatcataacgcccataatactctccacctctatccgaattgacagctttaatcttctttcccttttgaagctcaacattcgtcttgaaaatcttgaaagcatctaaagattcagatttttcacgaatgagctcaacatgaccatatcgggaaaaatcatcaatgaaggtgataaagtatttatatccacccatagcaggtggaacaaaaggcccacaaatatcagtatgaataagctctaacacatttgcagacctgtctgacttactctttctaaccttggcagtcaactttccttttatacaatcaacacaggcagtaaagtcagaaaaatcaagatcctgaagcacacc

SEQ ID NO: 259639 - DNA, 717 bp, Cannabis indica
ctggttgccttgttgagcttcctatagtcaatgcagattttccaaccagttagcgttctagtaaggattaattcgttcttctcattctttatcactgtcatccctcctttctttggtaccacttgtactgggctaacccacttgctatctgaaattgggtaagccactccaacatctaaccattttaccacctcttttctgacaacttctttcattggtggattaagtctttattgtgcatcaatagttggtttagcaccctcctccattaaaattcgatgtataattgtagagggactgattcccttaatgtcagccaatttccacccaatggctttattgtgtgctcagagtactctaagcaacttgttagtctccacatcagaaaatgaagctgacactatcactggaagcttcttgtcttctctgaagaactcataccgtagatgattaggaagcaccttcagttctaactctggcggtttctctatagatggcacaagctcctttggcataacccccaactcttcgtaatacttcctattcaatggccataagagtcgagccatttggcatactccatctcctccattccttctagctcaatcaactcatctttggttaagctcaattctaaaggatcttctatcaactttttcttttccacaatgtatcaatcagatcaacaagaaacagttatcacttgcctttggaaaa

SEQ ID NO: 259640 - DNA, 892 bp, Cannabis indica
gcctgtgaacaggatgtgggttagacgtgcagttggcggcggtgaaagtcagtcagacagtttttctacatacataaatacatcttcactaatatctagtgcagcgttcctagtgttactcatcacacggtttctgactatagatatggcctcaaggggaacaaaatggtctcctttcagctatagcatttgttctactaattaatctaagcatgatgtagatgaatgaaatggaaataaaatttggaggcattactcataaggaaagttgtcatgggaggtggttggatgaacaaaaatagaaaaagagactccacaaaactaattaattagaagaaaggaaagaaaataaagagctcttaccagcttaacccaaaagctcaaaaactcaaactcaaattctgtttcaaaaccgaaactaattttcactcttgctcctaaccttattcatttttcatggattccccacccacccaaccctatttctttcaattcatccgaattgaagcgtttgtagagagaaagttgcagcttcaagctttccattattaatggattttctttcaaatacaaaaatacattaaaataatacaaggaaataacaaaattatagcctgctctattagattagatttgtgattgatggtatacatttaggtggtggagtttgattggaaggaatgaaaatatagaaataagaatagaaatagaatgaaataaaatttaaaatgcataaaagaaattgacatgttacattgaatgatctttgcttccgttttaaaatagaatagtcattccactaaaatggtggaaagagcattctaatatttaaaatgtaaccaaacaaaggaatagaatgaaaattattttctttccatttcattacctccaa

SEQ ID NO: 259641 - DNA, 630 bp, Cannabis indica
ccatggggctcgctctaagattttagcggcccatggttggcaaagcatgctctgcggttagacgatgagctatcctggttcaaggaggttccagcgccggtggcggatgtaggcgtcgtaaattcatgagagattttaatcactttgtaaaaaaaaaaaaaaaaatctcatccaaatttaataaacgagatgttcctttctatttcctttcactacttactacgtggtagttgtcttattcaagctctcttatcttttatacataggcttttgaatttttgaattcaactaataaaagttgtttataaatatgaaatgaaaccataatcaataaagttcattcatatcgttgaaacttggaagccagctcttttatcattcctagctagctttacgccaccaattagctgtgatttatttttaattttgtagtcaaacaaacatcacaatactattaattaattttgtatacaagcttctacaaaaatcttataatataacattatatctttatatattaaaagtgtctatctaacggcaattcttgatttaacagaatatactaagaatattctgttaaatttaacgattagctttgatctcccgttaacaaataaacccaataattaa

SEQ ID NO: 259642 - DNA, 560 bp, Cannabis indica
atataaacatcctcatttagatcgccatggagaaaagtattgtctatgtccatgtggtgtaggtgccatttatttatggcagcaagagacaaaaacgagtttaagggtgttgaacttagctacaggagcataggtgtacaaaaaaatcaatgcctggtttttgtgtgtaacctttggctacaaggcgggctttcaatctattgactgatccatcaggattgtatttgattttatacacccatttgttcccaattacatgttgattgggaggtaaggatgtcacaatccatgtgtgatttctttctaatgcatcggtttcattatccatggcttttagccaagcaatgaattgggaagcttctttgtatgattttggttctgtgagtgtgacagtagctaatatagctgctttaaacatgttggaaaatctatgataagaaatgtagttggcaatagggtagttggtggaggcagcaactttatcacatatataatcttgtagataaagaggctttgtgatgtttctgctgttgggttttatgccctaaataaaactcttt

SEQ ID NO: 259643 - DNA, 640 bp, Cannabis indica
ttccaggctgtaagggataggcgtccagaaccgtcttcactcattaacataaagcaacagcgtgacgagacgcttaaggtatacttaagttgttttagcacagttgctgcaagagtaagaaatttggatgatagtacccagcttactgcccttcaggcagggatcactactgatctctccaacgttggaggcgaactgtgggacgacctacaaggtcgtccagtgaaaaacatcaccgagttcaacgagagggctcaggtgtttgttcgaaaggaggaagctcgaaaagagatgaacttgttaaaaactggctcgggaagcaaacccagcactatttcaacaagtattgtctcaactaaagctgataaaccaggggcctcaagctaaaaaagggaagacgactctaaggggtcatctaaagacaggaagaaacaaaagaaacacgacaagtacgtgccagtttacaccatttattccgagcataatgaaactcgggagaatatctacctcgcgcatgagcacaaggttgcattcagtaaacctgagcccatgaggcatgcgaggtataaaagagatccaaccagatactgtagtaccataaagacatcgggcacacaacagacgagtgtcgtcagttgaa

SEQ ID NO: 259644 - DNA, 695 bp, Cannabis indica
tggagtttctttttgttgaagactgtcagtagttttcttctttgttgttgttggggttgatgtcggttgatctttaatttcttcatccactggctgtaccatattaggcacctcatatttctttccacttcacagggtgattgccttgcactagagctttgttgctgagtctgttgttgagtctgtgactggttctgatttctctgttgatagaacccactattccttcgattacctccttgattaaacccatagttgttgttgttttgagagtaatttccaatggcttttgcttcatccattggcaaatcattcacatcttcttgacattctgaatagggatgaggacctccacatagctcacagaccacttgagcttgttttacttgaatagacatcaattttgttagggcctctacctgagctgtcaacttggtaatagcatccacttcatacatacctgcaacttttttagatggacctctttctgttgaccattgttggttagtcatggccatctcttcaagtaattcaaaggcctcattagcacttttcctcatgaaagctccaccagcagcgacatctatgagtgttcgggtttcattcatcaatccattgtaaaagttgtgcacttgcagccacttctcaatcccatgattagggcactttctcagtaagtccttgaatctctccca

SEQ ID NO: 259645 - DNA, 706 bp, Cannabis indica
aaaaagtagcatttcttttctgatattaggaatattaagttttaaaataaaataaaaataaatgtaatgcatctgaacccttcacgtgtccgtatttatgagttaacgaaagtggtagtaacggtgtaagaaaattgtaacattaggtatttttgcctctaaaaataaatattaggtatttaaatgtataaactttgaaacattaggtatttataccgcaatttaccttaaattaaataagtgtatgtactatttttgatgaaaaatagttagtattaaacaataaactttaatataaatttttaattaatattttattatcatatatattttttttcatttcaatagtttgtaccttgaaatactataaggccactaagaaattaaattaaatatgtgtaaaactatttaaattgtaaaataaccacaaatgaaggatttttaagtaatatttcactaattttttacattaaatatgtgtaaaactatttaaattgtaaaataaccacaaaatgagggagtgaagtatcgaacccaccatcacaacattgacattcacgaccccttaccatttgtgctgtaccactattatgcatatttcttcaatcaaatgtttataaatattatatattttaattttaattttaatttatgtatattaattttaatttttcggggcctcaaaaattgtggggcctggggccta

SEQ ID NO: 259646 - DNA, 791 bp, Cannabis indica
atatggtattattgaaaagaagaataagtgattgaaataaagtgccaaaattctaactagagattggccctttgaagtgtacggcaaacaagttatttttgcccaatattttattccatataattaaaccctaaccctattgaagatagtataaaaggatagctatggtctcattatccaactaatgcctccaaagctaacaacctagatgagacctcttccttcttctttcttcttcaattcgaaacactaagcctttcatcacactaaataatttcagccattagtgatagagtgagtgcccacacacatcaagtggtagctcaatcatactgtggaaaactgtgaagaatccaatctccaagaaggagacttaggctcaagaaggagagaaagagatccaagttcagatcttgataataccaatgtaaggtttcttaaacgttatatgtgtttatttcattgttttagaaattaatattagtatgttaatgaaacatacttgttagtaaatttagatcctggtaaaatatttccaacaactggcctcagagccatggtaatgatttactttcatgaaatatgaattaaaacgatgatatatgttgatttggatggtttcatgttgatctgtgtgttatatgatgattgattgatgcttgtgaaattttatgaaaaataattgaattttcgtttctggaattatttttattggatattttgggaaaaattaagcaattcactttgttatagaacttaatttcgatattattttaattagttatgatttt

SEQ ID NO: 259647 - DNA, 659 bp, Cannabis indica
ccctaattacattatgaaaccgggtaagttacaagatccaaaaccctaatcccgagaaacccgaacccacaaccctaggtcctgttatacttcctagggggttaatctaactctggaaatagggaaacacccaaccacggcacggaatggatgagaattgaggaaatgaaatgcccggggaaccctgccaaaaccggttacccggtttgcaccagttcacctaagaaatttcatttcttgctcaaaactccaccaaacgtaaccaaaccttctagagtgcctaattagggtatacacagcataatccaaccagtatttcatagaaaaacatacaaaattaatttatgccattaaagatcaaagctttgaactcaaagctcaaacttgcataaatccaacacaacacattaaaaccagctgcaagaacttgaaaccaactcaaatgaacactaaaaatcaaacgcaaaacaaacctaaccctaacagcccccatttcacaaaatcacttaaccaaatcaactagaaacttgagaataaagaagggtgctactagggcttaccttggtttcaagaacctttgaatccttactgaaattccagaaaagtgagctgaaaagagctgatctcctctagtttttgccccagccgaaagagagaaa

SEQ ID NO: 259648 - DNA, 781 bp, Cannabis indica
aaaaatgccaaaaagtctacctaaaaaaaaaaaaccctatctagataattcataaactaattacttattttcaaattaaaacaatatattttagtctatttattttaaatatatcattaatgaaaataacttgattaaagttgatctaaaattaattaaaattagtttttaacttaatctaattttcaaaattaaaaaacttcgaaatatctacatttaaaataaattcatttcgaattaatgtgggaaatgatcattaaaataaaataaaatatattctgaaaattactctaatttaagttgattaaaaattaacaaacttccgacttaaatataattttctatttaattaaattcattaaaatagaaacaaataattaagtatgttgaataaaatcaacttaattattaattctaatttattatctaaaaaaatattctaaattaagttggtccaaaattaattaacaaattaattttcaacttaaatatattttgcttatttaattaaatttctttgaaatataaataaataattaagtatctttattaaaatcaacttaattattaattctaatttaagttctaaaaaaaatatcctaatttaagttggtccaaaattaattaacaaattaattttaaacttaaatatatttttctacttgatttaaatattagaaaaatataaattagttactagaaatcactatctagaatcttttctttaaacttaaatgtgttttttctaaattaattttcaaataatccaatgaaaaattaa

SEQ ID NO: 259649 - DNA, 855 bp, Cannabis indica
taatatatatatatatataaacgagggagctataacatattgtatatatgtatatatttcatagaaagatgagggagccatggcccctgtacagcagaacatccctcctcccctacccttaactatgtctaatccaactatattactcagtgcataaaaaaacaaatgaagaagataaatcttattgttattatacagtaaaaacaataaaaaaaatattttgatagaatattttattttattagtagaaattaataaatatcaatacaatctataatatctatagcatattatacttaccttttttattctctcccaaagatcgcagaagaaaatgaaagaatgttttgaagaagaaatcaaaaaaagatatttgattatgaaagatatttaataaattaatattataaaatgtaggattatatatatacttaaatttttataatgttggaggttaattaataaaagactttttatattcttggaaagagaaaagttagcaattaatgtgggagagaatgttaattctgttaatttagctgttaaggttaacataatttatattgaataattaaattaaattaatgaggtggctgtaattaattggtgggacagggtggagacagcatattggggacaggtgattttttttccattactattatatattttaaggagtcaaatcgcggctatgtttaacgaaaaccgacaatttggagttggtctagttgctagagatacacaaggaatactaatcgaaggctgcactaaactgttccaaggccaagtttctgctgctacagccgaagccatgggaatccgtgaggccctgagctggatcaagaagaaacgttg

SEQ ID NO: 259650 - DNA, 722 bp, Cannabis indica
taaatatagaacttaacaaaaaataaaaataaattaccgtaaatataaatgctaaataaattttggaaaattctataatacactcccttaaaagagatgcaccgatacatctctatccaatttagtatccgaaataattttttagtcaatttttttctcatggtcatgtaaattataatttattaagacatcttgaaaaatttgaagaaattcagaaaagtcttaacacgctgaaaactacgttcaaacagtatgttacgcgcgtgactattttattttatacacgtgtaaaatagactgtttaaacattgttttctatattataaattatttttaatttctcaaaatttcgtaagatatcttaaatagctataacgttcactaagatgaaaaacaattacactaaaaagttcttctagatgccaaaaacaagtaaagggtgcatcagtacattccttttaaggaggtgcatttttgaatcaccgtaaaaaatttaggctaattgggatttttacccccaaactttgacatgtaccaaatcatgccccctgaacttttaaagttgttaaaaatgccccttgaactattgagattgttgaatttaaggacttttatccaattttagtaaaaaaaaatctaacgtggatgaaagttcaggggacatgatttagtactgttgaccgagattttcggcaactaatataataataatatttaagaaa

SEQ ID NO: 259651 - DNA, 819 bp, Cannabis indica
tgttgccttccctgatgcagatatatcttttttgctctctcgtagaagtcttcaatgtcatccaattcccttttcgacatattcccccataatctactcccagggcgtattccaggagctatggtgtacttatgttcttcgttggacattcttcctactttggagactttgtcattaaagcgttggatgtacccccttaagccttctttctcccttgctttacattggtgatacttgttacaggcataatgtaatcactcgccgcttgatgttgttaaaggaattcctctaaaaaaatttcccacgatgtaattgttccaggcccatacctcttgaattacttgtatgcgactccttcaagtttaatcataaagcattgcaaccttgccttgcaagacaccctctttatcttcattagatcactaaaagctcctagatggtattttgggtcagtcgtaccatcatatggtgtcatgcgaggctccttgaaattgggtgaaagtggttccatttgaatttccctcaagaaaggggactcctcctcgaattcatcatcattcgaatcttcctttgaagttgtagccatccttcgacgtagatcctgcatctctgcttctagctctctcattctctttttcactctttctcgagagttggtgaacgacacttggattttcctagcaatttgcatggagcctgcgggtagtactcctctcatcccatcgtcgtgcgcctctctatcatggttgaggggagataccttctgctcgcttttctcttgagaagggggtgccagtgcagtgtccccttgcatgagat

SEQ ID NO: 259652 - DNA, 644 bp, Cannabis indica
gcaaaaatagtgaatgagctgtatcatctcttatctcaatcatctttgtaagcaaaaagatcaccctcaaatgttgttacatcagtagtgatgttcaagaacacacacttcagactaaacctaatcaaaagtatcaaaactaaacttagatgaaactagacaagaataaacttagctcgagaatgaaatcatgaatcttgattgattaagaatagtcaatagtacacaatcagatatattcaagattataacttaacacagtgaataattacaaaaagaatgtctcatactaatataatgtatttgaaaatacaaaataacaataaaaaaaatactaatactaacaaaataaaataaaataaaaagtagcactaagttataaaactaaaaagaaaaacattaactaaaataataatttaatagtcaaattgatcacttatggattttagccttgaagattattaaaatattggttatatatatggactttaaatattacgaaaatcttaatattttttagatgattgatattattggtgagaacttttttacataatttttttttttttgcttaatttgaaaatgattgcgtatgttatgatcaactatagaacttcaataattaagatttttttttaaaaaaa

SEQ ID NO: 259653 - DNA, 571 bp, Cannabis indica
ccttgctcttcagtctatttttagcagatgtttctgtctaataaagattattttttttaataaaaaataatcatacatcaaaataatttatgattttatttttaaaataatagatttttattaatttttttaatattataaagacattaatcattattttctcaccattatttgggagctagtactacatatttggtataataatagtgagataagattttcatcaacaatttctacaaatcgaataagatattagaccgtagcttgttctggattttataaatcttatcaacaatttctaaaattagaataagatattggattgattttatagagctaattttcttacttatttataaaaggtaaagatcacataaccaaaactttttccatctcatttttatagaaactaatcaaattgaggaagattctagagtatgtaatgtcgttttctaaagaaaattgctaaaaattattattggtgtctaatactattttcggtattatatcgctattgatgtaattaaatatcaaattctatataacttaaaatataatttttagggaatat

SEQ ID NO: 259654 - DNA, 271 bp, Cannabis indica
tgggcactactctttcactcaagagattcggttcaataatgaaggagagagaaagagaggtggcggctaggttaggtagaaggcactcaggtttttctctcaaggaataagatgcatcatcttttcctgaagccatcactacctatttatagtatgccacctagggttaggttagaattatttggcattaaaataatgaaaatattaaatgataaaacctacataagtggccagccaaggctatggatattgggccccacttttgcaattt

SEQ ID NO: 259655 - DNA, 513 bp, Cannabis indica
aattttcaaatttaaacctcaaaatatcaaaaaataataataatctattaaaaaataaatattattaatttagaatattttttttttaagaaaaatttagagtattgatatttaagtttaaatgataaaattaatattttaattagatattagggtttgaaaattcaaaaatttgaaatttgaggaaaaatcccacaaaattcgggttttggggtgtggctcccgaggaggctgccagatgcccagacgcgcgcgcggagaggggttgtagcagggtcccgtgtgcgggaaacatcagcgcctgcaacatgcacacgggcggcattgcagggtcctgggcgtgtctgaaggcacctgaccgaggatttcagacaattcttgtctgaatccgcgcgtgcatcacctcggctcgtctgagttcctaatgcgattgagcaccctcgacagccatgacacccaatcttccaaaattcataacttcctcaatttttatcggaatcgagttctgtaaaa

SEQ ID NO: 259656 - DNA, 554 bp, Cannabis indica
gaacataatatattgttgcagtaacgtgaaaacaacattgtgtttaaaacaatcatgaaaccagccgtttgtatttttgtaaaaaataacaaaataaaattagtccttaaaaatgttaaaaataagagttctaagcgtacatggagtaaatttaaagagaatgcatgttgcttaatattcttgaagatattttggtgaaaagtggtaatagatgtgataatggaactgttagactcaggacatggaaagagataaaaaaggcattgagtgttttgattcctaacagtggtatatataagagctaacccacacattgagaacaattatcgaatgttgaagaaacaatacagtattgtcttcgacatactcaagaactttaataaaatattaaccttgggacttgggcagaaactcgtgttgataacgtgttataaaataatattaaatatataagaagaaaagaagaagttgatgaagagaaagagaaactgaatgagaatttcttagttgtttatttcaatgggatgaactcatatttatacaaaaatatgact

SEQ ID NO: 259657 - DNA, 908 bp, Cannabis indica
aattcatattaggatgttaattaaacatacttgttagtaaatctagatcctggtaaaatatatccaacacttgtacctctatcccctttgatgaaatcctcaaaccaacgttcgactgccctacacccgtgccatccctttcaccctccgtaattaccattttacccttccccattactgccggcgaagctctcacgtcggagccaagactaggccccgccactttcattctcagaatcgttggatcaaaacaactcctaatcggtactccagctttcaaccaggctccatacaaagggactgccctcccaataggtggataagcgtattctaaggaccaatcacacttcccatacgaatgagccaggtgaccacaagtaaagcatatcgccggcagcttacggtacttaaattgaacccactcctttctatcacgtgaaatattcaagtagaatcccgcgacgagtttttgatcaagcaatatatccacttgaaacttcaagaaacccctccgagcgatgacgttccttggcgccctttcaaagtccacatattctcctactttccttgcaatgacttctgtattctcccatgttaggtatggcgttggaagtccatgagcctccacccaatatcttgccatgttcatattcgtattctcccaagtgccatctttaggccagtctctaatgttcaataatgccccattaactaaccatggcctcttcttcaggatttccttcttatcagcttcattgtcaaagaagattccccacaaacccggcttcaaggtcttcattctccaatgtccttccaggttccatatttttgaaagtatctccttcactcttccccttgctacgcttcgtctgccaaagaccctcgccaggacccccttccttgttacc

SEQ ID NO: 259658 - DNA, 1121 bp, Cannabis indica
ataaccagttttattttagttataaccagtttgagttatttcgtgttatttatttttattcattataattctgttttggaaccggttatattttaattattactggtttgatttattttatgttatttgtatttatttattatgtaatataaccggttatatttcaattataaccggtttgagttattaatttttattcatataaccggttatatttttagttatatctgagacatttactttggtacttttccagcgacgttgacttttccgttaactttttcggcgatgttgacttttctgacgacttttccggtgaccgtgatttttcctgcgacttttccagcaaaacctattgttgttttataaatatgggatttctatttttttttttacaaaaatatgccataaaaaaactcatataaatgtcaaaaaaattaaaaacccataatcctatagtgttatttatttatgccataaaaaaataaaccataccctcaattcccatatttatgaaaattcctctttagaaattcatatttaggatgttaaataacatacatggtagtaattctagatcttcgtaaaacttattcgaacagtatatattattttgttagcataatatatatattgtattaactaactgtttctttagtttactatgttttactggttttcagttagttagttttgacagttagtttctttaactaactctcttgtatcttgctttgagtgatataaataaagggtcttagctcattttgaaagctaagctattcagctaaattcctctgtttcttttctttctctgagactttctttctttctgttcttggtttctaccattgtcaagtttagcttgtttagcttctacatggtatagtcgccttcaatggagtcgtcgattcctccctccgatcctcctcagacagtcacagcacctgcaccagacgtgtctgcacaatccgctgcttcttccccctctgtttggaatccatttttgagttctctttctacctctctcacgatcaagcttgatcgtactaacctcctttcttggaagtctcaggttgtgcctacggttatcggccacgatttggacgatattctgttca

SEQ ID NO: 259659 - DNA, 921 bp, Cannabis indica
gagtgagacgggacctgttcgcttattcctgaaggatttccgtagtgcgaagatgcgggagccaatgcctggctctgattatatcttggactagcggagaattgtataccgctcatttgtggagtaaccgaaggtagggttcctgggagttggactccaggcacgtatcctgccattccggtcgaatagtatcctccataagccactatttgggcttcttctaagttgatgtacttttggaccctcttcttgaaatcttggagattcgcagctccttcttgctgtaattcgtttcaaaatggagcccctgtacggatccttgcttgaagaagcgcaagctgttgtccgtcattaactttcttagtctttgaggcttcttccttgaacctctttatgaaatttttcaatgtctctgtgggtagttgcttgatgttagtctgggcactgacctcgagattaatctttctcgcggcgacaaattgtcttcgaaaacttatttacaacttgttccagcagtccactgatcctagttccaacttcttgaaccattcctccgcggacccactcaatgttagtgggaagcacaaacacttggcgtcattgctgactctcatgatcgtcattactcggttgaaccgagataaatgatcgttgtggtctgaattcctggtgtaagctgccatttcgggcatcttaaagtttttggggagttccgcctccaaaatgtgtctgcgcacggttcccggtcctcacagtcagagtctaaggtgtcccctttttgtcttcgggagactcgagcaatatctttgcatagtatggcaagctcagccattattccctcgttcagcgttcccgtggaggccgtcggtacatgtttctttttgtccaagtgatcccgtaaatcaccatgcttcccgttga

SEQ ID NO: 259660 - DNA, 473 bp, Cannabis indica
atttcccatttattttttaattgtaatcggtttaaattattgtgtgttacttatttgtattcattatattatataagtggttctattttagttataaccggttataatttaattataattagtttgagttattttgttttatttgtttttattccttgtattacagaaccagttatatttcaattatatccggttctatttttgtttatatttgagacatctacttctggtgacttttttcggcgacggtgacttttccgacgacgatgacttttccggcgaaagtgttttttcggcgacttttctggcatcgatagtttttccggcgccagtgactttttcggcgacttctccgtcgccgatgaatttttcggccaaactcattattgtttacaaatatgggattttcatctttttttacaaaaatatggcatgaaaacccatataaatgtaaataaacaaaaaaaaaaaaa

SEQ ID NO: 259661 - DNA, 572 bp, Cannabis indica
aagacttttgagactacattggtggagctctactaaaagcagtcgatatactaacatttttaattataatctcaaccaattatgttcgagctttactaacaccaatcaagctatataatatatcaaatcgactttggaaatctcatacatatttggtgaagttctacccatttacctcatcatttgattgagttgttattgtgcatgtgggaggagttggttcctttaaaatcaactgtcgttggattgattattttggatctataatacttagtattttgcttcgtgccattgaattaccaatatatattatgttagagttgagcttggatgattgagcaattgcacaacctgaaaatgctaattataagtaaatatgcataagagccaactggtgcaaaaatgagaaaatatcactcttgcataagaaaacataatataatctttaattttaatcgttaattcataaaataatgcaatattaatatagtaatgaatttatttaaatttagataacaaaataaataaaatgggatttcttcctaaaataaaaaaaaatacatgaattagag

SEQ ID NO: 259662 - DNA, 540 bp, Cannabis indica
agaacctgaagaacaagatcttgatcttgaactggagcaccagccacagtgagcacatcagcaatagtctgaactttctccacatactcgaatatggatagattgcctttgtgaacatgagagaattggccttttagttgtagtaatcgagcttttgtttggctggagaatttttgttctaacgcgcgccaaagtgagtgagacgaagtatgatttgcaacagatgcaagaatgacttcagacatggaagaccgaagccatgagagcagcaattgatccttctttttccactgagtatactcagaatttacagctccattgacaagattctgaggtggcggtgtgtcggtgaagaggatttcatccagatcatgtccgatcacagttggtatgacttgagatttccaggagagaaagttgttacgatcgagtttgatggtaaggttggctgtgagagaatgagaaaacgggttccaaggaggaaccacaggaggattcgaaggagtctccatggcaacagtagcagtagttccaggatca

SEQ ID NO: 259663 - DNA, 521 bp, Cannabis indica
ttttttttttcctgcgatttcagagtgaggaatgctttcggggtgcgatttttgggcggtccgagagagtggggctgggtcggggtgggtgcggtggttcaccgtgggtggtgtcgagttttgggtggtgcgatctagcctcacgggttgggttttcggtgtgcatacggttgagaggctttctttgacagagaaaagaggaagaaagagagggttgaaaataatgagaggggtattttagggtataggaaaaagtgatcctactttttcaatagatataagtattagtttaaaaaattaatttaggtataaaacatggatataaattcaaatttcccttctataatctattggtgggatagaaattcgaaattagaggttttattgtctaatttttctgtatttttgtgtgcctttaggattgacaatgaatttttttaaatgaaagaaaatcttctatttattgtgtaacataattatattgttatttttaatctttatggattactctgacaaaaaaa

SEQ ID NO: 259664 - DNA, 823 bp, Cannabis indica
ggggggatcatgcaaaggagtattatttctccaacttaggagattatttaggtcagtcccagatgggttctagacctccggagcctgttcccttggatccgtcggcctatctttcttctagctggttccggacctcggacagctatctcggggacgctgcagccagtattaagattcggaactttgctagggtcgaattagagagtcagggtaggactagcttgattgctttttttaagtgtttactgctttcacagatattctaacacttactctgttctcttgttgtagcagctaatccaatggaggcaattttggccacccttgccggagctcacactcctaatgctccccttcctccaacttcttcccagattgttaccccttcgaaggcttcttctagtgcccctccagacactattgacttagtggatgaggtggaggcacttcctgaggaagctaaagaagctcaagaagagcaatgggctcttcctgaggaagttgaagaaagtgaagaagagcaagaggttgctctaatccgcaaatgcaaatgcaaatgcaagagggtagctgaggagacatctaagcggctgcggagagtggacactccggccccgagccatgattccgggatccctcccaaggcgaaggaatttatagtgcctcccaacatagtgctgactccggttcccggagatgaggcgaggcaggagcttcggatagccaaacataacttcgccatggatgagtactcccgggggcatgctgaagtggaggccttgaggaggattttgcgaactgagatgcaaaattcccttaatga

SEQ ID NO: 259665 - DNA, 1337 bp, Cannabis indica
aaaatgcatccaccggaccaagatcatacaagtttctgaacagatttgggtctatattactataaagtcgtgcgatttggtctcaaaaatgctggggcgacataccaaagattggtaaacaagatgtttaaagaccagatcagacgaaacatggaagtatatgtggatgacatgctcgtcgaatccaggaaggttggggggcacatagatgacctggacgaatgcttcaaagtcctcaagaaatacaacatgaaactcaatcccttaaagtgctcctttggagtcagctctggtaagtttctaggctttattgtcaacgcccgaggaattgaagccaatccagagaagattcaagccctcctggatatgaaatcgccaacaagaatgaaggaagtgcaaagcttaactggtcggatcgccgcactcaacagatttgtttcaaaatcaacagacaagtgtgttccattcttcagcatcctgcgatgaaataagcaatttgagtggacggaggaatgtgaaaaagcttttcaagagctaaaaacgcaactcgcaaaacctcctgtactctcgaaacctgtagacggagaagaacttaagatatacttagctgtaacggagcatgccgtgagtgttatactgatcagagaggaaaacaacatacaacatctggtctattacattagtaaaagactcattgaggccgaaggccgatacccattgatagagaaactcacctactgcttgattctagcaataagaaagttaaggccctattttcaatctcatcctatttgggtgtacactgaccaaccgttacgccaaaaattgcaaaagccggacgcctctggacggttactcaagtgggcagtagaactgggtaagtatgaaattactttccatccccgaacagcaatcaaaggccaggccttagcagactttgtggtagaatgcacaggcaaggaagaaagcatatccgaaggcaacctcgagccagtacaaataccacagccaagtaatagtgaagacaagccgacttggaaactacatgtggacgggtcggctatagatcaactgtccggcacaggaatcgcccttgtcacacctggggggcaacacctgcacgctacagtcaagtttggatttaaagcatccaataacgaggccgaatatgaagctttcatcgctggactaaaactagcccgggagatgaaggccgaacatattgaaatctgtagtgattcacaggtggtagtaaatcacgtatttggagatacgaggctcggggagaaaagatgatagcatatttgagcaaaaatacacaatttgctcgcacagtt

SEQ ID NO: 259666 - DNA, 559 bp, Cannabis indica
gaagcgggttcaatattttcttttggtgttctttcacttatgttaatgatcttgttttatgctttatcgattttaagcagaccaacttcttcagagtatacagttggaaagaggagggagaaatcagagagactatttaagtctgcggttatagatggaaagctcaaagtggccaggttaatgtaaatgttgaagaatatgtccacaaaatatacagcttcgtattgatactgttattgtttcaatgaatagtatatgtgcacaagttatatagaaaggaaaagcaacaaattaattgtacacttatgctactcgtttttgctatatcatttgtagagattaaacaaactattattttattttagaattgcagtggtgtaggtcttagtttttgagttttggattcagatattaggacaatatcatagagattatataaggtaaagttatcacgtttgtctctgtttttatgttttattaatattaattgttttctttcattgaatgtgacaatagttttctttaaactttttttctataaaattaattcttgattata

SEQ ID NO: 259667 - DNA, 1195 bp, Cannabis indica
ccggtagaccggttccccaacctgacttttggttctggaaaatcctgggagccaaccagaattccggttcttacaggcccctctgaacctggattccgattcagtgcaggaatgaccaaaaattctataactgaaccaaaacaaccccaatccacatgaaaccttccagacctgttctaagcatcctaaagatcaatttgaaagcaacaaaacacaacttcatgcacaaatacaaaaacctccattgatgagccaagcttgagttcaaaaactcaaagcttgctcatcccactaactagctatcaaaacctactcaaatcaccttaataacatactttaactactaaaaacataattaaactccagccgcaagaacagtaaccaaaaacccaaaaacatgcattatctttttcttcaaaaataagaaactaaagagggaactacaagagacttacctagagttcaagatcccttaaaatttgctggaaccaacaagaaaaatggagaaaaacacagtaaccccagctggtttggagggtttcaaaagagagggagaacttgagagtgaaatgtaatcttttagaaatttcttattttcttgtaaaacgaatagattaatctttattatcatactaatatcagcttataactcataaaagaaaaccaattaattaataaaactaagtccactaaaggacaaactactaatggaaaaaagactctgttgccctttccctaccaaaaccacttaaaaggcactaagggtattttgggaaattctaaattcccgactaatctcgacattcctaatgtctaaatatatcgtcccgctaaactaaaatactacgatgtgattctactaagccatacaccacgttccaatgtggtcgggcactgaacatgcaacattatgaaacttctctatatgacatataaaatgaattctgaattaaaataaattatcataaattaataatttagaattaataactaattttcataattaaatcctaattatcctctaatttctaaatttaagttaagcggtcattacaagttaggcatctcgatacgaattctaccgcattcttctttattccgctccactagaagtaggttttaagatcttgatacatctagctggtgttgggatgcagggaatatggagtggtataatctgttgggttttgtgccc

SEQ ID NO: 259668 - DNA, 1738 bp, Cannabis indica
tctctctctctctctaactcacataccacactcattgtagtgtggtgtgagttttgtgatcatccatgtatcttcacagtatcttataagttgagaatagactctgattacataattatactcatccaataaaatttaataggccactttattcttgagtgttgagactagcttagaagattgtggtatgaactcttcagcaagttcttagataggatgttcgataaaatacgaaaaagatagcgaggatcccttaataggctacaagaggtattatctcactattcattagtctagatttaatctatataaattatgttgagatctttgagcttatagttcatattagattaaattattttcaatcatattatgcttctctttttttaactctaatatagaccataaaaatcaataattggtatcaagagttatctttataattgtatagattaaatattgtattggatatttatgtatatatatgttgttatattatgaattgatggatttaattttttatgcaagaataagaattgttaattatatgataaaattgggttagaaattttacagtatttattagaaaaatatgtacaccataattgtggtataggattttgttgtacttttttattacaatttatttgtaaatttttgtcaaattatgtagtcttatattccacaaatcctccattgatgagtgagttcaggtttaaggagtaaactctggcctaattgagttcgagtttactcctagtagcccatgaagattaatatgaagctcatagtcatacacaaatagcaagatattcgagcaaggtcactgatggacacccgaccagctcgatcgtgtgatcaactcgcatgcactggccagaagatgtgagttggcaatttcataagtgatcgatgtcatctccaagtttgcatgtcacaaaccaatcctttttttgtgggattaatttgtaccttcagagaataaaggcaatcagtctagatttcccaatttcttcattgttattatggaaacatgatagttttcaattttatttcttatagattaagggaaaccattactatgtaattagcccttataaatagtggtctcatctcactattcatggagatgaatttattcagagaaaaaacactcaagagagacatttcgttccaagagtgaatactcagagatctttgtaagagcttttgagagagaatacttcattctttatctcacaagttcataaaacgaaaataggagtagattattaccattatcacgggtcaaacctctataaattctggtatttctttaactttttattatttgatttttattatttatttattcttatcgctttaattaagactcactgtatttggctaaaagggaggttaatattttggtgctttcattgagagcaaataaacaagttttttgtcttaagtcttttacaagacacatgatgtttgtcttcattcccaagtaaagggtgagtcctatgtgtcactcgaaggggggttcaaaatgatacagtcatcccaatggtgacagatttgagcatgcaaacacttggaaacgtaagagatccacctgtgacagcccatagacaagttaatactcaaccaccaacagccggccatggagtgacttctcctctggcttggttcactccagacacaagaaatcgggaataccaatacgacaacctagaatactgttggaaattatttt

SEQ ID NO: 259669 - DNA, 858 bp, Cannabis indica
gtacttatgccactatttaccccttagattacatataagttagaagtgaatgaatcatttccttatgttcttccactttaaattttggatccgccactgttcccgacacccgaaaatatcattactacacctactagtcctctctcacttttcttctacataaaaagaaaaaaataacttaaaagtaaagaagaaactaactcatcatatccaaacttctaaaacccatcacacaaaccttttcctttttcctttttcattttctttctctttctctctaaaccctccattttccatccatccaaacaacacaaaagaaaatgttagatccagccaataacgatttactcccaccaccttcttccccaaccaattcctccatctcctcctccgatctcgacacagaggtaactatccaaatcaaatagaaaaaaactcttcaaacaattacgaatcttttctgattttttgtttctgattttacagtctacaggttcgttcttccacgatcgaagcacaactctcggaaccctaatgggagtcagttttccagccattacattccgagctccctcccaacgccaccgcgaaactcctttatcaacttccgccattaacggagcaagaacaatgagtggatctcgaagaaggtctaacaaatccaatgccacgtcatcatcatcggttgcggagagacgaaggcggtggtggagtctttgcagagatgagaacgatgcgaaacccacggcttcgttgggagattttttggagaatgaaaggagatttggtgacggagctttttacggtgcgacggctgagcttgaaggtgttgttgtggttaatgatgatgatgatgat

SEQ ID NO: 259670 - DNA, 1701 bp, Cannabis indica
aaataatttttaagttatgaagccaaacaacctcaaaggtttttacgtggttttgcagttaaaaatctgcatattacacgagtcaatcttattaaatttctgatgcagttctagggctttctttgtctaatgaatttttcgtccattttttagtataacctgctcctatttataattacatagaagggcagttaattataaatttgactgatattttacaacgatcatcccctgaaattgtgggatttgatttcatcccacataaaataaatgcgattattatttgagaatcacacaactgtgattggtccgcttttactaggtcaatttaaatgtgtattaaatacgttgtaaatcgtatcgttctgggacatctcgctgggaacatagcaacaataaccttggtagcaagctagagcttttcccatatctttccgaggttgataatgtaaatcttgtcgcttctgggcttgaagacataacgctccatctaaaaactgcatcttggtgacaaggtgaacttcggcagtcaacatcatttgaatgtctgcttctgtgtgagagaactgactcaacggagctgtgaatctcattgaaagatgtttggagctgattagtgaaggtccatgagcgcgccttcctatagcgagatggatgcctcgctgttagttgttgggtttgctcgactattatacttagtttgtataatgtgtattatacactaagtgtcttagcaatcatcatgtcttgcctacgtctcttcatgcgtagtgaggttgatgtctcgccttgtacatccgatgtcgtatggtttctcgttaatgcacgaggcaacagtttgtatatctttatctcgcgtaagaccttactgttagcaaattataaatatactctgtgaattccgtatttaatgagttattctattttctaatataattatcattacatttgttgattcgtattcttcccagtttgacacgtgtcttcctctgaagataacaattgcccttaaaaagttctgtttaataaacagtgctttttaatgattaccgagggtatatttgtcataatcccttttgtaaaaatgcatgtcctctgattttggcggttttgtggtttcgagggacatcaacaattaatgaccatcgatcttttccattcctctttcaaattctaccagtaggattaatcatctttctgatctaatggagattaacccaagagtatataaacgaaaaaggaaacatctttgcattatcttttccattttagaaactctgagaatttttaaagcttctccgtcgaaaaaccatcacaagatttgctcaaaaatttgcatgccctctcatccaatttagttttcgacttcaagcattcggatggatcttcacgccatttgttgattaacaaactacagagtcgttcagtatcccaaccaccaactgcaaacagtaagtgattttctctcaagtttgttgtattatatttctgagtttaattgttgctttattcgtctgtatcgttgtcgtttcatttggttttagtaatttttagggctcaatcgtgtctagataaaagttagggtttagaaagttcgtaggttttctagaatttccaattcgccaccttctggtttgataaatttcttctaggaattaggattgctttctccttgcagcaatgtgttgggttttgtgccct

SEQ ID NO: 259671 - DNA, 618 bp, Cannabis indica
atttatatgcgatatttgtctaactctttctgttaaatctttatatgcaatatttatgcgatgtttgtgcgattattcactaatttatgtattatttttgcgacttatgtgcgattaatatgcgatttttgtgcgattaatgaaacaattttggtatttttcttgtgcgatttcctgcgatatttgtgcgacatttatgcgatacatatcttactgttttcttttgaaacacaacaaattgatgccatggcgcacttattgagaagaagacggaccctctacccaaaagtctacactcgaaaaggtgtagttttggacacatctgctccacagatatttgccatgtattggaatttctatgagggtgacaagagcaagatgaaatgggatgagaccgctatgagttatgtggaggggatacagcatagacacttgccatgttggaagaaccaggattacatctacttcgtgttgaaccttcccaaagagcaccactgggtggcagttgaggtggatatcgacaactgggagatcattgtatatgattgtgatatcggtgctacccttgaggatgccatggagtcatatttgaagccttacagcgagctatttgcaaat

SEQ ID NO: 259672 - DNA, 1370 bp, Cannabis indica
tagtgacgtactcatttcggtaattatattagttactgaaatatcatttataggtagctaagtgttggatataatacattgaagggtagaacggtaaatttatccttactcgatgtagatcatctatagaggatcattaattatttgaattataacaatggataaataatagcgtatctatatcttggaacatatagagtgttctatataattaagatgcaattctaattctatagtggcgcaaggaggaattaataagctaaagaatttacttgataaattctagaactacttattggaagcttaattatataagcccatggtccccacactagttgagataattactacttgtagacttagctaattagttttaattaatcaattataattttaaaattagactatgtcttaattgtgaattttcactaagcaaggacttaattgtaaagaaaagaggtttaagagtttatttgttaattaagagattttctaaagtctaattaataaataagttatatagcaattttatttgataattaattataattattaaataaatagttttgacatttataggatgaaaaattagataatataagcataaagtgaaaagaaaagataaattgttgaataaaatagtaaaattgtaactagtggggtccaaatcctatggtcggccacatagtgtcaattttgctgttattatcttttttattctatataattgaaatcctaaccctagtttaaatactataaaaggaatatgatgctctcattctcatccatcttgcttaacttagttttctaactctgtcaaataactagaaatttaagatcctccttcctttgctatttcgaaatcctctctctcattcttcatcaatttttaagcctgttgtaatagagtagatgcccacccgtattaagtcaagtactcaatcatagtgtgaaagattgtgaagaatccaacacctgaaggagatccaggcttagattttgttaatactatgcgaaagaaaggaacaagagttagagatctgagtgcaaggagccataacattccactgccaccaacgtaaggtttttttttactttatatgtgtttatttttattactttaagattcatgtttagggttttgtattgtagaatataatcaacatacttgttagtaaatctagatcctgataaaatatattccaacaactggccttagagccatggtaataatttactcatttaaaatgatgaatgtgtgatttgaatgtgattcatgttgatatatgtgtttatttgatgattgattgatgtttacaaaatttttacaaaatataattagatttacaatatggaattattttatttgg

SEQ ID NO: 259673 - DNA, 807 bp, Cannabis indica
tggaagttgggccacgttattgaacccaatcaaatggacatctcacttggttaagtttgtagtaacttgggcttttacacaaactttttattataccactttgctcaaatctgaaaaataatacacaaattaaaataaattaaatatttccaattaaaataaattcaccattaaaaataaggaatatttaatttatattaattatatgtgcacaaataaaggcttaaaatgtatcaatttgaacctttatcacaacccccaactagcttattgctagtctctagcaattcaagcgaacaaaaatagtgtcaacaaaatattttcaggtcaaaatttttaaaaatagcacaattattcaagcaaaatgttagtaacaagccaataagaactatacagaattaccttgaataaatctagagtgtgagtgtgtgcaccaaacctgaacctccttaccgcaaaccataacacataaatgctttcgaaaaatgtaccaagtagaagtctcaactccattaccctcacaggtttttgaaatatttattcatggctaaggatttcactcatggagttggaagttgagaagtgagcactcgaaatggatagatcaatttaggacaaatatttgaataaatattgaaacgaagataagttatgaattatttggacaaccaccataaagagtaccacaaaccagcttttcgggacttttaagcgaaaatagacaatcttttacatttattctaggagccataacaaatgaaaaattaaatacaaacttttctttctttctatttgtttttttttttt

SEQ ID NO: 259674 - DNA, 1393 bp, Cannabis indica
tttaattccaaggtcaaagagcaaactttgtgagtaggcgatttggttctaagaaaggtcatgccaaacacaagaaacccatcacatggagtttttggtgataattgggaaggaccataccttatcgctgaaaaaattggcaatgaaacctatcgactttcagaattcgatggcactgtgatcagaagggcttggaatggtgaaagcttaaagtattattatcaatagtactcgcactgtaattatacctagccaatttattttgataaatgttctaagtataaggggtatagcctaccatagaaccacttcgtactattgattactgttataatgaaaattttattgaattctcgaatgttaaaaatttttgcgagttttagcatttttaagttattacaccaagctataataatattgtgaaatagattaaacaagtctgtaaaatatgcgagtaccccagtacttcttaaagaagacagatatatattgtttaaaacaaaaagaaagcaagttgaaatttgtcccaagtacaaaacgcgagtactcgtgtaccgctaaaaggttcgataattaataataataaaaacttggataaattaagaagttggagaagtagagccatctacgaccttgctggcagctccatcaacaacttcctccgtatcagcagtctccgcttccttaggaaaaaggtttcctccgcatccttgagtttgagtaggcgacatggcgcgaaaagcctcggccatctcagttgcttccgctccgagaacggagaagttaaagactagaattttggataaggtcgtataaatatagtcagaaacagcttgttcatactgtttcttcccattttccttttcagtctccagatcgcgagttaattcctcaacccgcgactgagaaaggttggccttattctccgcctgctctttggctttttggaggttctcgatgtccttttccctagaagtcgcatcttgcttcaacttcctcacattctcctgaagaagagtgttttgcttctttaaaaggttgacttctttggagccagggacgaacgccctcgagaacacggtcatgaactgcgtggccagttctgcagaaagtgacatcatttcctcggcgggaaccgcctcgaccttcgatacgaactcatcactcacgaatctgtcttagagggtcacaaagtcgcgagccctaacggcaaggtcgatcatgactttcttccccttgtctttagcaggtctgacctacttcttggaagagtcagctgcgggagttgcgacgacttcactcttcctcttctgcgggatgataggagatgtcatcgcagttccagccttaggttttcggttgaggactggagcttgcttcaggaaagtcatct

SEQ ID NO: 259675 - DNA, 535 bp, Cannabis indica
caaagattgcacaataattgaaaaagtactgtaacgtgccttagcattagggcgttacaattatagttcgccaaaactacaggccacatactgtaaggttggctcatgttgccaaacgaattaaagccatcggcagctaaaccgagacaaacatttcgaggttcactagcaaaatcaggatgtttggcatcaaagtccttccatgctgcaccatccacagggtgtcgcatcacaccctcatcttttgatttaccactgttgtgccataccatgaattttgccgtatgccttgaagtatacagtctcttcagtcgcggaattaacggaaagtaacgcatcaccttatgaggcaccttttttgctcctaaattttctgaagttatccatctactagtgccacagactggacatgaatcttcatttgcatgttcattgtaaaataaacagcaattgtgcttgcacacatgaattgactcataccccaaccctaattttttcaattttttcttggcatcataatagtttgatggaattt

SEQ ID NO: 259676 - DNA, 1237 bp, Cannabis indica
tttttaggtaaaaaacctgggtaacttcatagagaatgacctgtaagttggcataaccgcatacggggtaagaaatacttgaataggcactgtttcatgctttgaatactcgcgggtattcggatgaacaattcgaatactcgcatatttgcgagatttacttacttctgattgttggctagatcttttaggattttatatgctgtgaattaagtcgcgagagcattaaccgagtttccaaatggtggatgtgtcacagtattctaatggtcatatacgcggttatatgtcccttgagatactgtgatacacccagccatttgcgacatgcgttaatgttctaatgagcgtactctttggctggtagatattctcggaacggtgggagtacctcagtaacttcagggtcatgcttgagaacgcatgccccttgagtcactgagtttctcccaccgtttctagaggtatatcgcttggcccaggagcgtgacttattcgcacttttagtattatctctactcgcatattgatggggtggtcagcattcgcaaggatgctgaccattctatcaagtgcgacattgtagtttaatgcgggtgagatcacttattttgttttcacacattcaccacgctgaaaagatcttctatctttcagatgagcgacctgtcggatagtcagctgctcggctcgggaggccacgcattcgatggtgacgaggaccaggaggaagatagctttctcccaacttcgatctcagaagaggagatcgcacctactgtaggcatagagctaggtccgatgtcttcttcggacatcgagaaaatggtgcaagagctcgctgagcctggggccattgatattcgagatagcgagtccacggtgtcagcccgcgactatcttattcattcgaggcatgcccctgatgtcgaggtcgaggagacagacgacgactggacggccccagctcgcgaatcaggcgatgaggaggaagaggcagaagggagcggtactgactcggtcgatgacacccagctgaacgagcctttctcgtgcgaggatttggtttcgagggttaccaaatcggacctcaccacctttacgaggctgaacctgctgcgacttgcgtctttgcgacctaagccaactcagagggcgcaccttccttttacaaatccagcgatcattcccacagaggatgtggtaatctcaatacccattctccgatgtggggtat

SEQ ID NO: 259677 - DNA, 639 bp, Cannabis indica
tgctgaattttttcctttgtgcaggccggtttgaagttggcttacacttactcccgggctaaatctgttacttccaagagtacggctctgtccgacaccttgagggcggaggcagacttggccaaaaaggaagctgaggaggctagggcagaaattggagatgttcggctggagctaggtgaagccaacaagaagctatttgctgctgagaagaagatctacgtgctgacaaaggatctcgaagctgctgatcgctttgaggagaccatcgagatcttatctgctgaagttaacagtcttcaggatgagaggacttctctgcggcaagttcttctttgaatgaaggaggagaaggatgccaaggtggccgaggcggacaggttgaaggagaaggttaatgctttagagacagccagcctcgagctcttcttcgatttctggaaggctaatccccgggccaattttgactacttgggggatgctaaggacatgtaccttgagtactgcgcgtcccaagttgcttatggtgggaacgaggcggctgcttcaacctccggccaagttgcgtcaacctctggccaggctgctgatgcttctcttgttcgaacaacagatcctcctgctccagttggcccagaa

SEQ ID NO: 259678 - DNA, 942 bp, Cannabis indica
catctaaagagaatcaatatcctcctaaaaacatatctagtaagaccatgtgctgcaaaattaacagttttacgaatatgtttaataaatatattaagaaaagagaataaactgataacgaatatcaccaagtaaatccgagaactagtcttgataatgttgaagcccttgaacaacacaaaattgaatcaagcaacaaccaaagcctatcatgtataaaccatgagcctatacacttaaaaacttcaatatttttcactcacaaaattgtattaagaaactctatcaaattattctcctaacattccaacacttggtaatgttaccaagtgattaacaacattcaaaatgaaccaaaacgctcaagtgacatgttgcctataattagtggaatatactaaaacattgtaactctcatttacatacttaatgtgataattttgtgagttattacaacaattacaaatttgtaacaaatttatactctttcaaatgattattaaattttgataaataataataggcctttgagagtaactgcattatctatgtaaattaaatttatttataagttatgtaaatctacttcattttatggtttaaaaaaagttctttaatgaactatgtctcctatttttcaaaaatatatttgtctattacactaatataaaagacacacactactataaataaatcaaaatttatgtgtgcaatatattttaaaagatgaagttatgacatatgagggcttcaatagcataaaatttaaatatgtttaatgctaattaactgagttcatcatcgggcttcaagaaccatcggttaagtcgttcagatgcctttcggacctaaaaatgcatagcaataacacaattaattagtttcataatacattagtaaaaaaatattcagatttctagggtaggtaatttcatttttttt

SEQ ID NO: 259679 - DNA, 900 bp, Cannabis indica
aagtataatccaaaaaaaattaaatcagtactatagtaaaatgttcatcctcgtgtattttcgttatttttcaaatttttaatggtgaatttattcatattaaatcacaaagaaacatgtagatagagttacgtacgtggaaatactattttactttttaatgtttcataacagttgcattacaattgtatcaacattttactaacaattatttcttcacatattactgttaaggtacaagtaattatcgattagtgacaaaaaaatacttacaaatagtttcttacatatacacattcacattttacatttttttagttgcaattaagttgcactgactcgcaacagatataactattgcattacagtttcaacagcaatccacgatccacgcttcttcggattgaaaccttcatctgatccaaccctcggtcaatcacccagcaaccttcgtctaatacaactttcggtcaaccacccaacaaccttcgtttgattgaaaccttcgtctgatgcaattttcggccaaccacccagcaacattcatctgattgtgtaagtgatagtgtaagaggtattttagtaattaaaagctcataaaaggtataaatgttgtccacaccttatggaggtatttttgtaaataaagtgtcaatttgtacttttcatgtaataattctgaaaaattaaacatacttttaatcccatttgagaggaagaaaaaaaaagaaaattcacacaaagtattattaatggtaaaattattatatttttatgtttagttttttttttatatatttttatgacgtcatataaaaacaacacgaaaacaataaaaaaattacatgaaagtaacaggaaaataacattcaaacaccttcaaaataatattcgaataac

SEQ ID NO: 259680 - DNA, 559 bp, Cannabis indica
ggttgcctataattagatagtgagggcctcaaatcaaaagataatgaaacacttgccttcgctcaaatttttgagccattacttccctctattttcgaatcactcttctctcttcttctcttcatattttcgaaccctatagtgatagagtaagtgcacacacacatcaagtggtactcaatcatagtgtgtaaggctgtgaagaatctagattcaagagaaggaaattcaggctcaaatcttgctgatactctgttacagacaggatacaagggttagagatctgagcgaaaggagccattattattccgctgcacccactgtaaggtttctcaaactttatatgtgtttaaattatattgttttagaaattcatattttggatgttaaataacacacatggtagtaaatctagatcctgataaaacatattccaacaactggcctcagagctatggtaatgatttactttcatgaaatatggatttaaaacgatatttgtgttgatttggatggtttcgtgatggtttatgtgcttatttgatgattgtttggaaat

SEQ ID NO: 259681 - DNA, 1229 bp, Cannabis indica
tggtaaagtagtctacagtgactacgacgtactatgcccctccttttccctttgggagttgaccaatcaggtctatcctccatactgcgaagggccaaggaggcaacatcatcgtgagctcgttgggtggagctctagggatctttgagaatctctggcacttgtcatattttctgacatagtccattaaatcctcaatcattgttgtccaaaagtatccttgttggagtatctttttggatagacatttccccgtggcatgattgccacagaagccttcatgcacttctatcatcaaccgctcagcttcagtcttggtgacgcaccttaagagtgatattgagaagctctgtctgtacattactctattaaggattagatacctagcaacctttcttctcatgattttttgcctcattcttgtttttaggcaagggctcaatttggaggtaagctgcgataggtgtcatccatgttggactgtcatccaacatgtcgacttctttagggatggtaatgcctttttccttcaagaattttattggcactagttttgccttgtcatcaatggtgttgcttgcaagacgggcaagtgcatctattgtggcattctattctctaggggatctaccttattgtatagcctttgagctgacttggcaagtcttgaatctttctcaaataggccatcattcattcacctcgagttgtgtattcacctaggacttgattcacgactagttaagagtcgttgtatatgttaaggtggtcagcccatacttcaagcgccagcttgaagccagcgatcaaggcttcatattcaatctcgttgttagaggctttaaactcgaatttgattgctccgtgtagctatttcccccaagtgttatgtgggcaatgcctacactggacaattggtcactgtagcttccatcaacatgtagtttccatgttgattcttcaggtttttgctgctgctctttttctcgcttcttcgttggctcttacttttctcttgaatcttgagagatctcaagaggtgtgttcatacattcagccacgaagtctacaagagccttaccctttatggacattcttggttgatatgtgatatcaaattggccaagttcaatggcccacttgagtagtcggctagatgcttcagatttttttaaaaccgaccgcagtggctagtcggtgtacatcttatggggtgtgcttggaagtat

SEQ ID NO: 259682 - DNA, 507 bp, Cannabis indica
atactatgccatgtcgaatatatgtatatattggcattatgaattacacgcttaaggcataattaaactagactcagcaagctagtaccttgagtttaaatttaatgcggtctagggttattaccttagaatattgtgaatccagtgaaagcatgagttagggttaacagtcttagtaaatgttatctaagtatgtagaaatgtattatatgagtgattacatagtgtgcaagttagggttattaccctaaggttatatatgttgtagtaaatattgaacacacgcatgtatgttaagagttatgtgtataagacataactaggttagacctggtatatatcaccatgataaaccactgaaagaacgtaatacatagattacgtatatacttgaatagggttatgcgagcaaggcaaatgcaggttacgctcggtaatcaaaactgaggtaaaccctactgaggccttattatttatagatgtgtgagagcaacacgtaggtctacg

SEQ ID NO: 259683 - DNA, 690 bp, Cannabis indica
acttttgtattctgttttgccgcttaggtcggctagaaagaaaatacttgtaataagtttgtagatatttttttttgggatcctgactattttacaagtttaaatatattacaagtttattttcattctgtttaatataaaagtttaaattctacgctattttgattagtaatctcgattaagggattagggtttcataagtattttgggtagcgtgcctaattatttagggcgttacaatcaatgtgataaggatttgaataaatttataaatcaaataagttatcacatgaaccaaagaacacatgaaataagtaatgaaataaatctgtttctttattgataaatgaatataaaaagattacattgaaatagagttttatttacgacataaaacctaacaaactctcactcgcattaacataaaataatcagtacattttaataaatcctagattcagtttgttcttttcaaatgtagttagagtcaaaattttggtgaatggatcaactaagttggctttagtatcaactttctccactagtacgtcccctcttgctacatattctctgatgatgtggtatttcctctcaatgtgcttgcttctcttgtggcttcaaggctctttactattggctatagcaccagtgttgtcacaaagtaaaactagtggtttttccattccaaga

SEQ ID NO: 259684 - DNA, 602 bp, Cannabis indica
tacggagaggtactgggagtgcgcggtatatcactcaggggtactcaggatatgaacaaaccctatcaatactcgtacatcgaggtacgtagtgcatgtggtatagtggctataccctagtatggaacgttcgtactcatctgttaagccttgtaaataggtgtatgggcgcctaagtacaagtcggaaattacatgatatgttatatgattttcttactgagtctgtcgactcacagttctgcttccatgtgtaggtaaaggaaaggcgaaagctgaacaggagtgaacctaagctaggatgggattgtacatctcaaagcagcgcgacctggagtgttcggtctcgagacatctgggaattgtattttgtagtcgctgtgcgacctgtaatgtatgtattttggtatattaactttaaaagtttgaaaacgggatcccgacgcttgtaaatattttaatatattataaagtttattaattaatataaaagttttaatttgacacatttttcaagaaaattctttgactagcaaagattgcactgtaattgaaaaagcactgtggcgtgccttagcattagggcgttacaattttggtatc

SEQ ID NO: 259685 - DNA, 778 bp, Cannabis indica
tcttttagcaattaatatttataaatttttttctataaatcccttctataattattttaagggtgttttttcataaatgtacaacaaaaacaatataattacaaaaaatgtgtaaaaaaaattattttaaaaacttatatattttgcaaacttattacatgaaactatacattttaatcattaaataatataaataattaataactaaactaattaccataaattatttttttacaactagaagaactaagtataaggcctcaagctgaaggctaagttgtatatgttcaaataccattgcactagagtaataattctacctacaatactacactattttgttgctcagtcttaaaacacttttaaacttctggtcaatattatgggtaatactacaccatcggttttcttctccataacccataagctatacaaatgacctcacccaaacctttactactcctctctctccgtctctccacacacttgtaaatgaaggagttgcatatcgaaatgggttgctcttcctccctaccaagtaaatatcactaataatctcattctagttttaatccattttgtgattgataggcataagggattaccagtgaaaggtcttcaagtgaagggtcctttaattatgtacaaaacaagtcaaagaaaggagggaggagtttttctattatagtttgaggttgcttcgttttgtaggagagctggaggaatttagccatttttttttagaaaatacattgaacttatttcactttttactttt

SEQ ID NO: 259686 - DNA, 727 bp, Cannabis indica
tctcaccattccatgtaatgttatctcgactgtgaccatgatgcattggaattgcaaggattagattttgatcacactgatcaaacaaatcagcaactatatcttcgtcccaacccgacccatcaatagccatcaaattgcaaactttggcacctataagagctggatgtgaagatgaaacaaaaggattttgcgtgtcgggtagccaaggttcaccaaggaccaaaatagaagtgtcatctccaatagaccaacaaacaccatgagtcagaaattgacgagcttcaagaacactacgccaaacatagatggggttattaccaatttcatcagtgaaaaaagtaccaagtggataataccttgctttaaaaattctcgagacaagcgtttcaagttttgtgaggagtcgccaaccttgctttcccaaaagagccaaattaaaacttctcaaattccgaaaacccatgcctcctttagatttatgtttgcaaagctttttccaagacatccaatgaatacctttaggagagttgttcgaagattgccaccagaacttggacatcaagccttcaatatctcttgtaacctcttgtgggatcaagaacacactcatggcatagcttggaagtgcttgtgcaaccgttttaatcaatatttctgtacctgcccttgaaaattatgctactttagtaataagaaatttttgaagatttaacaaaatagtcaa

SEQ ID NO: 259687 - DNA, 628 bp, Cannabis indica
tccaactgacaaaaacgaggcaccaaaactcttgtattcagtgccttgatacacaataattgaaggcaaactatacagaagagatcattctatgcctctactttggtgtgttcttcctacagaaacaaacgagatcatcagagaaattcatgaaggcttttgtggggatcatgtaggttggcagagcctatctaaaaagatcattaggaaaggatattattggccaacaatcaataaggacacccatgagtttgtcaaaaagttagataagggtcagagattttcacatatacctcgcgtaccaccaacgaaactgagaatgataacctcgccttacccatttgctatatggggaattgatttaattggggcaccccacagggcgaggaagagccaagtacgtagtggtagcagtcaatttcttcactaaatggactgaggtcgagcctcttgtctccataacctgcaagaaagtccttgactttgttgtcaagaacattgtttgtaggtttggaattctcatgaagatagtatctgataacggaacccagtttgatggcgacttgttcactgagttctacgaaaggaacaaaataattaagagtttctcgttagtatccaggcctca

SEQ ID NO: 259688 - DNA, 1138 bp, Cannabis indica
aactttaagtttgcagttcctcgtctttcttcgatttcatcaagtgattctgcaaagagtatgtgattggtaccttgatcgtacgtcaatcttctgtgcgaaggtggcttaagttcgacgggcaacatagcttcataactgtacgccattgagaatggtgtctgtctggttgccattttttttcagttgtacggtatgaccatagaacttcaggaagctcttctggccagtttcctttggcatcttcaagttttttcttaagtatatccttgaaggttttgttgactacttcaacttgacaattttcctgaggatgcgccactgcggagaaacttttgatgatgccatggttcgcacagaaatcagtaaaggattggctgtcgaactgcttgccattatctgagactattttgtacggtagtccaaaccggcatattatgttcttcacaataaagtcttgaactttcgttgatgtaatggttgcgagtggttcaggttttgttcacttagtaaagtagtcaaccgctaccactgcatactgcactctgccttttcctttgggtaattgcccgatgaggtcgatcccctaaatggcaaagggccacgaactttgcatctgtgttaactccttgggtggagctcttggtatctttgaaaatctctggcatttgtcacacttcttaacataggcttttgaatcttcaatcatcattggccagaagtaacctttccttagaattttcttcgataagctttgtccggtggcatgatttccacagaatctgtcgtgtacttcggataggagttgtgcagattcttcttgagtgacacatttgagcaatggcatcaagaatcctcttctgtacatgactccatctacaatgatataccgtccagctttccttttcattttccaagcttcatttcggttatctgggtgtttcccagactcgaggaaggccgctattggtgtcatccagtttggggatgtatcaatcatttcgatttcttctgtgccagtgatggtaggctcttcgaggaaccggataggaaccaagtttgccttgtcacatacattgctgcttgccaatcgagctaacgagtctccagttgattttcttctcttggaatttgtctg

SEQ ID NO: 259689 - DNA, 555 bp, Cannabis indica
ttaacaaaagcaagacaacatttaaagatggagaaaactacattagacacagaccaatcgggacaccttcgaggcttcgactcaagatggccttaacaaggaccttacagtcagagaagaaagtgacattggactgcaagtgctggtccgagagaagcatagtgtagttattgagttatattgactatttccagatttataaggttgtgtaaatagtagtgaacggattaggtgcttagattaatgacatttcctaacttctaatagataaatatatttgagaaaaggaatcaaattctgtttcttactcttgttcctttctttctagacccttcccttacacctttcttttcaacaacggtttagtaacatgttttagagaagaaggtatgccattagaaaaataaaataaaaaataatcatacatttgtaattgaaagtgttgtgttagcatcaatatgtatgatgtctcaatgtgtaaagcttggtgtgatgtgagcaaggtttttggaacttaaaaacaaagtagagccttagatctcattaaaatggaca

SEQ ID NO: 259690 - DNA, 529 bp, Cannabis indica
gctaacctttgctcgttactgtcagtatacatttctttgttgatcaaaagcaacccccagttccaacacttcatgtaagtatctcgcatccctcacattactgtcgtgttcatggcatgctttactttttacttgtttttctgggtttagtgtttgaagtttctaagaatgtttcaccttgagtttttacgtaatacgtctagatttctcttctctggtgttagggttactcttgttacgcactgttgttatattttgtaaaggaccatatactctttgtgtgatggccttcaagggcagagagaagattttgtctctctcgattttctgcccttcctctctttttcttttacgtgcaatgtcaccatctgtgagatctttgcacccgacttttgtccaggaaatccttctaaggctttcttgttcacagaagtccagagggggcctctttccagcagttaggggacccccactcccttttttgatttagggtttcgtatggggcctaattgctggaattttaactctt

SEQ ID NO: 259691 - DNA, 774 bp, Cannabis indica
ggtgaggggtcctctactaaggaaaggaggccttccggggaggtcattaatcttttcgaggagctgactgctgcaaacccctctacccccaaatctgtcaagtccaaggagtctagaccaccaacagttggttctgaactggtcaagagtgatcctgaacgtgtgcgggcacctactccagctttgatagtgcttccaggggccaaaaagagcaaggagatactggcccattacatgaaccagcttgttcctgaggtcagtgagcaactggttggtgctgacaatgactcttctttggatttgttggtgggtgcagtcttgaaggagttcaccagggtaagtcttttttgatacttccctctaatcttccatacttacatcgatatgctaaagtttttcttttgtgcaggccggtctgaagttggcttacacttactcccaggctaagtatcttgcttccaagaacgcggctctgtccgacttggcggggaaggatgctgaagaagctagggcagaagtcggagctgttcggttggaactgggtgaagccaacaaggatttgtttgctgctcggaagaaaatcattgtgaggctgctgaccgttttgaagagtccattaagaccttatctgctgaggtgaatagtcttcacgacgagaggacttctcttcaagcaattcttcatcggatgagggaggaaaaggaagccaaggaggggaaactttcagccgaggtggacatgttgaaggagaaggtcaatgccttggagacaacc

SEQ ID NO: 259692 - DNA, 961 bp, Cannabis indica
gatcccccaatccactcatcttcctagaaacgaatacttgccccatttcctactttaaactttaccaacttcccatattcatcataaagatctaagatatccttccatggtcctattggggacaatctaaccccctgttttgtatcccagaaattgtctgctttgccatatcgacttttaatgactttgtgccacagagagttcgattctaggggtatctccatagccatttcataagcaatcctttattcctcatttctagtcctccgattgctaagccacccttcgctctaggtttacacacctcattccaagccactaaatgatccccacctgctaagtctcctccttcccaaaagaaatctctcatcattttttctagttcctttcagaccacctttggagctttgaataaagacagatagtaaattgcaagttaagagaggacagactgaatgagagtcagcctacctcctctagaaaggaaagagcatttccatccatccattcttttagcacatccatccaagataggctcccaaaaggacttcttccttggagaaccaccaagtggcattcccaaataagtcataggccacttgcccacctcacacccaattcggtccgcactatgggccactgcttcctcattcatacagattcctaaaaattgactttttattcaagtttacttttaaacccgagataccacagaacgcttcaataatcttaaccagcttttggagagaagctccatctttaacacagaaacgagtgtcatccgcaaactgtaaatgactaagccgaatatcatctttgcctacctggaacccctccaaagattctgtatctattgccttgtccaccattctaccaagaacatctgctatcaatgtaaaaagaaacggtgataggggtctccttgacgtagacccctagatccattgaacttgcctcttac

SEQ ID NO: 259693 - DNA, 674 bp, Cannabis indica
gttgatttctggtttacaatgtgaaatttatttctttaaaacacaataacaagatctaattcgaattaaggaacgacatgttacatataagtccgtttattattttttgtggttgccttatagttgcattatcgttttaaaatagtttataaattatgcaggaatttcaattaacgggtaccaacaaatagcaattatacaaagtaagatttatgtaaatagctgcaaattagttttataatagttaaaaattgatctgattcaaataaaactgatgaaaagcatagggatcacaaatagtacgaactgaattgaaataacaaaaagatcaggagctcccaatcaatccaaatcaggtatgttgcccctgattttgcccaatatacgtggaccaaccggacaaggacatgtggatcaaaagatcttaacatttgaattatttgctaagtctttatgaagaaaggcagcatctgggacctgcctcccggagaaggcatacggagccccctatgctcccggaggcctaagtaacatcaaagcatctccgcgaggtgtcaggcttcccctgagcagtcatctcgcatttaatgccgcatgagaggaaacgtattgggactaccacacgcaatatagtctgacgacacaacccccaatctgcacctacgaagctatga

SEQ ID NO: 259694 - DNA, 997 bp, Cannabis indica
caagtcatccacatacaagcatataatcaagatatcttcattttaattttgatatagagtgcatgctcatggggacacttggtgaaattcttgtcttgaaagtgcttgtcaattcgagtattccaagctcttcgcgcttgctttaggccatataaagcctttttcaacttcaaaactttttcttcatagcccaatggttgatcgatgtagacttcttcctcgaggaaaccttttaagaaagcagactttacatccatttggtggatcttccatctattttgggctgctaaagaaattattagtctaacagttttaagacaagcaaatggagcaaacaccttatcatagtcgatgccttccctttgactataacctttttccaccaatcttgctttatatctctccacctcgcctttagcattcttcttttccttgtacacccattttactccaattggcttgtatccctgtggaagagtagctggctcccatgtgtcattttttgtgattcaattgatttcttcatccatcgcatctctctatttcttgcttcttactgcttcttggtagcttagaggttcacaatcaccaaatagacacataagagaaatatcattttgattctcagttaccttataaagttcttgcaagcttttaaagtgtggcgtcttttcatttgagctttcacttgaatcttcttgtatatttccaattggcgagattgttggagtagtaggttcttgaagttcttcttccaccttggttgtttctctacatcttcctcttcaaagtaaggaagaaaatcatacttgtcttcttttgtgttccaattctaagaatcttctttatcaaactttacatcgagactaatgatagttttactagtaattgggttgtacaatgtgtagcctttgaatcttgagtcataaccaatgaagatttatttctcacttttatcatcaagctttgttcttttctgatcgggaacatgaacata

SEQ ID NO: 259695 - DNA, 614 bp, Cannabis indica
gtttagatactatttagcataatccttccagaatctcactcaccctgtcccataatctttccagcatctcacaatccttcactcacaaactcagatgcttctgaatctagttctcagtcactgttttctgacacttccaccaccaacagttcggtgtctcaaccatctcaccctattgctaccataccagcacaatgtgatcccagtagcatgccaaatgacccaaatccaatcactccaacctctacatctgtacctactattacaaccaaccctccaaatgccccaattatttccactcatccaatgcaaactcggctaaagtctggtatcagaaaacctaaagccttgttagctgtttgtgaacccaaaactgtcaaagctgctctgcttgaacctcactggaataatgccatgaactctgagtatgttgcccttaaaaggaataaaacttgggttgttgttcctagacctgccgacagggttcctatcggttgcaaatggttgttcagagttaaactgaacaaagatggctcattaagtaggtacaaggcccgacttgtggccaaaggattcagtcaaaaagctagttttgactatgaagagacatttag

SEQ ID NO: 259696 - DNA, 595 bp, Cannabis indica
cgtcgagactcagtagcctaaaatggagaggttggcttatgcacttgtgatggcctccaggaagctaaacccatactttcatacctactccatagttgtgctgaccagccaccccctatgccaagtcctacacaagcctaaaacttcgggacgtcttctgaagtggacgatcgaactcaaccaatttgacatttcttatgtaccgcggacagcgatcaatgggcaaatagttgccgacatcatggttgaattcacttatcgacctaacaaagaaggaggtcatgaaatattggagggacacgctcaaaatagggaggggaggtaaagtttcatgtagatggggcgtcaaatgtcggaggagctagggcatgagtggtgaggggttagaagatgtattctgcaatgtgatttgggttcaaggcttcaaataatgtagctgaatatgaagctttgttggttggcctacgcttggcaaaggagttgaaattcaccaagcttgacatatttagtaattccaaactggttgtgttccaagtcaagggggaataccaagctaaggggagtaagatgaaggcatatataggtagggtgaaaa

SEQ ID NO: 259697 - DNA, 892 bp, Cannabis indica
attttcgttggaggctccgtccacaatactttccatgttgggaccgacggtgtcggtgctttcgcggttgcctcggcttcattacattcagtgatgaaatttaccaacgcttgtccctttatggagatacggggtatgtagtgtaagtcgaattgactcaactccattgcccatttgaggagccttccgaatgcttcttggttttgcgggacttgtcggagtgggtgattggtcaacacgttgattgggtgagcttggaaataaggcctcaactttcttgaggccattaggaggcaaaaaaccagtttttcgatgacggggtaccgcgtctccgcccctatcatgcgcttgctgacgtagtacacgggatgttgagttttctcttcttcctggactaaggccgcgctgaccgcgtgttcagagacggccaagtacaggaacaggtcctctttgggagaaacggaagaggacccaacaatgaatacttcccagactactattggttagtcggccaatccccagttacgagttctgctcgtgggccaagcggtacacagcacaccttgtccggtaattcatcaggaggagtcatacctgacggttccaactagactaatggcgctattccacctgtcaaccaagagaataaatcgctaaggcaaccaggctcttctgtgttcgaaaggttgggagcaacccatgacctaaggaacgatctaaacagaagaaggggaacagacgaacagaatactacaacgatcgtgcatcctggagcccgtacccaaatccccgctcagaaagacactgacgtaatccaaatcgaccagaatgtcgagcaggtcagcccagccgtgcaggcccagcttgacgaattgaaaaatatgtttcatgg

SEQ ID NO: 259698 - DNA, 2598 bp, Cannabis indica
atgacttaaattagttatgtactagtttgaaatgaggaatgatggatgctagatattattttggtattttattgacttattaaatctatttattttgtgactacataactgtgagaatactcttattcttttatattaatgaatggtcctgattttgttactaatattttcttattgatataagagttaatccattacttgtaaataagtattttgtgatataaattaaaggatcatttataagcattatcttcctacaagggtcaaggtgtgacctttgaccacccaagttatggatattacatatctgtcatgacctagggctcagatcatgatagtgataatgttgagtttactaaccactggtaagtaaattttagtttatggtgatgttttgaaacaaggtctgattgagttttatagcagttaggaaaagtcatttcctatgtgttaaggcaattgaaaaaaattaagagttggagtaattttctttatcattggcaaagagtatgactagaattggaacaatgtttagaaatggaaagatcggtcaatgttactgtaaaatcgagcttattgtaagggactatgatggcacaacaaagtaaaagatcatagaggaataagggttgaacttggattccaactgataaaagattgaagcaagaagtacttgatgagctttatgctacgccatgcttgttacatttagaaatgacaaagatgcattatctttcaggtatcccaccatgagcttattccggagttaagcctacatgacttggagtaatcttagaatgggtgacctcttgagaaatttttcctcaagaagtgtgtgagtgaggacaaaacatgttggaaagacatatattagattacaagaccaatgtcgttccaggaatcaactaagagtagtgtttaacaggagttatcagattaagaatgtatattatgatgagaatgtgttagtggttgagaataaaaaatgatatgactagatatgtatcaacatctttagttgtcggtaagtaaaatcagagcattgaaggccaataggattacatcagttttagaagactctcgattagaaatgggaagagataactacaaattttgtagcgggattaccaaagactacaaagttttatgacttcacctggatgatagtggacaagacacactatgtcaacacacttgttgtcaatgcagacaacatgtacactgagtcaagatgttgaattagatactgaggaaatagttcgatttcatggagttctaaagttgaatatcttgggtcaggattttaagtttatctctaacttttgagaaaagaatgggtattaaattgaaggttagtgcagtttttgttcacatgtgaatggacaatttgagagaaatacttagataataaaagacatgtcacaagcatgtgtgatatggtggagcattctagaataaatttcttcctctagttgattttttgtttgatagcagtcattaaagtgccattgatcgggcactctaagaaatatggtatagagaaaaatattgatcaccgactcactagaatgaagtctgtgagaaagggtgcattagaccgagagggtccaaggaactaatgaggccattgagaagatttgagtttgtatgctcacctcacaaagtaaacaaaaaagctatgctgaatcgaaacataggaataatgggttccaagtgggactttgtgattcttagaagagagtttagagattgaaaatgaaaggtagataaggcaggacaatgatggagcatgtttatggtttaacttcctaccttgttttcacattttcatgttagtgaagtatgtgtcagattcgactcccattttgagcattgaactttagactggtttgatataggaggaaccacctatccagatattagatagtaaggaagagatatacagagcaagatgattctgctgtttaaaatactgtggtgaaataataaagttaagaaagagatttgagttagagtcgcagatgtaggaactatatcccgagttgtgcagataaattttgaggacaaataaagtgtgaatggtataaatgtaaaaaaattcattaccgcatataaatataaaatttgaaagaactatgatattttgtgtaaaaactttattctaataatattaaaatggttttagttttttttttttttttttggggtctaaggattaaatacgtttagttaatgttaggttataaacataagtagtttgttgaaaaaaaaatataagaagaaattgatatgaaatgaaacatacatggtaaataaatagaggtaggtaacatgttcattaatagtttttgtaagaaagacacaatgtcatctttagtatacataagtaacagaatggaacagaggcgttgtatgatgcaaaacgcccaaccaaagttaccagacgtgttccttcactctcaaaattttaaatacgtctttgttgctctctactccaacataatgtacactctcactcactctccactgtatatgtctttcttttcttttcttcttttcttctcctgctcttgatgattttgatgagaatgaaataat

SEQ ID NO: 259699 - DNA, 2855 bp, Cannabis indica
ctatacttgtgataagaaaaccaagtactaatcataatccgactctcgacaaatgaggaatctttaaccctgtatacacttgaatcctcatcaagttttatccttttcagaataacttttactctacaggcttggaaccaatctgggtctttgggaaaatgtccaaacaaggctttgagtactggtttcaatggcaagttccggtgtgtgctttgctcttcatcataccagctgtggtagctgtgagatacattaagaaggaaaaggcagagcctttaagatcctttgacttgtggaattgttgttggagaaatctcagtccaatttggcttctattatacagagctttttcttttatttgcttggcttggatgctctatagcacggtctcaataactggaccttttgtcttcttcttctacacccagtaagtttctcatctctattatttatttttattttctttttgtaatttcaaagaatttatctttaaaaaggaaaaaaataataatttgggaaaaacaatgttttttttagtagttaagactaatgttatgatatatttgtgactcaatttgcaggtggactttctcattagttatgttatattttgcggtatgtcgaagctctatgctattattctctacatgtttcttaacccttttttttcatattaaaagatgtgtttatgtattgtttgttagttggggactgttatatctgctcatggatgttggatgtccacaaaaaaaatccttatctgaagaaggaaccacaacttttgaggaggaagaattcaaagacaaaatcaagttaagcagttcgcatgcgaaaaaagagattaaccaaaatgcaggattatggggatatctaatgcaggctatgtatcaggttagtttatcaaattctcatttttgtggccaatatatggtccaacccaacttgtttctccttttatggcctaaaggccttttggatacagaaaggtcatgaggcattagtagttacagataattaataatggtcgatatcctgtagaacatacttgacaaattatttaatatatataaatatttcatttggcaaagtgatattaaaaaaaggttattttcaccaactgtaattatttatttttcttctttcactaacctctctaatcctacaatatttgggatggaaccagagaactatagcaattgttatgtaggcagctagagaatctcagtgtttgtgaaatgacacgacgtgcctcgccatttgatgtacattatcactcggttgtttcagattaaacgatttttatttgcggtttaaaaaaattattgaaagaaactctaattagtactctctctatttaactatatatctatggcagacttgtgcgggtgcttctatcttgacagatttggtattttggtgccttttagttccattactagccaatgttcagtttgaactaactctggtgagaactgtaatttgatttattaatactcaagtaaaaatagcatatatgtcttatcactgactagatattaataatgggctttggttgacagttgatagggtgtctacacgctgtcaatgttgtcttccttattggggatactgcactcaatggccttgtaagtatcttatatatatatctaacacctacttatatgactgaattaatgaacatctataattgatcatgtaactctcttcttttgcagccatttaagtggtttggctttgcctattttgtgctgtggagttgtctctatattactttccagtggatcgttcacgcttgtggttttatgacatggtaagcatacaatacaataacttcagtgaataagataatcacttgtatagacccagttggctagtgacatatatagatatatatataacgaatcatatgtttgtctctttcatcatctaggtggccgtatccatttctcgagctcaatacaccatgggcacccttgtggtatgtcttttagttttaagaaatgagaatatgaaatagctttgtatacagtcactttgcacaagcctgtttattataattatttgcaaaatggtcttctagattctagagaaactcgacaccttatttaacacaattaacaaactgttttagaggtcatttgggaaaagaaaaaaattatgctttggtaaaactctttcaccaaaacatatgcatatacaaatacaagtgctaatagtagtagtaccaaaatgtttgcatatacaaatattagtagtagcagcagaacttactgatttttcatggctgcaggtattttggagtggcgttatttcatattccctgttattggatatacacacaacttttcaaagccaaaaattatgttctgcccagattgtttccacgagcttttgttaggctaaattagtgtgtcattgttgttcgtatgaaatgtatcagctgtttttcatccaacctccgtttcaacatttgatttggaccttagaaataaaatggatataagtttaaatggtatttttaaaaattcttaagaaaatatacatatttattaaaagaaaatatacatatttattaaaagattcatttttttttatttagctcctaggataagtggccctagtggaggcctaacttgctttagcttagggccagtcctgccacaatgacaatgactcaatgtgggcatcattgagtgttaaatttgaataatataattatttttggtaaatattttttgtattattattattgttaactgagaaagttgccaactgatttggagtctaataaatgctaattaatcaccaataaagagttaagtaggggtgttcatccgatccaattcgcacttttt

SEQ ID NO: 259700 - DNA, 666 bp, Cannabis indica
tgatcgaactgttctttcagaaacgaaaccctaaccctaatttatttattaaacagggcccaaagatgtatgcagagactggttggacaagttttccattgtacattggaacaaagaacaagccattgtatggggctggaagagacatggaagacatgttggagtctagccatggcatgccattgttgattagaatgaagcttagttcttcatttaaagtcattccaaggcttattcacccaaaataccatcaccaggcccattgtttgttaatacttcggaggcccaatgagaaggcccaccgaacccacttgtacaattctacttgcaccgttaatacattataattttgtaaaataccattttctttataattctctacaaaaattaataacatatatttgtagagaattataaaaataaataactattttacaaaatatttacatcaagaaaaaaattatattcttactcttgtgggtactatatataatgataagaaaaaagagttttgccaatacaatatgatgtttaaaattatatatacatttgttattattgtatgtctttgtcttggtatttattatatatgagaagaaattaacgtataaagtgaaatgagcttttcttttgttaaggattgttttttggggtaagttgaaaaat

SEQ ID NO: 259701 - DNA, 665 bp, Cannabis indica
actatatatatagtctaacacattactctttcctctgttgtgtacactatcgaagatttcttccccaaatctcttcggtaatcctccaatgttcaccattatcttacgatcttctcatttctgaaagacccagccattttggatattatacttcggtactttccactactctgcttataaaggtatataatttatagtatttaacttcatctttttcttccgttttctcacttgccaaattaatattggtcttactgttttgatgctcgaatttttttgcatttctctcataactattctatcagcttaatacttagttccatatattttgtattctgatcagatagacttataatttcttgattaccctcttttttttttcttcctaaatttaggcatatttaatggttttcttgattagcagttttgcagattttatgttggttgagattattggaatttcaaatatctactgtaaattccatgtttttttttttttacacatttgctggccattgttttcattttgttttaatgggtcagttgaattctttgagtgtatcaaactgttttaagatacagggtaagaaagtggtagaggaatatagctgtagtcgaaagatgggtgtggagaattaccatgtaattgagcttgtaggcgaagg

SEQ ID NO: 259702 - DNA, 1558 bp, Cannabis indica
ggtctaaaatggtatttacccaaaattataatattaattttattttttaattaaccctaagaaaaacaaaaattagttgttgttattattattagtagtaatttattggggttttattattattattattaattagtttgataggaaaagtggctgctgatcatagtcataaatggatatataaagagcctaatgatcaagagatcaacttcttatcagcatggcataattcagccgactcggtaataattaattaatgttaattattattatttcattcattattataaattatatatatatataatatatatagttttttttaattattttcatcaaatttttaatacagtaccctagaacatgggaagcccagtttcagtccggcataaaggtataatattaattatattaattactattagtttaattacactacaaacagttactaattattattcaattatattaattaatttatcattttttaattatattcagaccattgccctgatagcagtgagagaaggagttgttcagttggggatctatccataaggtatgccatttatagcttttccatatactattttgtccacacaattattaataaagcattgttattcgacaccagtgttatcgaacactttctagatgtgtcgtattatgattgactagagatagtaatctaaaaaattattacattaaactatattaaatttaatacttagttgaactaatattagtaatattaacacataaaaagatgctaggccccactggtaccttttaacatttctcttattattattaatatttataaaaagaaattttacacaaattacctaaaatcattacgttttttttttaattatttttacaaaatttatgaatttttagagaaaaatatataacattatttattatattttcgcaacatgtaaacaactgtctgtaaaaaaaaaatttaaaaattgttgattcttttataaaattcttttaaattaattaattatataattataattttgataggttattgaagacttaagctatgtagttcttctaagaaagaagttgagttacattgaaagcattccaggagtacttcttcctcatccatcatcaccatcatcatcatcatcctcaccatataatcataattacggaattacccctgataataacaataacaatgcatggcctaatactaataattataatttactaccccaaagtactcatcatcaatcctactatgatcatcatccatcatcatcatcatcatcaatcctattataatcaactacctttgatgaagaacaacaacaatatgataactccatccatgagcagccttgaggcacttctctccaagcttccctcggtggtgccgcccccggcgccacctcatatggcggcgcattcagccgggtgcttctctaatgatcttcttcaaaggagtactaatttggagtttgttgctaagaatgaagttgatcatgatgatgataataataataataataataataatgaccaagatcaacaacaatat

SEQ ID NO: 259703 - DNA, 713 bp, Cannabis indica
aagggctagagatcttgaacggaatgagtcattatattctgctgcaatcaatgtaaggttttcttaaccattatgtgtttatttcattgtttttgagaattaatatttaggatgttaattcaacatacttgttagtaaatcttgatcttgctaaaatattcccaacgactagcctcagagccatggtaatgatttactttcatgtaatatggatttaaaacgatgaatactgtttgtgtgttgatttggatgtgttcatgttggtttatgtgttatttgatgattgaatgtgtattacgaaaattttgcatgaaaataattttatttttgttctgaaaatattttatttagattccttgtgaataattaagcaattttggtttgtacgaaactcgattccgataaaaattgaaaaagttatgcaggtttaaaaattgggtgttaatggtgtcgagatggtgctcatgcgcaccaggcatctcggacaagacaccatcaacaaaattgggagttttgttaaggagtacttcatggtggatggcgcgggcatcactcgtacccggttccagcagattccaacatatcaccgccctcccctcactcttactctccaggatagagttcaaaggcttcctcgactgccgggggaagaccggaacattatccagttgacctccaaggataactttgtgaagtacgggctctatccgaag

SEQ ID NO: 259704 - DNA, 518 bp, Cannabis indica
ccttcaataatatcacatcccaaggtggttttattaaagggaggtttataggacacaatatcttgatttgtcaggatttggtaaggcattatggtagaaaggcaaacaagcctagctggatgattaagctggatctccaaaaggcgtgcgatacaattgagtggagcttccttgaagagatgctaactggtttgaattttcctttgaaattcattcgactagtcatgaacttaatttcaactcccaaattctccttgatgttcaatggaacacttcatggtttcttcgaagccaaaagggggataagacaaggtgacccgatctctcccttgctctttgtacagggcatggagtactaatctagattgatgaagaaagtggaggaaaagtagggatttaaattccatgatagatgtgctaatttgaagctgaatcaccttacttttgttgatgatgtctttgttggaaattattttagcagaatctagatttactaacaagtatgttggattaacaac

SEQ ID NO: 259705 - DNA, 816 bp, Cannabis indica
tttcatgatggtggaggagctgtttcgtggaaaagtatcaaacagacactcacagtatcctcaacaatggaggcagagtatatggcatgttatgaggctacttgtcaggcaatatggctgggaaacttcatttcagaattgggtgttatggactctatctcgaggccgctgaaattgtattgtgataattccgcagcagtagctttctctagaaatgttagaagtacttcccgttctaaacacattgacataaagtactattttgttaaagagaaagttacagagtctcttatttccattgaatacacgcctagcactggcatgttagcagacccactaacgaaaggcttatccatatgtgtatgtttggagcatgttgcttgaatgggattgttagaagcctagctgttgagctcagtgggagtttttctattatgtattgaacatgctagtatcttgtatggaatgcttatgacttgtattttgaatatgcataatgatattgaagtcacttctaattattgttgtcatgcatacatgtgttgtttactgaagtgacaagtacaaaaggagatgaatgcgcatagtctcaattttgttgtacctcatgcatgtttggtttgatttttaatgattgttattggattaaaatgtcttcaaggtcaattcatacataatatatgtatcatgtcgatatgatattatgtacgtcttaattggttaccttatgtgtaatagacaatgttatggtggttgattatattgtccaaatgggagaatgttagaattattattgtggactaatataatcatgag

SEQ ID NO: 259706 - DNA, 1225 bp, Cannabis indica
tagtatagcatcaactatcctaaaccattacctacttcctataggttgggcttcctttcataactagatgtggggactgtgtcttcaaccatttgtagacaggtgcaattctatgcgtcttacttagttggctattggtacatttcattatgtgcttcgagttgcactactagtgttggtgatctattgcactgagcctgtgaaaactcttcaacaaatcgtcttagtcatgctcgtattccttccaatgcctctattagatcgttagccttaactaatattgggttctctggaacaccaacaatctgtgggtcagcggaacacacatccttagcccccacctctatttgtcgttcctttcacattaattctaagtgatcttctagttgcatgtgtgagctcttacaagaaaggtagatttaatagaaacaaaagagtttaattctagggagagaagatttcatgtacatatctaaacttaatgttgtcaagcttaactagtaatattatatataaaacctaaatttattctaaattttcaagaaaggaacactgtccttcctagtttcaattcaagacgataaagaaatataaaacctatacctcttctttgtaaaaagtgtaatcaatcataagtgataagatactcttaatatctctaagcaccacttcagatgaggctctaattctaggaaacatcttttaacaaaaatatatgtatcacatataaaactatcaatatcaaattgtgcatggaattcagatgagaaagaaatccatgaactgaactttcttagaggtggcttgaaataccattgctgggtgacctttgctaatgtggttgggaaaattttgcatcatacattatctcttaccccctgtaagtctatttgcatctcaaagtatttcaagtgagataaaggatcctcttttcctatatacatcttccatactggtattcccagtttctagcatgcttgaagtgaatccagccagaggggaactcactccaaagcccaccgtcagtggttatgtattaacttatttaggggttgtccctggtcgatccttgcgtttccaagagtctacacgcttggatctgtcaccatcgggtcgactagattagtttgaattcccccataagttacaaccatcttgtatcctgtcaagactttaagacaaaaagcttgtgtttctactctcaatgaaagcaccaaatgtggac

SEQ ID NO: 259707 - DNA, 868 bp, Cannabis indica
agaatcattggaccgtttattaactaaattactgtccgaagaaagcataattgactcatcaatgcagtactcactgttctatcataagaaccagtcacgaattcccgaccagttggagaataatcaatatccatcctagaaaagaaaagaaatgtgaaaaaaagtgccatattcgtatatgaaataacttgaggtgtaaaatataaattcaacaaagatattacattagcaacttacactgcagaaacatgatctttatgtacacacttagcttcactgagcttcctagcatcataactatagcaattggagtcttcatttgcctgattaatcaaaggattgatatgcataacagctgagtattcttaaaaaaaacaagaggatatacctatatttgtatattctataccataggatactacaacaagaatctatcaaaccttactatgattttgttagaatgaaggtcatgctcatgcctacatgctacatgagggagaaaccttctaaatgccacatcttttactcccaattatttatttacttaattcaacttgagaattattttttatcaagttaaacaattttagtactaaaaaaaaaccttttcaaatgaagttagactacatttcacacaagtcacaacccttattccaacaacagaagcagctaaaactacaaatgtattataaaacaatttcataagtatgatatgcacatagagatctaaaacctccaaaatgaacaaattcagaagcactactaaaccgcaggagtttaataaatgtgcttacagcagtgaaatttattggctccataggattccaagcaatggaattggttcttgtctgtcacaataaaataaaag

SEQ ID NO: 259708 - DNA, 537 bp, Cannabis indica
taataatatagtctataaacacagtatatcataaaattacgattttacccgtcctgggtcaaaattatgaaaatgccccgacacaccaacgggatcttaaaatgcaataattcataatagtttcacatattaaatcatatagtaatataatttcccattaatacataattaatctagttaggatcgctaatccagttatttaaccttaggatattacacttctagtagctaatttttttaaggattattatgtgaaccacttgaatttattttatggattaatgtagttgttcaatttcttcttcttcttttaaaataaatttcattcaatctgttttaattcagtaattatttactagccatctataattgttatctatgaattcgaatcaaaatttagaaggtgagattttcatatgctctgattgttatggatgcaaattgatttaggacgaaagtacctagcttgtttgtatgattttattagctgttatgcttaatgctatctttttttattaaacttaccataataatata

SEQ ID NO: 259709 - DNA, 2096 bp, Cannabis indica
taattcaacattttaaacatagaaacaacaacaacaattagcagcagcaacatcatcaaaatcatccatgcattactcattttttcatcatttttcaagaagacagaagtaaagaagctagacaagaattacctcaactagaatcactctaacttgctgaaaatcacttgaaattgaagaggaaaatccacttttcttgctgcctcaaatggccgaaaaagagagaggaaaagagagagagagctttttgagaaatttgtaatttttctaagttttgaaaagaatgaaaagaaaatgccacataactccttttacttcagccaacaaaagcattattaaacatttaatttaaccaaataaaatccactaaaggacaaaatgcaaacttatgaaagctactaaatgacataaaatgcatttcagaattcaaaaataacagtataaataattatttaaatagctataaataattttcataattaaacatgattaactgctaatttccaaattaaactaagcggtctttacacgttcctaatggctttctagccatcaagagccagttttagtgctttgtctctcttcttgagttccacctccaacttggaggcctcagtagcaagtgtgttgttttcttggtttctaatatgaagcatgcgctccaaacaagtaattaaccctgcctcttttcaacaaaagcatttaccttggtaagggcctcccccttcacgagaagcttggcctcctgaaccttaagcttctcccgaagagcacccaaggaccctttggtcttggcatgagaaaggttgaacttcaacagggcctgaaatcaaagcaaaatcgagttagtgccagagagaggacctagctgaccaacctctttctgatgcttccctggccagccagcttctcaatactacaacagtggtcagtcaaccttgcaaagctttatacctggtcagacaacttttgatagaacaacaatttgagcaaactcagatgtataacttactaaggtcaagtcctagagaccacaggatgacagcctctctggctcgtcatcgtcaatttcttggagctcaccaccaacaatgggtagaatcatgtcaatacatctatgagcatcctctacaactctctatctggtggttgtgcctgccccacggctggttctctaagtgcccttgctcgaaggccaacgtggaggtggggtcttcctcaaggggaggtagtaaagacccaacaacatcaccaaatcggatggtccaggccaccatggccctagggcgacctgaagccccacttgagggctctccatcaaaatctctgagcctggaaatgcaaatataaagtaacaaagttataatataggttacaaatattcaatataagaaaaaagcagaaaagtttgtgctatcaactatcaactaccatcatcctcgaaagaacagtcatttgaactgctagtagccgccttgcccttgccactagatgtaagcaaggggcaagcatgcctggcagaaccttagcctccaggcctaatcaacaaagtggtgttgtcaacagtgccttcgcgagcacagcgttaggggaggactttctctcttctctccaagttccttacaatttttgaaagggggatatcgtcatccatcttaggagtatgtccacctcctgggcaagcctcctccgtctggacctcccgacgggcccttagcccctgtaacgccaaacttttgggggatatagaccatatcacaagaagttggttgtacaaaccagcctcaatatattcctcctatcaactaggagtgacagaatatgattgactctatcctacattcggagggtgaggatggagcatttataggttggcactctctaaaagtgataatgatggacatgctggatgtcccaagcaataaattagttgtcggcatatcctcccacctttgataatggcgtgctgttggtatcacccaaccactgatagccaatttggctaaagtaaaagtatcctgtccagaaacatttttggatacatttttggcatatctcataaggggatggctaaggccagcctaactcagcataga

SEQ ID NO: 259710 - DNA, 585 bp, Cannabis indica
gcgaaaatgattgaagatgctatgagaacatacagaagaatacaagagatgaacattcaaccgacggaggaaacttttgctaatcttgtgtgtggatattcttctatggaaatgtaccgggatattacaatcttgtggggtgacatgaagaggagtatggagtttggaaatctttcgattagcagggatttgtatgagtacttgctaattaacttccttaaaggtggttactttgaaagagtaatggagatcattgattatatgaggaaacataatatgtttacagacaaggcgatgtataagatcgagttcttgaagcttcataagaatctttacaagaacttgaagtcgtcggaagctagaacggatgctcaaagaaaccggcttcggtatgttttggcctttaggaaatgggctgagattgattaaagtttaacaagagaagtacattgtgaaagttaggctcactacaatgtcttgttttaatatacatgttgtacatactacatgagatcaaattatggattgttctttcaatttcttttgtttttgatttatttgttcatgttcttgatgtgattttag

SEQ ID NO: 259711 - DNA, 540 bp, Cannabis indica
tacggtaaatttatcatatctaatccaaatttaatatcggtctgttctgatgcatactccatacgtccaacccaaacttactttaaccaataccctggaaaggacatagcacttatccaaggtacaagtaaactacgttgtagattatcatatcagttaaaccctgtgtaatgataattataggagtacaattaatcatacaatcttgtttactttccactgtgttggcaacacaataaataagaatatcagtgtgataaggatttggatgaatttattaatcaactaaataaataaatgatcacatgaaccaaataacacattaaagaagtaataaaattaaatttgtttctttattgataattgaatagaaaagattacattgaaatagagttttatttagggcacaaagcccaacaatacagcctaaaacaactcttggcaactcgacacacaggctggtggagttaatatgtacattgctggagaagactgtcacatcatgactgctctaacatttccttgcctttacctgcacca

SEQ ID NO: 259712 - DNA, 732 bp, Cannabis indica
gcggtttctcatatcatttattatctgatatatgctaccacttgtaaaaaatgctaaaagtcatcaacacaatgtgcttataatttttaatataataactcatgttatctaggtatatgttgtttgttgttgagagaattataaaagagcagaaacaaattaaacttacattggagacattgttggaaagttgaaaatagagctttctaagtagagacctttgagttggaggactagcttgaataatagtatacaaatcaagcttgacataggcagaggtctttctaagagccttctgagcttcactccatgagtgtgaatcaattaaatctttgacctttaacagagcaacaacatgccctcttattcctttctgggcttcctcaactgtctgatccggactcaccattcccatctccaacccatttgccaatttctgaccacaattgaaacccaatgacccaactataatagtaatacccaccattacaattccccttctgcctgaggccttgctcagattcacacccacactagttgctggtttcgaacaacatgatgagcagcagttgaataagggtaagggaagtggcaagggtttcactgccattttcatttttctctcatccaaattcaaaccaatcctaaagctttatcgcaacagttcttcactcaatagctgggggttatacaacttcattttttttagggattattttaaaaatatacaaa

SEQ ID NO: 259713 - DNA, 817 bp, Cannabis indica
tatttatatgtagtttatgagacccatgccacaatatcataatttgcattagatattaactttgtgctaggtggtaagaaaaatggctaatgtatgcaaactaattccctaacatgcaatttggaaatttagtaaatacatctgatggtcagaatgaaaaacatgctcatcgatagcagtgaagtattaaacaataatttgagcttgagaatatagtcacaaatagagaatctaactttcttgagaatctgcaatagtatttgtagtttagatacatgagctcttgcaagatctactagtcggcatcaatggctcatgtatttgtagaattaatatagtaaatttaaagtattcttttaaactaatgtgttaaaatgtatattaactcaattaatatatattttaaacaaaatatattaaatatataaaattataaatgcacttccttaacaaaaaaagttaattaggatttttatccgacatgtaatgaatcatgtccttggactttttaaggtagttaaaaatattccgttggatttaaggacttttgtttaatttttgtaaaaaaaaactaacatggatgaaagtttagagggcatgatttaataaatgtcaaagttcgagaggcgtgatttggtagatatcaaagtctagggaacataatttaatacataaacaatcattgaaatagtaaaattgaatgaaattagaaaaaagttcttaaatctaacaatctcaatagtccaaggagaatttttaacgactagaaaagttcaggggcatgaattggtaaatcttaaagtttagggggcaaaaa

SEQ ID NO: 259714 - DNA, 1395 bp, Cannabis indica
ataataactgagaacaataaacaacatatatttatagaggtttggccccaaattttggtaatgacctactcccctttgattttattttttagaaaagatcacaagaagattttagcagtgtaatggctctctcaggaaaacgaaattcgatccttgaatagtgaaagtgacccactatttataagaataaagcgtgaataaattacattaaattatagaataaataattaaggttatccgttgacgttgttgtgatgggtgacactcattcctcctaccatggccattgttctcacgagaaggtcgttatggtatggtattacgagtagtatcctgactttgggtcatcatcattcgtgacctagacctctcttaacttttgacagggtaacgagtccagttactctcacgaggttgtccccttctttccgtaccaaggtgcccacaggctccactttgtggtggtctcgcggtctcttgggcatcatgcctctctttcgactctctattgagtctaagaatctcatcttagtgttgacattgcacctcgttctccatgaacacctcatgaacgttagtggtccattgtacaccatgagatggcgatgacaaacttccagcatctcatatttgactatcgtcatcaaacatgggttgtttgccttgacattgtcccttcaccaacgggctcagcaggttaaaactcttgttggtggtccatggaattttctatgttttaggggacctgcgtgtaattttcataatccgtatgcctcgtgcttaccatggtcgcaagtggagatcgatgctttgttaactgctctcaatggaagaacttaattattgatgtggttttttgtcaacgaatatacgaagattgtacatgagaaagatgaacacaagtaaatgtcgttcaaaagtaaattggtttatggaatcaaatttgacaatgatgaacaataaatttttgtagtggttacaccactttcagcggtaataggctagtccacttagaatattattgatctcaaggcttaaaaaaagttctccagagttatgttctccaaaaatttaatccttgggtgagttcttagaatgtgagagaattggaatttctgagaatcaaagttccctttataagtgactttaccacctttttatgattttacattgtagggtttgaagtttcttaacacgacattatctcttttcctaactatatatagtgagttaagtaaaatataaaataataatataataatatttaaaaataaatatctaaaagaatgagagttgttgtatatattcccaaactaataactttgatactacgaaagtctcttcatgtcgaatgaaattcatatgagtcacttggtcttcagagatagaccctat

SEQ ID NO: 259715 - DNA, 3105 bp, Cannabis indica
  modified_base (698)..(698): a, c, t, g, unknown or other
agtaactaatcaatatatcttgcatgtgaaagtgttatttagttattatttttttttttgaaggaaagagttatttagttattagttttatcaaattaaaaacgcaaaaagaaaccagattactaaacgtcaatccatcaagtgaatcagacaattattaaccattattagcttactcaattaacttgtccccattgaataaaaagggaccatcaaatttttatttgaccaccaataagtttccatgcatcattgtatttcattctttaaagtaaatagagaaaaaacgttacattatgatatgaaatctcattattattcattatgtaaattctcaaatacatagagaacaaattgtgctattgaattcagcaaaagagtaattgttctattgaaagaaaaatctatatgtatatatagggaaaaaggaaacagaaaaagtgagttgaacataactatctgtcaaaagtacgtactgttattactgtaggtgtatcattacgaaacataccataaaaacatgtgtctcttatggtgtcccttatgaccatttatagtagtaggctataagcttgacacgtagaaaacatggctgtcgttttattaaaatatatattttattatttctggtaaagctggattccatagtttgcatatatagcactattattaaaagtcgataatatattataaaaatntttccggtttcctcggcttttaaccagagctagtagtccaggaccagagaagtcttggtacagtactcttctgatattatatttatagctataaagcccccctctctctgcctactactttttacgtttgaatagtaaactttttgtttttctttttcacacaaaagaaatagtatttgattattctaaagctagctttatgaatctcgttcaccatttatatctatcctttttcgattctctctctttctcaactcgaaatcggaaacccgtatttaggctaatatagcaatacttattctgctatgtattaacctttgatcattcctcaaaaaaaaaaaacctttgatcatgcattttctttagatctcagcaagcctgactcttcttggctattggcttaatcatgtgtctacacacctgagatatacatatgatataatgcatacatatatattagaagcatctcatctcatcatcatcatcatgcatgagcatggcagttgtacgtactcgataatatagaatggttccatttactacctagtgaataatttcgcttcttcttccacatcctgtctactattgttttttggctgctttgtataatatttactattatatataatttacattcttttaataaggggtaacaaagacaggtataattcattaaataattaagatagtgtctttgtctaaccacctattttactactttttcaaatcagacacataatgacaatgtgcagctttttacaaacaattctcatcaccataacatattatatacaaatgggtagagattaattcatagtagatgatttgattccattagcacttttaaaattaataaagacataatgattgatatatatacacatataacatgccattgttctatgtgaatgtaatgtgtcctataattgaaactattattagtatagaagattaaatattaaaataataatatttgagaatcttattaacatttactaataattgactcaaaaacaacaattccctatatatatagcaataggggcatcatgatgagtacgtaatactatatatatcttgtccaactatcacttcaactactattatatgttttaacagaaaatttgaagtcatgtccactccttgtggaagcccggcctagccctatctataatgtacgtatacctcttgtcgtttccacgatctcccactccactttattaataataataataataatatatcttgttcaccaaattttccagaaatcaaatattttgagagcttaaacaagataaaatataataaacaataaatagataaatttttacgtgattcaggtgttaatgatccttagtccacgagtctaaattattggcctctatgggtaagtgttttaagataccaagttattccaatgtaggtttctctgctgctttgtagtagaaggttttttctggagattttagtagagtggcagtaagtgaaaaattgtcctccctgccttaagaagaatgagactctttataggcattttggggatctagggtttcatcttccacacgccactaaggcctgtactacgagaagacaatctggccctcaactggaggaaccttcttcatcgtgtggtgtacagcagctggcgaggacttttgtacaaccatgaacatgtatgtgtcacgcaaaggtcttttcttcgcgaaatagtctctacctaggccgttgggcaaaaagcatgctcgagggtgcgtacgcgcactatcatgatctgacacaagggacacgatctgatcatgtgttagaaaaaggtataaccatctatggagtgatattttgcaaggagatgacgtgtccaatgtctccaaaacccatactaccttccgggatccccatcgaaggatgttgctcccagaagccattgcctctcgctgccttctagatccggaagtcatttcttttagttaccctggatgccttatgtagagaccgtgttcccctctccgatcgtgccttgtgtctgattgatgaaagcttagataatatttacccctaagctttcgagatgaggacatttactgcatttacttccttttgcgtggtaaccacgcatcacgttaggaggtgtttcttacccctcttcatgtgttgcaaggtgtgcttatagcaagaaaggaggagggcgactgagtgacgtggagaaaaggaccttgacatttatgtgggccccaggccaatcgcatgggacctctcaccttcctattcgttggatttactgtaaccattttgaaccattgatttcttgtggccctgtctcctttttgaaataaaagccgcgtatggcggtgccatcattttttattcttttttgttcaaaacttcatattttctctacaacttctttttc

SEQ ID NO: 259716 - DNA, 537 bp, Cannabis indica
tcggggtggaagtaggatttttccgctggttcccttcagagggataccgtatagggctaggctccctggacttatgcttttgggtgcttggtgaggactcttctggtgtttctccaagtcctgcagggatggctttagggtgtacatggatccctgctgcctccatggctttctgcatggcgagcatcacctcttgcatccttttgttttgctctttttgggctgtgatttcagcttcatgatcagcagccttttgtctcaagagcactagttctgtgtaactaccttcgtcataggcgtcgtactcgtcgaagtttccttcgtattcgtcgtcgttggtctctcctcctacctcagagcccacgttgactcttgaggccacttcctcatcttcaggatcttgggcgtcttgaggaggacggggctgacgtgtgttgcgagtctccaccattgttgttttagcttataaggttgttgtctatttgcagacgcttccttcagctctcaatgaaagcaccaaaatattgaccgaggttt

SEQ ID NO: 259717 - DNA, 1241 bp, Cannabis indica
aaaattaatgtgactaacgacaaatcggccatagagacgacagccgcactgaaggccaaaaggagaaggaatgttcaccatactttggattgcctgaacaacaaccaagaatcggtttcaaccacaaccgatccccattgtttcctctttatccaactcaaagcctccttaacccctaccaattcggccatagccgaatccacacacccctctcgcaaaaccgtgaagccttcaatgaatcgaccctgatgatcccgggccacccctgccgctccaaatcgactatcacttgcaaagattgcaccatcgacattaaccttaatctttcccataaccggtttcacccaatgctctaagtccattcttgaacccgtaggaacaagtaaagaccccattctcctttgttgagcacttctccattgattaaggactactcttgccaatagaataacctccgccgctgacattgatttgtcccgccaaaccacctcatttcgggcaaaccaaatcgcccaaagaaccatgagcaattcttcctgggccgtggttgagtgttgtaacagaatgtggctaaaccaatcccaaaaagactccataggcatgtgactccaatttataaccgaaagatgccaacaagaccgtgcaaaagagcattgcaccaacaagtggaaaatagtctcacgcacctggttacacataggacaaatttggtcaagaggaatatgtttggtagtaagttgaaccttagtagacaaacagccagataaagcacgccacatgagttggtgcactttgggagggacatgaagcttccatgcaattttccatatcttaatctcaaaatcactcgtattagtgatctccgaatggtgcaacaaccgatatgcctctctcacagtatagaaaccatgaagatccttatgccaataccaagtgtctatgggagtctcctgatcaatgttggttcgaaggataatctctttatctcgatcattgaatatatccgagaccacctctagatcccaagcccgttctcctaccaccatgagattattaaccgtccacgtctccataccattggctaaagaagtaacccacggttgagagtcatctgcaagccatggatcaaattgaacactaatgttcgtacctggaccaaccaccctacgggcgccctccttaatcaaagcttgcgtttcaaaaatactcttccatatgaagctaggattcggcccaagaga

SEQ ID NO: 259718 - DNA, 529 bp, Cannabis indica
atggtaaaataaagcataagtggtcgacctttgatgtgggcccaccactttgcaattttgcaatttttaaactatttatcttatttttctcaaaaatgtcatattttccaatttgacctcttaaatgccaagactatttattcaataattaaaattaattatcaaataaagttcccatttaatatatttattaattaggcttaataaagtctctcaattaataaataaaccctagaatcttctttcttcacaattaagcctagcttagtgaaaattcataaactagacatagtgtaattttagaatcataattgattaattaaaatcaattaactgagtcttacaagtagtattgtctcaactagtgaggggaccatgggcctatatgaccaagcttccaataagcagatctagaatttaccaagtaaattctctaacttattaattcctcattgaaccactatagaacttggaattgaactctcagctatatagaacgctctataagttccacgatatagatacgcta

SEQ ID NO: 259719 - DNA, 549 bp, Cannabis indica
ttatgatcaaagtagagtaacaggttactctttttaataggcgtgaccgaatttatgcccctcaatatatatgtttttaataataaatataatgttgaagcattcaaaacaaataaataaataatgtaggttaaaaggttataaaataatttacgttaaatcccaatctatttactgtttatggaaataactcccagcaaagaatattaaaaaaaatacaaaatatattttcttataaggtaacattattatttttttggctaatttataagtgtattttccatttaaataacaatagggaaacttacaaaaatactgaaatttggattaatttttacaaaaatactgtcacatggaatttttttcaaaaatactgtgtttttataaaacaccagtaaaacacaaagcaatataactcaaaacaacactagaacactagtaaaacaccagtagaacaccagtgaaacttaacacagtatattgcagtatgaaacttataaaaaatacagtaaaaagtaaaaaataccgcctgacagtatttttataaaa

SEQ ID NO: 259720 - DNA, 512 bp, Cannabis indica
aacgtttagggtttgataaaaaacatgtaccgaagattatgagatatcgtattctaataggtttaggttaactaaaaataataatatataataaaatgctaaaatattattaaatcaacaaatatctaatttttaaattttaaaagtaagccctctatcttcgtaactttaggctcagttttgaccttaaaaacttccgaattaggatgtaactatttcaataaaatttatagatctttgaattatcttttcaacaccactagaatcacctcaatcggagctctaaatctctagacatgatcattttactaaaacagtttttaatccttcgaatttatctaaacctacgaatttttttaacattacttccattataatgttatttaatgcactcatacaataaattaaacccactaaataatctataaaactctattagactttcatattgggcttttaattgagtaattatccaaattcgtaaaaataccataattttaccttgacactta

SEQ ID NO: 259721 - DNA, 770 bp, Cannabis indica
tttttaaaatgcaatatttttgttaatggggctatagccccacattgatagtagtaggtccgtcatttattattattcttattattgttcactacaaaaatttgctatttttagtaacaattttttagtcacaacataaattttttgtgactaaatgtggcttttagtcacaacaaaatattacttgtgactaaaacatagtatttagtagtatttagttacaagttgtcactaatttagttttagtcacaacaagtattgtgactaaaaatacatttagttacaataaattgtaatttttgtgactaatacttttagtcatggacattttagtcacaacataggaaccataatttataattaatcataatttttttatttttagtcacaagttttgttatgactaaaagtaagattttttgtagagattattattattattattattaacttccatggaaaacattggatgtagataatatacggatagatttgatttgtaacagggtatatggaataaataatcaacaagtttgtgggtggaaaggggattggtatacgaaattgggaaattctaattggtgatgtaattgttgggatttaatgtattgattcttatttctcaaaaaaaaattattaaattttttggtatgaaacgaacaaaaaagaaattaattggtaataaaattattaaaataacttagctagcataagaagttagaatgaaatagacaaaaataagaatgactcttaaaatatcttttcaatca

SEQ ID NO: 259722 - DNA, 659 bp, Cannabis indica
ggaaaaaagaagagaccaagccaacttagagcagcatggttgcctataaagagttaccaagcccgtcaaatcaatgaaagaaatacttcacaagagaattactccttgaagaatattccttgacagcaaagatcttgtagcaagcatgttcagaccgaactgagaaggtccgcacaatgttataagataacagtaaaggtgcatacaggtctggcgagtacaatgagaacctagagttggaacttctacccaaacactgaaatagggaatatcttggtaagtactctcactagccaacttgtcaattaagtacctttaacatttcatcgtgcaggaaccgataaaagcgctagtacctacgaccttcttggcgtgatctcccatcgttcttcaatggtggcctctgctttgctaagtcatgtaagggtagccactacgtgatttcaaaaatggacactaagctatatgcttttattactcgttagactaattgtgtctaaattacttgctcacaagattaacttcttaaagttactcttttagttccacatgcgtactatggatagcaccccaatgaagaactcatgcaaagtctgtgaaacttggtgaatagcaagtgaccaagagacttgcctgcatggtcgcttgggaggcaccca

SEQ ID NO: 259723 - DNA, 1024 bp, Cannabis indica
tttgctgtcgaacaacgccccgctccatgacttttttgaagtgaaattttctaacctagctctctgaggcggtaagttgaggcacgaggatcatgtcatgagtctcgaataggccagcctgcagcatcaaagttggcagtaatttttcccacattgccaggtgactcttgaactctcaaattcgtcggggaaatcgatccgaggctcaagtcaaatatgttcaacaaccaataatccagatctacctctagcgtcacccaatgccgcgaactatcgaagtagagggccatatatattctctccttattcttccaactggccaagaattgaccttcatcccctcgaatcaaatctaatatgccctcatcccactgatagttagcctggtcatcacccgcagcttcccaccgagcaataactcctgctgggaaaatacacggcatgatgacacatctatttgggtagacctctggataaaagtgttgtcgcctcctcatcaaatggaatgccgcatccaaatgctaaaacatgaaaattaaatatgtcagagattaaataaaaagagttagataaagtctttaaaagcaaaagaagtaaaaaagtcttaaaaacttacatcgttcccaagccatatcctcggagtatgtagttcaaggaaccaagacgaatcgtatcgaccggtgaagcactctctcgggtacttgttcccaatctggccgagtacccaactgtgaaaagtcctgagcagcttccgatcaaccactctaagtgggtccgcattcacgagtgtcgaagtagccctagacttcttcttcatttcagtgtactcagcgaaccacctaggccgccttctcttcctccggttctccatgagttctggagctgtctctaacacctgcacctcagaatcctgagtatccccgatgctggtgatattcgtcttctcaggtgtacagaacatgtcatcatcatccggtttgtaatcatttgggagaatgaattcatcttccaatgactgagcctc

SEQ ID NO: 259724 - DNA, 537 bp, Cannabis indica
gtcctatcatttacacaaggattgcatttattatcaatctgtttatacattgatttacaataattaagctaaaaaacgtaaacataataaatgaagaacagtttccagtttaattcactaaatacagcaacgtatgcgacttctctagtgcgagttggctgttcatattcttgcataagctcgcaggcttaagatgccaggatgtctgcgtccttgtgcgagttggttgttcatattcgagactagttgagtccaggatgtctgcgtccttgtaaagtcacttttacgaacatcatataccgagctgatagaaccaagacatgtgagtctatatcggtttatcgaggctgttgggtcatcgggaccagctcgcaacatagagaatcgatctctatgttttcacaggaggatcgtggggatactcgcatatatcttgatatatgcagattaaagtcgctccttggtcctacataatgtgattcatacgaatgcgattagacttggtcgtattcgcatcatctcgctgagtctggttca

SEQ ID NO: 259725 - DNA, 801 bp, Cannabis indica
gtagtcaaaacatagtgcaacctgaaaaagtttttactgccatcttttttcgacatcatgatacatttaatggttcatctagtgagagaagcaaggtcgtgtgggccggtatggagtaaaaattgatgagcttggttttactttagttgatttagaccaacaatgaagactcaaaatttaaaactacaattaacagcagaaaacaacattgttcaatatgatttcacacacaatttaaaaattattaagcatttagcaagtaagaaagatatgtgaaaatataaaacaaacacatcttaaataatttccaaggtttccaacaaactgatacagtgcttcattttgagtcaagagtcaaagatatcattcattgaatagagtagtcaactcatctaaaatagaaaccattatagcaaccttttattcgatcgaaaagagaattcgtcgttgcttcattttagtcgagagtcaaggtcatttctatttatgagctttcaccgttgtttcataccttgtaagtcttattcttagcagccactattcagatggacattactaagaataaaacacttacaataatacttatcttttgagattctacggcattaaattgctaataaatgtccatgtattagggatgaatctcactaaaataagaactgtgtagaaccaacaatggagatcgaataaccttaaaactaatactcattattttaaatagtatattttcatttgatacttattttaatctatttatttatttatatatttatttaattaaaattactaatttagataact

SEQ ID NO: 259726 - DNA, 589 bp, Cannabis indica
ttcaacgatttcaccaccaaaagcggcagccaaagctaaaatcaccacaaccaccacctctaagctcgatttatcctgaaaaacaaaacaaaagacgatcaaactttggggatatgttattgggtatgaaaaatgcaacattttaaaaaaaaatgggtaaaaaggaatgaaaaatggagaaatgggagatgggaggcggtggttgggcgagggtttcgtgaaggggttattggttatttttttttaggggagaagatgaagtgagtaagacaaagggctgaataaggttatataaatcctatggcatcggttattttgtaataattgacgccataggggacacgcgtcagccgatgcgtgcccctatagcgtcagttattacaaaataactaacgccaaatgtggtgttattaaaatttaacaccatatggcgtcgattattttataataaccaacgctatagggtgtttttattaaaattttatttatccacactctatagcgtcgattgtttagtattaaactgaaaaaaaagtgcctccaaagacttgttttgtgttgcgatatttagcacacgcaagtgtacgta

SEQ ID NO: 259727 - DNA, 792 bp, Cannabis indica
caccttactcaattcctacaatgccaaaaaaatacattagattcatgtacttgtatttaagactttatcttagtacaaatataattagcgtacctgaaattcaagacttagtcgactttcaacaaatttcaaccaattagtaaggttgatttctggatgctttttagggacttgtgccagtcgttgcacatcattctcttctaatgcgggcatcattataatgtcttttgtcattctattcttgaagtcttccataaactttccagcaaggatcagacaatcatgtttgaactcatccgacactttaaatcccgtctagtttgaaggaaaataaacacgattagagttaacttctgaattaataaaaaacaaatcaaaattctcacaaataaacgcatacctgtatatctttccaaactttattttttagtgtagggttgacttctttccaattttaataggacaaccccatcgtctcacgacatctaactcctaaagtcgatactaggttggagtagttttttccacagtactgtcctttgtcattcacctcgagtgccactctttttccttagtccattagcttggatatttcattcatctgagtagctcctctgtgtaggtatcggcctaggacactctacttcttggtctgaatctaatcttgaacctgagttggccatatctacaccattaataaataaaatttaaagttagctatgtaacaagttgtaggaatatattttacctggtatctagattttactactatgtatgttatttaacatccta

SEQ ID NO: 259728 - DNA, 751 bp, Cannabis indica
tctcgtcataggttttaaaccaaaaattactgttgttgaaagaaatgattattttattcacaactgaagttcaaaatatttcatcagcaatgtgatttacaatcattaatctcataagtacttccccagttcaatcgtttattttatcaatcttccagaagcatctggttttgagaaagcgggttttgatgttcaaggtcaatcacttacatactcccaccattgtttcaatatccagagtcaatccctgacatatcccgaggttccaagagaaataatcctggttttagttgtttgtctttgactgttatgggctgacgaccagctttccacgtggcagccttatatgcaacaatagtgagccgatatctactcacgtcgcaattcttttacaaaattgctttaccagattaactgcgacttgtattcttgtgactcgctccctctcgaaaccgaggtgtcccttcctcctatagaggagggttgtaatccatggttgttcgagttattgagctgatctagctgatcatggacatcgttctgcccctttacatattgttgaaagtgtccttgcgacatgagaccttctaactcatctttcagctgacaacactcttccatggtatgaccaatatccccatgatatttacaccgtttagttggaacccttttacgcctcgcatgtttcataggttttggctcgctaaaaaagacttcctgtacatgcacgaggtagatattttcccaagtt

SEQ ID NO: 259729 - DNA, 831 bp, Cannabis indica
tctgaatctggatctctttctcttcttcctttgatgttgattctgcttcttgtgtttggattctcctacagtcttacacactatgattgagataccacttgatgtgtgtgggcgctactctatcactcaaggaatttcgaaattgaagagaagaaaagagagagaggggcgacaaaggacaaaggcttttttctgaaggaaacaatgtgtaagtcatcgtttcctggagccaacactttctatttatagaatgccatctaggtttaggttagaattgtatgcattaaaaaaaaagaaaaatataaatggtaaaccctatacaaagtggctggccctattaggataatgggactcactttgcaattttgccattttgtcatttcgcaatcccattttctcaaaaatacaaattttccaattcaaccatttaaatgccaactctaaatatttaataactaaaaattaattattaaataatattttcgtttaatatatttattaattagacatatagaatctcttaattaataaataaacctagaatctcttttctttacaatttcgctcttgcttagtgaaaattcataaactagacagagtctagcttttagaattataattgattaatcaaaatcaataaactgagtcttacaagcagtatggtctcaactagtatggggaccatgtgtctatgtaaccgaacgtccaataagtcgaaacgaatttaccaagtaaattccctaacttattaattccttattgaatccacacttagaacttggaattgcactctcagtcatatagaacactctatatgttccacgatataga

SEQ ID NO: 259730 - DNA, 827 bp, Cannabis indica
tatattctgtgaggtgttatttacaagtcatctatcttagaagtataatttagtagtgtaaaatgttacaaaagaaaaaaatactaattattctattttatattatatcattcattcgatagaaagaattattaacttaaaaatattacaattattattcaagaccgcgcgaagcgcagattaattccctcaataaataatgataaaatagaatctaattacataattaaattaataaatttataatcaatttctttgtagtgattaataataatacacacatgaaaatgtatattttaaattatatcacttattattattaaaactataatatatatatatatatatatatatatataaaaattacaaaagtttgggaacatcgcgcaaagcgcggcatagtttcctaatatatataaagaaaaacattaacgaattgaggtggcaatttgaatgagtttttcctcattttctttgatttctcaattttttaaattttttaatttatttataattttatatatattattaaataattaatgtgtcttttcatttgtataacttacactattatgtagtctctattattatattactttctataatttacactattatataatctctattattactatattactattggtatataagtgaattttggttgtattttcttaaatgtaaaatgtcataagtttgtacaattcaatttgcaaataatattatgatctctatataaatatatatatatatatatttatctcaagtttctcctaattactattaccatagaataataaccctcctaaattactaaagatcaa

SEQ ID NO: 259731 - DNA, 783 bp, Cannabis indica
agcgagaccgagaagcggtccgtgtgggacgagtacgccattggatctttggatcgttgtaagcctagtaggcttgggcccaccaaaacagtccaagcctcaataatggtccatcacatgcaatcactatttttaattgtttcttttaataaaaacatatttaaatagttaatttttttcttttaatggtgggggctaatgttttcttacttgagaaacaaaattaaaataataattattaagagcatgtttggtattgttttctgtttttatttcaaaaattattttagaaatgagaacaaaaatagttttgaagttttaaacacaagtcatgtttgggtagtgtttttaaaaacaatattgacaaaaaataaattggtttttaaaacaggaaaaaatattttgttcttttcaaaattcttattttttgtaacttttttttctgaaaactgttttaaaaaaataagctaaacaagccatattgttttcaaaaataattttttgtttttaaaaacaaaaaataattttttaattttgatgtcaaacatgcactaaagaattttgtttttttttaaatgtttttatatattatttttctttttaaaattacacttttttttattttcaaaaatacagctcctaacatataatatctactatatatactactaacaccatcaaaatattttaagatctacaaataagataatttttactaagaaccgtaattatatatgtatatatttaggaattcatacaaaactactttattttttttttttt

SEQ ID NO: 259732 - DNA, 486 bp, Cannabis indica
aaaaaaattaataaaaaatcattaaattttttctcttgttacaattagaatggtcttttcttcctttttaaaatggaatagtcattccatcaaaatagtagaaagagcatcctattggaatgtcattctaatactttaaaatacaaccaaacaaaggaatagaatgaaaattattttctttccattccattccatttcattaccttcaaccaaacgctacctaaattctcaaagtcgaacttttttattaacagtaatttttatttatatataaatatatttattatattaaaaataaatatgtaaaaaaaatataagtatattattctatacaattttataaaaaaattattacatagaaaatacaaatggacactttatttacaaaaatacctccataaagtgtggacaacatttataaattttatgtgcttttaattatcaaaatacctcttaaactattacttacaaaatcagacgaatgtt

SEQ ID NO: 259733 - DNA, 1050 bp, Cannabis indica
ttgtttgatatacatcagcacataaaaaagatatatttgtagattaaatggatatcccatagtgtaaaattaatataccacgggcttaaattttttataagtttcttttttgtttgtcttttacttgtttttttaatgagataatgtaatgcataatatatataatgtagtaaaaattatatatacgtcaaatttaaattaatattcaatttttttttctttccttcacaatatatcatagcacattaaaatataccacaaaatatatactacaatcataagaagaaaaattaatatattaattttttaatatataaattaatatattaataaatataataaatactataatgaaaaattaatataataaatttaaattaatattttaatgtgctatggtaccaatataaatataccacaaacttaaactaatatcctattaaatgaatttttttctccaaaatataaaatagcatacacaaaatatatactacaatcataagaagaaatactataatgaaaaattaatataataaattaaaaaaaattatatataccaaaaacttaatttaatattccacatattttttttttctttttctttccttcatgatatactaatgaacataaagacaatattttctagtgaaatataacaatacctcaaatataaactaatattccacattttttaatttccgtctttcgttcattatgtaccatagcacattaaaatattataccacaatcttaaactaatatactaactttcagttttttttaatacactattgcacataaaaatgatatactattgtgcaaaataactatacaaaacacttaattattcaaggttataattgtaatttcatcatcaaatttttaactgaatgacattttgttaattttttttttttttttttttattttaaaaagtaagggtacgatttattaacttagttgttaaatttaatggtctatttgtcatcttgacccttataaaataactgattctaatccaatccgtaaaatagcggatatttatacttg

SEQ ID NO: 259734 - DNA, 987 bp, Cannabis indica
tgtcgtctggatctgatgcccaatcagcatcacagaaggcagtaagatcgtaacaacctggtttagtgaagtgaagtccatgactcattgtgccactaacatatcgaagtatcctctttacagcttgccaatgagtagtcaagagattttgcatgaattggcacaccttattgacactaaaggatagctcaggtcttgtaattgtgaggtactgtaaagcacctacaattgatctgtacatctgaacatctccaatcggttccccctcgtgagctgataagcgaaggccactgatcataggagttggtgaaggtttagacccgagcatttgggctttgattaacaagtctcttgcatacttggtttgacaaagatgaatcccatgatctgtataattgacctcaattcccaaaaagtatctaagaggaccaagatctttgagggagaattgattgttgagtgtggtgatcagattggttacagctatctcatcactccatgttattagaatatcatcaacatacactagaactagtgttgttgatttgggggaatgattaataaacagtgagtgatcagacttggaagagatgaaaccaagagaggtcaagctgtgttgtaacttctcaaaccaagcccgaggtgcttgtttaagttcatatagagccttgtttaacttgcacactaagtgttcttgaccaggaatctcaaaacctggtggttgagtcatgtagacttcctcttgtaaatcaccattgagaaatgcattattgacatccaattatctcacagaccaacctttggataaagccagagttaacacaactcttactgtaacaggcttgaccactgggctgaaggtttctgtgaaatcaaaccctgcatgctggtggaatcccttagcaaccaatcttgctttatgtttgagcacactgccatctgtattttacttcctcttataaatccacttgcatcctatggcttgtc

SEQ ID NO: 259735 - DNA, 682 bp, Cannabis indica
catggtaagacaccgtagacacacagaacataatcagagccacaaatctaggactaaatcccatccgaataagcacagcttcaagaaacgcccaaccaactcgatcgtaggccttgctcatatcaagcttgattgccataaacccatctttacccgttcgcttccgtttcatatagtgcataacctcataagaaaccataatattatcagaaattaaccgtcctggcaagaatgcactctgattggaagatatgacattcggcaaaacaactttgagtctatttgcgatcaccttagacacaactttgtaaaagaaaacaacacaaaggaatataggccgaagatcacccatttgttcaggattcttcttcttaggaacaagaacaatattagtttcattcaagacagatggaaactcaccagtagcaaagaaactctgaaccaaccgcaccacatcatcaccaactaaactccaaaaatttttgataaaatccaggagtcataccaatcaggtccgggagccttatcaggatgcatttggaacaacgcctttttaaatttcctcacgagttacttcctcgagtaaccgaattattttgggcttcagtaaccgattgggagacacagttgacaaccgaggaactaatcaaccatctgaatgcataaaatgaatgctggaaat

SEQ ID NO: 259736 - DNA, 836 bp, Cannabis indica
acttagtaacaagttaagtattcatttctgatagattttcaattagagcacttcttatttccatccactactatatactcctctcaataccttgtcaatctctacttattaacacatcacttcctcttgataatctctggaacgactatcaattctgcatcctaatatgaatctttctagcgtactttgtcctcactcatacgctttccgggatgactccccgaaagatttcccatcttgagattacccaagttaagtatgcttaactccaaggtaagctcatagtgggttatcagaaagtagatgcttctttgtcgttcctaattgtatttcttgctttcattctttcattaataaaattcaattgccatcactcccttcattaacctcttgcaattcctcatcggtttttgttcacttaaacttaaggaattcccatcttattgttaacttgaatcttgttcgtttctacttattttaacttgcatcaatttctcttgagctgacacaactttaaaatttcccaatcacttacagttaactaccattataaagtgaatcaatgtaacgtatacagtagaggcaacattgctcataccaagtacccacaactaaactggaaatacccatttcccgaattctcaactaataacatttaattaaagatcattccttgatcctgattttttttttttctgtgtttggtagaaatattgataatcttttcaagcacatccagaaaaatacatacctcaagtatattctttattttattgacaacctttggtacaaactaccataccaatttacagtgagtctcccgttgatgatgctga

SEQ ID NO: 259737 - DNA, 1213 bp, Cannabis indica
ccacgtcactactgatgttgtatactacgtggtattttttgtctgttaacaattctctttttttttggatctgtgttgaaccatttacaccaaaacaataccaccgtatatgcaccagtaaatgacacatgcagtatttctaaaagctcgccataataactaaaaccttctgtgccaggcacacacactccactgttttgggtgaggcgatttttgtctcgatcagatgtaataaacctagcaccgtttattacacacccttgataggaataggcagcaagatctgatccagatgctaaagctagcaattcctccccatgatgacctaaagatccaatcttgtgcaactcgtagatctaaattgggataacaaaatattagaactaattaatttcaaatcatacttagttagtgattacaaatgaagataccttattataaaaccatgatgggaactcctgtttgtgtaatttcttatgatctgcattaggatccattcgtttcaggagatcaaggtgttccctagtcattatttatttgtgttagaattttagtttatggaattacaaataatgagagagaaaaaagtacttgacttacttcatatagggttcaacttcagtagaattcaaaaataagaaccattcaatagttctcctcttgtgctcgttcattggaattaaagttcctttaccgagtggacgacatagggattggaacacaaataagtgtcgtggaacatattgagcatcctcattgcgatcggggcaattaaattttgttgtgatgcctttaaagtacatcgaacaaaacgtcaaagcctcatcagtaacatatccttctgcgatggatccttcaggacaagctttgtttctaacatatcctttcaaatttttcatgtacctctcaaaaggttacatccacctcataaacaccggtccactcattatagcctcttctggcaaatgtaaccccaaatggatcataatgtcgaaaaaagcttggggaaaaattaattctagcttgcacaatatcgagatgagtttttttgcgctttctccatatcttttacatttaatgtccttgaacataattgtctaaagaaatggcatagctctattatagtgtctcctatattttttggaagaaatccagaaacactgagtgaaagtaatcgttgcattattacatgacagtcatgggacttcaaccc

SEQ ID NO: 259738 - DNA, 521 bp, Cannabis indica
aggagcaaaagtaaacttaaaaacaataaaaataatgttctaccttatatgtaatctaacttaaccattatactaaagctaatattatgtttataaatattattttttttagaaatatatgttgtaactaattaaattgcatatacattatttttccgattgtttttaagggggcgattgtccacctcgcctacatgtgggtctatccagggccgtctcaaggtgttgagaggcctagggcaaaatttaaaatgaggccttttttttacaaaaaattaaaataaatattatttttttttgctctgagatattatttattattgaaattttgacacaatataattaactcttttatctccatataataaataatttttctcacacataacctaacttaacgtaatatttgattataattaataacatcttttatattgaagtgttacatattttaggacttttgtaaaaaaaaaaaaaactcaaatagtatatcaaaaattatgttaattttttttaatata

SEQ ID NO: 259739 - DNA, 682 bp, Cannabis indica
aggacggcctgatagacctagccagtggataatttctatatgtcttgaacaacctgacggtaaataatgtggatactacatcatgaaattcattgaaagtttcatgactgtagaagatcaaatacacgtgttgatacaaccggtaaaataattaataaatattattctttattaaatagcatatgataatagactttactaattaatgtatatagctctgttttacacggtaagttctctacttcgtacacaaatgtcgagataaatgttattcgcgataagtagattttttacgtgaaagcgaaagcggagtgacaacggttgccttgttgattagtgtgtatatatcttggggtgttcgcggtgcgggtggtgcggtttttgactattttttcaaaccaacccgcacatgcggtttttccaatttctcaaaccgcacccccatcgcgaaactaaaaacccgcaaaaacgacaccgcaaaaaatagtgcggtgcggtacggtttttgtggtttatgcggtttggactatcactaaataattaaactatcacaaatacaacaaactttgagcaaaacttgtcaaaataccataagtcttgaaaataaatatgaaaaaaaaaattaagtgtcaacaatacaataattagtggactttgagtgaacattcacatattggaccta

SEQ ID NO: 259740 - DNA, 1011 bp, Cannabis indica
ctatctttaagaaaatggaacaataatatataaggctgcagagaaggcaaaactagccacataggttcttgtcaaggaagaggaagagcaaaataagtctgattcccaaaacaaaactgtatactcacctggtgatgcctggggggctaaatcactactcaaacgatattttctagtcactaaaagtctcatatcttgttttggtagcaaaataagaataatgcagacagaatcacaatcgaattgatagaactacatgttcatgtagttcagatgaacatgaacctgcgcacctagtgttaggggaactatcaccctgggcgcatagctattcccctagaaatgctccagatgggttcatttgtttctcgaaagcatttgtatgttcattgtggataaaaataagggaaatggctgggaaacttctttggaaaggtacttcagaatgctgtaagtttaaatacgtcaacctaggccaccatagtggcttggggcatgcactgggcgcctatgtgggggccaacatctctgaatttcatctcattgatgttcaatctcttttcagtgaaaagtactccacgaatttagtcaaatttgcacaagcatcactcggtgaaacaaaatatgtgcctaggttgaaatgtcaacctgggcgcccattgttggggatgggctcctttaagatgtcgtttacaaaatatcatgtcctgatgtttttccttgatggatttgaggaattggggtccaagaatgtcctcagaaacctaagccctagttgtggtgtgtctagactaactagaggtcaacttgggtgccctttagggcttcatagtgcccaggtctcgtttctcgtagacttatctctaaagtctgaaacttggctagggtatgtctctcatgtattctaggacaatggctaaggagattgcccataagaagttgcttagaaccaaaactggtgcgagacgtcgcacatgatgttaacttaggggccagcacttgtactggacc

SEQ ID NO: 259741 - DNA, 1367 bp, Cannabis indica
tcttgtaattatcttaatcgatttggggagaggaggtttatatagttatgacaattggacaagtcaccaaccatatgctgagctgtcaaaaacagttaattctgtctggctcttcaaagtagttaaaacaccaacagcgtatttctctgatttgatcattaaaaaaaccaacaataaccttgttcaaaaacttagtggattgattctcaggccttgccaacccttggagtaagactatctaacattgagatatgatttgaactaagtaattttggtcttcattgttttattttcttcctttgcttttgatcattaattgtttgtgtttttgtttatctttggatctttgttttgtattgcttgattttgtttaaagccctcatgaattaattcttgggtaccttctcaaaaaatctcataccaataaagatattgttcattcttatatactcgtgatcttttctatttctaaacaatgtaaaactttggttactcacccaacactatctaatccatcgatcactgactccttatatgagggtatataatactatttattcttagcaaaatgaacaaattaaatgtagaacttgatatgtatatgtattcgttatgaaaattggtactaaaactagaaaatgggagaatatgtcgtgtaaaaaaatgtgaacaaagaaaaaagagataatgtcctcaaaatgaagttggggtgtgacgatagagttttctttcttaaatagttaggattggttaattttcggcccatgtacttgagttctcctacatttcaggcccaacactgtctttggtattattcattagggaaatttacacccactactgttttttcccaatttattacttttatactgttgtacggcaaatacaacctttttactgtttttttttttttttggcagtttactgcctttaaaactttagcttatttatttattttttttattttaagtgataaaaaaatgatgtgactgggaattgtcacatttgtggcagtcttttttttttttttttttctttcttttaattcaatttaatcatcatatcaatacaattactctctttcacaccacgtttttatacctactatcccatttaattattcatcttcttcttcttatgttcttcttcttcttcttcttcttcttttttttttaaaaaaaaaactacatccagttttgtcttaggtcaaatttttgtggttattctctcttcttatgtgtttaccaatctctcttctccattattctctcttactattcatcatcttcttcatttttttcactctctacttcctcaagttctctctatttctctccatcaacatataactttttattttttttcta

SEQ ID NO: 259742 - DNA, 2208 bp, Cannabis indica
ttttttttctatcttacaattttttttcaactgtaaattttattcaactagaccaactcggctttaataatattattagcaacaataaaagaagattatacttcgaaaaaatacgatcatcacatataaataagattgctttagccatatgatgagcaacctgattgacaaatcatttgacaaaacataaagaaacatccctagaagaagataaaaattatttacaatcctcaatgataccaccaaaagtggatgacaaaatattcaaatttctaacagcttatatcaacaccagacaatcagattcaataataccaacactcgaaaaatcgtgctagccatgataatacttccttgagagccatgactttagcaatccttgaaagaacttgcccaatctgcaatcctgtaatctcaaccatgacccgacccttatgatcccgaacaaccccaccaaaactatgcattccttcctcatcaaacaatgcaacatcaataatcaccttgagtttttcataacctgatttaaaccataactcaaccccatctgaaagataccaaatatcaatcgcaggaaacaaagtttctttcttgagctacactttgtttcctcacccaatcgtgagaaaaaatgaaaaaactagtctccaaacgaccctgcatcaactagaatcataaggaaacccgctacttgtcaataattctgtgtaaaatctcaggcaactaaacaatgtaaaattgattcacctgccccatgactaattggacacaacaaagagacatccacatgtttagtcttcaactgaactctcgtaggaaaacacctactaactaccctccatacacaattctttgcctttggaggaagctttaattgccaaaacttcttccaaaataccacaacctctcggtccacactaccctcacggtttgcctgtaataatttaaacggactcttaactatatactcgccagaagattcaaactcctaatacattaccagtaatccttagttactgaattggaaaggtgaataccaaatatattgactatcacttcctcatcaaataaatctttgacaacatcaacatcccaagccttcttacccaccataaaaatgctactaacattttcattagccaaatataacttgaatcaaatcctctccattaccagttcccttccacgctcccttacgaatcaaatcctttaccgcaacaagatttctccaaatataacttgaattattatcaagttctgccgaaagaaagttcttatttttaaattactgagctttgtacactttagaaaccaatgaatcaggcttggttaggagcctccaagcttgtttacccaatatagccatattgaaatcatgaagagagaggaaccccaatcccccaacctccttactacgcaccattctctcccaactcatccacaaatttttttggcggggttagccatccagactggataaaaatcctcaatgatgaactagtttatttggagtttctcaacctcctcctttagtgtctgtgctcgttctttattaagcaactttcttttctattgcatgggctttgcatccagatcaatgttgaggacatgtgtggttactgtaggatcaatctcaaccatgtcattgtgtgactaggcgtatacatcgaggttttctcatagaaattttactagtgaggattttctttgaagcaacaaacctttttcaattttgattttcttggccaaattatttggatcgatctccacctcttccaactcttccactggtctaacatttgaacttggtttcccaaggcggtaatccacatcttcaaccccgccttgggcagatccctatttagccacgactttacctttctctgatccttgaccagatctttcttctttctttgccttggccaaggtgaggttataacattcccacgcagtccatctgattgccccacagacatacaatatccattttgtgttgggaatatagtgcataaatagtaaacagaagttactaactttaagtcatacaaggctaagtggcctaaaatgatgttaaaagcaaacagggcatctaccaccaggaattgtgccatgaatgtcgtggcagttggggattttcctactgtgagcggtaggcagcacattcctagcggggatatgttgggttttatgccctaaataaaactcttt

SEQ ID NO: 259743 - DNA, 1050 bp, Cannabis indica
cttaattgtgctaatatttattttttaatttatagtggcgattgtggagtgtttgccatggagtacattgagcactgcatgttggaccgatcgtttgagcatgttaatgatgataacatgcttacctttagacataggtggtgtgtggacttattttaccagaacttgacatggtagttttttgtaatgttattcatatatacacataaacttttgcaattatattatattatactgtgaaatgttaaatcgctcaaatgtcgcacctatatcgcgtagacatcgcaaataatatcacagttgtaataataacttgcacaaatcgtgacaattaactcgctaaaaaagtcgcacatatatcgcataaaaatcgtaaaaagtagatagcatagcatattagacatgttaccagtaaatcgccaaatgtcgccagaaatcgcataggcattgcaaagaaaatattaaaaaattggtgcaacaaagtcgcacaaagtcgcatacatgtcgcataaaaatcgcacagaacaccagttatggaaaatgaaataaaatcgcatatgaatcgcataaatatcgcacaaagtcgtagacacattaaaaatattcatgcatattgttaaatattcaagctatagtcctgttaaacaacaacctgcaatacaacacacatgcatctaaatattagagaaacggttcaaagtcgagctttgcacgtagctctgttgtgccctgcaccgtgacatagcgaacaatgatgaggttccactaccacctgaccactagacggtcgacacttcgttggtcttccacatgcattgctcttcctaggctgacctactggttttttctctgctggtatcccaattcttatgttcttgatgtgttccagtagtacccactcatcctcctcgccaacaatattaattgtggcatcgtagatcttcttccacgtttcttttgtgtaatatggagagaaaagtacgtacacactcacattctgactaaatgttgcagcacatgcatggggacaagggattttgagcgtttgga

SEQ ID NO: 259744 - DNA, 684 bp, Cannabis indica
taactaatattgacttagatagatataagggtaagtttatgatatcttatccaagttcaatatcagtccagtttgatgtatactctatacatccgatcctagcatactttgccaatgtcctggaaaggacaaaacacttattcaagttgtaagtaagctctattgctaattatcatgtcagtttaaattagtgtactgacaaatcatgggacataaacttttgaaatatataatcatgagtatattccattgtgttgacaacactataaccatgaataactatatgttctagatttgatagaatttatacattaaacataatatcataaaagaaatcatgtgaaccatgcaacatacaatgatttctgatcttttactaattagtaaatctgattatattgaaatgggttttatttagggcataaaatcctaacaaactcccactttgtaacaccctactagtttaggcgcgttatcatgattttaacttaattgtgcagctcgttgctaatcaacaagtttattgaaaaactgtgaataattaaaactttatttaaatactcataaataccaaaataaataacatatatataaccaggatcctgtatacaaaacatttacaatagtttcaagtattagatacaaaagttgtcacctagcaactatacaaaatatgaccagctg

SEQ ID NO: 259745 - DNA, 489 bp, Cannabis indica
aacaaaacagagggtccaattaataacttttgaaaaacacaggattcaaaatgatatttacccattatgtaataatcagagattttaatagaaatgaataaataagtagggatgacaattatacccgtgggttgactttcgggggcgggggagggtatgggtttaaagatttatacccgagtcggaaacggggcgggggcgggggcgggggaatagatacccgccccgatatgatacatgtatatatttaaattttaaaatcataactactacaattaaaataacttaattatattcttttttttactatacaaactattctacttaataagtttattattttacttagtttttatgattattatttttttattctctttaagacatcaattttttttcaaaaatatatatgtaatgggtacccgataggaatccttctcccgtcgggtaatacctgtcctgccccctttaatttaaacaggtattggg

SEQ ID NO: 259746 - DNA, 620 bp, Cannabis indica
aaaacttaacacagtatactataatatgaaactgttaaattagatctcactgtaatattcattattacagttttacaagatgaagtgaaaatacaaataaaacacaacagaatacaaaaagaacagatcctatgtggcttcgcctctagtggatcaagatctggttgttagttacaaccgaaattgtaactaacttccagatctatgatcaaccctaatctacaagtatttaaagggtactagagccataccagatctctcagttgagagataccagaaaactcgaacccagatttccagatctggaagcttcagctccaaatctcagtgttccaagttcatgcaaagaaagaaaaagagttagtgagtgagaaacaagaaaatacagagagataaacacatagaaagaaaaagagagacaatctgaaataccagtcaaaagtttgtgacttggatttctcaccttttgtatcaatcttcttcaaaatagtgcagatctgtagatcgtcttcaaggcgagctcgaaagaggacgtacccctgatttagggcgaacctccataatctctggtgttcattttctaaccctaacctaatgatctatgttcgatatttgtatgt

SEQ ID NO: 259747 - DNA, 1326 bp, Cannabis indica
atacttccaggcttaccccataaaagtgttaaccgatcagcccttgagataagttttatcaaaaccagatgcttctggaagattgataaaatggtcaattgaactggggcagttggacataccataccatcctcgaacatccatcaagggccaagcttaagctgacttcttgatagaaggtataacttcagaagaaatcccacctgattagcgagacgcagaaacctggaagttatatgtggatggctcatccaacgaacagggttcgggtgcaggggtaatattaatatcgtcggaaggctttaagtttcactatgctctgaggttccaatttgacgcatccaataacaaggctgaatatgaagccttgatcgccggcttaaagatagcagaggccttgaaagtcaaaaatctcatttgtcatagtgattcgcagttgatcgtgaaccacgtcctcggggaataccaggccaaaggcttaaaaatggcaaactatttagagaaagtttgaaagaacttagaaagattcgattactttaaaatcaaataaattccgagagaacaaaactccaacgtcgatgccttagcaaagctggccttgcagaatgacctggatgaactaaatctggttccggtagagatgttgagcgagccaagtatatgtgaaaccaaagacgtcgagatgatagatcactctccgacatggatgacacctattatcaactatttactcgacgggcaacttccaaatgacaaaaaggaggcgcaaaaactattgtatatagtgcctcgctacacaatgatcgaagacaaactatacagaagagggtatcaatgcccctactttggtgtgttctcctcgtagaagcaaacaaaatcattagagaaattcatgaaggcttctgtggggatcatgcgggttggcaaagtctatctaaaaagatcattagacaaggatattactggccaacaatcaataatgacacacatgagtttgtcaagaaatgtgataagtgtcagaagcttccacatatacctcgcgtaccgccaacaaaacttagaatgatgacctcgccctacccatttgctatatgggggatcgatccaattggggcattatccactaggcaaggtggagctaagtatgcggtagtagcagtcgacttcttcactaaatggacggaggccgagcccctcgtctccataacctgtaagaaagtccttgactttgtcgtcaagaacattatctgtaggtttataattctgatgaagatagtatccgataatggaacccaatttgatggcaactttgttggaaattatttt

SEQ ID NO: 259748 - DNA, 1102 bp, Cannabis indica
tttgacttgcctaggtttttgttctccttctgctcgttgaatcggcctcttcgagttttataaaaccttctgcacggtcaagaaaattgctcatcgagtctattggaccgttttttcttatgtccttccaaagttcaccgaggacttcaatgcccccaagtatcgtggacaactttctgtcttcaattactcgtgaaaccttggtcgcctccgtgatgaatctgctaatgtaggctcggaggggctcgcctggtcgttgttttacttcgaccaaatcccctaggtacaacggaagtttgtgggaggagggaaattgtgcatgaaactctgaggaaaaatccttccacgagtttaactttccgggcgccaacttgaaataccattgctgggcggaaaaatcctacaacatatatctcctcgtactccttggagatccatttgcatctcaaaatacttaaggtgtgatagcggatcttccttaccagtatacagcttctaggtttggcatcttaaacttgtagggcaattccaagatattcatctctcgggagaatggggttccacgtgctcgatcctctcgagattgttgttcctttgactggccataccttggaacatactctttagttcgtccaaatgtgcctgcacggctggactaacctattcggcattttggtcgatctgagtcgcatcagcatctttctgagcgggattttgaacatggattttgagttttacgatcggcgtgtcaagctgatcgtccactcctctcctcctgtttagatcttttttgagatcatgggtcatccccaacctctcaaatatgaaaacgcctggctgtctcagtgactggttggtttggccaattaactgaccgttaacttggttggagttattgggtatgacttctcctgatgaattactagacaaggactgcccgccaaccacttggcccacgggtggaacctgtgaccggggattcggcagttgaccatttatagtctgagaggtattcatcactggatcttcgtccatttcacccaaaggaatgacattcgcaggctgctgcccggcaatcgggtaggctctctaaatcagcaca

SEQ ID NO: 259749 - DNA, 710 bp, Cannabis indica
tcaaatcaaaatgcatccactagacaaagaacatacaatttttcgaacatatatgggtccatatttctacaaagtcatcccatttggtctcaaaaatgcttgagccacataccaaagattggtaaacaagatgtttaaagaccagattggacgaaacatggaagtatatgtggatgacatgctcgtcaaatccaggaatgctggggggcacatagatgaccaggacgaattcttcaaagtcctgaggaagtacaacatgaaactaaatcccttaaagtgctcctttggagtcagctcgggaaattttttgggttttattgtcaatgcacgaggaattgaagccaatccagagaagattcaagccctcttggatatgaagtcgccaacaagaaccaaggaagtacaaagtttgactggttggatagccccactcaaaagatttgtttcaaaatcaacagacaagtgtgttccatttttcaacatcctgggaggaaataagcaattcgagtggacacaagaatgtgaaaaagcttttcaggagctacaaacgcaacttgcaaagcctcccgtactctcgaaacctttggatggagaagagctcgggatagacttagctgtcaccgagcatgctgcgagtgacgtgtgttaggttttatgccctaaataaaactccatttcaatgtaatctattttattaaacatcaataaag

SEQ ID NO: 259750 - DNA, 838 bp, Cannabis indica
ttttaaattttattttattcaattctcattcacattcccgtaaaccctaaaccctgatgcctgaactctgacccttgatcccaaacctctaaccctaaaaccccaaccccaacccaaaaccccaaaccctaaacctttaatgccaaaccccaaaccccaaaccccaattcccattcccattccccgacccattcccactcccattcccattccaattcccattcctattttctttccctttcccattcccatccccatccccattcctattgccattcccattcccatcgcattcccattcccattcccattccaaggccaattcccatttatattcccattccatttcccattcccatcccaattcaaattataattcccattcccatacccattccctggcccattcccattcctatccccatccccattcccatacccatccccattccccggcccattcccattccctggccattttcattcccattcccattccctagccaaattcacattcccattcccattcccattcaacattcacattcgcattcgcattcgctttcccattcctattcccattcccattcccattcccattcctcatgccaattcctacttctattctgattcccattcccattccccaacacattcccatttccaatccccattcccattccccgacccatgcacatttcatggcatgtttactaatcaggattgggagtgataggtatggtaatgactccttttcatttgtttacttttttttaatggttggaatactctaagggaaagacataaaattaggagaaaagaatgggagaagttctcc

SEQ ID NO: 259751 - DNA, 538 bp, Cannabis indica
gtatattgggcaaaatcagggactacaatgagctttcacaaaaatcatggtacaaaagagccatgtatgtcacatacacctcagtatacgagagccaagggttgcagtggcattttacacacctatgttagtatttctatggtttaataaaatgttgatgttatcgctagtaattgagtttcttaatcttggagtgctagtgcaagtggtggtaagtgttagggtttatgccctgaaaagcatgtaaagatattttttattattaaataaagatttaaacatttgatatatgtgttaatgttaaattattgatatttattattgaataacttatattaaatatcaaaaaattcattattcctatctaagaatatggcttgtaactatacagagaactaagaccacttagctatgaataaagtagttaacaacatattaaagttatggaatctttaataaatggttgctagtacagttcagtgatgtccgttctttagtgcaagtaatcttggtttggattacggatgtagtgagacat

SEQ ID NO: 259752 - DNA, 629 bp, Cannabis indica
atatccaaggcggagaagatcccttctgaggagcttgttccgcgctctgtggagttggcttcgcagtcgatgactctgttcatgaaagctgttgccgctggttctaaggaagctgactcgctgaagaggcacaatgcccagctccaggagaacatgaagagactgaaacaagaggcggctagaaaggacaaagagcttgaagaccttcgcaagtctaaggagcaggctgagctcgaggccaagaactctcaggtgaagatcgaggagatggctcgcgacttggaggtcgagaaggagaatgggaagaaacagtatgatcaggcagtttctgattatatttacaccactctttccaaaatcccagacttcgacttctctatcctcggagcagaagccgctgagatggccgaggcttttcgcgccatgtcgcccactcaaactcaaggtggtggagggaatcttcctgaggaggccgaggttgcggatgctgaggaagtcgagaacgaggccgctagcaaagtcgcggatgaacctgctcctgttgctcctgatgcttgacttttctcttctatgtttaaactatttttcttgaattttctagtttagttttttatgcggtacaggggtac

SEQ ID NO: 259753 - DNA, 629 bp, Cannabis indica
tacgaacttttatatggaagaaaatgtagatcacctattcactgggatgaagtgggtgaaagaaagttcttgggtcccgaagttgttcaaaaaacaagtgaggcagttaataagattagagcgcgaatgctcgcggctcagagtaggcaaaagagttatgccgatccaaagcgtcgagatattgatttttaggtcggggacatggtatttctccgaatatctccgatgaaaggcataaagcgctttgggaagaaaggaaaacttagcccaaaattcattggaccttttgaaatccttgagaggatagggcaagtagagtacaggttggctatgcccccagcgctggcagctgtacataatgtgtttcatgtttctatgctttggaaatatgtctcagactcgtcccatgttctgagttatgaagcattggaactccagccagatttgtcatatgaggagcaaccagtgcaaatacttgatagaagagagaaagtcttgagaagcaagactgtggcactggtgaaagtactgtggaggaatagtaaagtagaagaggcaacctgggaactcgagacggatatgcagcagaaatatccagagttgttcaggtaaatttcgggacgaaattt

SEQ ID NO: 259754 - DNA, 664 bp, Cannabis indica
aaaaagtaaccaatccaaagtaaccgatcaaatccgcacttttgtggattggattggatttgagctattgtgcggattggattggatccaaaaaaatgaaatccacacttagtgcgaattggatgttgtttgaccaaaagatacagattggatcggatgaacagccctacctccatcaaaaaaaaataataaatacattgcaaaacatttttttactgctaaaacatagactcgtgcattggaaatacgaatttcggtcatggcttgaataggaagtataagtgtctaacattacaaaaaaccgtgactataattagtgagtaattttttataaatttattataataaaataaattagatataatattgaattatatacatcacaaacatactaggcaccacatgaattatttttcaattaaaaatatatataactgatttttttttataatagaatataaggactttgaattttgaaagcgtataaattggaagtttggttgaaaactatagtcaaagtgttttctataagacgcagcatatgatacacgtgtggcaacacaataagaatctatattatataattacgcggacggatggcatgtcaattgccacaacttaaacttacgttacttattacggcaggaaagggaagaaaaagaaa

SEQ ID NO: 259755 - DNA, 725 bp, Cannabis indica
gcgtggcagcctccaacggcgttgttccagcgtcgcctctctcaagtttctccatctctggctcttctccgactccagcgacgtttttccagcgttgtctctctttgtttctatacttgtttgttttgtcttgttgtctttctccatggcagaacaaaactcgttaagagtcatctctttagtcgcaagacagtgcaatactcatgcacttcaggttatgcaaatccctcatgacccttggattgtggattctggtgcttctgaccatatgacaggtgatagatcactattttcttttctaagtaagtgctctcatgaaaggactgttcgcatagctgatggttcgtcttctagaattgatggaattggaactataacaatctcaccaagtcttgtcttaaattctgtcctttacgttccaaagcttgattgcaatttactttctgtaagcaaattgagtagtgatcttaattgtgaagttaagtttgctgctaagttttgtgtttttcaggatgtggaatcggggaagatgattggctatgctgagttcagtaagggcttgtatctgctaaaaatcgacaaccccatgtttaaccatggaaatcgttgttgtttctcccaaggtcaatctctttcctcagtaaatcagtctaataaaatcagtactatcatgttatggcattaccgtctaggtcatccaaattttgtatatcttaaacacttat

SEQ ID NO: 259756 - DNA, 502 bp, Cannabis indica
aaaaaaaaaaaaattagaaaaaagttcaaaaaaatataaagcaacgtttcttacaaaaatattttgctcttcagctacaaccaaaaccaaatatttctaaatcattaatccatgcacagtagcttcaaccttcttggaagacttttgaacattttcttttacactttctatgtatgtaactcacttcattctaccaaagaaatagaaatgaacaacaagtctattctcatcagctttgaagttcatcattactagaaatcaagtcctgcagcaattaaaacaacatcaaaacaacattaaacaaactataaaacaactttctactatgatttttttcttcaaatgaatgaactacaagcagagaacgtttcaaacaagacaaataaaaaaataagttataagccttgtaatatttttctttagaaggttcaacttgtaaacaccatcagaggtcttatcacgcacctaaaaaatattaagatgacaaaattaataaaacaat

SEQ ID NO: 259757 - DNA, 1559 bp, Cannabis indica
ttgtgatgaaaacgcaagcaaacacaaaaataataagttcgaatgaaaaagtacaaggctttcaagataagagaacaccagttggtttacaaacttgtctttaccaaaatgccactaggggcaaaccattaagccattttcctaaacaatgatataaggttattcatggggggctggagaacttgagaaagattgtctacacgtagctcgagaaagaccgtctacacgtagctcgagaaagaccgtctacacatagcacaagaaataccgtctatacaaataaggacttgacctttgcatagacctcattctctgcatcagaagatcccatttgctgcagcagagacctcattccctaaggctgagacctcattcccagtctaaggaaatttataaatgcctatgattggctggttcagagattttcttgtgcaagcttgggtcttgagccatttgggttctttagtagaatccatgatctcgctaactgggattacctccttcctggactcctggttagcctgagggggacctatgaacttgctctcaaaatctacgtccatttctgtagaggcaaagacaaaagatcaatgaagcaacagtaaaaaaacgacgaattcagatcaaaccaccaatcgcagaagatgatgcttaccctcagaaatctcttgtggggattgcctgtaacgatcaactgtatccccttggtttggattaaacggatgatcttcagtcttggaatcttttgtttccaatttaaactgaggtttgaaatttttgggaacatatggagaagaaaagcgattggtatattccagcattacaagccttgaggaataaatttttgagcctggatgggacatctccgtaggggagtgataatccaatttctgcatgaaactcatcaaaaactagaaagtttatggaacgtggctaaactaagccaccattttatactcagaacctactaacggaaaagcaaaaggttgagaaaactaactgttgggaatgaggtagaagatgaaaaggcggtccatgaatactaataatgaccctccaaatcgtggagccgttaaaattgagggcatgcgtggtcttgaaaaaagggattatgactaatataccttctgtaagcatttaaaaagtactttttattaaaaagaactttttaaggggcaatcgttatacccaaaattcagctaccatctcaatggaggacacgtgtcaagttaaggagaatatggatcgatgtgtgtaacagtaattacatttaatggaacaactcataaaatgcaaaagtgacagagtatatttacaacttgctgactataaggtcttatgcgagataaagatatacaaactattgcatcatgtattaatgagaaaccatacgacattggatgcacaaggcgagacatgaacctcgctatgcctgggaagacgtaagcgatgcgtaatgactgtgaaaacgacttagcgtatacaaactaagtataacagtcgggtggactcaaagcctaaataagtgaggtgactatctcgctataggaaggtgtgct

SEQ ID NO: 259758 - DNA, 1055 bp, Cannabis indica
ttttaatataattattgaattttattttttcgacacactcttcaatgacgacaatgtcgtcattgattacattatcaatgacgacaatgtagttagtgatgtacctaaataaaaaaaaaataaacgacaatgtcgttgtttatattatcaattgccaacgactttaaaagtcgttgttgataatcgtttttatcgacgaactatttccaacgacttttcaccaacgaaatatcctcattgatgagaaatactgacgaaaaaaggactttttaccaacgaaatttatcctcattgatgcacatttttcttgtagtgtatgttttcaaaatgattaatatataaatttttatttgattgtattcttgtttgaatttaaaggaaaacacctcctatcatatatacttaagcacatttaaattatttgtcttaatatacttcttttgcatatcttataaaatcttgtcatagtaatttagtctggtgatcactttgatttttgaggacgaaagatgagttatgggagctctgattttgtaacacttatccttgtaaattgtaataaaactgaagaagagaaattaaaaattcattatttgaaataatgtttgcaggcttgccagggttcatacacatgcaatgtttacaaaagagaccatgctttagtaacacataaaagtctagttttcaaccttaccagagtagtatgtttagctccattttgctgttagttaaaataactagtattttcctcttttggtccaatgataataataatcagcaatgcttcctcagggtaaatacattagtagcctaccttattacaccagccatttgcatttcatactttgcaaagatgcaaaggtcgtcgattttactttttttttttggcatcctaactagccgtgcatctatctattaacatattaaatttcatttctatttttgtatataattgcttcgaaggtgaagagtttttattttaatacaataatatgcatcattaatatgccaccacccaccccactttctaggttgtcaacataaagcatggtttt

SEQ ID NO: 259759 - DNA, 1387 bp, Cannabis indica
tattaatccaattaatttctttttatttcctcttttaattaaaaaaaattaagattgaaattaagacataataagatcttgatgttttaaattcataagccattgacttttactaataatgtcctatatttagcttcgtgagttagattcgatttctacaataataataagtactgtcattaatcagaaaaaatcaagatcaaaacgatggagaaaaaaaaaataataggattaagtataactgagtctaattgaaataattaactttcccttatgaaagtttgatgaaaatcagactcatttgagttatactttaatttttttttttttttttttattcattatgaaacatggcaaagctgtcgtccattattaatcattttaggaagttgaaaactaattttcaaagaagataattttcacatttgactaaaaataaaatttaaaaatccagttagttagttaacttctcaaatagcacttgactaatttgattagttgaatgtgtaaacattactttaaaatataaaaaaaaaaaactttagtagctagctataaaactagcaagcagacactaacacacatatagtcttctggggctaaaaagaatatttgaaaagttatatatatttttaattaatttattaaattatgcactaaatttataaataagccccgccaatattttcaataaattaaatatatttacaaagaataattataatttttattcaaagtagacaataaaattttcacgagataaaaattttgaattcatcactactagcaagtaatcatatagataaagtttttttatctctaattatgatgaatatattaaaataaaattatttaatcgttttactggtcgttttgggtggtaactaatcaaacgaaccctctcttaataaatattataaacattattataatatgatatataaattaaattaattaataataatatacatttattatgattatggttaagtagttgcgtgttgaacgttagggtgacataaaacccattacctcagtgctgtgacattataccatccattgagagttgaatcgtatgtccccacttatgtatttatttcacacatgtacacaaataaataaattattaaggaaaaaaaaaaaagattaaactaattaaggttgttgtcgtatcgtggagactatatatatataggtaataatcataatatgtatatgccaaattaaacaaagctacaagaacttttgcatgcattctaatacaattcgtgacactcatatttaacaatttacatattttattaattattttacaatatttattcatgattgattgattgcgtccacatacccataccatgatatcttttccttgttcttcttattt

SEQ ID NO: 259760 - DNA, 722 bp, Cannabis indica
aacaacagttcctgcaagacaatcacataattgtactaataagataaatagttatgtatggtgcaaaattcataacaaaatatgaaacaactaattacaatcttaaggacatagccttcgaatgaacgacatcataaaattatttttcttaagcattgaaatttatgtactgcgctcatgtcatgcgaagtaaatcatgttcctatacgatagtcaatacactaacagcagggaaaggtatgaacagaaaataactcatttaacaggacaacacaagcaagaaaaggagtatcaaacgaaacacccacatgtcaaatttaaaactactagcatagacatataaaaggaaaactttgagttaaattgatttaagccaagaaagaaagaagtgccttgtgatggtgtacactattgagaaaataagtgtagtcttgggcaagctttattttctggcgaacggatttgaggtctgataataccaaattcttcctgaattcatttgttacatgttctctgaaatgcctcttgctgtcttctttgcctatatgtttaactaccgctttgagcaagtttctgtacaccttagcaacttggaaagcttcagaactcatttccaaccttcctcttcagcgttttctttttctatttctgaaacaacacaccaagaaattcttctcacaaactaaaacatcatttatggaaattatgttttcacaagtaga

SEQ ID NO: 259761 - DNA, 1688 bp, Cannabis indica
gatgtttttcttgatgaacttttgggtttaccaccgtaaagagaaattgattttgtcattgatttggcacctggagcagaaccggtttctaaggccccttacagaatggctccagtagaacttaaggaactaaaaattcaactccaggggtcgcttgacatagggttttctcagcccagtgtgtcaccctagggagctccagtattgtttgttaagaagaaggatgggtctttgcggatgtgcattgactaccgggaattgaataagctaacaatcaagaataaatatcctttacctaggatagacgatctttttaatcgacttcaggggaagactgtcttttcaaagattgatctccgatcgggctaacatcagttgagaatccgagaggaggacattccaaagacagctttccgcgctaggtatggacattatgaatttttggttatgtcttttggactgaccaatgctcttgcagcttttatggatttgatgaatagggtattcaaagatttcctcgatacttttgttattgtatttatcgacgatatccttgtgtactctcaatcagaagaggagcataagcaatgacttcgagaacataagttatatgccaagttcaagaaatgtgaattttggctatctcaggtgtcccttctttgacacattgttagcaaagatgggatcaacgtggattcgggaaagatagaatctgtcagggattggccgagaccgaaaacagtgatggaagttagaagtttcttaggtctgctggttattatcgtcggttcgcagaagtgttctctaaaatttcaatacccttaaccgagctcgccaaaaacaatcagcgttttgtatggtcggataagtgtgaatgaatcttttaggagctgaaacagaggttaatcacaactccagtgttaactctgccttctgataaagagaagttcgtggtttattgtgatgcatccagacagggtttagggtgtgtactaatgtaggcagattgggtttttgcctatgcctcccgacagttgaaagattatgaatagcgatacccgactcatgacctaaaacttgccagtgtagtgtttgctttgaagatttggcggcattatctctatggagagagatgtgagatttatactgactataaaagtctcaaatatttctttaatcaaaaagatttgaatatgagacagagacgttggttagagttggttaatgataatgattgtgagatcttttaccatcctgggaaagccaatgtagtggttgatgccctgagtaggaagggtcccgggcaggtaactagtacggttcagattttacctcaattagcacaggacgtggtaagatcaagcatcgagtttgttgtaggcaaacttcatatcttgacgctgcaatctgatctgttaaagcaaattaaagttgctcagctaactgatcaagagttagtgaagataagagaagaggtttcagctggtcaacccagagactttacagtgtcagataatgggatgatgttattcaagaccagggtttgtgttccaagtagcatggaacttagaaataaagttcttgaagaggctcataccactccatattccctgcatcccggtatcacaaagatgtatcaggatctgaaaccctacttctagtgaagctagaatgattgcctcacagag

SEQ ID NO: 259762 - DNA, 2241 bp, Cannabis indica
ttttttaaaacaaatacttgggagctcaacaaaaatatatttaaaccaataaacaaatagtggtcaattagaactgtgttatttagtcaaaataataggtattttggtattattccaaacatatttgatttcaacacagttgacccaaagttattttgaattacccatttgaaaaaaaaattaataattatataaagtattattttttgtgaaaaaattgtacatttttatgtttaataattttttatatatatttttatagtattctatataaataatacaattaacaaaaatacgactgtattttctataaataaaactataaaaatcgtaaaaatatttaaaattatatagtattgtattgtaattttttttgttatttttatgtattttgtaaaataattctttgaaataaagaataagaagaagaaaagaacaacatgataagaaagagtaatggtgtaatataataagaaaaacctttgagagccatagtagggttttcatagttttaaaccaaataaaaggatcttcttagagaagtgtggcaacattcacaaattaattagcattaagccaacaaattaataacaatacaattcttgtgcatgtaaacattctcaaatatttcacattcacttctaactcaaacatgttctttttacctaccgaataagaatgttcaggatataaatctatacataaaaaaaacaatgtggtaattaagaaccttcccaagttgccattacttattcaagatgtttcttgaaatagacgcccaattaattaataggtgtatttttttgtaaggattaagaggtgtattttaaaaaaaatgataactttgtttttatgtgtttcttcgtatgaagctaatgacaacatgtatacaactcatcaattatttatttttattttttaatttaagccttccaaaatcttaaatgacttgtcaaattattgactaattggtgtataatgatttcatgaaatttataggttaagttttattttttcagtgcatatttattaggtcttatataataaggtcattagtcactcctcattaaatatagaaacacataatacacctacttctttagttaaattaccgaaaagggattatgtaagtctctgagccccaaatagtacccatcaatctacatcaatcccacctacttgttttggcttcttttggtttaaattagaaaaggtgacaaaggtaagaaacatacattcattcactcttttcatggtaagaattaaaatagactttacattaccttattttcctataattacttgaatatgtatatgtatatatcaatgtagatacacctccacatgcaaaatttcttgaatgttgaactgaatcacatctaaagttaaaaaagaatcctcccaaataaatattttcatttagttgaggaaaaattggtaagtatctcaaagaaagttgattatccctattactactagtattaaacaaaagaaagttgtattgttcctttatgtaaacggcccatgtgggttggtgggcccaattataaaaaacaaaacaaaataaaataaaacggaatccacaaagacttgctttttaatttcttaatgacatgtacaccttgcaattatcaataacaattctccattattgcatctttcacaagagagaattttgatgaattatgggacccaaaacccaaaaggaagaactttcttccatacccttttgtttcttggcttgcttttttggacaaagacaccgaaatggtgggggtggtggtgggttttttttttttactttctttcttgaaattaaaaaaaaaaacaaatatatatatttatataattatatataataaggttgaaaggaatgaataattaggacccaaatggagccctatgaggtatgccttttacttcttcttgcactagaaggaggtggagaaggctggggggataaatgtcttgatgtgagccttcacgcaactcttcttcttcccttaataatcctcttcttgacgatataccttctcttcttcccatttcctcttcattctttccctctaaagtaaagtttgcatcaccatttctctttattcccacaagctacattcatatataattaaaaaaaaaaacctatattataaatttaatattacaaattttaagtcaatccaagaataacccataatttctataacatgggtgattcacattcacattcatattcacaatctc

SEQ ID NO: 259763 - DNA, 699 bp, Cannabis indica
tggtagatgcattttgatttgattgtagcctgagtaagcatccatgaagcttaatatttcgtgccgtgctgttgcatctacaagcttatggattcttggaagtggaaaacagtctttagggcacgccttgttgaggtctgtgaaatcaatacagactcgccatttcttgttcggcttgggcactagtacgggattcgcgacccaagccgggtaaaaagcttcaattatgaagttattattgcctagcttttcaacttcattcttcacggctactgctcgttctttgtccaacagccttcatttttgttgaactggccagaatttgggatcaatattcagaacatgttaaattatagaaggatcgattccgaccatatccgcaagtgaccaggcaaaaacgtctaggtttgctctcagaaattttatcaactctaattttacttcgagcaacaaaccttttctgatctttagctttctggtcgggatatcaggatcgatttcgatctcttctaattcttctacaggtccaacattgctgcttgggtccccaagttgaggatccacatcttcatccctgcctttgggagttccctacttgggaatgttttttcccttgtctgtgctctggctggaggataattccttcttagccatggccactgcaaggttataacattcccgtgcagactgctggtttcc

SEQ ID NO: 259764 - DNA, 2211 bp, Cannabis indica
gcccatgctattgcaaggcactctcgatttatctcttgtggttgcattttagagcaagatatctagcctaatttgagggatatcttgttttctgaatgcccttaatttaatgaagttgatatttcattaaaaaaaaaaaatataataatattacatatatgaaaacaatacaatatgacacaattaaaaagatatactacaaaccaagttgactaaagcacagattcacgaacgtttgtgctttctctacgagaaacacttacttccagtttgaaaatgacatcattacatgaaaaactaatatactaacatctaagaattattttgataggctcgcgtgttgaggcccacaactaggttgtatatctctactcttcagacaataaatgatcagtacctcactcaaatcatgataagtgaaaccatttattgatcaaattttttgtgcattgaattaaatttatgtttatctagcttgtttatgagcattggctcagcgtcatgagactagctgtacaggaactatagaatcatagactctgtctgttgccttctttgcctaaaccaaaatgatgagatcgagaggtcagactaagaagagatttcaatgccaaagagatagaggcaaagatatattacctcttgctcccagtctgtttttatggtgaatgtgaaaagagatatcacttgtacaatgagtgcacatattatccccaaccaaagaccctacaatgaagaaagaaaatgttttcaataacaaaaataaataatttatctcaaatctagataaagtatgtttaaaagaacaagacaagttttaatgatttatggaggagacctttccaccaacgtgcaagacaaaagccatcaaaacagctgatggaattcccactaagtaataggacccaagatttacgtatgctccaattttctgccatccacatcctctacaagtacctaatattgtaaaattaaccacttgttactaaactttatattttgtaaatctcaaataaatagaaattatactcaacctgttgttttaaagaaatgtactttccttacagacgcaggaggcaggggtgaaagtgttcttttcaaatcataacatgcaaaaatctttttatgtgttgatattcaggacttggttcaaaatgagagatgacactataaactactttctgatgtcagatttatttctgaacttgaaaaaaacttttagattgcctttaatgaaattgaatacagtctattcttttcaaataaatcagtcttcattctattagttacattttataatattagaatatcagtctaataaatgactttttttaccattttaaagaaatgactatttcattttgaaataataataaaaaaaagaccacccaaattcatgactaatatttttttattattcttttttatgtttttcaaatgttatttttatttttatttcgattctcatgcttatgtattcattcctcccaacagttgacgctaaaaaatggtcaactctacatcgtctaataagtgatattggcaaacaaaaaaaaaataagaactaaagagagaataccacaatttatagtagttcactccccatatcacaatggtaatagagctgcgtttacttcgaatttttattatcgcaaaagccaattgtcttacaagagaactcaggaaaaaataattaagtctagattcacttcacaatttctaatttagagagagaagctctgaccttgaagggagaatggaaagtgtgaataatgagctaagggagctctccttttttataggcaaggatatctaactaaagtactataaaataatagaaaaaataacacgaaattcattggaaaatccagcattatcttgctagtcaattttgaggcccaaattgtcagaattgcggcgggagtgtgagacacacttacatccgtcttgaaaagagcttccattgactacttgaatcaggtcatttggataaaaaattaaaagagttatggccattttagcgagaggtgtgcactgctgaaaagtgactgcgagatcaagctaacttttgaaagtccaagttgacgtacccagaacatggtttcttgggctttaggtatattttaaggggaaattcatatggtatactaaattttgtcatttttttccaaaaatactgccaggcggtattttttactttttactgtgttt

SEQ ID NO: 259765 - DNA, 2883 bp, Cannabis indica
ttttcaataatatacattatttataaattaattacaataataatgttatttaaaataattgaaacaattaacgtgacacctcagtgtaaataactaaaacaataaattaaagatgcctcatgtctaaaccatttttatcaactaaataaaaaaagaaattaaacttgacaaattagctcacgttctcccatatcaatctttatttcttttggtgaaagtgaggtgcaaagcaccatttcattgaaaaaaaaaacaacaggagcaacaaagccagagtcaacggcataatacaacatctgaaataagaaactaacgagaccatctctaacagaaaaaacacaaatagtttaggaaactacaaagtaaataagcaaagcaaaaacataaagtagcagtcgccatagaacacttcagggcccgaaagtgaaaggagtattagcttggatccgggaacaattcattctgatccacgaacacttcaggagctaggcattaaagaaatggcaatttctcccaccacatcatttatcctcacccattttgcagcattatgagccataaagttctgctctctgccgatctttgacagctaaaaactttgcagatggagcgtagaagatctgaacttggaagcagttcccgccaggttgagatgcaaattttgagggtaagtttccaagaaattggacaccaccactgcattatcacagagaaaaccaaccctcataaactggttttgcacagcatagtggcctgccattgccagggtatgagcctcagccagagccaactcagtagccgtaaaacaagcagcaaacacaccacagattcgatttctatcatcccggaagacagcagcccctaccgagaggtttatatcgatggaaacatcagtacaacacgtcatccatcccaaaggtggggtaaggtcaattgcagacttcacactatggagctgattgcatgagtgatgatctctgtatcgcacacgaactgcccgaattgcctcagagttttgaacttggtgcgcgccatgacagacatcattccgcactttccatatactctcaaaaatgcacaaagcccagtaatgaaatcttcgaagcttagagcgccaggcctattactttttgtccttgaaccaatccagccattcactccaatttccacactggctcaagtttgtcctgattcccataagctttcaaaccaaacagctttagcgaaattgcattgccatagcacatggaaagaagattccatttcctcatcacagaggggacacaaagtgcagggtatgttgaacaccataccaagcctctcacgggttgggagagagttgttcattatttgccaccatagcagtttcaatcgcgcatggatgggacaattctaaataaatttccaatgccaatttggaacattagcgcacctatgctttatgatgagatgataggccgatttaatagagaataaacctcttttctctcctagccattgccacgagtcttcctgcttcgtcgccggcagcccaatgttgaggatgttaattgcatccgtcgaatcaaaccaagcgcggatcctggctacattccatgtctgatcatcattaatgaagtaccttaccagattcgctccctgagtaacattcaacttcagactaggctgatggtttcctatcggaacccaggaatcaaaccaaatggaggtagacctcccatcccctattcgatgacacattccctcactgagcagaggtctagccttcacaatcgccttccacagtctagagtctgttgtcttgaattgaacatcccaaaagctactttcttttaaatacttctccttcatagtcacgcaccaaagactcgatggatccataatcaatttccatccccagtttagcaagaaggccttattgatatcttttgtttgcctaaatcctaagcccccatggtatttggacttgtagagagaactccaatcaatagtgtgtatagttctcttcgaatcatgatctccccaccaaagtttctcaggcatcggtcaatagaagtagcaatggtggaggggatcacctcagctgcagccgcataaattgaaagagaattaccaatcgactgaaccaagcatgctcttccagccttcgagagtaatctcgctttccatccttcaactcgagtttgaaccttcttgaccagaaatcgaaaatcacgggttcttttcttggaccgcagaagcggcaaacccaaatacgcagtgtcagcaggcatccttttcatgccttgtttactagcaatgaggttggcccgattgttggggacacctttcgagaaagagattgtagatttctggaaattcacagcttgtccagaccaatcacaataaatttgcaggcactggaggaaagcatccgcctctttgaccgaggcttggccaaaaagcattacgtcgtctgcaaacataagatgcgtaacaggaggggccgatcttgatacttttattcccttgatcaagcccgtagcattgaaatccataattaaacgtgataaaagatctgccgccaaaataaaaagagcgggggacagggggtccccttgtctaaggccacacgacggggtgacagaaccttgtttgactccatttataattagattcaatttcttgatacacatgcagcttttgatccacccaataagaggttctttgaatccatgaaaaagcagcgcctcgcacacgaagtcccaatccatcttatcatatgccttttccatatcgagtttaatcagcatgaatcctctagaccctcttttctttgccataaagtgaactatttccttagccattgtcgtattttcagcaatggatctccctttaatgaac

SEQ ID NO: 259766 - DNA, 675 bp, Cannabis indica
caattcctgatattagatgttccttcagcttttaacgtattgttaggccgaccgaccttgtacgacctaaaagctgtcacatcaatattccactcgtgcttgatgtttccaacaaagaatgaggtagggtgtctaagagcaaaccagcagtctactcaggaatgttataaccttgcagtggccaaagctaagaaggaaatatcctccagccagagcatagacaagggaaaaaacatttccaagtagggaacttcccaaggcgtggatgaagatgtggatcctcgacttggggacccaagcagccatgttggacctgtagaagaattagaagagaccgagatcgctccaaaaatcccgagcagattgctaaagatcgaaaaggtttgttgctcgaagtaaaatcaaaactgataaaatttctgagagcaaacctagaattttttgcctggtcacatgcggatatggttggaattgatccttttattatttcgcatgtcctgaatatcgatcccaacttccggccagttcaaaaaaagcgaaggttgttggacaaagaacgagtagtagccctaaaggaagaagttgaaaagctacgcaacaacaactttataattgaagctttctagccggcttgggtcgcgtttcccgtatgagtacccaagccgaacaaaaaat

SEQ ID NO: 259767 - DNA, 1806 bp, Cannabis indica
ccaaccaaacgcctcctaaaatcatgaatacttactacaatttattcaaaagatgaaatgaaaacaacacacaaacactcaaagatatttcacaaataaaaaaaaaacttaagactttcaagttcaatcatatacatatcaccattctaagaattgacagtccaacacttcttcctgatctcaccagcagtgccagtgaggacctcaatagctcccatcttcttcatggacaatgcgaattcaagaaagaaatcattctgatgaaccaactcttgaacggtgttacgagcaaccttgttggtaacaagtgcggcgtctgaggtaaaaaggcccttatgcttaagtacaacgccgtagtaactactgtcgaatttgagagcactgcctgggtccatttgcacagttgtgtttttgtcatttggagggcatttggttttcaaaagcttagcatagtttttgtctaatgaagggtcttggtctccttttccagtgaagttatagagcctgttgttgaatgcactacaatgtcccacaccgattgtgtgtgctcctttaaacatagatgtataaatactatgattagtaacaataattaatgctacaaaattaagagtgtttatataatctgcaatcacaaaatataaatcatatttgaactaaaccaattcattttaattaatttagttttgaatttttaaaaaattttaatactggtttggtttgaaaaaattgaaaattcggatcaaaccaattcccctatataaaactacttaatttgttcagtacttatttaattttgcacctgataatacgacgaggtcatgcacagaaaggcctttggtggcaaagttttgcttgagtcgggagaagttgaaggagggtggtggaatgttttgttgtgcttcgttttttctcgacactttcccatctctcctaccagtaggcacttcccacatcgatttcttaaactgaatatatacatattattgttaaactgaatatagatgataggattgtttatcacctgcactataaacacccttaatagatgatattaaattttgttttatgtatatttgagcataccgagtaagatacagagtcccttgctgccaaagcgagaatatcagcgcatgaaacgactcctggacatttcttctcaacttgtgctttgatatcatcaattacatcgaaccccaacaaagtttggtttggaactgcatccttttctgcatctttctttgttgagttcaaaagtaccgatccatcacaaccctaaaataataacaaatgcatacacttaacatttttttttcatatcaatgcacttaaaagaaaagtgtgtgttatgaatatggcttactctaacaaaacagtcgtggaaatgcattctgagcaaacgtgcaggcacagccggattactagccacatgtttttcggtgaccttctttacaatagtctccgcttcttcgcaactatgtttgtagaaattatttgtgagtttgcttccttgtgaggcccccaagaagctaatgagaataccaaacactaatatatgagtgttgattttcatcatcttaaaaattgtttactaatttcttagaaattatctttgtatttatgagtaaagatattacttggtatgaatgaatgaagcaatgtttgcacatccttatataggcatataaactatatagagatatgaacgtagttcattttatatatctttctaataaagtttatgataataataatgattaaaattataaacaatattgaagataatgttgctaactaaactgatat

SEQ ID NO: 259768 - DNA, 765 bp, Cannabis indica
ctaggactaggaccaggaccaggacctaaacccaaacccgaacctagatcaaaacgcagatgaagacctaaacccgaaccgagactaggactcaaacccgaacctcgaccgggacccaaacccacacaataacagggacctagacccagaatcaggatacggacctgggaaacaaaactaggaccaggacctagtacccgacccagacccgaacttgaacctaggacccaactcgtgacacggaaccagaaatggaacatgactgtgagacgagattaggatctagatttggacacagggcttggacgaaacccgtagtcggtgtctggattttggacccaaccctggacccgaaccctgacaaggacccaaacccacaccttaacctagtcccaaacccaaaactggacccgaacccgtaccctttgacacaaaactggaaacaaaaccgaaagttgaccgggactagaactagcacttggacttggaatcatacctgaaattggacatagatccagaaccgtaaccggaccaggacccgaactccaaattagacctagacccgaattgggaaccggacccggatcccaacccaaacctggactcgagactcgaacttgaacctgaactcagacccaaacatggagccagactagggacatagaaccagggtcgagacctagaaccgcacccctgtctcgatcccgatcccaaactcaaaaatgggacctggggcctgaacctgaaccagaccgagacccgtga

SEQ ID NO: 259769 - DNA, 508 bp, Cannabis indica
gagcctacttcaatccaaaatgatgaagaagaaggagagaaaataataaattcaaatttgttgaattctatctctacccaaggtgttgagaaattatttgagcaaagcattgaagaaacgctaattccaccaccatcgctcatacaacaagtaattgggtatcaatataatgagaaaatggtcatggataagtacacatatgaagatccgtatttgctaccacccaatccacctccattagcgtcattccttggcttccattatgctcaatcatttaagaagagtcaagttgaacattggagctcgcaaatttcacatctcgccaagcttgagggcgtccaaaacaaagacccatatgtgagggcatatgccactctctatgggcggaagccgctctttgatgagcacttctccaaaagtcaagctagtgactttaaatcaagcgcttcttgggaggcaacccaagtttctcaactttgtttttaatcttataactctagttgtttcc

SEQ ID NO: 259770 - DNA, 898 bp, Cannabis indica
ctggaaaatctataataagttttcggcgttgttgcagataactgttttagttaatatcatgaaaatagttgaattctattctaatttagtttcttttaatttgattatttttgtgcttaactttggcacttgttggaaaagttgaatatgattggtaaatgtgaatacttggacattgttatacatgcttgactaggattaatagaggattgataagttagattggatagaacttgcattaattggcctttgaggcgaaatccttgatgatgtgtgctttgtaaaatgatttagacatttgcgagttctatttttattttcaagtttgagtgataaaattagtattgggagcaattaaattgaaaatctgattttataacagttaatcttgtaaatagagatagtgtagtgtggtgtgaaatgaagtaacacttgcttcgtgttggattgcaaattaagaagcccatagttaactagaaataattagtagtgaagcataagcaccagagggcagttttgtgtggaccattttgaggtttggaaagcatcccaatatatgctagctagctggttcccactacatgttggattaaaattctatgtgggcacatatgtataatgtatatactattataaagtgtgatataaaattaagtgaccaattatgttatgggtatcaaaagagtattaaattatcataaaaataatgtgtagataccataaattaatttataatttgtcgaggggtcaaattatatatacccaaaactcattatataataatcgtccctaagaaacacactaaggtttctgtattctgtccttcctcatcagagaaaatactttaaaaaatagtgtattcttggaagatcaaaaccttctctgcaatctccaacaa

SEQ ID NO: 259771 - DNA, 532 bp, Cannabis indica
gtaaattcatgagtgattctattcactttgtaaaaaaaaaaattaagtaaattggacatagtccattacatgtaaatattgctcatcgagcaaaattaataaaaacagatcaatcaagtcgtttacattaaataggataaaaaccctaacaacatctttcactaaataatccataagttgtcagaagtgaagcatcaaaacaatgtgaagaatacaaaatttctatctcgaatgaacacgtgacaaatcacacctatcaataacaatcaaccaaagatctttcaatgaaacttgggtaaaaataccccaattattcaaactagaataatggagaataacatgacaaaccctattcaaaatttcagacattaaatatcgatgaaccaaaaaacaaggtgtcaaaagacactagaataacttgtgcatccaaattcaaaaatgattgaagatcaaacagggatgtaaacacactgttatcaaaataaaaaaaaatagtaaaatagatgccctacttaaaaataaaaaaaaaaat

SEQ ID NO: 259772 - DNA, 643 bp, Cannabis indica
tttttcatctcattaattgcaacattaatggtactgacgattattatctccaatatctttcatcagaccaagtttttcttagcatttattatcttctggcctctcgtttctctcttaaattgcatttgcatttattgtcttccattttcttctacaaagtctctcactatcaaatcatcagatatctcttaaacccatttcccttcatcaagatggcggcgaggagaatcgaaagagttgatgatgcttgggagaatgaaataatcatgatgtctactcaggttagaggccaagctatgaccagaggcaagccaagaggtacccttaatagtctattttattccttatataaagatagatttaggttattttggtgttcgtcatttcccttctgtttgtttcctctcttgagaatttttctgatttttaattttaagatggatgctcttaaccctttcccttctcaatctttgtctcttacctctgatgaaaacactgtttacacccttactgatgtccctgatgagtccactgataatatcaatcttcttttaaagcttttcaccatcaaacactataatcgaccctccttgatcaaaactctgtctcaaatctggacctcccaatgtaggtttcctgtagt

SEQ ID NO: 259773 - DNA, 566 bp, Cannabis indica
ttattttctttttcggttttgtccaattttgttttaaaaaaaaaaatttgggatttgcccagtggccgcggccagatgtagtgtcgccgcggccatttaaggcttatagaaacccctttattttcacgaattctggccgtggcaaggggacataccgccgcggccatttaagtcttacagagaggtgttttttttcacggaatttggccgcggcgaggctatatctcgccgcggcgaagatggtcagacatctttaaaaagagcaatttacatatcatttcaaaaacactatcttatttcttaaatctaaccaccacgccgaacctcactctcccacaccaattttcttcttcaaatcccattcaaaaccctttttcttcaaatttcaccataatcttccttccaaatcatcttaaaccattatttctctcatcaatcactcattcccactcaaaatcaaccccaaatccctatgacctcacccaaaaatttcaaaaacccttattcatcttcttctttcttaagaacttcaagctttctacaatggaggatgattaaaggaggat

SEQ ID NO: 259774 - DNA, 531 bp, Cannabis indica
gatccacatcccttcacaaatacctaaggccaaagcccgatattctgactctgcgctactccttgagactacagactgctttttgctgcgccaggtaactaaattaccccatacataagtgcaataaccactggttgatcgtctgtcagtcagctctccagcccaactagagtctgtgtaaacttccaagtctcgattgttgtattttctgaagtgcaaacctagacctggtgtcattttcagataccttagaatacgatacaccgcttccaaatgttcctcacaaggattgtgcatatgttgactaacaacactgacaggaaaggcgatatctggtctagtatgagagagatagattagttttcctactaatctctgatagctccccctctctactggagttgaatcctctcttcgattagctttcaagtttggatccatgggagtgtcaaccggcttgctcccaatcattccagtttcctttagaagatctaggatatactttcgttgagatataacaattccttcttt

SEQ ID NO: 259775 - DNA, 623 bp, Cannabis indica
agatcctagtaaaataaatttctaacacttatgtgatgaatgtatgtgttgaacgaaatttttccatggaaagtattttttctatttttgataatattttatttggattccttgtgaaaaattaagcaatttttgtttttacggaacttgattctgataaaaattggtgaagttatgaattttggaaatttgggtgccatgactgtcgagtgggtgcatcgtgtgcaccaggcactcggacaaccaggccacgcgcgcgcttagctgaggagatgctgcacatccgcccgaggagatgctgcacatctgcccacacaaagcctgccaacgccgagattccacgcacacggaccctgcaggtctcctcctccgcgcgcgcccgaggctgcgtgcagcccttcctgggcagccagcacccattgcgatttttggagattttcccccaaaaatccaatttttgggattgtttcccaaaattcaattttttcaattttagatttttccaatttgaaatatttccaattttaaatatttccaatttgaaatatttcttcttttttaaatatttctaatttgaaatatttccattttaaatatttccaattatggtaagatttaaaaat

SEQ ID NO: 259776 - DNA, 888 bp, Cannabis indica
tatatgtgtttattttatctattttagaaagttcatatttagggtgttaaacaacacacttgtgagtatatctaagatcttggtaaaataatatccaacagcctgtaccaatgctcggtactcatcatatctcactaatgcccgtacctatgcccgatacgtcgccgggtatattgcatcacctaatcaggtgagcccatatattatgtccatagtatcattacattaccattgcctaattaaacaatcgatattttcagaacctgtcatgccatgtggtacattatactttacttacctcaagtttcggatcaggtatgttggccgacctacttggaaaatgatcgataatctcaggccctatgtgataacaataataaattaataagtgtttatcccaaaacaccccttaacactcgcataacacaatctaagattttctaccaaactcaatggcataaatagactaaaataaaacttatattttggctctaaaccatacaccatattgtggagatcgttgcaagctttgaaacagtatatagaatgtccaaaacggacacccgagaaaaaaaagttatagataaaaatacgatttctaatctcctatgaatttctaaaaagtatgaaacacgataatctcaatttttgcactcaccgaaacactaccaaaacttatccaaatcactcgaaacttcacagggcacatatacaccatgaatactaccattcttgcataacaaaaattaaatcgaccccttaaacggaaaacgccattaacgctcagattaagctttaaaaaatttcaaactcgatttctaactcaaaattacctcaatttcagcaagaaaacatcagaactagtcccatgactacccgagaacaatc

SEQ ID NO: 259777 - DNA, 533 bp, Cannabis indica
agaaacatgtagtccacataagctcaactagagagagaaacacaataaaagctataaatgcaaactcgaacacgaatgtaaaaaaaaatagcaccagaccctcaattgataaacaaggaagtgtgaatactaatttaaaaaacaattcctactgatgatctgaacaacaccgatgtcataagtgtgtgaagtgtcctcatgtgagccctccaaggtttagaaggacagctcactctctcagcttgaacaatgggaacagttgatagaaggaaaatacttgcaagcggatgccctttttttttatttatggaatttttgtttttgtggaccactcaagatattttgccaaccagttatggctttcactcctccctggagatgtagccgtctccttatgaatctttctcacagaatatagtgagaaggagcaaactcctcaaagatattcagtggtacaaaggaagctcttcccattgcatccagggagggtagcctttctaactgggacatcgaaaagttcagatcaagagaga

SEQ ID NO: 259778 - DNA, 640 bp, Cannabis indica
gatgctttagttcgaagaggtttagatataaccagaaagagatttcaccaaagtttgctggaaatataaacagagcacggattgagttcgtgacaggagaacttgttggtatcacgttgtaatttgatctattggaaagaataaaaaaaatggtctaataggttgactctgaattacaggggtacaaagaatgatttgggaaccggtttggtaaagtacttttggttttgtttgaaggaattttaggatacaaagacagggtatgtgtaccagtcaataaggttaatgaacagaaggttctaaatgggtttcatactactctatacattttatacacgtgaacaactaagatatatcacgatgttacaatcctttgttagctatgaagatatattgtgaaatatgaattagatgcccaacttgttagtaaatcaagaaatggtagagctctatgaatttattttggtaagtaggaacagtaagtttctatgattctatctgggtacggagaacaaatgtacaaagtcagtacagttttctttgtttgagcgggatatgattcaaatggattcgtgtgctaagttatttgttgaagaaataggttaaccctgtgatgcttcaatggtaaatatctcagatc

SEQ ID NO: 259779 - DNA, 867 bp, Cannabis indica
tctcatgtactccatggtgtgttcaagacctgacttagctcatgccatgagtgtggtaagtaggtacatttcagaccctggtcctgaacattgggaagcactgaaatggacaatgaggtacctgaagggtactctggacactggtattgtgttcagtaaggagaaccagtacaaggaagaaatcactggttttgtggactcagattttgcagcaaacctagacactagaaggagcctaacagggtttgtgttcactgctcttgggggctgcatcagctggaaatctaacctacagaaagtagtagccttgtcatctacagaagctgaatacatggctgctacagaagccatcaaggaggctatatggcttaaggggttgacagaggagttaggtttcaaatctgaggatatcacagtttattgtgacaatcaaagtgctttacatctcatgaaaaatccaatgtttcatgagaggtcaaagcacattgatatcaagttacacttcataagggatattgtgtcatccaagaaggtgcaagtgaagaaaataagcacacatgataaccctgcagatattttcactaaaagtgtaactagagacaagtttaggcactgtctaaacttgttgagcattcaggacatttaatgtcctcacttatttcttttggatcagagattaagtgagtctaatcaggtggaattgttgggattaaactcacttaacctctcaagtcagtatgtccatctatttgctcatcagatgaatctgaagaaagctgctgcaatttataacagttggctttaataccaacttaaaggggacccaccagcaactatatataggggttcctctattctcaaagagag

SEQ ID NO: 259780 - DNA, 680 bp, Cannabis indica
tttattaagttttataattacgttattttttagttgatatattgttattttaatgttattcagtttatgatatacttgtagtattgtatgactattaatcgtatttttattggttcattgttttattaatgttgtcatcctaatattttcaggtgtgtgataagacctctgacgttgttgacaagttgaagcttctaaagaaaaatattgtcaaggtttataattttcttttgtgatttgccttgtttgaaatattctctgattgtagttcattcatttgaagaaaaaaaatcatagcagaaagttgttttatagtttatttaatgttattttgatgttgttttaactgctgtatgacttgatttctaatgatgatgaacttcaaagttgatcagaatagatttgttgttcatatctgttcttttggtagaatgaagtgagttgcatacatgtacaagaaaatatttcaaagtcttttaagaaagttgacgctactttacataaattaatgattgagaagtatgtttagttttgattgtatgcgctgaagagcaacattttttaagaaattttgcttttataattttttaaacatttttctatttaatttcacatgtatcttacataggatattgaacattataatttttattttgatatatcttttagtacaatgagaa

SEQ ID NO: 259781 - DNA, 526 bp, Cannabis indica
ttgaatcgcatgagcatatatatttgaaccatttatccgaataaaatatataaatatagcagtcaccaaatctaggaaagataatttaatggaagaccaacactagtaccatatattctcaagaactaatttaaggatgctcttgataccacatgttagaatactgtaaatctgtatatagccctaattaattcaagagaatcaaacaataagattaaggaatagcggaagcgtaccggagtccataaaatcgacctttaaatgatctttaattggtatgatcttccaattttcatcaaaaccttctctgtaaacttttgctcttggtgatggggatacaagagtgaaaagattcgatgtaaatggggaacattacccgttatattaccaacagacaaatctgttggtaatatttattgactatttctatttagcccctcatcaaaatagaaattgtccttatagtatctacatattaaaatcatgacaattatgcccttaagtcataaactttattctaaaatag

SEQ ID NO: 259782 - DNA, 1012 bp, Cannabis indica
agatccaattggtcgactttaacgaacaaattgaaaaatactaataatacagctaagttgaacctaaccataccaggattaagatccatagacctaagatcaatcattgatattgatttagaaagatataacagtaagtttatgatatcttattcaagatcaatatcgaccccttccaatgtatactccatacatctaatattggtaaactttaccaatgccctggaaatgacataacacttatccaaggtgtaagtataccttattgctgattatcttgtcagtctaaatccagtgaactgacaaatcatgggaattaaacttttgaacacataatcatgaacaaatatatatctgtatatttatatatgttctggacttaatagaatttatacattaaacataatcatgaaataaatcatgtgaaccatgcaatattaaagcgatttctgatcttatattaattagtaaatctgattatattgaaatgaattttatttatggcacaaaacccaacaagaacacccactaatgaatataggggtgttcattggaccacatctaatatttttaggtctatccagatctgatttaattatatatttgatgttagattttatcatccgatctgatctaattaatttcagtcatccaatcgatccaacatccaatagatgttgaattagatcggttctatccattggatgtattttatgtatatccattagtttaattcaagtttatccaatatcttagacctagtatttattagattggatcagatccatctaatattttatgtataatatctattagattgaattagatctatccaacctacaaaaaaaagtaaaattttaatattaattttcatatatacgtgtattttttttttacgcataacaacctaaaatatagttacttaggtgtgttcattggatcacatttaatgtttttaggcctatccagatccgatccaattattattggatgttaaattttaccatccaat

SEQ ID NO: 259783 - DNA, 656 bp, Cannabis indica
gactggtaaaatatagtacaaatgtcgattaggaaggaaagatggtagctttggaaaatcagaaggtgaggaccttcgtgttcttgggcaaggatcaaaggtcccagaatccattgatcatggtgtttaaggctgaaggtttattatgggatggatgtaccaacctttcagttagtgtggcaaatattgcaaaggaaacatcagtggaactgagacacaattttgtggctcaagggcttctggatgcctttttggaagagctaccaagattattgatgaaatgggaaattaattttgaattgaattgatactaggagtaaaaccggtatccaaagttctgaattggatggtaactgtaggattgaaaagggtaaatattccgttacaggaaatattaggtttgaaatttctagtttgagtaggttttatttatgaggaagaaggatgacaccatatgagtgagtattgactgctgggagattaaaccaattaacggtgatgaacgagtatcctttgtcaaggatagatgttatgttgattaattttaagaaagaaccatcttctctaagatcggtcttcgatctggttattaccagttgaaggctcgaaggaaggacattcctaaaatagcttttcatattcaatgacttcgtagc

SEQ ID NO: 259784 - DNA, 594 bp, Cannabis indica
aataactgttgctatgaatatttctgattgggttactgataatttttttatttttttaagtttatggtcatggatgcttgtaatgttgttttcagcattgccaaacaaagttatactatttaacgtttaagtatttttggcatagagttgttgaggatatgtatagttagagaaaagttgttaactttatttatttataagcttaatattgagttgttgtaattggttttgtaaatttaatagaaataatacttgctggtttaattttattttagaacaggagatagaaagtattgttgtacttcaacatggaggacaatgggatcaaaatggaatctacatcaactttgaaggttgtgcattgctcattccaaataattgcaaccatagccacttgtttggaatgatttgtaatgagctgaagttgctaatagaatcaactattttgaagattcagtatcaagtaaaagacggctacagtcctttcaatatagccagggccgaccctgaaacttagtgggccatagaaaaaaaatttatttgggcccttatttagaaaaaaatgtggtatttttcaaaataaaaaatggtata

SEQ ID NO: 259785 - DNA, 4533 bp, Cannabis indica
agaagattgattcacttgaagtaattttattcataagtgtatcatcaagaagtggaaaagggatagggagagagaaaaaaagataataagctaataatgagctaggcatgagaattctaattgttgtgttatagaactctcaaaatcacagccaaggacacacacacaacaccagaaatctctctttttttctcaaatcctagcctcaattagagactaagattaacacattacaaagaacaaagaatacagtagcaaatctcccaagagtctaaaactcattattacaacccaacgtcacttatttatacccgtagactaactactgttctagtagaaaaatcttaacagaaacataacaaagtcactaaaatagaactcctaacagaataataaacactattaacaataaaacgactaagctaagtaaagcagcttagcttagttagttatccctcttctcacaaaagtgaacttcattggagatctatcattgtgatttgtgctttgtttttttatgttttaaactataagcattttctcaatctttgtttttttaaattggctccccatcaccgaaccttacaatgttagatgactcctatgatgcatgtatttatttcagcccttagaaattcattaattctgtggtggggaagtgtaaatctaaatagataaaataaattaattcaagcaaataaaatatatgtagaaactttagaggtggtctggctgtcttttttacctgtgtgtttgaatttgaagcatgagtgatatatctgaacttttattgatgcgcaggaaatgagcttccctcggaatttgttcagaatttgttgaaaatggcaccgacaactgaagaagaattaaaacttagaatgttcgatggagaactttcccaacttggtcctgctgaacgattccttaaagcgttggttgatattccatttgcctttaaacgattggaggcattactttttatgagtacacttcaagaggagcttgccatcactaaagagtcctttgaaaccttagaggtacaggactatttctataatttgactcagatgaattaattgattttgtgtgtcatcactgttgaattattatattactgaactttctcatagtgtgagaatatgcaacacaagaaatgtgaaacttcatactatagaggcatagaaagggtaaagatctgattttgcctacctacactaagatatttactacaatcttctaggtgaactaggttttacatttgccttttctattcatgaaaagattttctagccatctgttttgcattgatgactgtgaccaatattattacaaaaatcaaactgtgagaactcaggagaaaaaaatttctacgttccaacatgatcttaattgtatgattttgcatggatagcgattgtcaattttcttagcttgactttttcaatcccaactggtggtaatttttgtacttcagtggtacttacattgtatcgcctctatggcaggttgcttgcaaggaactcagaaacagccggctattccttaagcttctggaagctgttctcaaaactggcaatcgcatgaatgatggaacatttcgtggacgtgcacaggcattcaagcttgacaccctcttgaaattgtcagatgtaaaaggtacagatggcaagacaactctcttgctctttgttgttcaggagattatccggtcagagggtataagagctgtccgtgtagcaaaagaaaacaaaagcatctctagcttaaaatcagatgaccttcttgaagatgctttacaggattcagatgagcattttcgcagtctaggtcttcaggtagtctcgggtttgggaaatgaacttgagcatgtcaagaatgcagcagctttggatgctgacagcttaacgggaactattgctaaacttggtcaagcattgctaaaaacccagcaattcctcaactcaaacatgaaaagtttaaaagaagatacgggttttcatcaaatgctaaagagctttatgcaaaatgccgaagttgatatcacatggcttcaggaggaagaaaaaagaatcatggctctagtgaagagcactggtgactatttccatggaaatgctgggaaggatgagggtttgcggctattcactgtagttagagactttttgatcatggtcgataaagcatgtaaagaggtaagagagatgccaaagaggcctgcaaaagtacagaaaaaagaaacatccaccactgatcctcaacaacctgccacttcatcttcctccgagcctcgcaaatctcccctagatcttcgtcagcggcttttccctgctataacagatcggcgagtggagaatgatagttcggatgaagacagttcatagattttcaattatggaaggtatcaagcttcttcaatgaaaaacttttgctttaaatcttgcttaggcctctgaggaaatttacatgttgatctgttataatgataattatgatctagtcaaatcttttcttcagcatttttaacaaagtcggcttttgttctttgttcaggtggtttgtatggtgcttggaggtcaaacaatgtgagccccaaatcgattctttccttgagcaccggttaaatacaagctactctatataatagaatgcagagaagaggaaatgaccatgtttttgcggcatggattttggatttcagcttgtagagagggaatccaacttgtgattagttgttagatatagtccaaacattaaattttgtgttttatcattctttgttagaacttagaaatggaaatgttcattcatttattcactctttagggggttaagggttgtatagctcgtttctgaagaaatctttttcatcaatacagaaaattcaaaatattagaagtttttgtcaaagtttttcctgcccaaaatgtttttccttacctagtcccataaaatagcaaagggaaattacattttcagaccttgctcaatcaatataattctcgacaaagaaaaaaaaaaggtgatgattctaatttcaagttgtacgtgccaccatttttattctctaatagcctaagtaaaatttaatttattaatgcataaattaaaactaaaattaataaaagatcttatgttttgtgaaataataaattagattttgtatttttttaaaaatagtgctacataatacactgaattaaattttctgtcaaatattttgtagtgtaaaaatattaacaatgtacaataatcattgatctagaggtgggtggtttcccctttctatctccatgggtctaaagaaaaaggtaatttcgaagcaggtggtggtggtagtggtcaccgatgctaatgagtatcagatgttgaatgatctcccttcgatccatgaaactgtggtgaaattgaattagaatgaagtttttcttgatccttgtgctgagctcgaggcaaatttaccgtcagcgatggtggattgcccaattgttggtgtttcgagtggacctactaaggcttctagttgggcggaggaggtcgaaaaagaggactatcaatcgtctactaaaaatatgtggagcaagtttaaagctaaccaggtgagaactccctccactcgtcttaaatactttgaacctatgaaagtgggggatcaaattgttgccgaaattgatattgatgaggtttaggctgaatcattaatgtggcatacctctatagtttgtattgttctgggtgctaatccccattttagagtttttgaaggctttgtgaaaaaaatttggagaaatttgggttgatcgaatagtgagaatgcattatggatttatcttagtgagttttcgagctgaagccactagggatcttgttttggaggctggactgattcattttgacaaaaaatcattgatccttcggtcatggacttcgaatatggattctgtgaagatggttcgatatgttctagtctggattaggttgaatggtttgggacttcaatattagaggtcgtaatagccttagtgctttagttagcaccataggtaaaccaattatgagtgataaagttactcaagagagatatatagtaaagtttgctagggtgcttgtcgatattgagatctcaaacaatccactgaaaataatatcacacattaatgagaggaatcaactagttgaacaatcaatggagtataaatggcttccctcaaaatgtgtagcttgtgatttattaggtcatatagtggccaattattcaaaagacaagggtcttgttgtttgttttgtagtactaaatcaggtatgcagcggaatattagtttctgattatcattgtaccatatgtatacgttaaatttgaaacaaaaagacaaaaagacaaaaagaaaatttatctcttatagcctataaatgtatccttgtatcttttcatatgttgtatccttggatgatgatgaagaactcacaccgtagtcttctagatctttcaccacacacaaggactagtgtaggctagtaggatatagtatatatcca

SEQ ID NO: 259786 - DNA, 987 bp, Cannabis indica
gatcactgcaatcgagaggccagggatctaataagtcagttcagtcagagaaccaatagaagaggccaggatctccttagagatccacttcaaggaagactaccgccaagttcttcaagaactaggatagatcttcccctgccagagggaggacagacctttcctcaaaggtcaaatgacgagaacagccagatcttggcaactagtggcatgggggccggccaatctcagccaatgaccttgaattgttgttctcttgggtgtttccacccattctcgagcctctctgattaaatattagccttgggtgactcactcccgaatgtcccaggataagaaatcaccttgttggccagccaaaggtgcacttctagggtgttggccggccaatggttggataactaggggtgttgttgtgccagagattcttggtcggctctcaggctaatggctgccagagtctggctattctcaccatcagatctttgcctggtgaaactggacgatgtactcttggtcatccatccatctcagaaattcgcgtctctattgtgcgagtgcatcacagccaatagcgtgtggttcttcagtttggccaacttgacaggcggcctctctaagtctgggtaacttgagatctctcccaagtctacatagggctcaccaattcttggcctcatctctccagcataatactggggaccagatacaaatgtggtgtccggggttgctccatattggtgttagacgccagtgaagagtcctccctaggtggcaaaggttggccattaagaccaactggattggtggtgtcgacctggccagttttggtggtcaggttcatggtgcctgccagaatggcagggttgaccacatttgttgagttcgtggagattccagttgtgactagaacacgaacatcatgatctgcagtcatagggtcttgaagaagacccaacgaggtagaagttgtagccggagttctcc

SEQ ID NO: 259787 - DNA, 512 bp, Cannabis indica
tctaattttaaaagtaggccctaacaaaaaatataatttgtaaataatatttttaaatattatcatattacaaaaatatattttacataattaaatacctaaaaactcaaacaattttattaaaattgttattatttttaatacaacttcaaactattatcaaattttatggaaaaaaaaattaaaaggcattaaataaggaaaaaaaaatcatagaaaaactctttttttcattattatttggcatgacacattgatggaaggttgggttaaaaaaaatcagaaaaatcatattgggcctttttaaattttgggccccgtgcattagcactgtttgcacacctaaatagccggccatgacaatatataataattaggtgtatatgcgtacctgattgattcatagtaattactgtaatttgatagtgtaatattatcaactaagtcttcctcaatcaaaagcaatttatttatttgattattaaaaatatacaattgtgatgagacaatat

SEQ ID NO: 259788 - DNA, 809 bp, Cannabis indica
ggagagtggtggactagccttaggtgttgacacctagctagtgaatattcagacaaagattagtttctttagcctttattgcattttggaaaataaagagaaattagaaggaaagaccaaaaaagtgaagaacctctctttctcttctctctctctttgaactagccataaaccagagaattggttgctgttttttggtgttttcagcaagaattcagagggaataaatccaaggtaaaccctagatactttttagttatgtttctcaagattttagttggtttcatgtagtgattttgaaaattagtggctgctagggttaggttggttgataattcaaattctaagtttgatttgagttagatatagcttctagcagctggtttggttatgtgttgtaatgaaattatgcaagtttgagctttgaaacctaagctttgatctttcatggcatatttgaattcagtgggtttttctgtgaattactggttggattatgttgtatatacattgtttaggtactctggaaagtttggttgcatttggatgagttttgagcaggaaatgaattgttgggggaaacctggtgcaaaccattttctcaattctcatccatttcagtgccgtagttgggtgtttccccgtctcctaagttcgtgtaatccctagtgactataacagagcctagagttataggttcaggtttcccggattagggttttgaccatgtgatttacctggtttcattatgtgattagggcatccatctagcacaagacttccgttcaggtcagccaacacacttgaat

SEQ ID NO: 259789 - DNA, 620 bp, Cannabis indica
catattattctgctgcacccactgtaaggttttctaactttatttgtgtttattttcattgttttagaattcatattaggatgttaatcaaacatacttgttagtaaatctagatcctggtaaaataattccaacaagttgtctatgtacacatttcctattttcttacacattttctttttttttttagttcggcagtgtattgccttttaattcagctctatttttttttgcttttttgacaatttgtgtaaaagtgactagttctttattttgttctagttttttttttttttttgaggcacttctattttttttttcaaatttgtagagtttttttattttcatcttaaacttccctatacattttccactttttttgttggaatacttctataaatattatttttcctcattaacaatggttgttaaccgatcttcctcccctattgccaaaaagtccccaaaacaacctcaaaaaaataaaacccgagcatcaatggacaagaagagtttgaaagataatcctcctagccatacttccacagttcctgctaaaagaaaattaggttctggtacttaaaagaacactaaatcaaaatactctcaatctgtgttgg

SEQ ID NO: 259790 - DNA, 3052 bp, Cannabis indica
gtatcccaatggtgcaaataaaaactaggcggaaggccgtacggacccggggccttatctttccccatatcacatatagccgcccttacctcatcaccttgggggatagcattgagaactagattgtcttgttcagtgatgatcggttgaaaagtcccttcctggagcggtatgagaccatggccgctttgcttgaaaatctccttgaacttattgaggaagcattgagctatttgatcattatcccttatccattcatcatccggagagagtttgacatgttggatatagtttcttcgtcttctaacaatggtcgaggccataaaaaacttcgagcacatatctccttcttgaagccattggactctcgatttttgcttccaatgtatttcctctcttagtaaagcctcagctaactctttcctcgccttctcgatcccatcaccattatccggattcttttgctctgtttcagctagattggtcttcgctagctgaatttgccgagatagatgcgtgaactgagttttgttccagtgccccagctttctgcttgttgctttcaccttcaagtggaagttgatcatgggattctcgtgacgcctggctttccaagcttccttcaccacccaaaaggatcgaggatctctagcccacatgttttcatatttaaattgtctacccttacatgtggctcctcccaaagtgtcgagaaggagagggcgatggtcagactcagctgctgccaggtgattgatgatagcattagggaattggatcctccaatcagtagtagctagaccacggtcaagcctagctcttttcatagcccctcctccccctttcgcccaggtgaaattaggcccaagaaatcctaagtcgattaaacccgctctgtgaaccattcttctaaaatcaaaagcatatttggaggtattaccatggtaattgaaacactccttgtcatttagagtaccattcatgtcccctagcatgattagaggggtttgggactttagaacaatgtcacccgcagttacccagaaatgttctttgtcttctctacttgggaggcccatacgtacccaagagcatccatggaatccccagcggatcagatgtaatttcacacataattaagaattttgatgatgactgaatattacacgccactcccttcatccagcacacagcaaggccccccgaacgcccaatgggagggacataatgtaaattcgggaagtgaagtttagcacaaagtttattgaattttgctggaggtagtcgcgtttcagacaagatcatcatttcgggcttatgatggcgcaccaaatgcgccaattgtcgaactgtcgcggagttcccgagcccgcggcagttccaagcgaggattctcatggcgacattggagacttttccgggcaagtctccgtagccccaaattgaaaatccacctccgatttccccattgactcatggttgccttcaacaatttcagtaatagagcaactagttgaaggcttcctctgtttctcaataataacgaaatggttatctaggttcacctttaggtcaaaagtcctatcttcccagtggtgagtagttgtggaagttccccccaagttagatttagacttcttacctcccttgaaagacttgggagtagcccccagtggtgttttggatttaggaggcctgccccttcttttacgcaccccatcatcaatagaggctatgggtgatttgcctttccttcttcctttctttgcagttgctgtggagtccccattagagcctggagagaaggattgcacctcctgttgttgcaaaagatcctcagcagtactatgttttccccgagagaagccatcatcgtgcgattgactttgtttaggaggatcatggactgacccagtgacatgatggtctgggttcgaagggcttggggatagaatgggctttgtgttgggcctaaataagtgtccatcagcagccttgcgtttcctcgggccatgtaagtgttcctccactctgaaatcatctatattaatgatggggttgaaaaagacgggttcacggtggaacttatccacagttaaggcccccattagcaattcacgggctttgggctgagcccaacactcattggatggccattgaagaagttgggcttggcttccaagaaatgtggtagtagcttgatcacaaggatcacatgggccatgcttcagagtactttgattggtcatggtcccttgcttttcagaatccgttgtcgtcatctcagatggattctcaaaggggttaaggttttggtcacttccaaagttggtagaatttgtatcctccaaggaggtaataatcccatttgtccccatcgcctcagttgtggcatgcttgctagtcgacccttcttctccattgcagggtaccctcctttttgcctgagtagcagcatagtgttcagctgcgtcctgcaaatcttggatggagacagtttttgaattattcccaaatggggcaatttccccaatacccgggagatataccagcggaagctgggtaataactagctccgactgtgcatcaccaccggcggcctcctcttcatctgagacgatcctcttcttcccaggatattgccttctgcattctctaatctcagcttcctcgccatttcggatagctttatgaaccttcatttggttccgtagggtaggatcttgaaacagcctcttttgtaacacccagtcttggaaccatttggcaagaggggttgtgaaagtagatttctccggggcatcgctcttcagccaaattccaaacattgggtaaaaattaccacaggagtctttaataatcgttggggttttgaagcacacactttggtcatgagttagaacactgcatttgaagcacaccttcgggaggcgttcataggtgtactgtatccataagtctttgagtcgttggcgccgtaagaagaaccctgagaatattggtttggtaatgtaaagcccgcttagttaatttggaaattagcagttgttta

SEQ ID NO: 259791 - DNA, 753 bp, Cannabis indica
aattttgtcctttaaaatatgtcttgcaaaataactaccatataatatagtttaacttaaaagggcaatttagtcaatttaagcattccgattacgtttcctaataaagtaaacaagataaatcacaactattccatttctaaaaaattttagtaaacaacatattacaaatattgattccgattatttttcatttattccgttacatttctcaattaatttattccgattctgattacagtatagtaaacgtgccattaatgttatccgaaattggttacggaattagttatttataattgaagtgtgccaaatgccataatttcaataagttataatattaatactaaatatgtggaagctagtggcggagggagaaacataagttaggggagtaaattataagaaaaatataatatgagtctatgagagagggaaaattacaaataaccagagagaatttttttcaacctatttaatatataaaaaagtacacatataactatttttttggtgggaggactactgtaaaatgtttgcattttaaaactaaataagtgaaataataacttatttgggatgtttgcactgcaggtggtgtaggtcataatttttttttttccaaatcaaattgcaaatcgcaatgcagtttgagcaatttatattattatcattatcgaacataataataaaaaattaaaaattaatctataaatttttaacaatacaaaagaaaatttttattaaaatttt

SEQ ID NO: 259792 - DNA, 869 bp, Cannabis indica
ccggcctggtgccgagttgtcaggagttgtcttgggctgtatctattgtgtatttttgtttatatgtttttgaggcgtcgtcgtatacagttttttttaaaacgttttataacaaggatccccgaaacacgctttttatgttgttataatgttcgttttcagtcttttattttagtaaggtttttaatattgtcacagtttttaataattaattaatctattattattaaattagtttataaaatcacacacatggcatccctatggaataggacgttacaagtaccaatcaattcatttaagcccatttcaactgtgtagtcccatacctacacagtctcagaatcatcacacttgaccttccccaggcgatgtgggattgcacagcttacctggtatttccccttacagatcatgggactactgactgtcccaatcacctcccttacgaggttcgacgtcctcgtcgacaacacttctagctgggtcaaggttctgataccatttgtaacgtccccgcttcaagcctccattgggcccttacacccagggactcatggctcttatacacgagtacaccactctggctgttgttgggttttgtgccctaaataaaacccatttcaatataatcagatttactaattaataaagaccagaaatcacattttatgttgcatggttcacatgatttatttcatgattatattataaattctattaagtccagaacatatgtatttgttcatgattatagtgttgtcaacacagtggaatataatcatgattatatgttcaaagagtttaattccttgatttgtcagctcactggatttatactggcatgataatcagcgataggtatactt

SEQ ID NO: 259793 - DNA, 634 bp, Cannabis indica
attacattttttcatttcttaattagaattaatatttattttattttttttaacagcaacagtgaatgatgaagataatgatgttgatccaacaatggtaattagttaagtttttgtaatttatcaaataaattatttatttttattattaatacttttttctgtttttatttttttgcaggagccttacgtagttgatcttgatgattagaaagtacattgttctttttagtatatgagtgaggacatggatgagaacaaattgtagtgtttagtacttatggttgctagttattatatttgagtttatggttggtagttattattgatgtattaaatattgttaggaacaaaagtacaatctcaaactttcctctattatgcataattgaatcactcatataaaatcccttttctctctctttcaccctctgcccttttcatttaaggttttttatctaatcttgcaattcaattcggtatttaagttgttgaaactctaaaaaatttaaattagaaatcacttgcggcaaagttgactccatcgctgaaattcaatcttgcatcagcatatgcccataaaaaatccacttaaaattaaaattctttgtttaataaacaatccattggaaat

SEQ ID NO: 259794 - DNA, 579 bp, Cannabis indica
ttattagaaaaattatcatatatactatttttaaatgttttttttttttaaatttacggtttggaaatctatgtgggttgctatataaggattttgattgcgatttaggttgctctgttatttgctataagagtttctatgtgaaatttcgtaaaaataacaaaaaaaaaaaaaaaaactaattaaaagtgtaaaaataaaaaaactcctaattattattacattttaggtatattatttttttttaataaaattgatatgtttttttattgaaagaaacgtgcaattgatattatttatttttatcataagtataaatgtgtaaactctctaagaattttcttagcactcctcacaaattttgctgggagcaccaagcacctatttaatatgtatggattagtgtcactttttctctaatgttcaatgtcattgtcgtataattactactagactagaccatagcatttatttcttatacagcatcaaaacttttccaaaatatcaatagacgtggtcctatactaattacactttttcttaagcttgatcatcataaacaaatggcagtttctttca

SEQ ID NO: 259795 - DNA, 1213 bp, Cannabis indica
ggaccagaatcaatataagatttaaggtttatttgcttaagtacattgctacataaagtacattgttatatgtattgaatatatcgtaatacatgacagataaaacttatcatataatgaggaattatcgctatgattcatatgtttattatgtaatgagaaacgttaattttaagtggtaaatctaaatgatgaccaagtggatgatattataatacaaaatcattcaaatttattttgcattatcttagctgagtggatttgatcacaaatcaatatgtgataagtatgattattctaaatatggtcaattttttattatcgaattattcattttttgaattaatttttaaaacattctgataattaatgtggcacagacactgatgaagtatctcacctatagatacattgtctcgatccttgaactcctcactcattctgtgcaaaaaacagtaaattccatctaaaacagtagagagcttggaagctcaattatccaatctgaagcaacattgatattgaaacccaaaaatcaatggctagaggtattacgatctctttcgttgtttatatatacactcgatttgtcttcattatgttactttgcaaatcgatcatatatcctcactcattctagtttttcaaatattattttatttcgattcttgataggtgttaattcattatagtaaactattttgagtttttttaaaaaagtttacaaggatgatattgtaattataatttatctatataaaaagagtatttcagcatgtattttcaaacgtggaggttgactaagaattgtaatatgaggttgtaattagtactacttttcaaatatactagcttgatcttacgtgcaatgcacgtatagttagttttttttttaattatatttaattaggtgatgttaagtataatatatgtatgtttaatttttttaattaaataatattttttttaaatttttaaaatgagatttgagattttgatttttgaatttttttttttaactaatgcaacaacattagtagatatatgcctcctatcaattagattgttcctggctaataatttctctataatttttggtagaacaagtaatattctacaaattaatttataatattattttaatttctttttctaaataatagatattattgttaactgtgaaaatacaaatatatagatataatatttctgt

SEQ ID NO: 259796 - DNA, 1020 bp, Cannabis indica
acctcttgggttcgttgctcaaggggagttagggcaagtttgttgttttcgctaatctttgtatggattgaaacaaagcactcgtgcttggtttggtaaatttagtcaggctgttgagaaatttaggttgttggaagtaagtcagatcattctgttttctataaaagatcaactgctggcatcattttgttagtagtgtatgttgatgacatcgttattactggaaatgatactgaaggcatctcatcccttaagtcttttattcatacccagtttcacacgaaggatttaggggagctcaagtatttcttgggtattgaagttactcgaagtaaacaaggtatttttctgtctcaaaggaagtatgtacttgatttgttaactgagacaggaaaattaggagcaaaaccttgtaatgctccaatgaatccagctgtgcatcttacacgtgacggggaaccatttgaagatcctgagaaatatcgcagattggttggaaagttgaattatctaactgtgaccgtccagatattgcattcccagttagtgtcattagtcagtttatgtcttctccaacaattcatcattgggcggcactagagcaaattttatgttatttgaaaggagcaccaggacgaggtattgtttacaaggatcatggacatacccggattgagtgtttttctgatgcagattgggcaggctccaaggtagacagacgatccacttcaggatattgtgtatttgttgggggcaatttgatctcttggaagagtaagaaacaaaatgttgtgtctagatccagtgctgaatcagaatatagggctatggcacaatctgtgtgtgaggtaatatggatttatcagcttttgactgaattcggatttaagacttctattccagcaaaattgtggtgtgataatcaagctgctcttcatattgcctcgaatcccgtgttccacgagcgaactaagcacattgagattgattgtcattttgttcgtgagaaaattcaacaag

SEQ ID NO: 259797 - DNA, 599 bp, Cannabis indica
cagaactcatagcacaaaaccaaaggggattcgttcaaggtagattcattggccacaatataatgatatgtcaagacttggttcgacactatggaaggatatccaaaaaggccaattgcatgatcaaactcgatctccaaaaggcttatgacacaatagaatgggacttcatagaggaggttctcaagggattgttcttccctgataaattcatctctttgatgatgaattgtgtcaaaactccaaagttctctctttttttcaatggaaccttacatggtttctttgaatctaagagaggaatacgacaaggagaccctctctcccctttattgttcatcattggaatggaatacttgtctcggataatgaaggagataggatgcaagcaagattttttcattccatgaaaggtgtgcttcgctgaaacttaaccatctcagtttcgccgatgatgtccttttattttgtaatggagactataaaagcattatcttaatgcttcaagggcttcaactctacactaacacattcggcttgaccccaaacaagtcaaaatctgccatatattgcagaaatatggcagacatagaagttaa

SEQ ID NO: 259798 - DNA, 601 bp, Cannabis indica
tatatatatatatatatattatttggggtttttataccatattgaaattttaaatcttttttattttttagtgtggggtggaatttttttctgaaaatactgtttttttttaaaaaaaaatactgtgtactatgttaagttttcactgttgttttatggttgttctactgttgtttttaattgttctattttgttgttttacaattgttttataaaaagatgttatttttgtaaaaaattccgtatgagagtaaaattgtaaactttgatccaaaatccagtatttttgtaaaattgctaaaaggccataaaatgttgatctgaactgttgagtgatgagtgtccaaggcccatgaattggattgggctgtaacccaaataaattgtttttctttacagctggtgcatacagtgagattgcgttgtctgtctcttccctccgcctctcttctcaattctcatcactaattcattaacacaattctcaaaattgtttttcggtttgatttaggaacaacaccaaacactaaagttaattgatctcaaaattattcttcattcaaactcagaaattcgattccatccccattttttcattctt

SEQ ID NO: 259799 - DNA, 455 bp, Cannabis indica
caaagcctcacaggtaaagtcgcagccttaaaccgctttatatcaagatcttctgataagtgcaaggagttttttcagattttaaaaggcaacaaaaggatccattagaccgaaaaatgcgagcaggcttttcaagccttaaaaacgcacttggggcaacctccgatcttgtcaaagccaatgaccggtgaagtcttgtccatctatttagcagtgtcagaatatgcgattagttcagtactagtacgcgaggatcaaggacgacaatacccggtgtattatagtcagattactggatgtcgagacgcgctacgcccaaatggaaagttggcatttgccttggtaacatcgtcaagaaaattgcgaccttatttccaagctcacagtattgaagttttgacaaactaccccttaaggcaagttctggcaaaaccagaaacatcgggaaggttatt

SEQ ID NO: 259800 - DNA, 589 bp, Cannabis indica
gttgtcttggtaatgtaatcttttggtttgtgtggttgggtggagttctcgctatctctgtatgaccatgatctgttggttggataaggttttgaataacagttggtctgtcgtcgatctaccctcttcggtactctactgtcgcgagagtaagagtaggacattgttgattgtctattagattcgtcttcctccgacttgatttgtgcccaagctttggcaagcacgtcctccattgtcttgcatggatattttgtcagttctttgtaaagatcagattctactagcaggcctttacggaagtcagtaatggctgtgtccacgttgcatgccgtgatggaaactttttcagcattgaatcttgccacatagtctcgtaaggcttcacctctcctttgtttgatgcagtataggtcatctaagagtttctccaatttcttgctgctcgcaaattgttctacaaaaacatctgttaattgagcaaaagaagcaatcgaattattgggtaaattcgtataccattggagggctgggccagccaagctagacccaaaacctttacacatgcatgcctcgtgcaactcgcgag

SEQ ID NO: 259801 - DNA, 2426 bp, Cannabis indica
ttttaaaatatttgtgtaatatatttatttagaataatgtatatatacatttagttacataattaatttaatttttatttatatgaaaataatatttaatttaaataaattaataaaaataaacaaaaataaatatgtgaaaaataaataaaaatatttaattttctataaggtcagttatttataaataattgacgccataaagtaataccgcattagttatttgctaataatcgacgctataaagacgcattatacaaatgacacgtccttatgtcgtcggttattttataataactgacgacatagggtctctttataccgtcggttaatgctgcccctctatggcattatctagaataacgtcggtaacgaattttgccaaaatcgatgctgaaagctcaagaaaactcttctaaaacctaattttctagtaatgcaagtgaatcaaagagtctagtaacataaatagaagttcatgatttctcaagatttaggttaatctaattagccatctttatcttcatgatatgaattagatttttatagtaaatgactagtttaataaaggcaaaaaattacatagcagttttgtcatgtataatctctattatataacgtacatttacaaagatgtcaaactacatcaacaatctgaatcaatattgcttgcaccaagtgatagacatcaataaaccatagcaaccgttgattaaaaactctgaacattaatatataaactaagtacacacaaataagaagataataaatatgtatcgatcaccacacaatagaaaaatacaatgaaaactcattataaaaaaagaagctaagcaaagagtttcaagttgaaagactagggctggggttggggaggcatgttgaattgagtgagacgtactcttgagggagaagatgatatttaatggaaagagtttcaaatatcctcttaagttcaaagacgagctctgatcttcgactgctcttttcaccatagttctgatggttcatggtgtgttgcacgtatagacccattctcatctcattcacgttctctatctccttaactaacacgctgtgtttcggatgccactgcttcggtttactctctatgtatctgcacatccatatccatataagagaattgatgaatatgtatataatgtaatacaaatacatatatatatatataattacgtacatttgtatggctttcttgagctggacaatgtcatctaagggagtagagaaatcaatggtgaactctacagcatcagccatatcagggctccttctaaaattactaataggcttggtgagtagcacagagttgggatagtaaatcttctcgttgtcatatctcaagaatactgtggtaagaatgttcatctcctccacaatcatctgaatgccgtcaacgacacaacgatcaccaacatcaaaggggtgcatgacgaagacaaagatgatggactcgaacattgtcttgcatgtgttctgaaacatgaacccaactagaagaagttgcgaggtgaccacaaaaaccaccttggttgtggccaatcccatcactaggagtgacaccaccgttatcaccaccatcaccactgcgctcgccaacttgtgaagttggtggactgctgttttcgtgtcgtttagagaatgcgcaagagcttttcgctctacatatgcttgcacctgtgtattatatatacagaaatatcgagtttcatatattttaatttattttattctaatagactaattaattaaaaaatatgatataattagttttgtaatttaccacccagtttcggaaggaagactttgagatctttccaccttctgatccttcgaaaagagggaagatggtgtaaacctcttcatacttgaggaagcgaagtaaatcgccctcttctatgtatcttgttaaaggtaataattgagttagacatcaaattgttaagattaattatattaaatttaagagtaattagtaaattttactcttgaactttcgacaatacttattttgccccctaaaatatacgacttgttaagaatcccccttaacttttacgtctacagaaatttagtccttctcttaggttcagtcacattattctgtttaaatgatgaagtgtctttgtaaattaacaattttgccccctaaattttgacaactatcaaatcgtaccccctcaaaataaacatgagaaagatttaatacttttttaagtaaatcttaaaaaattaatttagatcttaagaaaaaattattttgaataattaaaaaaattaaaatatatattataattttaaaactaattaagcgatttaaaaagttatttattttttattaaaaaattcatttagatattaaaaataatatattaaaaatttattttttgtaaaaactaaatttt

SEQ ID NO: 259802 - DNA, 721 bp, Cannabis indica
tagtaaactcctcgtaataggatctgacaggttgaattaacaacaaccttttctccaccattactttcccttaatcacaaaatccttgataatgtgaaattcctctctatatgtctactctcttgggatactggattctatacttttggcaactacttttggttaatcaagaaaataacactagtagtttagacaagttggaatggtgccactatcagtgtactcagcctcaatcccacgatccttgcattcaacattaatcccacgatctttctgtttatgcgaatcgtaacgagagtggaaattcttcctcctcaagtttccgagccttataaatagtgatacatgttcactaggcaaaaaggaccgagagattgaaagtcgatacgcaattaagctaagactattattatctaagaattatatatccagagatacttttgtaagagctataagaaaataaatcttcttccttgttcttaagtcaatacaaataacgagaattaggctattgcgaaactgctcggagctgaacctctataaaattcctgtatcttattattaatttattatatattcattactacatatcgttttatcgcttataaaatagactcattgtcgttggctaaaagcgaagtcaacaacaagcacaaatgatacaaaggcaacaaagtttaaagcattcctgaacttcaaatttcagctaaaggaacttggc

SEQ ID NO: 259803 - DNA, 657 bp, Cannabis indica
tgcagcattagtgcgagaagagggtaaaaaccacaacatgtttactatgttagtaaaaagttactgggggcagattcaagatacctacctctagaaaaactcacactatgcctgattcatgcatctcgcaaattgcggctatattttcaagtgcatcctattaaagtcctgacaaattaactattgctacaagtagtatcaaaacttgatgcatcaggaggattaataaagtggttgattgagctaggacaatttgaagtaacttaccacccgagaacttcaatcaaaaggcagactttggctgactttctgattgaaagagtaaactcagaagaagactctggaacaggaagtgaagcagaaacatggaaaatgtttgttgatggggcttcaaatgacaatggctcataggttggagtaatagtgatgtcgccagaaaacttcaaattccactatgcacttaggtttcaatttgaaacttcaaataacgaggcagagtacgaggccttgttagcaggattaagaatagtcaaggcactaaaagtcaagagcattacgtgctttagtaactcgcagctagtaatgaatcgagtcgggagaataccaagcgaagggccagaaaaatggccaaattcttagagaaagttcagaagaact

SEQ ID NO: 259804 - DNA, 1084 bp, Cannabis indica
tggagtaataaatatctatgcatttgaatctatattatgcataagcatgtgattcaaacaataccattcaaacaaatatagtaaatacagtaaaatatatgtatatcaaatgattcattgttggagggactgagaattctatacggagctacatttaaagaattgaatataaatttatttagaaaatgtttggagcagttcaaaaatatttacgtgatgatatttgtgaactttctgatatgaagattttttattatatttatcatcgcaaatagatgtgattctccacctaatctttaactttttttttggttaaaataacaaatatttactattattaatattatttaattaaaagaataatatttgcataaaaataaagaaagaaagagggttgtgactctcgaataattatcaaatattaataggatttgttttatttttattttattattttattatatataaataatattttattattttattaaatataaataaaaagtcaccgattaatttcttataaaccaagaattcaattatataggcacactttatatagaatagatatatacatattatactctttttacaaattaagaaagtacaataaaagttacattttatataattatacgatacacttataatgatatattataaattatatacttattaggttaaaccattttgataaattgatggactctatataagattatttattacaatcgaccttagtcccaatcttgcaatttgttgtccattgtcaatcccgtgcaccatcagacctataaagatttaagcagataaagaaagaaatagctaacctcaagttcctacgcgacctgctgcacattaatagaacttttaaatacagtttttgtgagcatgcaccataataactaaataatattagctaatatatttattgataaatattattttataattacagattattttaaaaaaagttgaataaaaaatgaaaatatggataaatattttaaaaaatgaaatatggatacatattttataatatgtttaactattacataatgacttttttatttatattttaata

SEQ ID NO: 259805 - DNA, 729 bp, Cannabis indica
ttctaagtgtgtgaattaaaaaactgtatgaatacaaaagtaaacaataacataataacaaaccaaataaactaaatcatatacaacaaaaaatataaaacataataaacacctaaaaagacttcaaaataaaaaaaaaaaaaaaaaaccaaaagtcatacctaatgtcaaaatagatcacggtaaacttattaatatgtatgagtgttctcaattttattagaatttcaacttaagttatggcagtaagatagtgaaaatgtgttaaagtactgaatgtgtaacatttttattcaaccatcttttattattaatatttattggctttgatatacaaaagtcgtattgtattaaataacaaagaaaactatgtaaacaaaacagttaacataccaacaataatgaaaaaaacagaacattactgtttactcgtgaaaatagtaaagtatacaaaaatacattaatattaaaaaagtaaactaaatcatatacaaaaatattaaccacctaacaataacggcaatcatttgtgtaaattgtgcttgatttgttaatataaatgtaattgaaaaaataaacaaaaatacacacgacggaaccaatgtccccaacaactatgccaatcatttgtatgtattgtgcttgatttgtaagtgtgtgaattaaaaaactgtaggaatagtaaagtatacaataacataataacaaaccaaataaactaaatcatat

SEQ ID NO: 259806 - DNA, 999 bp, Cannabis indica
atcagattgtaatgggttttatttagtcaagattgccattagttggtgaccaacttttctgtgctgtaactctatgcgatagcattcacgagccagcatttgatcaccttacactaatcacacacccattggtgtttaaaacttcaaggataagtgcttaacctacctaactgcccctagtctgattaatgttggtcgacccagcagtatattgtaagctaacggttggtcgacaactgaaaaatcttgcattattataatggataaaggtgcttcgcccaaatttaatgggacctcgattattccttgactgatgacactgtcatctataaagccgcaaagatttaccatgcaaggtcttaatttagctttttcaagccccatcttcttcagtgtttccctataaaggatgttcactgaacttccgtggtccactagcaccctttttatcctcttgttggcgagctagatggtgattaccaatgggtcgatgtggaaatacctcacgtctttttcatcttcctccaagaatataattggaggttcttcagtctactcattttttacttccttcacatacctcttttgagcattattgctcactcctgcaatatttggccctcccgagataaccaggatatcctctccttcaagaggaagaggttgtaacccctagttgcctggattattgggattgggctagttatgtccattgccctatcttttcatatattgcttgaagtgacctcacgtgatgagaccctctatctcatccttcagctgacggcattcgtctgtcgtatgcccgataaatttatggtattttcaaaaatttggttgcatctctcttatgtctcacatgactcatgggctcaggtttcgaaaatgccaccctgggttcatgcgcaagataaatgttttctcgagtttcattaagctcgatgtaattggtgtagattggcacatcttgtcgtgcatcttttgcttctctttgctttt

SEQ ID NO: 259807 - DNA, 1078 bp, Cannabis indica
gtactctcctaactttactctcatcttaactaatccctttttttgttatcaaattattattattattattattattattattattattatttaattaattaaattattcctttacattttaaattacttataaaggtgataatttatttataataataataataataataataataataataaaatccttttttttttcgtttcaacagaccttaaatgtagtagtaattacaattaagatatagtaattacaataattttaaaatcatataataatttttttttattaagtttatcagtgatttttttttattaaaatctttattttgtgtgaagaatttttaatttttaagaattatatttttttattgcgtgtaataataattagccatattatttttaaaaagttatataaaaattattaaaaatttaataatttattattactaaaaaatacaatcaaccgcgaaaaacattttctgattaagtataactttaaaattttcctattagtaaacaaataaaatatctcaaatatatttgccttacccaaagttcctgaaaattacgaaactgcatgtgcatgttcgaatgaataatttgacttttccaacgaaatttacaacctttcccaacaaaaaagctgcaaataagcatacgtcttcatctcatatctaaaatgacggcaaaaccaaactacagtttctaacattaatgattttttaattagaattgttaaaagagcattcctattatttaccacggtgtttaacactttttcgatatgtcacgttgcgactggctagcaatacttcttaaaagttattatattaaaatatatgagactcaatacttagttggaccaatagcgatacacactactggtaccttttagcatttctcttgttaaaaggtattactattaactagtatcagtctctcatatataaaattaattttttttttatatttttacacttcaaaacggtcatttaatatttttatcgaattttacataaaaactcttattgcaactaacggaacaacttaattcacaatcaaaatccgtataacaact

SEQ ID NO: 259808 - DNA, 581 bp, Cannabis indica
catggatttccagggctacaatcgaattttgttgcaattgttgttgcagatgttcctttgatgttttcatatgttatatccttaatttttatgcccgatgcctgtaaaatatacataaaaaaacatgatcaatattttatatgtaagcaaataatcattattaggaaaagtgattaagtagttcttagagtaattacatgatctgggcaattgacgtgacttgggcagtagttttgatcgattatgattggattttggacgtttctcataacgatattcgagaagtgaacactttcgacgaagcccttactaggcttggcccatgatttgatcctgatcccattttgagtgcctgtgaaaacaacttgcttcacggttacattttggactccttcctcattcatgtccttagccaggctcccgatgctaatgccatgaccaggaccacaagccatgcgttcgatccagagattctgagtgccagggccgatggaaacacaatcgtccccagttcctaccgcagagttcaagatggcaacatttttagagagttgaacgtggatgccatcagtgttgggact

SEQ ID NO: 259809 - DNA, 1784 bp, Cannabis indica
gcggcggccaaggcagcccaacttataacggtcaagtccaacgagagttgtaccactaataaagacattggtgatagtattaacctaattagtagggacgcctcccctgatagcggcgatacagacgataacgacgacttttggggagaaattgaacttccggagcttattaacggcggcgcgtgtcataattattggaatggttgtggctggaccaatgtgcttggcattgaaggcggtgccaccactgccagctggacggagggagagggtccgttgcccttcactgcgtgtctctagctacagctagtatatgtggatatatacgtacgtacgtatatcttaattaattaatgtataattaagtatatattattaattagtttcatattataacatctcctcacaaaaaagtccaaaagtttcaatcatcctccccaatttcaaaaacaaataataaaaataattagtattttgctgttttctcgtgtttttttctttctttttttacttattaatctcataataataataatacgaaaatgtcacatatatgattttggtccattataatttttctttttgaaaaaattttgatccattataattaaattaattaattaattaattaattgttgattatgtgtgatttgtgattcgtttactctcacttggctccaaatcttttaatgtataaaaaattttgtattagttacacttcgtcttctcttttcttctaagcgatgagattaaatatatatatgaaaataaaatttttgttttagtcggaaaattaattccattttgttttcttttttacttatacggataagaaaattactgcactatacataattggtagggaacgtgtattgttatatatatagtacatttttaacaattaaaaatcatatacaaaacaaaaataaataaattaagctcagtccaatctgcctaaattactggaatgtactagtttattgctcaaagtctattaaaggtaaaatataatcactaattatataatatatataccaatgagaaagtacgaaaaataacgtcattagtgggtaggtgtagctcattagtcctaagagtagtataatttcgataatatatattccgtagaacacaactattttggagctcctgctgttttaatttcttattattatcattattattattattagtattagtattattttcgcctttattattaagtcaaacttttagactgtaaaattgtcaaagttgtgttaattatggtggaagtttttaaggtttgatgaaagatagagcaaaaaataaaaagtgtagctcaaatgatgagaagaccatgataagtagaaaatgatatattcctacttcgtgtgaatgattggttaatatttgtagttatggctactcaaatcgaagggttaggcccataattatcgcacaaccgtagaggatatttaatacttaattgttcaaaaacaaagcatgtgtcataatataattttttttttcaatgatgtgtcgtaattaaatcttggtggcactcgtgctagctagtagttttctctctatcaaattataacttatatgtttttcaaaaaaaaaaaaaaaaaaaattaataacttatatatgttattgtttttttttcttctctaccttactttttctttatactataataaaaattaacgtaacatattttgttttatttaacttagtaaataaaaacaaaatacaactaatctaaacagaaaacaaaaagtaatatagttttttgttaagt

SEQ ID NO: 259810 - DNA, 634 bp, Cannabis indica
agagtacatgtaaatatgtgtatatacgtatgttgtttatatgtgtgtgtatgtatgtgtatgtgtttatgtgtgtgtgtatgtatgtgtatgtgtatatatgtaagtttaagtgtaagtgtaagtgtaagtgtatgtatatatatttatgtgtgtatatgtatgttcatattttaattgggttttaattttatgaaattaggtcccgtttaccggcccgaagcaccgcttcctgcttgttgttgtcacttttggactgcttcaggttttgtttttttttttctttatattagtattgtaaatttaatagttttgttataagttagtatgcctatacatgttagtgaagtaggttctgtgataaaatactgcagtctgatcggtggtgtgatttattgtttttcatatgttgttatggaaagtttgtttgtgctatattcataggttttgaaaattttgggtttacgctttttaagccgttatgctgcccaaattttggtagatagttaaataatgtaatttttaatttaaataaattaaataaaaatttgttaaataatatatatcataaaatgtcaaaagtatgcaaaaaaaattttaaatttataaactttataatatttaatttaaataa

SEQ ID NO: 259811 - DNA, 703 bp, Cannabis indica
gcataaaacccaacaaatacatcatagggattaattggttctatatcccagctcccgtccaaatgacttgccctatcagtcattgtcccaaacttctcggctatcccgtagtatgactcaatacagttaatttggacgtgacacctaggataccaactatcaaacctatgtgtaatacgatctatgaggaggggattccaggtgtaaatgttatagcgactatctagaaatgaaactagagtattacgcttggccttaagcattatgggtgaccaaccacattgattacctccagatgctctttcttcggcttcccgaggggcagtgtttttggaggtattgtgcccgagccacgcgatcttgagctttctcctcgtctgggacaggaacctgctaccaagaagaatacttgggatatttataatcacaagtaaactccttgttgacctcgttcagaagaaagtcacatgacctaagatcgtatgggatagtcatcaaaagcctgcatcgctcggccatctaaggagtaggggcaggtctttttgagacaacagtcaaaaataacaatcagctaaacccaaataaaaggcagggactaatttaaccaagtcttgtgtaaataatcacttacgtataatgcggaaagtggttgtgccgatgggggagagactggtcgtccagaagaattcatctttaaaggaaa

SEQ ID NO: 259812 - DNA, 844 bp, Cannabis indica
  modified_base (674)..(674): a, c, t, g, unknown or other
  modified_base (736)..(736): a, c, t, g, unknown or other
atcataacatatgtgaataaaataagttagtaatgtattgtaataagatttttttttaatgtagtattactattatggtttactaagcaccacttagtggtgcatgtaatttttgttcggatcactaatgtggatagaaatattagtaaagtgtataatattgtaaatcctaactttattaactttttttttttttcgtttattaggttttttgattcatttgaagtttaatatatacgaataagcttacaacttttattttgaaaacttaataacatgaatagatagacatatgctatatacaataaatgaactccaagctttctgtaaaaagatcaaatattaattcacttaagagttaattctaggagttaatttagttataaagctcaagtatataattagattataaattcactattcattatgaattaattactatgaattaattgtactaaaagaattaaaagataattagaaaggtaaaatagtaattttgactaatttacttgtgaactaataaattggaggagaaactatttatattgattaaatcaatggattattaggtagaattcattaaatataatattattctatatttttatatgaaaatttcatatttatagtaaaataataatagaattaataaataagattatttattataaagnttaaatgtaaatcttatttctaaaggttagaattattagaccgtagtcttaaggtcaccctntacactgtttgcagtgacggacacactcacaatagtgtggcgatatagcccccaataattaaatctttaaaaaaaattaactatttttacttttctatttgataatta

SEQ ID NO: 259813 - DNA, 1344 bp, Cannabis indica
gaaactgggggtggtgcccgttgaacgcctcacggagcccagcatcaaaaccaaaaatattgtggcagcagtttagccagaccccaactggatgatccctatcatcgaatacataaccaaaggcgagttacctcaagaaagggcactgtctagaaggatacagtaccaagtgcaccgatatgtgatgatggatagcgttctctaccgaagaggactcagcataccatacctaaggtgtgtatcggaccctgaagctaagcaaattatgctagaggtccacgaggggttctgtggagatcatataggaggcccaagtctctcaaagaaaatattgagacaaggatacttctggccaataatgaagaaagactgtatagactatgtcctgaaatatgattcatgccaaagattcgtaaacataccaagagccccgcccaacgagatcaccctaatgactagcccctggcccttcgcggtttggggtatagatcttattgggtccctacgaataggaaagggaggggtaaagtatgttatagtcgcagtagactacttcacatagtggacagaggccaagccaatgaagactataattgctaaaagagcactagactttgttatcaaaaacatagtgtgtcgatatggcttgcctcacaagatagtctcaaacaacgggaagcagtttgactgcgaagaatttaccgacttctgcaaccaacacggagtcattaaaagcttctccgcagcagcaaggccacaaacaaatgggcaagcagaagccgtcaataaaatcctaaaggtcaccctaaagaaaaagttgttggcctgaagaattcccaagagtgttatgggcctactagaccaccccaagaaccccaactggccactcgccattctcaatggcgtacggttgtgaggcaatggtcccggtggaaacgttattcccatcccacaggagaacgacttacaatccagcatcaaacaaggctttattacaagaagcgctggatcaaattgacgaacgctgggatgagtctcaaatacgaatggcagcttatcaaaagaaggtggctaaacacttcaattcgaaggtcaaaaatagaaagttcactattggtgatctggttctaagaagggtcttcccggctgctcaagaaccaagagtgggggtacttgggcctaattgggaaggaccgtataaaattgaggatgaaatcggctccgggacctacaagctaaaaagaatggacggaaccatggtgcctagggcctggaatgctgatcacctccgaaagtatcaccaatagtcgaaaaaataaaagtttatgctctgtaaagtaaatt

SEQ ID NO: 259814 - DNA, 533 bp, Cannabis indica
gtcgaccagttggtgtccgaatcggacttccggttgggaacgggtctgccggttggggcagtttttggaaacctagttttctcatttttgaaatatttaggatattgccatgttatttatcgataggaaaactttcagtttcaagtttaagtcctcggaaagtgatttagcgagtcactcatctatgttataattaatgtgattagcgcatccatctagcacgagactttccgttcaggtcgaccagcacacttgaattcggaaagaaggtaagaactacatttaatgtgtgatatgaatatttgagtgtatgtatatgttatgtgtatatgcatgcttaaattgttaattgcactaccaacacttgtacggttatggtacagagtgcattggtatagtaaatattgtttgtgagtactgtacagtgataccaacacaagtacgagaaagtgctgaggtgtgtggtatatcactcagggtacaaaacaaaccctaccaacactcgtacagtgaggtacgtagtgtatatggta

SEQ ID NO: 259815 - DNA, 578 bp, Cannabis indica
ttgggggctatttagcaacagggaaggatgatgattgggtaacaatcattgtgaataaggagaaataatatttatagaagaataagaatgaaaatgggggggaaaatgaagagggaaataatatgaagatggaataactgaaaaaatttgaaataaaaataaaccacacccacaaactgtataaacgcttaaaaaatggatattagaagaagatgaataggaaacatgggagagtgggatttagtaatgattatttaacatttaaaaataattttaaataaatttaaactccaaaaagaagcatactgtcacaaattgacaccccatggcaaatcaatacttttttgaaatatttaaaaataattttaaaataaattaaaaccccaaaaagaagaacattgtcacaaatagtgacacccacacgttaatcaaaacttttttgaagaaaaaaattcaaaaaataaagtgacaaaactcggtgaagacacgtgtaagccacaaataatatataagatttgaatcaaggcaataattgccgaataaaaaaaacagtaaaaatgttacaattcgcgtgtcac

SEQ ID NO: 259816 - DNA, 1078 bp, Cannabis indica
tgatgatggacttctgagtcttgttcgggcagccaccttgcatattactttgtcttgtttttgagcttcttgattttcatgccttatgtttctaatgtcggttttctaaccctgttgctttcgttctgcacagacatgtctcggcagatgctcgacgctctaaggaagagaataggcggaagctctagcgcctctcctccgaccaagaagtttaagggcggtgaggggtcctctactaaggaaaagaggcctactagggaggttattgatctttctgaggagctgactgctgcaaacccctctacccccaaagttgccaagtctaaggagtctggaccactgaaggtttggtctgaactggtcaggagtgatcctgaatgggtgcgggcacctactccacctttgtcgatgcttctagaggccaaaaagagcaaggagatgctggcccattatatgaaccagctggttcctgaggtcagtgagtaactggctggtggtgacaatgactcttctttggaattgctggtgggcagagtcttgaaggagttcactagggtaagtctttcttaatacttcactttaatcttccatacttagctcaaatgctaaagttttttccttgtgcaggtcggtttgaaattggcctacacttactcccgggctaagtctgctgcttccaagaacacggctctgtccgacaccctgagggtggaggcggacttggccaggaaggatgctgaagaagccagggcggaagtcagagctgttcgtttggaattcggtgaagccaataagaagttgtttgccgctcagaagaaaatcactgtgctaactaaggatgtcgaggttactgaccgttttgaggagaccatcgagaccttatctgctgaggtaaacattcttcaggatgagaggacttccctttgatcagttcttcatcagatgaaagaggaaaaggaagcaaaagaggaggagctttctgctgaggtcgacaggttgaaggagaaggtcaatgccttggagacagccggtctcaagctcttctttgtttttgaaaggctaatcctcaagccaattt

SEQ ID NO: 259817 - DNA, 566 bp, Cannabis indica
tatttcattagttaatagaatcgattaactataataatttatatgttttataaatgttattttaatttttttatattatgtttttactattatataaaattattctaaaatttgataatgatggtggggaaaattacatgaaaatttacaatttttccttaactacatttatgcttcattttataaacgacgcaataggtgaaaaagaaaactatttcaacaatttatgtctcatttttgaaccgacggaataagttttttgtgacggtttggaaatgccacaaacaattttgcgtcgtttttaaccgacgcaaaaaataaaaaagaaaagtgcattttttgcgtcggtttgtaaatgaagataaatatttttcgcgtcatttcaaaaacgacgttaataaaaaactaatttgcgactacgatatatacgtcggttttttaaaccgtacataaattctttaaatgacacttaaaaactgacggaaattatactttttgtagtagtattttcaaaataaatggacactactacaaaacacacttttggtgtcggttttaaactgaga

SEQ ID NO: 259818 - DNA, 788 bp, Cannabis indica
cttgtaatattttgtaaaatatttttgggatcccaaattatgtcacttttgtttgtaaagtttaaagttattgcaagttttattttcattctattttagataaaagtttaaatttcccgcgcttatctatctagtaatcctgttttaggggattagggttttattattgattagcgtagcgtgcctaatagttagggcgttacaatttggtatcagagcgccaaggtttttaaacttcctgtagactggccgaacatgtacaatcatcgtcagagctcgactcgtggtgcagtaagtgttgagagtaaacgctttactgcttatgtgattatttatttaccgctttccattttaggcagtatgtgagcatttagagtatttatgtgatatatgatgccatgcttagaatgttaaatgatgaatgtttatttaaatgaaatggaatagttgagttagggtttaaaggcaataagtgcgtaagtgtggtattggtgcctgactcgccagggtttttaattactaggttgtttgtaaaatggaccctccataatcatctagaccacagggcgagctagtatagcctggtgtagaccaaaccaatccacttgtttaacgcccaaatgtgacttccactagcggtggttgtagtatagatcgagcggtcgattccacagggaggtgattatggacaaaagcgttattagtagaaaaataaaaacaaaaggttaataataagtgataatagtaaccaatgatttgtgattttaatttgataataaatattaaaa

SEQ ID NO: 259819 - DNA, 1192 bp, Cannabis indica
ataaaatttacacagtttttttgaaaaagaattccctaagtaaaaaattaaaaacactcgtaaaccaaaccatagaatgaggacacatgaggtcattgctaataattagattattatcacatcaatcgacatggagtgggaatcgaacagatatcaataggagatatatagattacatacgattggataaacgaacgaagcactgaaactaatcttacaccgtgaaacacccaccaaattagtttcaataaagtacaccaacattagtatagtctccgcatgataagctccccttaacttgggttgcaatccgttagcttgttatattcgtgtttatatttagacagattacaatatcaaaacttaacttaatttgacccctcgtcgacatttcatgttcacatgttcttacactccaagttgataaacacgagaaaatgatatgaaatatgagacataataagaaaatatatcacactattttttcacatttaaagttttttatggtgtttacatttttataaatctaatatcaaatcttatatttgatatttttatctagtctaattaattttaatttttgttttgtttattttgcatttacattttaggatatttatttctctatttttttccttctctagtttttttagtagattttgtatttatatttggggcattatttgattattggaggattcgttttgtatgtcgtattataccgtattatattgtatagtattatattaaggtatatttcatacaatattttttatgtaaaactatgtatggtattgacttgtgtaggtacataaatatataatattttaaaataaattaaagtttaacataggattatatgaaaatatgatatataattcaatttaataataatataatacaatataatataatacggtctaatacaacgtaccaaatgagccaaagtgtataatattaattcgcctcattttttgttgtttttttatatgtgatttctctcattcctatatttttatttatttttgttattattttacagtttttattgtatttttgtctctgtaatttttttatttccttttttctctctagttttagttttttattctctttgttatttttaactccatattctatgcttaaatcaactctggttttttaacaatcaaataaaaaattaaccaaaata

SEQ ID NO: 259820 - DNA, 995 bp, Cannabis indica
ttctcctagggttagatttaaattatatgacattacaaaattgataaaaattggctaaacttacccttaagtgaccagccataagatgggccccactaaattagaattttaccatttattcaacaatttatcctttctttcacaaatgccatattttcaattttaatcctttaaatgtcaaaactatttatttaataattataattttttttttgtatgaataagaattttattgctcaaaccaaacattacatcacagcattttgcacttcaacaaaatctatttctatcactaactttgatcatatacaatttatgttctcataatccaatctatgtcttcatcctttgcttttctgggtgcgaaaactttaattctcagcaagctaagttgcttacttttctgtagagccgtggaggtaagccagagttgttggttccataaagcttcattcctggccttccatatgtgatacacaaggcttgcaatgactgtgttcaccatgcttttccttgctgcattaaatctcttcgtttggtggtaggcttgcagcagttttgtaatgtcatctgttgttgtgttccattgcaggaaccttttaatttgctgcagacatcttgtactataatcacatttaaaaaataaatgttcattggtttcatcttccctgccacacaggacacaatgctctgattaagtctgcttactctctcctttgtgttcagccttttccaaaacactagctataatataaatctatgcttgggaataatgagcctatcccaaactagattacaccatggaagtttaggatgttcaggaaatagatcatgatagccctgttttacccgatacctctattttaggaagccctccatatccattctttgctgaaatttatctttaactgcaactattttcttccatgaccagctgcaatcttgtggagcagtgtagctccaccagttgtgatccttcaaataaaccatgtgta

SEQ ID NO: 259821 - DNA, 667 bp, Cannabis indica
cctagtacccgacccagacccgaacttcaacctaggactgagctcgtgaccctgcacctgaaatggaactagacagggacccgagattgggatccagatctggacccagggtttggacaaaacccgtagtcgtggtgtggatttgggatctagccctgggcccgaaccctgacaaggacccgaacccacacctggacatgaacccagtgtcaaacccaaaagtggatctgaacatgtacctagtgacccaaaattggaacataaactggaagttgaccaggactggaactaggacttggacttggaatcataactgaaatcggacctctatcgagaaccgtaagcgaggcaggacccgaactccaaatcctacctagacccgaatttggagccggacccggatcccaacccaaacctagactcggtatccgaatcggaacctgaactcagacccaaacattgaactagacaagggacacaaaaccagggtcgagacctagaactgcaccctagtcttgatcccgaatcgaaactcagaaatggaacctgggacatgaaccagaacaagaccgagagccgtgacagtgatccagatcttgactcaggattcgggtaacgggttctagaacaaaccagtagtcggtgtctagatctgggactcagacta

SEQ ID NO: 259822 - DNA, 683 bp, Cannabis indica
aatgattgagaaagggtactctttgcattttgaaggagatttttgcacaatctatgataagcaagataaatcctttcaaattgcaaaggtaaaaatgaaagaaaatagatgctttcccatacaatggagatatgcaagcaatgtggcaatgcaagcgcaaacagatgagtcatggctatggcatagaaggtttggtcacttcaacttccacgggcttaagatcctcaagcagaagaatatgatgcgagacctcccaacaattaaggagatcaacacagtctgtgaaggatgcatgctcgagaaacaacatcgacaaccttttccatctggcaaaacttggagagtcaaaaagccactggagctagtccatactgatgtttgcggggcaatgcgcactccatcaaatgaccaaaacaagtacttcattctcttcattgatgaatttacaagaatgacatgggtttattttatgcaacaaaagtcccaagccttcgatattttcaaaaaattcaaatctcgtgtcgaaaaacaaagcggtcactacagttagaagtgaaagaggcaaagaatacacttctattgaatttaaaaagttctgtgaagatgaagggatggagcaccaactcactattggatacgcaccaaacaaaatggggtatcagaaaggaaaaacaggactgtta

SEQ ID NO: 259823 - DNA, 507 bp, Cannabis indica
tcccccaaatctgtacgggacttctaaagttgcatgtagactgcatccgagctgcctttgcatttgaatgggtgacacgtgttaggcacgtctattcgtgatttgatgtaggcatctcttcgatttttggctaattaatgctctacttaattagtgccccgaaacccagttttctcctcacgcttgactgttacacttgattagtttaatttcccaatatttgctttgtgggaggaaatcgaagcgtttgaggaatttcgaaatgattaccccttttcaccgaagtgcctataaataaggctagcatttccttatactttacttttactgatttctctactaaacaaactcagagcaaaaaaggatttttacttcaagtctgtcaggagattcccacaaaaggtatccgaacaacttcgtctgtacttcatgtaggcttcaagcagtgagtaagtttttaatctcctcctcttttaactctgctagtttaatttcagggtttccatt

SEQ ID NO: 259824 - DNA, 1731 bp, Cannabis indica
gaaaaagggtaaaagtatatgatgtacaaaatttgttatgtaaatatctatgtcaatgctacaaattacaattatcaattcaactgagaagtgatatcaatgaagatgtcttcactgcaaggaattgtgagtccacccattggatgctcatatccgaattcttgttcagccatactaagcaagtcttgaaatgaaggctcatttaggtacgaaagaggtactacgtgacgcttcttctgatcttctccaacatagactgcaaagtagctcatgttcttatatatggctcaatacttttacatttaatctatgtgggacaatgttctccaatatcccccttcaagatagtggttatttttgctcaccaatcttgaacttatcttatcataagtagtgccatttgctcgcttatttttttgttttgcagctgggagttccatttgctcgcttattcttgttcgcagctgggagtaccattttgctcgcttgcggctggctaactctttgataggtgtggatcgaaagcccgctagagatatgattctgataccatgttgagaatcatggggttccatctcaaaaactaattggcaatgaaaggagtagtccattcctcttatatattctattatctttctacgtattagcaatgtgagacactctaacatgttagatgtcataacataaatatattttaccataaaaataataaatgtaataatataataaataaaattatcataaaaagtaataaagccgaaacaacgcaaataacgcctccgcttattctaccatcttctcattttttagctattaataatttctatgtatgtgtataaattatggaaacaaaagaatacaaattgagaaaatgagaaatgaaatcgaaaccctagacgccattgtcgaaactctctctgagtgttctgtgtgattttgtttctctctctgcgattcaatcttcgtcgtcgttgaagctcctggttgaggtcgagatcgaggggcaacggtcgaaggaatatttggctgcttctgtaatatattttcactagtgttacaaaataatagtgtggcattttttgtgtgactacacttgatcaacttattatagtaagttataagaaatgtaaagatggtaatttctgctttgtgtatattagggtgtgtttagaagtaattgtgtaattattagggtaataattatataatagagtaattacactatattttaatatattatgagttcgtttagtacgccgtattacattgtattgtattgtagagtattatactgaattgtattttatacaatatttttatgtaaaactatatgtagtagtaacttttatgggcacctaaatatataatattttagtataaactaaagtttaacatagtattatataaaaatatgatatataattcaattcatataatacaatatgacctaatacgacgttctaaacgagtcctatgtgtgtttggatatatttaatggtaattacttatgaattcttaatttcttgtttggaaaaatcttaaaattaatattttctggtacatactatttaaaatgaaaagtttttaataattacacattataattacaccgaattatcatgtgaggcatgagaatttaagagtgtaattaagagtgtgataagcggctccctgatcacaagtggcttttttttttacttttggctcttggatcaattttttttggatttt

SEQ ID NO: 259825 - DNA, 729 bp, Cannabis indica
ttaattttggacaacttttttttcttaacataactaacttgaaaacaattcctaacatgaacagatacagaaaatacaaatagttttgtcataacacatttagatcggattattattaaattttatttgacaaaaaaatcaatttagagtctcatttgtactattttgaaaaatacaatatctattttgttatttaataaaacaaatggtctaattaataccttttacaaaacacaaccaaaataatatttacctcaaatattataatctactgtttttatatgatggtatacaccaatacattgtagttataagttatagtagataatttgtgtgtcaaaaatagatgttctattttatttttatatgcgtacaattatttattttaaattttatttttagtattataaattatttaattctcttttatttatttatttttttttgaaaaaatttttttttgaaaaaaaactaattaatatttcgtataaaaaaatgacacatgtttctccaacaacaaaacaaaacacacattaaataatatttttcaaatttataatttataatttaaaataataatatagggacaccattaatcttttgtactagtagagataggggtgtgcataaattgatccaatccgataggaaccgaccgatccaattacaaccgaccgtcaaacattgaatatccaattgtgatcggattggatgttttttttaaatatc

SEQ ID NO: 259826 - DNA, 742 bp, Cannabis indica
tttaaatttgaattgtaatattaaaaaaaaactttatgttatatagacgcatttaatatatagataagagatcaaaaaaatatgtacagcgaatttaaatttaaattgtaactttttttttttaaaaaaaaaactacatttaatataacgtatagttataaaatattaataaacagataagtaatatattatatgggtacccaccgggacagagagtatcataccctgtttagacgggaaacctccgccctagtaggggcgggtctttagggatcccatccctatagaaaaaatatgcattcctattaacaaattgcaaaacattaattaatttaattttaaaataaaattaatattaattaaggttttataagaaaataaagtatcaggttaaaagttatcacaaattaaaaattataaataaatatatttgatgttactattaaaacttcttatatatttttttatatattgtgagatatttaatgtgcatgatcaatttgacaattgaatgcaattaatttattttttgataatttgtgattattctcgtggttaggtaatgcatggactttaatcttttatatatatataggtagccgattttgtatccagaaatataaaacacagaatgtattctgttgtacggcaggtacgtaataatgtgtctcaggtataaaataatgtgtctcaaggtacgttaccattttttaaccctgattatccctagatcaactccagc

SEQ ID NO: 259827 - DNA, 1503 bp, Cannabis indica
taaatactttgtttttatacataaataaatacctaacataatattaactaatctatacttgatcttaccaactctcacccataaccaattcattaaataatagttgtaatatagtatattataataactccctaataaacattttagtaattaaataataatattatatttggtatgattttattaaaaaagctaccaagtaattatttttgcaatttgtttgactaattaaaaaagatcatattattattttcgtactaaaaaaaattacttaccaagaaaacagaatcacgagcagcaagagcggtaatatcagcgcaagaaacaactcttccacacttcttgtgaattagggctcgaagatcgttaatgatcttgaatgcggtggctctcaaggtgagattaggtggtgcatctttctcacttggtccacttgctgacccatctaacaacactgaaccatcacatccctacacaacatatttatgtatatataattagtaacgacacataattaactaaatccaaacatatctaataatccatttatagaaattaattaactacaaacaacatgtatatatcccaaacttaataagcaaaatcaagactacaccactaacatatcctaattttaacaaagtttatcaagtacaacaagacataaaagtacctaagaaaacctcccaaagtttatcatgtcattttttataagaagatttttatagtcgagtgatatatactatgctgttaaatacaaactcggactgtaggaatgtcaatcggatcgggtcgggccagtcctgacccgacacgtttttggcccaaaccggcccgaatacttttttcagtttggcgggtcggaccaaaaaagtattgcggcgggttgtgtcagactgaaaacctagaaagtgaccagaaaacatccgggttgtggatctgcaagaaaaacccattttgctattcgggccgcgccgaaggtaaatagcttctaagcctaataaagtgattaaccctctctttttttatcaatgtggaacacttacatatattctttgagaaaagaaatagttattatttctgtatatatatatatacctgaacaaagcaatcatggaaatggagacgaagcaagccagcagcttgggcaatatcatttttgaagattttcttgagttcttttcttataatggactcagcagaaggacatgattttgcatagaattgccatgagaggcctttggttaaaggaactgttttctcagctgggccttcaaaatttgcacttgacacactaataatactactacaaattagtacagcacaacagattatcaaaaccagatttttattactagtagaagaagaagaagatgatgaactagccataaccatggtagacttttggtttttgtgttttggatgttgaaatgtcttagtaccactcttttatttatagccaaatctaagatatatatcattgttgtattattattattatta

SEQ ID NO: 259828 - DNA, 656 bp, Cannabis indica
aaggtatttgggtcctgagttagttcaaaagaccagtgatgcaatcgaaaagatcaaggcatggatgcttaccccgaaagtaggcaagagagttatgctaatcctaagcatcgagacatagagtttcaggtaggagaacatgttttcttacagatttcaccaatgaaaagtgtaaaatgctttggaaagaggggcaagttaagtcataggttcatagggccatttgaaatactcaagaaggtttaacaagtagcgtaacgactagctttacctccagcattgtcaacagtgcacaatgtttttcacgtatcaatgtttaggaagtatgtatctaatcaaactcatggcttgagttatgataccctagagtttgcaccagatctatcctatggggaacaaccaattcagatcctcgataggaaggacaaagttttacggaacaagactatctccatagttaaggtactttggaagaatagcaaggtggaagaggccacctgggagtcagagtctgaaatgaggactcaatatccagagttattcaggttagattttagggagaaaatccttttaacggggggatagttgtaatgtctgttatacttagacatgggattagtgggacacttagcactaattaatatgactatgtgatt

SEQ ID NO: 259829 - DNA, 599 bp, Cannabis indica
ataatgaaaaaatttgaaatttttatattatctgtatattacattatacattgtaatacttcactacttttaacaaaccattattattattttatactatctagctaagacatctacgtggaaaattaatttaaccacattttcatgtaataagaagaactaaacgccacgttgatcgttgattgaagatcatataatattaaacgacaacctgtttgcagaaacgacaacgcaaacaactttacattttacatttcaaagttttatttgcacccataattttaataaataaaatacatatttttaattatatatattattttttataattttttcattcatttcatattcttaaaaaaaaatatatctattaaacaaaaataaattatattttaaacattaaaacaaaaaattatgttaaattttattagaaaaaaaaaataacaaaaattatacaaataaatattaaaattaactcaaaataatataagaagaattttttttaaaaaaaaaatactaaaaattatttaagcttaaattctttctaaatattataattgtactaaaaatttctagtttaatttttccctatccataac

SEQ ID NO: 259830 - DNA, 1031 bp, Cannabis indica
taaaaaataaaaattacaaataatctagtacactctatatattaattattgttatacactcatttatttatcacccttagatttttaatctatggctataaaaacatctctatcatagagacaaaactcatgtacctattatatagacatatccaaaatacatatatatgtaaatagtaaatagtattacagtaaaatatttaagagtttgaaagaaataaaatctgtgaattcaataaataatacacattatataatgtacattaatttaaaatacaattattagaaataagttacttacaataattagtgtaacaaaaaagtaataaaataacaaaatacaaacagagaatgaatgaaaactaaaaagatgtaaacagaccagtattgttgtatgtagaaaaaaatacactaagtaaatacttataagaacatgcaaaataaacatgaatctagaatttggttttttacatgcctcatgatataatcttattatttgcaaatatctcaaaaattagtttcctaaatcactcagtatttttaactatttgtcgaaaatatatttaagatatagactcaattatgtgtgtgatttatgaagagtaatagaaagaggggacaaaatatgaagactaaataatgacttgactacatgttgaaattagttaaaaatgagattagatgtaccactctaataaaaatgcattaccatgcttggggtcaccaccaatgaaaataataagtgacaattcattgttgttctactttgaatgagtcttcactttgctcaacaaacacctgacaatgaacaaatattcagaaactagttttacagataatcaaccagccatcatatgaggatatctagtttcataaaaaagtactctatacatacataaaaaacaaataacgaaattgatttctttaaaaaataattaggattttttgttggattttgtgccctaaataaaactcatttcaatataatcagatttactagttaagaaagatcagaaataacatttaatgtt

SEQ ID NO: 259831 - DNA, 554 bp, Cannabis indica
agtgcaacctcgagggtttcggtcttatggcattttgagatgccctgtatgttgtaaaaaacaattattacgtaactttatatatttaaatgtatttttcaaatgtgttttatattcaggatccagacttataaactatataaatataatatgataagatcagttttagtttagcaagtttttaaataagggcgttacgattttggtatcagagccaccaggttgttccctaaagaccgtcaagatatgtacaatcaaagccagtgttgagctcaactcgcggctccgtaagctttactttttagcaaactatttaagatgtattgcatatatgcgtgaaatgttacacaaattctaatgtagtcttgagaatacttgaccactgtcgaacctacatgccttgtgggttcgtaggctaagtcctagataatggacgccgagcaaaacattagaggaaatagtgaaatggttaagaccggaggtggtcggggtggtagaaatccccaaaacccccgtagacgccgtagaggccgcggtcgtgcacttagaggtgg

SEQ ID NO: 259832 - DNA, 985 bp, Cannabis indica
tttccaacacgatccatacagtatacactcatcgtgcgatatatgcggaatacattgatcgtgggataaatgcagaatacactgatcctgggatcgtgggtatgccatatctctgtaatctgatcccctagttatagggatttcgttgatgactcacaatgcgaaagctgaattcgctaagtgttggttgccctgcgcagattgctgattgctttgctctgggcatgccagcgaggcatcctgctcggactgtaccttcgcgagcagatactccaagtggattccacttgtcaccattatgcgatgccacgtcagagtgcaaaaattgggataacaataatcttaatttgtagctctgaaattatagttattttcaagcttaagtttatggttatagtgagcatgatcttaaatgaaagttatgttgattttagctcatgttgtgagattgttattgatggatgctaatttgattttagttgtatatattggtgatgaaaagagctcaatttatgtgtttgagctctcttttatggtagttgtaatttgtgaaaaatggttttgaagtataagcatgtttggggtgaattcggtgtgatttgggcatgagtttatgttgctgttcgtcagatttgtaggtttggaaccccgacgcggcggccccactcattgggcgccgcgactcgcccctgtaaaatcttgggttcttcaacccagctgtcacgacccatgtgttgatttggatggtttcatgttgatctatgtgttgtattgatgattgattgatgtttgtgaaattctgggaaaaataattgaatcttcgtttctggaattatttttgttggatagtatggaaaaaattaagcaattcacttttttacagaactcaatttcgattttatttgaattagttatgattttttgaagttttaaaaaatcgggggtggtgagacacccttgtgcgcgtggctggctgctggcagca

SEQ ID NO: 259833 - DNA, 515 bp, Cannabis indica
ttattatttaaattaaatattagattttatatatttttaaaaaatataatttgaataaaaatactcttgtaataataagacttggtgtactcagggccggccctaggcataggcgggctaggcccgtgcctagggcccacactttccggggccaaaataaaaataaaaaaattattaggcttttatttagtaaaatttaagtgtaatataaacaacaaatatttatagcttagttggttgaggtggaggacataatgtccaaggtcatgggttcaaatcccatgacactctttttttgatatatttttgagggccccaaaatttaattcgtcttgggcccataaattttcagggccggccctgggtgtactacattttctatgtgactacatttcctatattcccataatatgacagtccgaccatcgaatcccatgacagtccgaccatcggaccatcggatccattgtttttcttttttttttggttttcggtgggttgcacgggttgagaga

SEQ ID NO: 259834 - DNA, 665 bp, Cannabis indica
aatttctaaaacaatggaatttaaacacatataaagttcaagaaaccttacattggttgcagcgaaattaaatgactccttccactcagatctctaacccgtatttctttttgtcgcagagtattatcaagatctgagcctgattctctttcaggtgttgtattcttcacaatcttacacactatgattgagtactaacttgctatgtgtggaaatgtactcaatcaatataagggacaaaaattaattatatggcattaaaaaatttataaataaatgcctaaattgagcttaagtggccggccattaggatgtgggcccaccaattacaattttgctattttactcaattatttatcctattctttcacaaatgccatattttctaattcaattacttaaatgtcaaaattatttatttaataattaaaattaattatcaaataaaattgccatataatatatttattaattagacgtaataaagtctcttaattaactaatagaccctaaaatctcttttcttcacaattaagccctagtttagtgaaaaattcataaataagacatagtctaatttttgaattataattgattaattaaaatcaattaaccgagtcttacaagcagtattgtttcaactagtatgggaaccatgggcctat

SEQ ID NO: 259835 - DNA, 1685 bp, Cannabis indica
gaggtatttgtactttaatgccttctctcgggggtgttgttgatcgtagttataattgtacttcccttttttttcaaatttctatggttgtttttgttgttaaacgttttacaaccatggtcgaaactctttctagctaggaaagtttgaccttgttggacgggtgtattaactgcagttttcgatagtccaggacttgggttggcctttttctgaccaactatgtccactcaccaaattgcttcctcaagctttataaacctgtttgcttggtctaaatattcacccatcaaacctacaataagccttttgatgtctttccataattctcttttaggttcgattcctcctagcacagttactattcttccctctttggtaagtcccttcacttgtgtagcctcagtgataaatcgactgctgtaatctttcaaaggttttcctagaatctatttcacttcaaccaggtcttcaagtgagcggggagctatcttaaagaacagaattgggtgtaaaactttacagcaaaggcattccacgaattgaacttccctgacattttcttaaagtaccactattgtgcaacctctgccaaggtagccaaaaaaattctacaccgtacatcaccctttactaccttcaggtccatctgtatctaaaagtatttaatatgagataacgaatcttctttcccaagtaagaattttgaactttgccaaaagattaaaggaattgactcattgggagaatggtgaccctcttgttgaatcgagctccagtcagtgagttttgagtcggtcaaattttaaatgaggctctttagctgatctaattagtcctgcacccctggatcaacttgacatgcctattgactggcctgtgtcacctactaaacccctagagtgtcaaagggtaagaagttgtcaacattatgtggaatataatcatccacattaattggctaattgttgggtgagggataaagtatctatccttgtttcctctcctatgattcaaattgtcccgaagatcagccttggggcccatcctttgaaaaactaagttgcccagagctcttttgcttcgttagatgataaaccgagccaacctaggaggattagcattgtttggaggatgttcctaattctcgtcgtgggtaggacaattatcacgatgacaaatgttatattatctgctattagctccatcatcattcttgcttgagtatgactatccactatgagaccttgttcggtcttgaggcggttcctagccgacatgttgaggctgcccatggacatagacccgtccatctttgttgtacacccccacaagtcctcgaggtcctacagctggtcgagaaggtacatcatgttggaattattttaccaggatcttagatttactaacaagtgtgttatttaacatcctaaatatgaacttctaaaatgatatgaaataaacacatataaagtataagaaaccttatagtgattgcatcggaatataatgtctcattccgctcagatctctaacccttgtatcctttctgtagcagagtatcaccatcatcagagcccgaatgtccttctcttgaatgtggattcttcacagccttacacactaggattgagataccacttgatgtgtgtgggcactcactcattcactataggctcggttaa

SEQ ID NO: 259836 - DNA, 504 bp, Cannabis indica
cacaagccataggtttagataaactcaaaactataatacttggaacaggaagttttgttgagtccattgaatagacttattttcgaaatttccgttcttgtccttataatagaaaacttttggttactccatatgaatggttttaaccatagttctcttggcttcacttcttagttccttattctaacaatccattacttgtttaaacaaacaatggattttatcacaagtgtcttccaaatcataacagggtgagttccttgaaatcctcccactacgacaaggtaccgtgaattttgtctaagaacataagttgttttgtcttcttcggttgtgtcaagacaatagaggcagtcgggccatcttatacaaaataagatgatagaacacttttggaatcaagaaaaaaagtacctcctctacgttgctactttgtttccagacttagtcattttcttagaaaagcagtatttgttgaaacaaacactttcttatctaatgact

SEQ ID NO: 259837 - DNA, 836 bp, Cannabis indica
tcaaacgtttcgggaaaagaggcaagttatgccataggtttacaggacctttcaagattctcgagaaggttggtgaagtggcatatcggttagctttgcctccagctctttcagcagttcacaacgtattccatgtttctatgttgagaaaagacgcttcagaccccactcatatacttagttatgaggaccttgagctgcagccagacatgtcatacgaggaacagccaatacagatccttgatagaaaagataaagtcctccggaataagaccatagccttgatcaaagtactctggagaaatagcaaggtggaggaagccacctgggaattagaatcagatatgagagcccagtatccggagttattcaggtaagattttgaggacgaaatccttttaaggggggatagttgtaaagaccgcttagtttaaatttggaaattagcagctaattacgatttaatgatgaaaattatttatgttgatttttttgaattcaaaatgcattttatgtcatatagtgaaattttatatttttgcatattcagtgcccggcaacattggaacacggtgtatggctcagtaaaatcacatcttaatagttttatatagcggggtagtttatttagacattggaaatatcgggattggtcgggaatttagaattttccaaaatacccttagtaccccttttacgtttttttggtggaggtgcaaattggtcaatttgccccatatgtagtttgtcctttagtggtttatgttactcttagtaatgtgattttttaaatttaatcttggctgaaggttttttattaaaaccattttataact

SEQ ID NO: 259838 - DNA, 3751 bp, Cannabis indica
atattattacaataagactggaaaagcgaatttacacaaatatttgaatcctaaattttgcctaagcaaacacttgcatgaacaaatgtttgaatcctaaatcttattcattagactttgcctactgaataaataatatattgacttgggctcatctagtggagctcgacccatgaggctctgactctatgctgatgtggatgtcacaccatggtgatagttatcaaaatcgtatcctactttcgtggataataaaaatacattaaatgcttgattgtcaattattatcttttcatattaagaatatatgatcctcggacacgatcctaggagttaaaacttgatatagcgggatatgataattaatgaatatgatacagagctggatgtccttagcaggatcttcttcgttgatgcaaactttttccacctcctccattggttcgactattctttctacccttacataggggtctaattcatcttcttcccaaattactcctagtgctggttggacgggtgttctgagatcttcttggttctcttcttagaccttgaatacaatcttagtcaagacattataacacttcctacccctacagaggggtaattcatcttcttcccaaattacttctagtgttggttggacgggtgttctgagatcttcttggttctcttcttagaccatgaatacagtcttaaccaagacattataatactttcttacacttttttggtcaccttttattactctaatgcttccattatcacttgggaacttcgtgcaaaagtgttgaatggaagttacagctctgaagtcaacgaagtctagtcgtcctacgataacattgtgggcggtgggataatccactactacaaatgcgtagtatttgaaggtggatgttgtgcttcttctagatacacctccacttaatttttctggaagttgaatcttccccattggctgtaaagagtttccattgaaaccttgaagttgaattggacaaggcatcagattggttttcacgaacccaattgcatggaaggaagttttgagaagaatattaattgaatttccattgtccaccaaaattctaaatacgcatttgtttataatttgcgcttcaatcaccatcaaatcattgtgagggaaatgcatgtgatggccatcttcttctgtgaaagtgattaggatattcatcattcaaagatgttgagtaggtgtttgtacaagagtagatatttcttcttgatctagctcattaagatatattttttttaagcatttttggtacttttggcaatatgtgggcctttggatatggttgccatgtggccttctacagtgggcgaagtgactctgggtggatacatattttctagtttgggagtaatgacgggtctaggcacctgggcattaggtgccccctgaggggcttatatgcttggaatttgtattcccaaagcttgaggataaactatgacccgaggaggatttacgatcccttgctgttcaaaaatgaaaatctatctgtgtgctactccttttccaagctatatgatggttatccgcacccaattggctaaatgaccatttttaaccaactcttcgatttcatctttcaggtaaccacactcatttgtggtgtgcccaacatcaccgtggtattcacattttttttattttgatcccttttgtattttccacatttgtacataggtagaggtttcttgtaattgaccatattgtaagttgctttataaatattttcccaagtatcaactagactagtatactagaaatatcttggttcatgactcctccccctctttggagtttcactccaacttggagcctttgcacttcttttgttcttgaaatgacaaacgtcgattctataacttttgtttattggttcgattgtctgggggcatcactgtatctaatttctgcctccccaaaaccagagaaacttgtctacacagctacttgtccgaagatagcaagtctgtaaattgtaggagttgtgagcatgtctcccagaggaacgatagctgcagctgatatatgaggagtttagattgtatagctgacatttgttgatggtgctggaagtactccataagtatgaacataagcttcttctagatatatgaaaccttgggtcatggataggaaatcagacaaagtgttagacctctttctttgtaactctccccacaaaaaggatccagcagatattcctgaggttaaggccaccaacttcatatcatcattgactttagtcttggcagctgcatctatcattctctgaatgtactttttgagacttttcttgtttgttgcttgatgtcggtcaatgagctaacctccatgtcataatcatttgcagctatgaactgttcttaaaaattatttgcagatcctttcaattacgaacgaatctaggagataatctcttccaccagtcttcaaacagattgtcaaagttaaaggaaaacagtttgcatcatcactcacctttactacttgcatcagtcagatgtatttggacaagtgagccttagggtctatcttgcctttatacaacttcatttgaggcattctaaagtgttttgataagggtgcctctattattcttcttacgcatggttttagagcatattcttctgaatcagatacgatcatatttttcttttgggtgagatgttctacgaacgtagttaacttagcaatttgattttctagacgtttagttgtagcatcttgggattcatgtccttgaactcgatcattgttgtggcatttgaggtcgattctacgggaccttaccttctcgcttttagctttttctttctttgcatttaaacattcccaaaggtcatttgttgaaagacttccgtcaaaaagtggatgaatttcatctacctcatcattgctccattcaccaaaattactaagatggtttttgcttccctgaatggtaggcctttgcacctgagcactaggcctatcattttgcacaactctgcctctcaaataagattgccttgccctggagcattggctaccttcttttcttgcagaggttggccaacaacattcgtggtttttaatagagtagttaaagcagtctttctcagaggttcccctatgacactttttctttgtccctgttgggatcagaagtttcacgatctttaaggtccattctttttgtagtattattgtcctgaggagtaggatcatcatgaatattttcatcaggagctacattatcttgctcaagtctggattctagtatggcaaggttgcttgtatttggtcagagaattcttttgtgccgccaatttcagcttggttttggcgagttctttggccacctcagcgttgcgggatcgggctcataataatatccctcatcttctttttctttcccatcatcttcaagatcttcattttcgggatcttcctctcgatccctattgattggattttcatcaacatattttttattgcgttgagtctttttagtaggacggatgattgcttctggtggatctccatcgactcttgtcttcgcctggactgtaggatatacatcatccataggagtgtgacgagtgtctccattgtgaccgccaattttgtttcgggtgagtaccatggttaaagtatacaacctttgacggtatcactgttttttcaactctcaataaagctccaaatatttaccaaaatttttggaaa

SEQ ID NO: 259839 - DNA, 6333 bp, Cannabis indica
aacaactactaaaggatggactagtacaaaatgagataagttctctattgcccaacgagaccccttctcattgatagcatcgatgactactctcgagtcattctccacaataacatacttagagccgatatccaaggcaactgacacagccaaagagcaggtcgccgcttcgccacaaagagcatccgagaaatcttcccgagctgtctgaactctaatcactctgccaaggtggttccttgccacaacaacaatacacatactatccaatcccactttaacatcacaattcaacttaatccaatcctaagggggaggggcccaaacttcctttaaagctggggtgggacattgtagcaaggagtcacatatctgcataagaagtacaaatattatcaatgcattttttaatatcaacagtacaattattatggaccttctcattgcgcaccctccaaatagtatccacaacaatagaagcgtataagaatatatcatcgacgcaagcccctttaaacttaagatcccagatgaatttgacccaatcccaggcacggatgcctgtatcacacacagggtagataccccaaggagaagaacgccagaggtgaagagccacatcacaagaaaggaacaggtgttcaatggattcatcgcaccttccacaaagggggcaacttggatcttctatatggaatctgttgccgatcacagctcttacatggagagcacaagataagatacaccaccataagatcttatgtcgctccagaattttgctattctagagtttattccacagctttggagcgacaacgcagtggggagatctttccaaggcttgggctagataggcagatttacacgagaattgtccattactttccagcgtccagatccatctatcagtaccggtaccagagggttgacccccttttagaatagctgaaactgattcgtggtcaaaacagtgattcaacttacgaagatcccaatgcccattttcacaaagaagctcagaaacacgctgaaagttgggagggttaccccctcttggtttcggacagaaacctttatagtggggaatccagggatcccaccatatatccgtagattctccgttagctatcaacttgcaggcccctttcctcaagatagaattggccttaacgacactcttccaaaaccaagaatccgagcttttgtacctacaagtgagaaaatctttgcccctgaggtactttgcaatcagaactttacaacataaggattggctcccgttaagaatattccatccccatttagctaaaaaggcctggttcatttctttggttttccggaatcccagcccaccaaaagattttgggaggcagagcatgtcccaagccttcaagtgaaggccatgattacctttctcgaaaccccaccagaaatcacggaccaaaccatctatccggttaaccatacgagtagacagtttagtggtttgcatggcatacataggcaaagacagtcccacagattttataagggtagctcgccctgcctttgaaaaagttttcgccttccagccctgaagctttgccgaaaggttataaaattgaaatcaacatccttttgcctagatctgaaaaggggcagacccaaatattttatacatccttctggataatcaattcccaaggcttccttgatatctcgatgcatgtccatcgggtgtttttactgaagaaaatggttgtctttagcttgtttacctgttggcctaaccaagaacagaatttttctaagcagctctagaagccatttgcctcagttaaattagctctacccaccaagattaaatcatctgaaagaaaatatgagagagaaccggacctcccctgctgagttaaatagccttgatggagccctgctcaagagaattggagatcagtcttgaaagcacttcagcagcccatatgaataggtaaggggagagtgggtctccctggcgaagcccacaagagggttggatatttcccacctgacccccgttcagaaaaatgttaagagtcgtggtagaaacacactgcgagatccaaagacggaacccctgaggaatgcccgagcactccagaacatgatcaataaacttccagctcaacctgtcataagctttaacaagatctattaaatgagtgaataatttcttgtacacacattgttgtcatggatattccgccccaagacaaaagcatcttgagttgggcatatgagggaaggaagcaaaggttttatcctgtttgctaataacttagcaataactttgtaaaccacattacataaggagataggcctaaagtggttggtgcgtttagggttttggaccttcggaatgagcacaatattcgtggcattgatccccctatgcatattgccactcacaaagaagtcttgaatcgcatcacaaaaatcagcaccaactgactcccaataatgtttgtaaaacaaaactgacatcccatcagggcccggcgctttatggttattcatggcaaacaacgtttttttgatctcatcagcactaggaatgctaacaagagccaccaactcctcctgagagattcgctcttgaaacaactgggagcaattataatcctgacaagttgcaccctctgtaaagatacccctaaaaaaatcaatgaactcattcccaacggcttcccgaccggagatccagacattatttttatccataatgctctcaatggaatttcttcgccctttaatggcagccgaaaggaagaaaaacttagagcatttgtccccgtctttaagctaagagattctggccctttgtttccaatagatcgcctttctttctagagactcattcaactctcggcggatatcacgttcccaattccaatcccgagacccagccgggagactctgcagggagttgagcttgagttcaagatcttttatagcctcatcaagcttaccaaactgggatctactccagttcaggagggccaccctagtggtcccaacctttttgaaaattatcgcaggagcccaatcatgatttactgagttccaagcattgtccactaccaggttgctcctagcatcacgggtccaaccctcctcaaatttaaagcatcttttaaacttggtatccagaccatccgacaagaggcacaaaggcctatggtcagagttgcaagtctgggacgagcaaagggtagccctaggaaacagattgagccaagcgccattcactaagcctttatccaaagcagatttcacatgatgcctcccagaccgatgattatcccaagtcaggttgtccccttggataggtaaattaatcaggcctccagcgtccagaagtttagagatgatcggtataaaggggtcccgaccagaggaaccctctctttccgaagcacaaaggacaaagttagtgtcacccaaaatcagccagggccccccaaatctatcacccagcttcaagaagtcagaccagaactttttcttcgcatgcaagtagggaggaccataaacacacgaaaggagccacggatgagaggggggatcagagtacactaaccccgagatatgattacacgagcaagagatgcactcaaaactgaacccgaccttccaagccaaaataattccccccgcatttccaaccgacggaacacaaatatgaaagtaaaagtgaagagactttagaatacgtacaagaggatcagcgtccactttgagctcggtcagaaagacaaaatcaggagagcgcgaccggatcagggacttcaattcccgaactgtagaggtttgccctaaccctctacagttccaagctaagcctctcatggctcctgtggaggagattcggcattctcctccacaggggtgtgagagtaagcagacccacttgaaacatcatcatcgatcacaaaggaaccaatcaggggattcttcaagatacccgatcggctaggggagttagaactatcttcagaaggctcatcaaccactaattccgcctcattctcttctcgccttgagtcccaaggaaaatcacgcacaacaccaggatacttgcggtgaattttgtgaggcctagaacaaagagaagttgaggattcaaatttccttttttgaaaggagtcgtcctctcattaacctcagaagaagccggaacaccaatatcacctcctatccttcgaatctcatacaaatcaagcttcccaaaatgtttaagatcattcattaattcttcttgcgctttgaaaaattgagccaaggctctatcttcattgggcagcatcgaagatacacgctcaacagtgggccctgaagaggagagaccaagttgctcaccacttgtatgctccataagaaccggcccaatacaaggagaaaccttattagaaacaatcgggcccccaatatcttccaaagacaaaataacattgatgttagtggcccctaactcaggcccgctagtattaatgaaacaattcatattagaaggccctgagtctttattataactagacacacataagcccaacccaacagaaggcccactgaacttatccttttgcaaaaggcctttctcaacttccaccttttggccagacggcccaatcacacttaagcccgacccaacaaaaggcccaccaaccagagcagacttaccaacagctatattttccaacacgtcttccctgtccaaggatcggtccacttcatcgactctcaaaacagaaagatgatcagaccctttccttttaaccagagccccagactcacctcccatactcggaatggaaatgcccctctcaacacctgcaattcgctgcttagggaaccacatcgcacgctgagacttcccataagcagcagctgcacgagaagtcacattcacaggatgtctcgggcgtcgaactttcagagcagacccgtccttcgaaccatcgccgtcgacagccgtgaacttcaacaacggtgagctcgcacctccatatttggccatgcttgagggcgctgcaaaacaagaaccaccatacgaaggtccagagaatacatcgtgataagctgaggacgtggagagccaagggccgaacatgggaataggacgccatcattcttcgccaccgtaaccgtagacgataacttacagccccttctctgatgaccgagacagccacatttgtaacaaaaaatacagatcttaacatatttcacttgcaaccattgtttttccccagagattaagtcgaaaaaacacccagaaactagcggtttttgaacatcaatatccactagaatcttaaggaaattagaccaagtggcaggtttatcatcttccaagtctaccttcaccaccttcccaaccagcccccttagaagatggccattctcacgcgaaaaatattcatggggcagattatgtatttgaatccagactcggagcacattgagagtaatcggcccatccacgctcggagaccaagcatgcaggaccaaggtataaccacggatgcaccaggggccattaacaagcgcccagttcctatcttcagctgtttcgaacccaaacttgaacaaatttgcagtcttcataacatctaccatagggaccacagagatctgtttcttccaagtctttgccacaaaatccaaaatcgtagcctcatccacaaacatgggagcaattactttcccatacaaacagcaggaagtgagtgcctttacagaagaagcacatggggaaagtttaacagtggtttctctctttcacttgaataaattaaaaaaaagcctattgtcattagcagttctctctcattctcgcctctttctccttctttcgatcaatcgaagcttgagaagagcagcacgcttctctctttctttctctcaatcggagctactgctcctcttctccggcgaccagtaacaccctcattctctctccctcctcagtcctcgaagccccaatctctcatcctctcagcgccgcaccacacttctcttccccatctttctttttccttcccgtggagcttctgctcaggccaggtggccctgctccggtgacagaccacccaaatccaccaaagatttggaatcctcgccctcatttcacatttgtgcagattaagcgttcaatggaaggccaatcagagaaagcgttgaacgaaactccaaaatctgaatccgtaaatagagcaaagaagttggttcatcgacgaatgttggtggggatcaaagatgggagatttttattgggaaattttcactgtatggacaaacaaggcaacatcatcc

SEQ ID NO: 259840 - DNA, 1107 bp, Cannabis indica
gggtgctcctgatcaggtgccggtaattctagtcacacaatccaggatttcacaaatagggttaacccctgatttcacattcataaaatattcacatgacatttaaaattccaatattcagatagagctcaaaaagagctttccaacagtatatattactcccaaattggagtccggatcacaaagttatggctatttgaaatttgcaaaaaggatctgcgcagaaagaaatgggcgcgccgcggcatgctaaataccatgatgcggcacctaggttcaaaaccaaggaaaccagcagcaaaactcgaattttcagcctctaatcaacaccaaatcatcccaaatcacaaccaaacttccaaaccatcgaatagatgctcaaataaacatatttcatgcatcaattccaataataaaccctcaatttcagattgtaaaaatcaacttaaaatcatgttcaaactttaaaacttcaagctctaagcttaagcttcaaacccacatatcaacaatatttttcagcaacttaatatcaaataaaactaggttcaacatggaaaataccctagagttataatccaagcttacccaaatacaatccaacaaatatcacaactataacttgcaatttcacaaccaaaatccacaaagtcaagcatcaaatctcttatcatgcaaaactaagaactacttcacttttcatactttttccaacataatttcagcaagcataaaggaaattaaagttgtagaaactacctcaaaaccacaccaaaggctagaacaatgattttcctcaaaaacaagcttcaatccaacccaagctcaagcaatttcaccacaaattttgaaaactcaaagagggttagagaaagagagaggtcgggtgagaggggaaacaaccagaatttttcatttgctttttctcaaaaaatcaatattagcaaggtatatccaataaggtcaaaagaccaaaatgcccttagggccaacacacacacattcatcctcacaagggtgttttagttaaaataaaatttcagattttatcaaattgcattttgggcccgaacctagttcgacccgaaatacacggttgtgactata

SEQ ID NO: 259841 - DNA, 6006 bp, Cannabis indica
acaaaacaacagtatttatgaaattaaaaaaaaaaattgtcttgagttagtttagagacactaacaagatttttggtaatagaggaaacccgtaatactgaatttagatgtaaagaacaagaattgttagatgaaaggagagtagaagaacctatatgagagattaataatctcttaccatcgccaacagctaaagattcagagccattatataccatagaagaatcaagattggtgctatcaaaagtaacatgggtcgtggcaccggtatctgcaaaccaggaatggtcattacctaagtcttgaatcatcgtggtggagtgtgcttgtggatcataatcaaactccagctgcttagggcttttgtgttgtacaattcttgtcaaaatgataatgaaaagggggagccatgtgaccacttttcatacaaacttgacaaattactttagactggttgaatcgaggaaaacctcttccacgatccattggttaataggaggagccagctggaccaacttttggattagcaaaagatcaaacatcgttcgtgcatcttgaacaaacaacaagattggcttggagcttgacattgatatcattcacggcgttgtgatgttcgagacgaatttcatgggaaacaagcaatgcctgaacttctttgattgataaagattcacttcttgaagtgattctagagacaaaagagtaaaattcgggacctaaaccacgaaggagttgcagaacaagatcttgaccgctaactagagaactcacgacagcaagatcatcgtagatcgactggaccttatcaacataatcaaatatggtgagatttcccttttgaagaagagagaatttccccttcaactacagacggcgagccttggtttgtgaggaaagcttttgtttaagagcacgtcacatagtgaaagaggtggtgtagttggaaacagaagcaagaagactcttcgacatagactatcgcatccaagagagcagaagttgatttttacgacaccattgatgacattctggattaggagcactaataaccaagagctgaggaggggaaacgctagtgaataggatttcatcaaggtcatggacaataaccgtaggcaccactagcaatttccaaaaaagaaaattgagctaatctaatttgagtgttagagaggatgtgagggaatgagagaaagggtttcatggagttgggtttggagcaggattagttggggcagtagctagtggtagtaccaagatttaaggttaaagacgacgtggaggtgagtcagggacttctaataccatctaaagaacaacagcattacggaacacaatttgagaacggcaaagaaaaatattaaagtagctcacaattagtgaaagcatttttatttatagaagtctaaaacaagattacagttacagaaaagccaggaaaagaaacaaacttaattaacttcaataactaactaccaactcatataatatatttaagtgacaaaatgatattttaagtgctaacactcgggatatagctctcaagtggctgcatctccaatatggtggatcattatccccaacctctagtggcgaggctttgggtgttgtggatctactcatgctagaagttttgttctcaagtgtgctttctatcttggactattctcgaaaaattccaaatccaaagaagtgtagaagatggtgcaacaatggaattttagccctcctcacttgctttctatactgcatagggccataagcgaagtcaagaaatttccttctagctagtggctggaagtcaagagatttccttcattcaacagttgtggttgggcctaataactcatgctctgggtcaggaaataatgttattttcgtatttgagaaaaggttcaaacgtatctcaaatttttttctcaacaatgtaatttaatcaaaataatctgcaacctttgtgtttctagtaccaaaaaataatagtagaaagtagtcttaatgaaaactggcgttaaggtagatggtctgaaatactggtcattctaattcaaatgtttgactcgtttaaacttggctcaaattatgacagtgagaaaatagattaatatttgagaagatagtaatgcaaattcaattgtatgacaacggatttcaacaaaaataaaacacacaaacaaaaatagaaaacactagcatatgcttcgtagtagcagtggtacgagtagtcgtagtagtagaaagtagtcttagtgaaacaaaaacattatatgaacaaaatataaaaacgtaaacacaagcacatatctcaagatttcatgtctgcttaaaaccatatgaaaacaacactaaatcaacagaaacaaatttcagacagattaatatttgtccctactacaaagcaaccaaaaaacaccattgccagagaccggcaaccaggtggttttgtggtattatatagtaatcttagcttagccatcaataatctcatttgcctaaatcataatcaacccacgcatatatgctgttttgtttaattcaaaaccccacaacttcttcacatctcttgagcttcctcctcttcctcatcatagtaatcgtcctcctcagcagtagcatcctggtactgctggtactcggacacaagatcattcatgttgctctcggcttcagtgaattccatttcatccatgccctcgccagtgtaccaatgcaagaaagcctttctcctgaacatagctgtaaattgctcactcacacgacggaacatctcctggatggatgttgagtttccaatgaaagtggatgccattttcaggccagttggtgggatgtcacaaacggtggacttgacattgttgggaatccattcaacaaagtaggatgaattcttgttctggacattgatcatctgctcatcaacctccttggtgctcatcttgcctctaaacatggctgaggctgtgaggtaccgaccatggcggggatctgcagcgcacatcatgttctttgcatcccacatttgctgggtaagctccggaacagttagggccctgtactgctgagaaccacgggaagttagaggagcaaaacccaccatgaaaaagtggagacgagggaagggaatgaggttgacggcaagctttctaagatcagagttcaactgtccagggaatctcaaacagcatgtgactccagacattgttgcggagatcaagtggtttaaatcaccaactgctcaaacataaattaaccgtattcaagcattagtatcccaatttcaaaagttttgactagatctgtacaagtgataacataaaacaatatacccacaaagaaatatcatggaataataaactcaattaagattcacactaaatcaaaagatcaaagaaaatgaatacggttttcgaaacaatgttcttagatctgtagaaaaggtactgaaaacaccaatgtttcaactagatccgttcaaaatacatgcaataaccgacagaatagctatatggaaacccatttcgactatataactagatctgttgaaaatgcataacagaaagtgaagaaacttacagctaggagtggttaatttcagggtacggaagcaaatatcgtaaagagcttcgttgtcaagaaccatacactcgtctgcgttttcaacgagttgatgaacagacaaagttgcattgtatggttcaacaactgtgtcggagaccttaggtgaagggaaaacggagaacgtaagcatcatccggtccgggtattcctctctgatctttgagatcaaaagggtacccattccagatccagtccctcctccgagggaatgacagacctggaaacctaaaaccgcacaaacaaactggattaaaaccaaaccaaacaacaaacaaagcacataaaactaacagaatcatttcaaacaccttgtagacaatcgcagttttcggcctctttacgaacaacatcaagaacggaatcgatcaactcagcaccctcggtgtaatgacctttggcccagttgtttccggcaccagattgaccgaaaacaaagttgtcaggtctgaagatctggccgtaaggaccagatctgatgctatccatagttccaggttcaagatccatgagtacagctctgggaacaaatctaccacaactggcttcgttatagtagacattgatcctctcaagttggagatctgagtctccctggtactttccggtggaatcaatgccgtgctcggcacaaacaacttcccagaacttagctccgatctggttaccgcattggcctccctggatgtgaagaatttccctcattttcgattacaccaaaaataaaaccgaaagcagagaagtttagagagagagagggaggaagttttagagagagaaagagaggaaatgaaaatttagggttagagtggggacgaaggttttggtttttatatatagaaaaagtgattcaaacggctcaattttattttaattttattatttttaattttaattttatgagagagagagtgggatttgagagtgtggttaattttaaaataattaaaggttgaaaaaaatagtggaggtgagttgtgattttcaaaaactgatgagagagaacatcaacggtcagatttagcaggatcaacggtggttgtgtctctatttttgaaattcaaattttatcctattttatattttataaatatggtgaagccagctgtagtaaccaccaataattccaaaataggagcccaagtggccccgctgttttttacagcgaaaaataagtaaaagatgaaaaggacaggtacagcctctgaaactcatacattaccgatctggcacagtaagggtactttcgtcttttcaaattatttttatgaagtgattttgttggactaaaacagggccatctcaaattttatataaaaagttttttttaataataatttattaaaaaaacgagtttcaacattgtacacgattacgaatacgacacaaattttataagttaggatcggcaaaattagatacggatcctaaatggatcgacacgacataacatgaaaaaaaatagatcaaacacgacacgactcacttaacacgaatttaacacgtttgacacgattttttaaataaaataaaataaaaaattattaataatgatataattatataaaaaaatatatatatttagtgatttaatattaaattaaataattttaaatttaaattaaaatattataaaaattttaattattattatatatataacaaattatatatacgtatatgcatataagttttataatagaacttaaaatttttatttttctttatatttccagctttaataatagcaaaataggttaatagggtcaatacgaacacgacacgactttttaagagtcgagttaggattgaaaaatttagctacgagtcaaaaaacgaatcgactcgcctggcacgaaatatagaagcaggtcacataaaatatgacacgaacacgacacgatgacacgttttaccacccctagctattaccatgcatctaaaaaaatatgtactgatctaattgatactgttttttcagtctaatttttttttatagtgatgtacattatagttattaaaaatattttttaaattttttagaaatttaaaataatttacaatatagaaaacagtgtttaaaaagtaattttttcacgcatataaataaaatagccacatgtacaataaattgttgaaaccttatttttggtttgttaaaattttatgaatttctcaaaattttgtaaaatatcttaaataactacaatgtacacgactataaaaaaatagactaaaaaattctcttggatattgaaacaaatagggatgcatcggtccactatagaattccccaaagttatttattgtaaatatcacttaggttgcttttctaatgcaccctcaaaaaatagtatattgatgtatcctctactattttggcattca

SEQ ID NO: 259842 - DNA, 788 bp, Cannabis indica
atgtaccaatctgtcttgtgagccaattttggacatgataacttcagaattgagctataactataaaacacttagatccatcttgaaattatctttccaatgcaagttcaaccaggccatttggataaaaattgagagagttatgcccattttactgaaggtagtttatgttgtcttgtgctagttgcgagcattgacatggccaaatggcaatgctcggccatgcatgttctcggacccctaggggtctgttttaacttgtttttttgagggtgagtcatattttgggggtcctaagatcccaaaaccttatttcgacgtccgaaaccctaacgggagtcggagatcattgccactagttggagctgaaaagttgcagtggtcgtcagccatggcttgtgggaagccatagatggtgtttcttgcttatttcagctatatggatgatataaaactactttggtaacattatttattggccaattgcttaggagagcactaccaccatttttgccaaaacaagtggcagtggttgcataagggacttatgaagccttaggtgacttttctcacttgtatttgatacatggacattggaaatacaacttggccaatgaaactcctttccttgtgtagtggtcgaccactgccaccaactatgccaaaattgtggcagtggttggccaagtggttttcataccacttggtggcttctttcacttgattttgacatatcattagtgaaaaatgcattattagaaagaaaaaaaatctcactttccctcttc

SEQ ID NO: 259843 - DNA, 1132 bp, Cannabis indica
atttgtatcctttatgaactatattgtacccaagaaatacacaagattgaaatttatgctgaagtttatttatgttgtaaggcctcaaattagaataataaaggcacccaaagactcttaacatggagtagtgaggcttggtgtggaataagatctcaaggggagacaaatacttgagttgtagagagagcattctattgataaggaaggttgtagttctacaagcctcattccagtacttcaaaggtaaagatgcatgggttggaatggttaaggcactctctatgacctgtgctttctttctacaatcccattttgctcatgagtgtggggacaagataattggtggacaatacctaaagttttgaacaatttggtaagagacctatactcaccccatactgaggcaatctttctggattcacttcgccttacaaccttagatttgattggatagccttaattttgtaatcaagctgtaattctacttatgttttgaatgtggtaaaggtggataaagcttcatttagttcttaataggtaaatccgtgtctaaaaaagcatccacaaaatttatgtgtgtctacttgctattaatgatttttctaagtggcctttcttcctcattgatgttgggttgtttttagaggatttaacaagttgatgttcaattttacaggagtaaccctaattcatattttttggttgaccattatggttgtacatgaattagatcggcatgctcttcggatggatagagaacttgtataattagagatgagatcctttattttttaagaattcatattttttagtctgtataaaattattatttttattttcaatgaatatgttcattgtcacaacaaaaaaaaaaggctaaggaaagaaatgatcacaaatacataaattaataacgtaaatgtccattttttaaaagtttagaaaatggccaatataacacattatgagttcgtttgatataccgtattacactgtattgtattgtatattattagattaaattgtatctcatgcaatatttttatgtaaaattatatgtggtattgacttttatgggtatctaaatatataatattttaatataaattaaagtttaacatagtattat

SEQ ID NO: 259844 - DNA, 758 bp, Cannabis indica
atgagatattttttttcttgattccaaaagtgttctatcatctttacatgatgatcccactgcctctgttgtctaatgtaagaatcaaagcatgttcaaaataataaataatgtccattcattcatggtataatcaatcaaaccatgtgaaatagcgggaatagacaggtacgcactacaagatgttgatggagaagaaggtaggaagcttagatcattgaaatagcgcaaaaatgccaaggagaatggtgcttgtgggttcgaccacctagagagaaggaagagatttttcaagagaaaatttctagtgagagaaagtaaaagtgaaaaaagggtttcccctaaaagtcacttatgtagtacatgtgggccccttttcctcacttaactcatcaactaaagcaattatttttctactgcaatgagatcagacagtcaagacacagcgctttgacaagcacataaacttttatttagcgaaggttataacagtctcaaaaacatcaatatagctagtaaagtccctatccttacagacgttcgcacagggactggttatcccaatttttgttcatgactttgcatgcttacgtggacagaactagtgccacgtggtattacaattcactaaaaggaaggccaagtaagcacttgatcaaatgaagaccccaacagtcaaacgggcatcaagtgacaaacagctccctctcaagagttggtcggccacccctggccagccattgggactgcaccatgga

SEQ ID NO: 259845 - DNA, 1160 bp, Cannabis indica
cttggggacccaagcagcaatgtgcacctatggaagaattagaagagatcgagatcgatacggatatcccgaccagaaagttgaagatcggaaagggtttgttgctcgaagtaaaatcaaaattgataaaatttcttagagcaaacctagacgtttttgcctggtcacatgcgggtatggtcgaaattgatccttttatcactttgcacattctgaatatagatcgcaatttctagctagtacaacaaaagcgaaggctactagacaaagagcgagcattagccctgaaagaagaagtagaaaaactacgcaacaacaattttataattgaagctttctacccagcttgggtcgcaaatcccttattagtgcccaagccgaataagaaatgtcgagtctgtattgatttcacagacctcaacaaagcatgccccaaagactgttttccacttctgaggatcgatcagctcgtggatgcaacgacagggcatgaaatattaagcttcatggatacttattcaggctacaatcaaatcaaaatgcatccaccggactaagaacatacaagctttcgaacagatatgggtctatattgctacagagtaatgctattcggtctaaaaaacgctggagcaacgtacaaaagattggtaaacaaaatgtttaaagaccaaattgggcgaaatatgaaagtatatgtggatgacatgctcgtcaaatccaggaaggctgaggggcacatagacgacctggaggaatgcttcaaggtcctcagaaagtacaatatgaaactaaatccctcaaagtggtcctttggagtcagctcgggaaagtttctctgcttcattgtaaattcctaaggaattgaagccaatccagagaagattaaagccctcctggatatgaagtcgccaagtttgactggtcggatcgccgcactcagcaaatttgtttcaaaataaactgataagtgtgtcccattcttcaatatcctgtgaggaaacaagcagttcgagtagacggaggaatgtgaaaaagctttccaagagctaaaagcacaacttgcaaaacctcccgtactctcaaaacttctagatggagaagaacttggaatatacctagctgtcacggaacatgttgtaagtgccgtgctaatcaga

SEQ ID NO: 259846 - DNA, 696 bp, Cannabis indica
acctaaggaagctttttaacgtggtataaggggcggaggtcctcgtttcgagtttcgccattgttgaagcttcgaaggtgcgacttgaaatagactcgaattcgagcatgtttaagcttgttcttgggtcaagggaggttatatatgagtgcatgggaccctaaggattgtttttgacgtaagaaaaagaagctttaacgtccaaaacgaagaaccaatatttttactccattaaagacggtacaccgccaacgaaggagacgactccgatctgccttctcgaacctcttttcttgatcgttttgaggtcttgagcactgtggagagcttccctaatcgaaaggacatgtcaagagcaatcggggacaaagttacactttaccagcgacgaaaccgacgagaacgctggcaaccacgttctgagcgtttctaatgtgtttttcttagatatttttgtttattttgattcgttattttattctaaggtgcttggtgaagtttaataattttttgaatttatttggaattattgtgaattatttagtttattttataaattaattatgaaaaatacttaggttactcagaaaaatctaggtttattttatatgatgggctatgatatataaactgttataaaattggtagattgaattttcaggcgattatgtatttttcatgaattattgatgttat

SEQ ID NO: 259847 - DNA, 669 bp, Cannabis indica
gtcaggaaatatactttttagagctacaaaatgtgtgtcactatatgttttttttatttaattttttattttgtatatatagtcactgaaaatgtgtgtcactatatcattttttattttatttttaatttaattttttatttcatataaccagtaactccatatgaggtcactgtatagtgtatatatatatatatttatttttttaattttaaaagtattaaataatcttttaattatttttttaataaaattattcactaatcaagattttctaataatcatgttaaaacccaattttacaaatgaataaattcttttaccaataatattttttttatacatatacagaattaaaaatgcaaacttaaacccaacacaaacaaaattatactaattatataaataatttttcaaaattaataaactctcatacatttctggaaaaaataatatcatttacagtcaaaaaagctcatttacacatacattttatcaattacaataaacaaaatcacacccacacaaaatgaagaacaacctagatcaactagacccaaaactcgatcaaacacaaagccccgacgaagatagccctttccgtccacatgcacacacagaaacagagagaaataaacaaagaggtgatggagaagaccatcaacgagg

SEQ ID NO: 259848 - DNA, 1032 bp, Cannabis indica
caatcatagtgagtaagacggtggtaaccaaacccgaaggagagaaagggatacaggttcagaacttgataatgccctactacataaaggaatcaagggctagagatcttgaacggaaggagtcattatattccactgcaatcaatgtaaggttttcttaacccttatgtgtttatttcattgttttagagaatttatatttaggatgttaattcgacatacttgtttgtaaatctagatcctgataaaatatttcgaacacttggaactagaaagtggcacaagtcactcggtcattcctgacgactcccatgaaattcaaaattatttctattacattgagccactgcttggccttcatgacattcgaacctcccaaaaagactggaggtgtctgcttgtgaaacctctcatacagaggctccatacggttgccaacaataagttgttctgatggcactgctggaatgaaagaagtcggtacttgcagtggaggcactggaggaggaccctgctttctcagcctctaaatttcttcgtcttgctggaggatttgagcttacatttctacaaacctttgctcccaatctggaggagcttagggttgattttcatgtccaccaccctgaagccttccacggcctttaccgcatccacggggattcagaggattttgacctccccgaccgcctttcgtctcgaccatgttgccacgacttctcatgtttcgctgggcattcatatgatatgccttagcctgcgaacccataaatcaggtaagtcagacagtgatcacatatgctctatgtaccgcactttatagattttaaggcaatgcatttaaataaataatcataaagtattatgcttcctaacatgattttctaatcagataaattactaaacaagtaaaggcttattgaaccgtgagtcgagcttatctctgacggtgattgtacatgtctagacgatcttcggtagaaaacctggcattctaataccattatcaaagcgttgacctagccaaaagct

SEQ ID NO: 259849 - DNA, 816 bp, Cannabis indica
gatgaactcacattgctgatgtaatattctaactttagttatgaataaagagaatcatttctattatttaagtaattacaaagcttcactctttaaaattacataaggggcatttgtgtatgattaaccggaattcatctggaaatacatagtatattgcaaacccataactttaaattttttttaagtttttgatcaaacctttctgacgagaaggtgatcaaacctttttgaggagaaggggctcaaaccactaatcaaacctttctgaggggtcaaacacaccataactttttggtttaaacctctttgacgagaaaggaaaattaaaaagttataacttacgtacaaagctgaatattaacggttcctgcaagatagaagagtactaaacgagacatcgcgacatcttgataaaagtacttaaacttagtaaatggatagataatataaatattcatacaagcaatcaaaaatatacaaagtgataaaatcataaaaagtatttcaagtttgcttaaggcagattataactgtcattgcgaggcacaattggcaactgctcgaaaatcaaaagtttggtagataactaactactttaacaggaaaagtacgagcaatagaaaaatccaaaagtactttacatttgattaaaatatagttaattacattgtacaaggcatttaagataagagaaaacccaagttggtttacaaacttgtctttacaaaaatgtcgctaggggcaaaccattaagccatttcgtaaacaaagaataaagtttattcatgggaggttgatgaactcgagaaagac

SEQ ID NO: 259850 - DNA, 773 bp, Cannabis indica
tcacagttctgcttccatgtgtaggtaaaggacaggcaaaagctgagcaggagtgagcttgagctaggatgagattgtacatgtcttggcagcgtgacctagagtgtttggtctcgggacatctagggattttattttgtagtcgctgtgcgacctggatattgtgtttttgccatattttgtataaaagtttagaattgggatcctgctgtatgtaaattattatgtgaattataaagtttaatatttattataaaagttttaatttgacatgttttttcgagaaaaatctttgattggcaaagataacactgtagttgaaaaagcactgtagcgtgccttagcattagagcgttacatactccgctatcttcagggtactttaaatgattgttctattctaataattgtgggtcacaacttattggctacgcagatgaaggatatttatctgatccaccgaaagccagatctcaaactggctatttgttcacttgcggtgacactgctatatcctggcagtcaacaaagaaaactctagtggctacttcctcaaatcatgttgagataaactatttagtcacaaattttgttgtgactaaaagtaatattttttatagtgaatgataaactatgcaatgaatgtatgtattaagttcaaaaggagaaaaaaagaaatgttaaaaaattaaaattatatcgatatatagatccatagatagatagatatacaaattttgttatggattgactagcttgaggcttcatactta

SEQ ID NO: 259851 - DNA, 700 bp, Cannabis indica
tgttcaatggatccatgcatgggttctttgcaacaaagagagggcttagacagggtgatcctatgtctccattgttgtttgtagtgggtatggagtatttcagtagattgatgaggaaagttgggaagaaagatggatttggtttccatgagagatgtgctggtatggagttgaatcatttaagctttgcagatgatgttctaatgttttgcagaggggacttcaaaagtgtatatttaatgatgcaagctctcaagctcttctcgatcacgtcgggtttggttgctaacaattctaaatctgcagtgtattgtagtggtatggatgacaatgaaattagaagggttcttgaaatgtcaggttttacaaagcaaaatgagcctttcaagtatcttggtgttccaatctgtgctaggaagatttcggcttctaattgtagtagcctggttcagaaaatggtagcaaggataaggatttggagttcgagacatttgtcctttgcagggaggttggtgcttattaaatcggttttgctttccattcacatttattggtgtcaaattatgtttctccctaagcaaatcattaaggagttggaagcaatttgtaggagcttcttatggacaggaaaaagtgcgatgagcggagctggggctgtagcttgggaaaaggtgtgctgtccaaagaaaacagggggttt

SEQ ID NO: 259852 - DNA, 665 bp, Cannabis indica
gcttgattgttgcatgtctttcgattgtgtccgtgttgaccacatttgctgcacctgttatgtttttttgtatcccattcagataaaaaccttcgtttccttggtcttccagatcttattttttggtttggtggcagaacaatgatatcttttatgttttgtggcacatcccaagttgtgtgattgtgtaccggatatgttgagccgctgtatgtttcaagccatgttcgcgtggtgtaataacctgaacagtagttgtaaacattcaagttcatctcttttataacagcaagcgcatgagcacacggtaactcatcaagttggaatctgttgcaactgcatgttttctccttgaggttgatgacccatgatctggttagttcaacgacttcgaacatggtctcgtttattggttttacctgcggattaagtgtaaaactgttaatatgtataacaacgaaaaacaaactattaagaaactataatgcaactaaaatattaaacattttcttacattttctgtcaatgagtccacaaagttgtcgactaatttcttctctgctgtaggtgttaaaaatgttgttgttttctgtgcttttttcctgtttgtgtatgtccattgttgtatcaatgctctcaatgactccatcagtgttgtgattggt

SEQ ID NO: 259853 - DNA, 637 bp, Cannabis indica
gaagatcatccaattaatccaaaccaaggagatattgtcgatcgttacaggcgattcttacaagggatttccggaagtaagcatcattctttgtaaatagtggtctgatctgaattcgttgtttttacgactgctacttcattgatcttttatctttgtcgctacaggaatggtgtagattttgggagcacgttcaaaaatcctccccgagccaacaagaaatctaggaagaaggccaaacggctcaagaccagagcttacacgaggaaatcttcgtgctagccaatcattggagttggtaaatttcacgaggctgggaatgaggtctcggccgcagggaatgagatctctggtacaggaaatgggatcttctaaaggtttctgctgcagagaatgaggtctatgcagcgaggatcgtagagggacatcctactaagtcagtatatcaggttgagtccttttacgtgtagacggtctttctcgagctcttctctcccctataatgaatcttgtattctttgtttaggaaaatggcttaatggtttgcccctcgtggcatttttgtaacgacaagtttgtgaaccaacttggttttttttatcttaaatgacttatactttttcattcgaacttaata

SEQ ID NO: 259854 - DNA, 729 bp, Cannabis indica
aaaaaaaaaaaaagagtataaatggagattatatggtactgtgttcatctctaatgtctatcctctcactcttaaaaaattagtctataggcttgtttgaaaaacaatttggtcaatactaccattgatgctatgcatttggtacctttgaataagaaatttattttagtttgacacatttggataagagaaattgggtcatgtaattgaatttcgagtttgtaataatttttaggaagtattgctaattaattgtaaggtgatacatctagaaagtggtaaaattttggattttttttaggagcattgttatggggtaagttgaaaaataccacttttattaatcaattaatcaaatttacttctaattttatattgactaattagtaatttttcctcccgaactttgacatataccaaatcatgctccctaaacttttttggcagttaaaaattccccctgaactattaaaattgttagatttaaggacttttgtctaatttcattcaattttactgtttcaatgattgtttatgtactaaaccatgctccccaaactttgatatctactaaatcatgctcctcaaactttgatatgtactaaatcatgctccctgaactttcatccatgttagaatttttttactgaaattagataaaagtccttaaatctaacaatcttaatagttcatggggaatttttaacggccaaaaaagttcaggaggca

SEQ ID NO: 259855 - DNA, 581 bp, Cannabis indica
atgtgcttgaagggaacatttcaattggattcagacaaaatttccttctaagtcaaggaataaaaaatggttgcaagatgaacattatcgtacttttagtagttggtttaaaaataaggtattagatgtgttattcactttgtttgtgtatatacttcgtgtaatgtgtattttgattagtttttgcgtctagttaggttgtatgtgaattgagaagtacgcctaacaatgtgaccaacattgttcgatggttttcacgtggtccttcttttaatgtcacgaagttttcatcatatacagtaaacggcagaaagttcaccactcaagagcgtgataaaagcaaaaccacacaaaatagtggtgttagccttgtcgctagtgctttgcaagtgtctagttcaaaagatcgtaatccagttcagtgcaacatgactttctatggagtagttaaaaaaatttgggagttagattatattgttactcaagtacctgttttctatgtgattggaccaaaagtgatagtgcagtaaaaaaagataatttaggctttacattggctaatctaaatagattagggcaca

SEQ ID NO: 259856 - DNA, 1025 bp, Cannabis indica
taccttgataggaagaagtcttgagaagagcctctattaactttctgtcaatgatgctgtcatcaactgcaagcacatgaaattgagccatgattctgtgacgaagaagaagaagaagaagaatagaaggaaaaagagttgtttggtaatggagagatgaaaaccacagaatggttgagagacttttatatgggaagccatgagaggtgagttgggaaagatacgattttgacaattgggaaagcaagatctgacagatctcaacaaagaatctccatgattttctaggctgatttttcaagcaaagaagttgcactgctttttctttactaatataaatttgatcaattctctacttttttttcatttaaattattattaattatgactcttgaccttttgtaatgttatgttattgtattattattattataaagatatggcctatattttcttagaaactctaacacaatatttcagcaataatttttagttatctctttcacatgcaattgccgtgttccacatatcctcacaatctctcacatgtaatgtgattttgtcaagtgtcaacacccaaaataaatatagattatatatatacatgaatatatatatatatatatttttgaaagaaataaatatatggaataacatttatgtatatatttacagagtgacaccattttgatttttgatcgttttaggtcaatatgcataagtcaatgatgtaagagattattaactagatttgacaaataattctcaacatcacatacgattagagaaatcatacaaaatatttctaaaaaaatatttctatttttttattagacgatgagctaatacggtggcccacaaatttgttaaaatttgtgtattatttcctaattataatttcaatttggagtgtgttccaattaacttattaccttgtttggtaactgagatgattatctaataaaaatttaatccaattaatttattaccttgtttagtaattgagatgattatctaataaaaat

SEQ ID NO: 259857 - DNA, 508 bp, Cannabis indica
cgaaactttgaagcatcaagatgacttaccaaaggtaatttgttaattaaatgtaacattcaacaaaaagaatcatttagtttcatatgaatatttaacattattataatgtacccgtaatttactattccattattcttcagttgcataaattgtattcttttgtatactccatcctaaactgatttcttttcccttgagttgcttccaaatcttccagttatttttcaattcatcccacttatttgtcaagctagcccctagtgtaatctctcctccagttgctttgtaaatatttgtaattaagtttagatattcaattttatctaaataagtagtagggcaatgcccatcatcaacctctttcatacagaattctgaaaaaaaaaaattcactctcagaattccatgttgttttacctcgtggtacgtcactcttagtacatatttttttttcattctccatctaattaaggctatgtttggtgggagggagggagagtaggat

SEQ ID NO: 259858 - DNA, 645 bp, Cannabis indica
cggatgcttgcttctcaaagcaggcataaaagttatgttgacccgaagtgcagagattttacatttcagataggggaacatgtctttctgcgggtttctccaatgaagggtattaggcacttcggaaagaagggtaagttgagccctaggttcattgggtcatttcaaatacttgagaaggtcgagcaggtagcgtatcggctagccttaccaccagcattgtcggctgttcatgacatatttcatatttccatgttgaggaaatacgtgtcagacccgactcatatcttgagttatgaagcccttgaactgcaatcagacttatcctatgaagaacaacctattcagattcggaacaagactattgttctgattaaatgctctagaggaacaataaggtggaggaagccacctaggaattggagtctaatatgaggactgagcatatccagagctattcaaattagatttcgaggacgaaatccttttaacggggggataattgtcatgaccgccttagtaatttggattagaaaaggcaattagcactaatatctgtcattttataattatttctgaatttatttaattgtgaaccccaatatttagaaataaatattagagttataatttctcaatttcgga

SEQ ID NO: 259859 - DNA, 512 bp, Cannabis indica
tcatgactccaattcactttgtcttttaagggacaaagagctttgtaaccattagagatccgataaggagtagttgaaacttgctgaatatccataacttctaagacttggtttttgacagccaccaatcttttccaataccaactggcctgagaagaagcttgatagctccaccaatccactcctttcatatacacacaatgtatccacctaatccacaagttatcttctttattcccaattgcccaaacatatttaatcatcactgctgtattccattcggcaatcctttttaggccaatccccccagctttctttggttggtaaagacattcccaagctataggggctgctcccactgacacatgatgacccttccacaaataggctcgacaaattacctcaatatctctaatagtcttcttaggtaacaccataatttgactccagtatgagtgaatggacataagaaccgattgaacaagtacaacccttccagcaagagacagatt

SEQ ID NO: 259860 - DNA, 792 bp, Cannabis indica
acgcgggacctcagaatcgaacctttaaataaacccagaccaggccaagacccgagacaaggaccaatttcgaacatggaccgggacctgcactcagactaggaccctaacccagatcgggacctaggaccctgacctgaatcggggacccagacccatgactcaggcccaagacccaaacttggacataagacccaaaccaggacccaagacatgagctagaactcgaccaggatctggattcagacccgggactggacccaagacccgaggcttggacccgacccatattcggtgtctaaatctggtaattagacctaggctcggacctacacccagaccagaactcgaacccgtaccaaaactcgaaactagactcgacttgtggtttgtgtttggatttgggactaagactcagacctgaaccaaaacacggacctagacctaaaccaggactcagacccaaacgcacacccgaaccttcaatcgtaccctatgacccgaaattggaaccggatctggaagcggaccattaaactctgaatcctaaaccttaaaacctaaattctaaactctttacacttacccctaaaccctaagccctaagccctcaatactaaaccctaaaccctaaacccaaaccaagacacgggcccagacccatagccaaaccgagattgtaacccaggacaccgaccgagacccagatccagacccaaacctagaaccaaactcaagacctaaacccagaccaaaacccacacaaaaacctggttcgtgacctagaccttg

SEQ ID NO: 259861 - DNA, 1156 bp, Cannabis indica
ataaaaatattcagaaagagcattgaatcagacgacataacttcagcctcagaattcaataaggcactcagcaaaaacaccaaacagcaattttttttcttctaagcaggaatttgttcaatccattaaacttgccaaattagagaagaaaaacattggaaatcaagagctccatttaggggcgataataacaatgataaatcacaaacccaattcgcagcaatcaatcacttaaaactcaacttcaaaagttcatctttttcccttacatgctggaacttaaaagcataaactttcattagcaccacttcaaattttaatcaaacaaaaccacaattcagacaaaatttatcaaaatctatcaaattcccatcattggtcatagaaaatcccaactttgtgtaaactcccacctaacaacatactcatcaaccaaagaaaattaggaaagaaccaagaaaacttacaagagaaaagacgagagcttgagaaagaaagaagagggttgttggtttttggggaggaaataagagtgagagagcacaaggtctttaagcttaaacgcataggaggcgagtaaaagcagagaggctttaggtggtggttgagaacttttaatgtagttgtggtggtagagctcattttttttagctggcgttgaaattaaatggggtcacaaattttggtctgtaaaaattgatggggtcactcagtaaaccattacgttgtcgatgatgatataaccatagccataggtacgaggtgtcgaagtaaggtcggttcggtttggcggcgctgtggttcaccaatccgaaatagagttctctaacttgacgttatttattcatagaattagtcaacatgaaaatatagtaaaactttcgagtttcgacattagagatgaaaagaaaatgcaaaaaacaattgtttttttatttaatgataacagttttgtgacaaaagacagaacagaactaattttttttaattggcttccatgaattcattctatgaaagtttttttttttctagggaatgaaagttcaaatctttggatttattccgtaccaaaaaaaatctttcacccaatacttttcctttttcatttttagggtaccaaagatattcaagaaaaaaaaaaaaaaagaaaaaggtt

SEQ ID NO: 259862 - DNA, 1351 bp, Cannabis indica
aatttgttagctgatatatcttcgtcaagtcctgtttacattcaattcgaattgtattggtagtgaattgaatgtatcaaagtagtaatattacatgacacatatattacataattacctaaccattctcgacactaacctatcgtgaaccctctcaaaacaacaaaactttatcctacgtgaacaatatgtacctaacacatgccactttttagaggaaaaaagaaacatgctactttttaaattatatatttcttcaagataaaaaaaaaaacttttaaattatcaatccaaatattctaataagaaaaatctctgattacaaaaaaaaaaaaaaaaaaacaaaaaaaaaccaccaaaataaagatcaaattcaaaattataaaataattaataaaattaatatgtattctatctttattttttaattaattaaattttttaaaatatttaaaacaaacaacaaattttttttaaagtttacatttatactttgactaaaagaatttatatttatacttttcctgcttaacgttttttcttttttactatttcttactcattaaacctaaaaaaaaaaaaaaaatcctcttttttatgctatttttagtcagcaaagtttttcttctttccttctttgttttctctctatttctttctttcttttttttttttcttcgactctatctctcgctcaaactattttttttatatctttgcatatatacaaatataaatatataaaataattgtacaattttatatctcgtttcttaaacacttttccactctaccacgaattttattttatttctttttaaaaaaatacaaataattattctacttttttttttatctttttcattttttactatcctcattctaactatttcaaactatttatctttaattaatcacattttgtacaaaaattgtaattaatttcttttaacttttactaaaatagaattcttttactttcatcttttttctcatatttttttttaatactcattctctctcttacaaaaaaattaacagcactcctcctatatttttctatcttttacatgattaataaaagtactatattttttagatattttgtagtttattcataattgatttatgaatgatttgcttattttaacaagattgatatcttgttattttatgttgatttatggctatctttttgtaattttatagctatttatgtgttgttgtttaggtattctatggttgttttatagtttttttccatttaatttttaatgtttttttttttttgttacagttgttgtttagtttatgtatatttttaatcatctatattttcagtttattctag

SEQ ID NO: 259863 - DNA, 2138 bp, Cannabis indica
catggcatgcttttagatctttaatgttctctctatatatgcctcatcttctcttctttaacatctcttctttgaacctgccattgataagtttcaagctttttaagcttttagaaatctttttcttctcatgttagattgtaagctttttggtatgttgatccacatgacagttttagagtataatctgtgatttcctaatggaaaagatttgattttggcctttaattttattcttgactctttgagtcataaagaacacgaggcacacattcgagctttgaaaaaaactcacatttcaattcagaattaaccttggatactagccttagggttcttgtttgagacctggccggccctaagattcaatcatgggagttgtcaagctctagggtttcaccctacaaagctagccgattcatgtctgggtctggtgaccctggctaatttttggctgagtcatgggaccctccgaccttccaaggcttgggaacccttgccggcctaagccttggttccaagcaggtggcaagactcctttcatggccttgtacgcatttacaaccttagtctcatatgtggctcccttagaaactttgtataaaacttaatggtgagtctattatagtcgaatgctcaacttaagactcaacatgtgtccatgtttttacatttgagactcgtactttgctgatacccacccttgtacaatgacattatttggcaaatacccttggatacggttgcccagagttttatctatggcttggaacctgtaaggaactctaccttttgtcttggaaccttccaggaactctgccttgcctttgagatttagcccggtacatcgttcttataggaactctgtccagctcttctctagttatgcagttcttgcggagcctcagccttatgcattttgaaccacacggttcttgtgtggccttggccttatgcatttgaactagttttttattcatattcggccttgaggctttcatgttcttgcttttggcctataggtactctattttggagcactactattatttagccttaaagccttttactatggacatataatcgtccaggctatcttcttattgccttgacatgtaagtatctggatttacttttttttatacaaaggttaagtatgcttacacttgacttagagacaggtttagtagcttattttaagcgttaaaatttctctacataagttccccgtgctagttcgatgcattgtatagtgtggttgtcccctagtgagcacgcaaaaatatagtctcttggtcacttacaatttaccaagtttcatagaccttgtcttggaaatttcttggggatgctactgggtgtacgcatgtggacctgaaaaagagtaactttaagaagttaactttgttagcgagtgttcttattcttgagccttttccgtctctttcaaaggttttctccaccatcattcaacatgaaagacagtaaaagattcgtgcccttcccaacttagttgctgcaatatcttcaaaccctccacgaaataaacgacagtgcctcttttgcactcactgtgagaaacttggccacttaaaggagaaatgatacattcttcatggttttcctcctagttttggtaataaacacaaaattgatcccccaaattgttccaactcagatcgaggtcagtcctctaaggaccgttctcctaaggagctcgtgccccatgctgcttctgccactacctctcctttggtcttcgacaagctggcctctcttcaggacatgatttcccaactcactcaacagatccaacaaactcagtcaaccgctgtcatcaacactcctatggcattaaaccttactagtaaaactatatcatggatagttgatagtggggctaccgccatgtttgctttgatataacatgctttcatcttttcataaagtccttgttgcatcatatatttcactgcctaatggacttaaaatacttgtacataaatctggcattgtacacataaatgataatttacaactctctaatgtactttttgttgggtttatgccctaaataaaacttatttcaatataatcaaatttacttattaataaagatcagaaataacattaatgtt

SEQ ID NO: 259864 - DNA, 1684 bp, Cannabis indica
gttgctccaattcagaatccttggaatcgtagatgaaactcttttacagaaagagttgaccatagcaggacaacattcataaaaccaaacagtaaaaacccacggacatcccaaagccctataccaaccatcatactggcctcccttctctgccttcttatttttcattataatcccatgctgaattctacctttgaatgaatcaatagtcaattcaaaggattccctaccccaacaatactcgtcccaccgaccgctatccacaacatctagatcaaacctagatacttctttatcaggagtattactaagaagaaaacactgaataaaatacaacacagccattttcaatccaagggactcatccaaaccccacctactacccaaaaaagcatcctcaatagctttgtggtcaatggtttttacaccacgaaaacagatttctaccaactgatttgattcctgtgaaaacaacaacttgttgcaatcaccgaaacaatcaattccagtaatcaaataaaattcctcagcactaaaccgtatgcaacgaccagcaaccttagcccaaaactctttaggattgggctggaaaacttccctcagtaataaactatgaacaacttggggatgaaaaacaaactcaggcatatctagaaaatgaccaaactgagtttcacgaaacatggacagtaaattaacagataaagttttcttaatattatcaatgacagaaaaaagactagtgcaaacacatttagatctatagtaatcagatggactaaatttgtagtcccagacctgcaacataaccaaaatggccacagtaaattattaattgtgaataatgcagtatggcaactaaaataacactataacaaaaccaaaaaaaaaattacaactatacaaatataaactacaaacatctaaaatcatattgatacctaaaaactaacagcaaacaactatacctaatgaaaatccaaaaacacatcaagcataacaatattaaactattaaaaatctaataagaaactacagacaactgattatacacactaaaacgaaaacaaaatacagaacctaaaacacaaacgaacactgtaaagaaagaaaacacaatgaaattaaaagccaaacccagaaaagaacaaaataaattgctcaaaaccaacaataaagacctacaaaattaaacaacatcaaacgaaattttaaaaaggaaaccctaaaattccacaaagtagaatgaacaaaaaaacgcaaaatctggaaatacaataaaatgttcaaaaagggggaaacgaagatgaaactgaaaacccacctctgttcgaacttcggcagcaacactagcttttttaccagaaatttcttcaaccatttgctcctccacactgagcttcgatttcttcttagcatgtggcctcccacgcttggttaaaggaggagcaaaatcagaatcctcctcttcaacaatcggacgtttaccctttgctttgttagccaaagatttcaagcccatttttcgatttttttttttgaactggggaaagagatgaggatgaacgagtgatgaccattttataaagaaatttgaaacaagaataaactgagagggaaaaaaacgtgaggaatcgtgggttgagtgggagttgaaaatttttggaagaacaaaaaatgagag

SEQ ID NO: 259865 - DNA, 988 bp, Cannabis indica
ctccattaaagagttaacggtaattacatccttattagatccagattactctggctcaaagttcatgactgcacataaatagagccatattataccacaatggaagggatctaaattcccagtcagccaaaattcttgtgaaactgtaacacaaaaagtctattgttaaaggttgaaaagaacttttccattcaccaggttgaaactgactgcaagaccatcactgacgctcttgtggcctctaaggaagacatttctctgtgcgaagatctcatcagtcttattaaatctgctttatctcatttcccgaacgtcactatctgctaatacttttgcccataaattggtaaaattggctttggggttagtttaagtttctatctggattggagataacccctataacctcaaaaatcttctcttctcttagagcatcttaccctaaaaaaaagttgaaaatttaatacttttgacttttgttgattttttgtttgaatggaaaatcaatcttattatccatcaaactcaactaccaaacaaggtagcaaatccaccggaacatcttccaggtaaaaagtacaatcagagtaaaatatggaagcttttgcaaaagcataagcaaccttatttgctgatcgtttaataaagaaaacagagacatttctcaactcagccaataaagcactacaatcattgataacacaattaaataaagacaccatgtctaacaaacttctaagggcttgaacaacagccatgctatctgtctccacaaagacttgctaccattctcttgttttaatttaactaaggacttccttaactcctatggcttctcctaaaagaggttctactgtcccatggcaactgctcctttgccaaaaccttgacctttcccaaataaagcggcattcacgttgatctttatattattaacatgaggtttagaccaacactcagcaccatcatcttcctttaacaaagacca

SEQ ID NO: 259866 - DNA, 568 bp, Cannabis indica
aaaaataaaaatagaagtcttacttgtatttgccttctgtaagtcactatcatcaaaaaaatttggaggaagccctgatgacaactgagatttggttgatgctctagcatgctccggtccagtgccttcaaagaatgacatgggaaaatttaaggggaccattttttagtaataaatgttattgattaaagcagacattctaacattatcggcagccattgaacgcagtggatgcaaataaacttgtctcgctagacgttatgacttttactatcttagccttttcagatataacataaacctatctacttcaacgccactttcaatagaggaccccatatctcatcagcctagtgaaacaacaaattatagtagatcattgattgtaacccttatttataataaagtaatttaatgttcacataggcatcaaatttaaccaaaatgacattagcatggatttataactacataaaagagctgtgggaaaaaaggagaagaaagtcatacttgtatttggattttgtgagtcattgttatcaaaaaaatttggaggaagccctgatga

SEQ ID NO: 259867 - DNA, 1188 bp, Cannabis indica
ctgatattatggtcaatagtactgtactatttgacagtatcacatcgatacgtctagagtatgactagcgtaccgagtataggctaatacagtatcgcatcggtacggctagagtatgactagcgtaccgagtataggctgatattatggtcaatagtaccgttgtacgaacgttctagactctgtactgtgtgggacacggagattagggttatggtcaggggtatgggcgtctgatcataacctgggatatatgtatgttatatgatttatgtttttcttactgagtctgtcgactcacagtgctatgtttatgtgtacgtaagggcaaggctaaagctgaggaaccgtgaggacgagcagatgaagattgtacatgtcggggcggttaggcctagagcgtacgatcctcgggacatcagggcttttgttgttagtcgctgggcgacaaatattttgtaaaggaatggaaatcttttgtaaagtattttgtaaatgggatcctgaaatattttgtatgtaatattataagtttttaattaaataagcaaattttaattaatcacgtttttcattaaactcgttgattagcaacgagctgcacagcaagtttaaaatcacgttaacacgcctaggctagttagggtgtgacatcctttttcagttttataccattgggtttggactccgttagattcaaatacaaaggatccaatggatagaaataagaaagaagtggaaaagatggttatttaatgctcatgatgtgtctcgaaactacaaaactgccaaaatcaaaggcatgtatttttttcaaaatggattatgacaaatataccctctggtaatcatttaaaaagcacttttcattgaaaaaaactttttaagggaaaattgttatacccaaaattcggctggtacttcagagggtgacacgtgtcaatctcagggaatatgaatcaataaaaatattaataattatatcagtaaaaatattaaatgaaataactcattaaattcagagtcaataaggtatatttataactcgtagactgcacaatctttagcgagataaggatgtacgaactattgattcacgtattaacgagaaaccatttcgcgtcagaggacataatcgcaaggaagacatcgataatacatagcgaggcatctacctcgcaatatgta

SEQ ID NO: 259868 - DNA, 884 bp, Cannabis indica
attgtctttaagttgattatatatatttaaaaaaagttatcaaaaattgaacgcggggtcatatttataccattttaaaaaatatagaatctattttgttatttaacaaaacagggggtccaatctataacttttgcaaaataaaatttacccttataaataacatcatattgtataaaatattttctacaattactaattaactaaaataaaaaaatatatatacatccaaattaatttaaagaataatgattttgtcccctaaattattgtaataaaatgtccttgaattttgaaaataataattataaatatgctccttgcatataactcattttttgagataatttttgatgtggctacaaaaccactcatataattacagtgtacttacgtgtctatttagctaacttaaactagataaaactaagtataatgatattaaacattcaaatattaactctataattataaatatacatttctagattttaatcttttaataattaaaatagttttagcttttaaccataatttttttataaattttttaataaattatttttaactgctaataaccaaataacttttaatttttttagaaagtgtgtcaaacatacccttaatcctttgtattattttaattttaatatgttgattttgaacatatatagtagtctaaatagtaaataactaaactgatcaaaagtgtcataaatattttgaacaaaaaaaaacataagaatttattatattgatggagatggagtaaacgttgttagaaaagccaaatattctcatgtacagtcgaagttggcagggacggacccgtattagtttgggggctatagtccccacgagtaaaaatattgtcttttaaaaaa

SEQ ID NO: 259869 - DNA, 1801 bp, Cannabis indica
acaagtttttctgaggcatttttgggggattttttacaactggagaagaagactttgatagagtaatagccatagataatgaacaagcaaagtatttatataaaaaaccaacaaataaatagggaaaaatatagagagaaaattataatttaaaaacaacaacaaaaaaaaaaattgtataaagtaaccaccaaaaatttgcccctaagacaataactggatgtgttttttttttttttaaaaaaaaaaaaagaagaagaagaacataagaagatgatgatgaatagttaaatgggatagtgggtataactataaaccaccaaaacgtggtgtgaaagagagagtaattgtattgaaatgatgattaaattgaattaaaagaaaaggaaaaaaaaaaaagctgccacaaatgtgacaatacccagtcacatcaactttttatcacttaaaatacaaaaaaaataaaataaaataaataataagtaaacacatgcaaaactctagactgatacaaagaataatttttttttttgtcaaatagtattagaatacacaaaataggaagacggtataaaaatgtactgtaaaaaagaaattacggccgtatcacagtataattaaaataaatggggaaaatatagtatgaggtgtaaatttccctaaataataatatatgtttcaccaacacaataaaaatatacataatctaatgtatatacacagtctttttgacataaaattaaaaaatatatatttaaaattttcaaccccaccaaataatggtagaccaataaaagttaaaatgcggctcttgcctatgttcatttttttttctaagtgtatacaaaaaaagaagtttaagataaaaagtaagggcttttttcagttttaaccaaaaaaaagtaataatattacaaaaatactttcagctagccaaataaacaaatatacagcccaaataaaaaatattacataaataccacttacacacaccttcaacccaagatccatgcttcctgggcaaccatcgtgcaactatgcagcaacccaacgcaaccgaaataaaaattcaatgagaaagagaaccaacattaatttcggcgacttcacctgaaaagacgaccaaaattaatcaaaacaggggctgcttcaaattcataaaaaagtgtagaaaaactactaagaaactaaaattcaactggaaatctaatttaatttgcataaaactaatgtcctcacttcagtttttagatctatgaaagacagatctcaaattgttgaactggagttcccaaacaatccaactcaagtataatccaaaaaaaattacatcaatattatagtaaaatgtttatcttggtgtatttttgttgttttccaaatttctaatggtgaatttattcatattaaatcattaagagacatgtagatagagttaagtacgtggaaacactgttatgatttttaatgtttcacaacagttgcactacagttgcattacagttgcctaaacattttgctaacagttatttcgtctgattgaaaccttcgtctgatgcaaccttcagccaaccacacagcaactacccagaaactttcgtctgattgaaaccttcatctgatgcaaccttcggccaaccacctagcaaccaccctgcaaccatcgtctgattcgtctgatgcaaccaccgtgcaaccacgcagcaaccacattgcaaccatcgtctgattgtgtaagtgataatagcgtaagtggtattttagtaattaaaattacataaaaggtataaatgttgtcttt

SEQ ID NO: 259870 - DNA, 752 bp, Cannabis indica
aggaaggaagaatgatccattcatgatggctagccaagcagtttacacttctgatctggctaatgataaatgatttgttattttatcgacaccagagaggaggttctgagagaatgaagaggatgaggagaatgttgatttatgttatgatgacttcattggtgggcaaccaattcatgaacaagttgcggaaattgatcgtaaccttgaggaagatgatgctgaatacattagaaccgatatcaatgagggaatatgggtcaattgtattcaacaaaacataaacaaaaaataaaagaaaacgtatctaattggcaacttacttacagtagcttacttgtgataattttgtttatgtagttactatttgttatagattacttgtgattctttttctatgtacgcagttactatgttatagctaactttatattttttttgttaatggtgtagatatggctaacccaggtttagactcagattcagactcagtagcagagtgtcctagggcgatagctacacgagggaatgctattcgaatgatgtatacacttctttaatctaattaaacttatatatcaaattttagtgaattattataaaatactaacattaaacaatttaatgcaggcacaattggaagagcataaacgatttgagaagacttttcaagttttatgacccagagcttctcgcagtgaatggtacaaatgatgaagagaagagtgtgtctttcgagaatgcgtcacaac

SEQ ID NO: 259871 - DNA, 3698 bp, Cannabis indica
tttgtgaaagaaaatttaacaaaaatgaacatgcagattttatagtggttcacccccttttggcggtaataggctagtccacttggagtgttattgatctcaatacttgagaagagttttccaaagttcaatcctcaagtgagtttttagaaagagatagtgggagcttaagagaatgattttgttagaatcaaaatgagggtccttttacaagtgacttccctcccccttatataggttttcatctaggacacgcttagagtttaaaatatcttaaccccataagcacctttttgtaactatggttaggttaggtttgaaatacaaaatgataaaaaaaaaaatcacattttaaaataaatatctagaaaaatgatcaaaattgaatatatcttcaaaatcatgttggtaagtcatgagaggcacatgttgttgacgtatgaagttgaggccccatttggccttagatgatgttgaggtccccatttgggctgaggtgatggaggcgtgcccccttgtgaagacccccatttggtatgagatgaaggactgagtcaatgccgagatgacatgatggcgaggctccacttttggtccagacgatatgttaaggcctcttgggtcgaaatgatgcatgttgaggctcctagggccaatgtaatgcatattgagactcctaggactgaggtgatgaatgctgagacccctatggtcaagatgaggcctgctaggcctctaaagccaaggtgatatgtgctaaggtcgaggtgattttcatgtttcgacctttctcaataaaacatgcataaaattctcataaaaatttcaaatgagctaattcaagatgtgttttagaagttgagaaaaagatctaaaacttttgtactttgactttttctaaaatttagaacagaacatggaattatttaggtttgaatttggtttgaggtgatgaggaagcgttgtgataagatgcctctttttggttcctaggtgaggagatgtcactttgttgtcctagctgaagagatgcctcctttttggtcctaggtgaggagatgtctcatttttggtcctaggtggggagatgagacatgaagtcaccacctaggtgtctaggtgattagagatggtatcatcacctaggtgattttttatcattgtctttactatttttttgcaaaatctgggtataacatgtatcaaaatatttaacttgtcaataagttaaggcagagcatcaaaggccagcgagattacttcagcctttaaagattcttaagtagaaatgggaagatataaccatggattttatggttgggttactgaagaccacagagttgtatgactccgtttgggtaatagtggatagatacaccaaatgtgcactttctaccatctagtggatcagtatccagatttatgcgtccaggagatagttcgacgtcatggtgctccaaagtcgattgtcttagatcatgatctaaagtttacatccaagttttgggaaagtttgcaaagggtcatgggtactaagttaaaatttagcactgtttttcatcctctgactgatggacagtctgagagaactattcagatattgaaggacatgctacaagcatacgtgttagactttgaagggtcttggaataagtatctcttttttattgagttttcatgcaacaataattattaaagtacatttagtgtaacaccatattaaatattgtacaagagaaagctttgatcacctatccattgggatgacacgagtgaatgaaggtatcttagacccgaagtagtctagaaagctagtgaagctatagaaaatatcagagctcatatgcttgcctcataaagtagacaaaaaaaaaactacgttgatccaaagcatagggaggctgagttccaagttagggattttgtattcttccgagtttaacctttaaaggggattcagagatttgagaagaaaggaaagttaagccctagatttattagtccctttgagatcttgaagaaggtaggttaggtagcctatcagttagtattacctcatgccttgtatggagtttacaacatgtttcatatctccatgctccaaaagtacgtgtctaattcgatacatattcttagttgtgatgatagtgagcttcagacggtttttcatttgaagaacaatctgttcagatcttggataagaaagagaaagtgttgcagaataagacgattctgttagttaaaatgctacagagaaacaacaaagttgaggaagcgatttggaagttagagtcgcagatgcaggagcagcattccgagttattcaggtaaattttaatgacaaaattttcataagaagagaatagttgtaagatcccagaaacttgattgtaattatttaaagaatattttatgaaatatggagtattatgtctattaagggaataaatgagtaaggttataatcttaccaagttaatattgtgaaagtagggttattattagaaatgagaaaaataagcgtaatatattaattgcatagattttataagaatatatgggttatatgaatcctattttaaaaataaaataactgtgaaaattcgatttcgattggttcactaaaaatatcacaacgatattagtttcaaataaaatccaataggggtgaaaatcggtcggttatggtcggtttttaaaattttataaccgaccggacggttacggtttttattttacgaaaaccgtaaccgaccgtttagaaattataaccgtataaaaccgaccgtacggtttttggcggttttcggtttggcggttttaggcggtttttggcggttttgggcggtttttggcggttttaggcggtttttggcggttttgacggttttttggttaaactatttttttatttcaagaaccgaaaccgaccgccgtgtcaaaaaaaccgaaaccgaaaccgaccgccaaattcggtgatgacgtggaaccgaaaattcggttacggtctggtcggtttgatggtcggtttcggtttttcggtttttatgaacacccctaaaatccaacaactcctagttaccatgaataagatcttctgttaaaacgggatgtcttatactatgttaaatcataagtttagcatgttaattaattttttatttattaaaaaattaaaattttaaatgaatcaacaaaattagttagcatatttaatataatttaaattggttacttatcaaaattttaagtgacaccactttttaacatagaatattaattctaattaccatttggcataaaaggattgatgttggtctagctccaaattattattattattattgaaagaactttggggacctatatatgcatggttaagacttcctaggccaaggacattatgaggtagaggtagcatatgtgcccattgtatcattactcatgttttaaataatagtttatatattttagcaaaagacaataatataggtccccaaagagtatgaatttgcattaatggttggaggtaaaacctcaatatattgtgtctaatatttctacccttaacaaaatatctaatattataatacatgtgtcttccacgagaattaaacacactcgtgatgttgatcgagcactttcttctgagctcccaacacctctctatatatacaagcatatatatttggattatat

SEQ ID NO: 259872 - DNA, 610 bp, Cannabis indica
aaatcacgtaatacgcctaaggtagttagggtgttacagtagctctaacagaggagtataatgcaatacttcagaagaaactcccttctaagctgaaagatcctgggagttttaccataccatgaactattgggaggcttaagaatatccatgcattgtgtgatatggggctagcatcaaccttatgcctttctcagtatttaagaggctacaacttggggaggcaaaaccaacaactataacactagagctagctgatccttctttagcccatccaagagaataattgaagatgtccttgttcaggtgaaaatttttatatttcctgctgattttatagtcatcaacatggaagaagacaataatgttcctatcatcttaggaagagccttcttggtaaccgagaaagcactaattgatgttcaaaaggaagagttaaagcttagagttcaagggggttaggtagtatttaacgtactcaaggcgatgacttatccagaagctcgtgataattgttttttaattgatacggtggacaagttgttgtggcatatttttctaaggtttctccaattaggagagaccgaacttaatgacacactgtgcttgt

SEQ ID NO: 259873 - DNA, 1108 bp, Cannabis indica
aagtgaatgtattgtatataatagagattatatatgacgagaattgatatgaataaagttgtctttatctaacatgtcgtttactataaagacctaattcatatcataacgataattaatagtagatcggcctaaatcctgagtaatcatgaactcgtgttcatgttattaatttctttgattcactcgttaaagtttcttagagaagatgattcttacaatctttattttaggaatctaatagtgtggatggctaggaacatgatctacaattatggaatcctgactttcttaacgaattgaatgttggttccctttaagtgttaattctagaactggaaaattgtgcacaaatttagatgggatctaaattatacttccactagtgaattaatggtactaaaggataaagaagtaattagaagggtaaaacggtaatttgaccaaaactaattacaaaccaatacatagagggctaatcactaaaattgattatatcaatggatactacaataaaactcagtaaatataattgtataattactaagagtttaattctatattcatagtagagtaatcatggaattagtaaacaaaaattatttggttaatgagactcaataaataatctagtttattggagcttagaattataagtctatggtccacgaatcgccaccttgaaatactgtcaagaaaagggataaagagttataatgtttttcgaaaaaatttattttgaattgacaaaatattaattatttatttttgtaataaataaataatttttgaaattaattaaataggagaaagacaaaagttgttcagataaaatttgtcaagacaaaagttgttaggacaaaagacatcatccttgtcttaattcagacaaggtaggcgtctactttagtgtagagtgtccctattggttttatcttgttgggttaattaattaactagttaatttaattagataaatatttaaatttgaaaagtggctaaagatttcaaaagtagttgagatattctctcaagtagttgagagattcccccataaatatcaataaccgaattatgttctagatatttatttatttaactaatttaa

SEQ ID NO: 259874 - DNA, 865 bp, Cannabis indica
ttttgttctcattttttaaaacaattttttgaaaacaaaaacagaaaacaataccaaacatgttcttagattcttggtcacttagaaaattaaccagagtataccataatggtatgttcaaactttatggcagacaagtttgtacacatgttagttaaatctgtgatttaaaattaatcactaagtattaataagcaattgtataaaaagttgatacaatttgaatgataataaatcaaatttttcatttatttatctgaatgtgtagttacatatgtaacttgcattttttaaatataagaaatgctttaagattatcatcggaccttagcaataaataaaagttgtaaacttttgaggagggattccgcctagaagacatcatttaagaagggaaatttgaatttctatccatattttatacccaaattaattctctaaacatatacttataactattgaaaaaataggattacttttccctaaaccctaaaatacccctctcattattctcaaccatctctctctcttcctcctttctctctcaaatcaaacccaaaaccaacccaaaaatcaatccaagtcgagccattaaaacccaaaaatcaatccgaaccctcaccattcaaaccccaacacaccaccgcgccgtcaccccctcaccaccgcgtacgacccgacccaggcccctctccaccgcgtacgacacaaggacccaggccccctcaccacatcgtacgacccaacccaaccccgtcaccaccgcgtatgacacaaggacccatagaaccactccgatcgagacccgcacagtaccggccacgcatggcgagcataaagaccaattttttgggggttttaaggt

SEQ ID NO: 259875 - DNA, 657 bp, Cannabis indica
actctattgacttgttattacctattgagcttaagattagatttttactagttttaagataggttaccatcaatgagcaaaatactaagggagtttaggtctcatccctcgaaaattcatgctttaatcttgtacggagattaagcgatttgttataacctctcactattgattccatgtgaatcatgcatgccaaaatatagtgttcactttgtgaccacttttctccttaagtacttaactttgaaaattcaatcataaaagattaattttcacacaactcaaattctcaataattttgataccaagcatatcaaaattaaacactaatttagacaccaaacatgtctaaattacactttattttgagacaccaagcatgtctcgaaaatacacattttagttttagataccaagtatgtctaaactttctcatattggagtatgcacccccacacttttacattttattatcaagataatatcttaattgtaaaatatagaagaccactttatctctataatttttttttttaatttaatttctttcttgaaaatattttcaccaaaatttgaaaccaaaatatgtcaaaattttctcatatgcacatagctgaaattgatttataatttcaattcaaaattaaataaattaat

SEQ ID NO: 259876 - DNA, 2377 bp, Cannabis indica
atattagttcacccctatatcgtgatattaacgggactatgtctactttgtagtttttatttctcacgagatggtaattacaacaacttatttaagtattagaaactttagactctagagagagaaagtttagagagataatctcttacattgtgggtagttttttgaatgtaaaaaatgaactaagggagctctccttttataaatgaagaaggccctaaaaaataggagataaaatacaaataaagtgttttccattgttgatgatgatctaatggtgaaaattaccttctggtggtgatggttgattttttatgtctggcgggtcccgctgcgagctacttaaagcttattttcgtaactctctcaggataaattttggcaatgatagcttcagaatttcgactagtatgtgagacatgacttgatagagggcttaaatagattcaaaatgcaagttgaatcgcatcaatcagatgaaaattgagtgagttatggatgttttactgaaggaagtttacattttagcccccagaatgacatctagcgcccagattgacattccaatgcgtaaaagtgtagaaatgtccaagggaagtattttgagatgcctaagtgatggtttgacacccctttagtatttttatatgtttttggtgaagctggtcacacattctcggagatgttgttttgcggaaacgaaagacaaaatgtttggcttccgaatgagccaaaattgaagttgtgaatttgattgatctgacttcatggatcatcacacttgtgaaaaacttgataaaaggtcaaaacgacatcaaatttggataaacagaacccagcaaattaggccaaatgttgatcagggcactagggcctttaaatcgagctcccgagattttatttttgatactttcaaggactgggtctctcccccccatttttttaccatgtcggattcaatggtcacatcagaattggcattttagtaattgaaggcagagtcccatgttgattgtcaaattgggtgttgggcccaacattaggtcaacctgcgtgctgggccctgtttccaaggactcgagttagtgggtttctccccaactttacttgattctttgttatttttgatgacggtgaagcagagcactttttgctgatctgaattggaaacagccaaggttgacaaaatgtcaacctgggccctgggtccctcttatgccccttcgatagttccgtttgggccttagaaatacttgattctcaatattttctaaagacggagatgatgctcgaaagaattcaatgaaaaatccatttttgtggcctaggtttacaaattgtcaacctgggcccaaggccagccccaagtatcaacctaggcaatgggtcctgttatttgagcccataacttgttgtttttcctctaaaaggacctatttatctatttttgatgaagacagattcaatacaaaagtcagatcttcgatcggatacttggaaggtgcccaaattgacagattgtcaacctaggtgatgggtgctctaggcctcgggtgctcaaaaattaacttgctctgaatctaattctaatgcctctaacatgtttgtatgtcaagtcattgtcccaatgcaagtttttgccactttgcactaagacggtctcgaaaattgaaaccctagttaaggatgtcaacttaggcgccaggtggaaaccctaagtgcccaggttggcttttgggttgcaagttcgtataatatcagctctcggaccttatattagttttcttcatgtctttatagcacaaaatactgaaagatagtgagttgggttcaagttattgaagtccaaacttctatcccagagatcccagagtcaacttgggcgcggagttagggtctcctcccaggttgactgctatgactcgagtctactaacttcgtgatgtcattcttcatgccacatgtcaaacattgatgtcgatgtcaccagaaaatttgtatgggttaataatattattattataaacttctttattaaagtacatagatgatgttcctaggagttagagcattacaagtgctttatttttgtaacaaagaaacatcactaacagtataatagttttttttttgaagtaactgtatttgaaaagaaacaaaataagaatacagttacagaaagtggagaaactatatcctccaaactgaatccaaatcaagccttaatgcatccatggcattgtgatgggcgtatgattgttactttgtgggatatggtataaggatgcattagggaagagaaatagggattcttgaaccatgttaataaggttggataaagtcgggttgtcctcccaagaactctgaaccttggtga

SEQ ID NO: 259877 - DNA, 1187 bp, Cannabis indica
atagtcaagaatcgttcaagaacgggagaagaagtggtaaacacatccaacgctcaaggtatgaggggaaacggatcccaggagtgtctattaaggtaagaaccaataatattcactaagaacacaaccatggggcagccaaagttccacctacatggaaataagttattcaacgaaagatcctttgaaagaggagaatcaggaactcattctagacacgagaagcgactaagagaacttaaagtgccaatttttgacaaggaaaattttgatggcatggataatatcgtctgtgacaaaaagagcattgttctactcgagaagatggtgttatcgctgatgaaaactgagctggtggagtagtttgaaagaatgggcaacaataggacaatacagaggagacatcaaaggcaattccaaataaggagtcgattttaagagagaatttttttttttaaaaaaaaagttcttgtttgttccaagaaagacacattttttttctctgccacaacaacacctacataatggaccgctgccgcctgaagagaagaagatgccactaatcatgctacaacatctaataagatttctgagtttaatcatcttcgttgatgaagaaacttgtatgagtggggtgcagaattcactagggatcttctacattcaatagatttttgataaagagaaaaccaattggaaatgaaaaatacaaactgaaacttagctcatcaccaagttcaccagcaggacatgtgttgactcaaaaatctgaactagacttctaagccacacccgctcactagattggcgagaataaaatagttgttaagtaattataagagagacacaataaatttatagtagttcactccctatatcgtgacagtaatggagctacatctacttcaagattttatttctcacgataaggtattgcagaaaaaggttaagtattagaagctctaatttctagagagagaaactaaaaagagaagctctgactatgtgagtagttttctgaaattgaaaaatgagctaagggagctctccttttataggtcaaggaggcccacaaaactagagaaaaataaaaattagatgtttttaaaccgtagatgatgatctaaggtgatgaccatttttcggagcccaacgggacctgctgcgggtaacccattgcttatttt

SEQ ID NO: 259878 - DNA, 635 bp, Cannabis indica
tctttgtttttagtgggttaattagtttagttttctttctttaatttttcatgtgttgataattgagccgagatattgattgaactgctattgttatgtgtgcaatggattgaaatttaaaccgtgtgcttaattcataaactctttggatttaattggatgccttgtgaaaattttcttttatagatgtaaattattaagttttggatagtatcacttttgttctacttgggtttgaggaatgtttgcttgacatggaatagaacttgcgtgacttactctcttgaagcgaaatccttgatgattgttgcttggaaaatgatttaggcaattttctttagaccgattgagtctttcaagcttacctgtaaaaattttgtccttagtgtacccaagttgagccttagcttgtttcaaaattttaaccactgaattgagcttaatgtgtttccttttaattacttttattctcgatgtacctcactatgtcatatgcttttaattaagtttgggggaaataagtgttatgagtgggtattattttaaaagtagaagattgagaaaatttatgtaatgtaaaagtgtcttactcatcataaaaaataaagaaaaaaaagaaataaataaatttgcta

SEQ ID NO: 259879 - DNA, 561 bp, Cannabis indica
cattcaacaaagcttcggttccagtaattcaacatggaacgacgtcgtccgataggcctcagctgcttgtgtgccatgatatggctggtgggtatggagacgataaatgggtccaggggcagggagggactaatggccgcaaggcttattctatatggcattggcatctcatcgatatttttgtctacttctcccataatcttgtttctcttcctcctgtttcatgggttaatacagctcaccaacatggcgttaaggtaacataattataagtttatttaattaatatctattaatttctttttgttgtaattaaatacaaatttgtatattacaatggaatccaattataagtaggtacttgggactttcattgttgaaggggatagtggtgaagagagagctattgttgagaagttgctcgaaacagaagaatcatctcaaatgtatgctgacaggttgacagaactagctctcaatttgggctttgatggatggctggtaattattgctaataatattgccactttattaatttactttcttatcattttttttatt

SEQ ID NO: 259880 - DNA, 951 bp, Cannabis indica
aaataatcaatatatagaaacaatagaaagaaaatatacatattttagtatagtataaattggctatttctatttttatgtttacaattataataaacatactaataatatataatactttataaatatatatgtttattttgttttctatttattaaacatactaatttagtaaacaaaataataatattcacatatgtttattgtatcactctatgtgccatgtttatttttagtaattttaagtattgatttatatttatatgcattaatatttataattttgattttgtattttattaaaaaaatcttattaaattataataaatcatactaaatagataataaacatttaatttttaataaaaaaatatttaacttatttattttaataaaattgtttaattaattttacgaaattgtttattttgagttttaataaacatattttttttatttaatgattaaaatgtatggtttcatgtaataaatttcaaaatatataagtttttaaaataatttttttgttgcatattttttgttaattattatgttatttttgtttgtacatttatcaaaaaaaaaagccctaagaaattgataaaaatattattaaattttttcagaagggttgtattttctttaatttcaaaatacaataatcattctactaaaatattgaaagacaattatgtgatattataataatactttaatatgcaatcaaataaaaaaaaaaaattatttggtttctattctattttattacctctaaccaaaacccaccttagtttttagaaaaggcaataaatataagagaaattattgaagcagataggttttcaatcagtggcaactccttcatgtagtttagagattggtattgcaatcaatggaaacaaaaatagcaaacacatagttcaatgggcactattcaaatttgttccagaa

SEQ ID NO: 259881 - DNA, 532 bp, Cannabis indica
aaatctgagttggtatagcctacgggatttaaaataccacccttgtagactaacatataatgccttgtacttttcaaatatgtcagaatatgcttaacttcagtccaatgttcctatcctgggtttgtctgatacttgctcacaattcctactacatagcaaatgactggtctagtgtataacatagcatacattagacttccaactgctgaagcatcaggaacctttctcatgtcttctatctgttggggatcagtgggacactattccttagatagacggatactaggtctagatggcataactgcccctctggtgttagtcattgagaataactctagtatcttatcaatgtaagttgcttgcaatagaacaagtgatctgttattccaatttctaattatttgaataccaagaacataaccagcttcacccaaatcttttatttcgaattgagtgttaagccattccttaatgtcagtcattttcttcatattattaccagtattcaaaatgtcatcaacataaagga

SEQ ID NO: 259882 - DNA, 851 bp, Cannabis indica
atatatatatgtgtgtgtttattaaaaattggattagtattactaatgtttataatgctattattaatctagtatgtttattatgataataaatataatttgtatattaatactaaacatttgatcagacgtctatgctctctcccgagaagagccttcttgaagctatgctggaaaagcctgatacatccatggaggatctccttgctagaacgtcgaacctcacggttctggacgaagatgggtaggaaatcaatccaaatggagggtctgaagtggcctccctctgtgctatggggcggttgtgttccaatcagcctttgaatcatccacttctcaaaacaattctgggaagagtttggggagtttctgagaagattggggcatggaaatcaaactctctaccaagaatcaagtttcctggtcttctcattcaaatcttctcaagatttgaatagaattctaaccaagaacccttggttcctcaataatggctttctaattgtggagagatttgatggaattccacaagattggaacaaggttctcactcgattccctctcagtgggcgaattcttcagctgccccctcgatcgatcacgcagggcaatatggagcgattggctagtttcgcgggcgaagtaattgaagttcaaaaagttgataccgccaagatcgtaaccaaaggcttcttcacattcaaggtctagtgcgagttatcaaagccgatatgcccagggttcctatttccgagcgagggtcgaaaaatttggctccccttccaggtatgaccgtctacccttactgtgttttaatttgtggttttgttgggacgatgatactcgggttt

SEQ ID NO: 259883 - DNA, 1157 bp, Cannabis indica
ttcgccattccaggctctttgaagtgcagtaccattgagttctgcaagtcgatatgttgcgttaccaatcttctcagcgatgaggtatggtccttcccaattgtctccgaaaaccccatgcgctgggtttttcgtgtttgggatgaattttcgaagaaccaaatcccctactcgcagaattctctccttgaccttagagttgaaataccgcgcagttcgctgctgataagccacatttttcaggtgagcctggtcgcgcttttcttctaaaaggtaaaggtggagcaattgtttttcttcattctggacaatgttgaaaacatctctttgcaaggaacctgccccaaactcgactggtaccatagcttcacatccataggagagcgagaaaggagtttcaccagttgtggatcgcagggttgtgttatatgaccataaaacttgcaaaagttcttctggccatacccccttacgctcttcgagttttcctttgatggtatgtttgattatcttgttgacggcttctgtctgcccattgctctgtgggtaggcgactgctgaaaatacctttttaattcccaactcatcgcacaattgtcgcatttccttacaatcgaattgctttgcgttgtccgagatgagtttgtaagggatgccaaattgacagattatggagttatagacaagctcgcgtagtttggctactgtaatagttgcaagtgcctttgcctcagcccacttggtgaagtagtcaaccgcgaccacgacgccaaatgttatagaaggaatttcacaacaccaaaataaataataacaataataattataataataatatgatgaataagtgcgagtattcaacctagaatgacgagtactcgaacttggaacacaaatacttaatgaaaactggaaatacaaagaacacgagggaatataatggttcagtcagatcacggtctgcttagtccactattgcaaagattctgtaggtgtcccatttcacggtggatcactcctttatatacaaagcaagtgtccgattatttacacaacgattgcattcattgtcagtccgtttgtacattgatttacaataattaagctaaaaaacgtaaacatttaataaataaagaacagtttctattcactaaata

SEQ ID NO: 259884 - DNA, 561 bp, Cannabis indica
ttgcattattattttatatttttaataaattgttagatgaatatttaatcatatattaaattttgcattaaaatttataataatacattggagcataatagtaaaaattgatacaaaaatatcacaaaatcattatttgtaccaaatataaatcaacttttacatctctcattagagatggtctaaaaaagtaacatattgcaaatttattgaaaaaatatttgaactatgggctcacgtgcgaagcacgttagacccaactagtaattaaaaatgtccctaaataaaatagtccagtctattcttaaaccaaacacaggattactttcagcataattcaatcttgttcagtccagtccaatccttttcagtccaatcctgcgtaccaaccgggcccttaacactcttactttgtagaacgaaattttaaaattaatcccacaatgactacttttcttgttatttcagtcataatactttcttatttatttttttgaaacacgtctatacacaccaagaaatgagcagcacattataaatgggctaatttgtttttgtttt

SEQ ID NO: 259885 - DNA, 1431 bp, Cannabis indica
aagtactaatcagtaactacaaagatttaattcttcattttaattttaatttaatttatttttttttactaaacgagggaagttttatctatcatccaacaatttaaaacctatccaacactagtataataaaacaagcatgctcctctatttacaaaattcaaaccattgtctaactatgtaacttatcttcttaggtaaaaacaatcttgacctattttttatattctctttgattctttgtacaagagtcattatggttaaactttttccactccatagactttatttttttctgttttttttacatcataatataatatgattcatgaatgaataattttgaaaatcaaacttgataaaaattataaaatagattttaacccactcaaccaataatgtagttattagggctgggttgtactttaaaactatttagctgcctcattcaaattccatcaactccgccaatcatcatatgcaaccaattgtaagatatctttagtatagaaacgtaagttactcaattttagtttggctaattagaatttttagcttccgaactttgacatataccaaagcatgtccatgaacttttctgatcgttaaaaattcccttgaactattgagattgttagatttaagaacttttgtctaatttcattcagttttactatttcagtgattgtttatatactaaatcatactctccagactttgatatctactaaatcatgcccctcgaactttgacatgtactaaatcatgccccctaaactttcatccatgttagattttttcttactaaaattagacaaaagtccttaaattcaacaatctcaatagttctggaaaaatttttaacgaccttaaaagttcaaggcgcataatttaatacatatcaaagttctacagaaaaaacctaattagctttttagtttttaatcttcacacagtaaagaataaagtacttaagaagtttggaataatatttcatgtcaaattgacactggcttttctttttatcaaatcaattaggacaactcagttattttttacattctagctactaattcatgttttataacatgaagcatggagataaagaataccctacatataaacctaaaaaatataaaaataagaaattccatttttttaatttattttttttttaatcatgatgagaggacattagtagtacagggcactcaaatatttttatgaaagagtcaaaagagtcgtaattaagagataatgtttagtcagtcttactcttacacacacatcaccactatgctctgctatatctttggtttgcccccaacaacaaacaccttttgccatctccaataaaaatataatgtgaaagcaaaactcttttcaaagtttcatgcacttttagctgaaatgatgctgcaattttgcttt

SEQ ID NO: 259886 - DNA, 768 bp, Cannabis indica
aagctgggcatgattaacatctatgctccagcttgagggggagtgttagagtattagctgtatattaggtgtaaaagaattagggtaacttgggtaacttgtatttagtagtttcctatttttgttggtagtttcctatttcctagtctcctagctttgtatataaatatgtactattctatgaaatatacacacaattcgaatcactattttctacaacatgtaattacaagactaatgctaaaattcctaaaaaataaataaacacaataagtaaaaaataaacacaaggatataattttaagatttcaagtggttaaggtctccaacagagcaagtattttttgttttcacttaaactgatttggaaaaaagctaaaattccatagcttggtttaatattgttggttattaataagtaataactaaaggtcaagttttgtattgtagaatagttttttgttttcaagtactcaatggtattttgttagtagaatagttttgctacaaagttttatttgaataactataatgtaagcctcaaatatcaatcaataatatacattttaaaagctagtaacatctggatcaaacctcaaagcaaagtgggtttatgaggaaggagggtcttgataaatacgtagctgttgctgctctacctttagattcccacctattccatcacctacaatcgatcaactagaccagctaactctctgaaaaccacaacacaagttgcataagatagttgttttcatatgttagtaa

SEQ ID NO: 259887 - DNA, 1438 bp, Cannabis indica
caagtggtagagaaaagtaaacaattattagaagttaaatctaaaaatggcttgtcaaattgtcaggtgctgctggagcaggtgacttcttctccttggaacaacctgcttttcatggtttactatgggatggttgtggaaggtaagttgtatggaaacatgttacttccgccatttttttttctttcattagctgaagcaaaaatgattaaatcataaaactgagttgacccttgtaataccaaccaactttatacttcaggtttggatttcacattataaatgctgatttaaatacgaaactctattacttatatcaagtctaaaagaattaggaaaataagcaggctagatatggccatttcacatagcaatagtatgtatttactgataattattttatgcaaatgtgaaatgcaggaagaccttgggttcatgtgaaagctaaaataaagaaggactatccaacaatacaatatacttcatggacggtattactctatgctcaacctcaattatttgctatgatgatataatgtaacaacaggtgaatatatcataatctgacttaagagaaataaatgcagttctggcctgttattggttggatcaatcaccgctatgtgcccctgcaattccgggtgattcttcaaagcttagttgcattttgctggtacgaaattttaattggtggctttattctatacttatacacatgggcttcttattcatatccattaagccaaaagtgaagcttctttatgcttttccattctaatcttttattttttcctttcaggggaatttttctaaatcttcgagcacgatccatcgtcttaccaaagcccaaatgaagaaactcagtttgcttgaataagttaaagcacctagatcccagctattattattctgttaagtaaatgatctattttgagcaatcatgaactcagaagagtacttctctagatcttgaactttgtttgttatatatactggatcttattcttaaatcttaatgattcccatcttaagccagttttgatgtttcatcatgacctggttgttatccaatcattaagcaatcaagatctttatttatattctaataacagaaatgttgattgctatactaaaatgtggtgttgccatgctcccacttcaaagcagagtaggtaacatgctaattttatctataaccctggttttcttaccttgaatttttgactaagtttatgtattagaatgatttcatttacaagtgtagttggctcctgctacccaaaagaatggggacatagagtccagctttagttgaaatcaggctaggtgtgaagtgaactttgtggcttattagtttaagctaatgtgaaacatttcaggaagacctctctcctgggtttatgtcaaagcttaagtaaatggcaatccatcattttaa

SEQ ID NO: 259888 - DNA, 516 bp, Cannabis indica
aattacatcaattggtttcccaagactaataaaaaataaatgagaaaaaaccatttactttctataattacaataagcaaaatagaaaacaaggcaggctgcattttctttcttgattctacatatttatcccacaaaatagggatcttgtcgtgttttgtcagcatgaagatatgtgagatatctctgaaaatgtccaactcgcattctctggtcggctcatgcaagctgcccacatgctggaagctggtcgggtgttccagcttctactgactttgagtatcgaatcttcctgcacggttcatcaagagctgaatctttcatccaggtcataaaaaccttttcacgcataacccaagtggatgccatgtcatcttgtgaaaatttggataacatcatcattttgtttgccacatgtgataaaacttgacaaaaggaccaatttaaaatattgtgaatagtttagggattatttgtaacgactaggctaaaatctttattatatattagatataa

SEQ ID NO: 259889 - DNA, 1050 bp, Cannabis indica
aacaaggtggaggaagccacctgggagttagagtctgacatgaagactcaatatccagagctattcaagttagattttgaggataaaatccttttaatgggggataattataatgaccgcattttagaatatggattagtaaaggaaattaacactaattattgatatttttatagttatttatgaatttatttaattgtgggtcccattattaaaagtgggcactagagttatagtttctcaattccagaaattttattaaactctagaggtattatttgagttatatatgaattatgctatttttataatttttgcttgacgacgatgaaaaatgcgatggatggctatttaaatcacatgggtaggtctagaaccttttcttagtgggataaatgttggagaaaaattgaataccgggtttgagcggggttatagtttttgaccattttacccttgggcttgaattagcttaagtttaagcactaagggcattttggtcttttggcaaggggggattaggtgactgttttgggttgtggcagttggccacaaggtttgattcatcatgaattaatgttttaacccttttacacttagaagaaaaataagaattaaagaaaaaaccaaaatttgagaaaactcttttctctttctctctctttgctcgtgcaccacccaaaccagaaggagctcactcaatttcttcatcttttctggaaattcaacaagaaatcttagtgttttcaattggaggtaagctctagcaccctagttctttagtttcttaacttgaagtttagtttgattatgtaattttgaagtttaggggctgctagggtttgtatgagttggaattcatttttatgctcaatttaagttagaaataggttcttgcagctggttttaatgtttggtgtgatggatgcacaagtttgagtttgaaaactcaagcttggttcatccatggcatgtcttgattttgtatgtatttctggattctgttgattggtttatgttgtaggaggtcaatataggtgttctggaagt

SEQ ID NO: 259890 - DNA, 547 bp, Cannabis indica
ctcttgttcagacctcaagggcagattgaagcttatactgatgcaaatagagttggaagcactttagacaataaaatctagatcaggctactgttctgttcatatgttggaggtaatttggtcacttgtcgaagcaagaaaaaaggtgtggtggctagaagtagagctgaagttaaattcagacttgttgttaatggaatttgtggaattatttgaatgaaaaggttgtttgaagagttgaagtcatctcaatcatctcctatgaaattatattgtgacaatagggcaactattacaattgctcataatcctacatttcatgattgcacaaagcaagttgaagtagataagtattttattaaagaaaaaattgagagcggtcaagtgtgtatgccttatgtttctacagaagagcgggtaaaaaatatctttacaaaaatattgtttaagaaacaatttgactttctaactagtaagttgattatggagaaagtttttagttcagtttgaggaggagtgttggaaaatcatctttattattattatt

SEQ ID NO: 259891 - DNA, 3946 bp, Cannabis indica
ctaatccaattacactttaccaattataagaaactaataatatcataaattattttagttatataatgaaacctatcattttgagagttataagaaactaataataattatttacgttagtttgtaatttaataataatatactaaattataaaaatttctaaaattttcaaaaactaatgcactgtttttaatgaaaattatccaatttccctcaaaaataaaattatgcaaaacatatttcagttgattttgaggagatggaattgggctagatctgtaacaactactagttgacacgtcattagggctttgtgtggtgggccggtaaagggtcattttcaggcaccgacaactggtttcttcttcgttgggctttctcgtttgttcaaaccactcatcaactgagtacagtccacacccaacgactatcatcatcatcatcatcaattcactactctcttctcttctatacaacacaattcaatccagatctttaattcttctcttacacatttcaccaacattgacaggttgttttctttctcgggaaccaaacacttccgagaaaatttcacatttcgcttcttaattggtacttgcactcgtttaccactggagacgaagcaaatggagagacctgattccttatcgtcctccgacgaggaagacgatcaccacaccctgattgagcagaacgacaggaagctcccaaattctactcgatccacttttcacattggtgacgacgatgtcgaccgccggaacaacgagttccgatcccgaatacgtcctcgtttcagctcttttaattcgcttaacaagaggtacgtcttcgccattttcttacctctcgtcattgtcgttttgtatttctccgtcgacgtccgcaacctcttctccaccagctccggtattcgattcgactccttttccgatcggttgcgcgagtcggagttacgcgctctttacttgctcaggaaacaacaattaggtctttttactctttggaatcagacatttcatgattcttccccaatttcttctaattcttcgtcttcttcaaataactctacaattgaaactcagcaaaatttattactccaagacttgaaattttcggtgcttaggcaaatttcactgaataaagagattcaacaagtcttgttatctcctcatcggtcgggcaacacgagctccacagggttggaaagtgattctgacgatcccaatcttggtgggtttggtatcaataggtgtgggaaggtggaccagaagttttcccaaagaaaaacgattgaatggaaacccaattcgaataagtttctgttcgccatttgcttatcgggccaaatgtccaaccacttgatttgcttggagaagcatatgttctttgcagctcttcttaatagagttttagttattcctagttccaaagtggattaccaatacaatagagtgttggatattgaacacattaataagtgcctgggaagaaaagctgtcattacctttgaagaatttgctgagactaagaagaaccacatacacattaataggtttatctgttatttttcgcttcctcagccttgttatgtggatgatgaacatatgaagaagctcaaaggattggggatcacaatgggtaaagttgagtctgcatgggtggaagatgttaaaaagcccagcaagagaacagttcaagattttcagtctaaattttcttctaatgatgatgttattgccatcggcgatgttttctttgccgatgtggagaaagaatgggtgcttcagcctggtggtccccttgctcacaagtgcaacgctctaatcgaacccagtcgtctcataatgcttacagcacagcgctttatacaaacattcttgggaaggaactttgttgctcttcatttccggcggcatggctttttgaagttttggtgagcttttactttccctggttctcttatctgtactgaagttgtgatctgtgtttttttcccctggtatattggtacattaaacatttatagaaacactttttggtgtggtcagattaaagtttgacaatttcacctgtgtctcattgtgaacgttaactgttaatctttctttttgtgctgcttagagcacgaagtcagaatcttaacggctttccgccaaagttgcctattctattgttgagtttaatcaatggaacaattggtttatgattaatttggaacaaccctgccacaatattagaaagtttattgtttttggtagccatgatggttctaacaattcttgcttatttccagcaatgccaagcaaccgagttgcttttttcccattccccaagctgccgattgcattactcgggtagttgaaagggccagtgcgccagtcatatatctctccacagatgctgctgaaagtgaaaccggtttgctacaatcactagttatgctcaatggaaagactgtaccactagttaaacgcccttcccgtaattccgctgaaaaatgggatgctctgttatataggcatggccttgagggggactctcaagtaagattgctttttattattatttcttttttgcagatacagggtaaaaaaaaaagttcttttcatagaaaaatcaagcatgtgcttgggtttcagtgacattgttgttaccattgaaaattcttgaaaaattgatgtgcgtgggttactaatggtggtattgatggtagtggttgaagtgtggtataaagaatggtagtttgattttgtctattgctgggatcagtaaataacataatagatagtttgctgatattaatagtagcttaataatagggagttcataatggtgtgagtgtaacactgcttgcagtctcagtggtgagttgcagcagtaataatagtagttatgggattgctggctaaggcattagtagttggtggtagcagaatgtagtagagacaccaatgctaccaattagtgtcaatcgttaagatttggtggcaaagtaatacttcctgccggactcttctcttgagtaaattacatttaaccttttttttctactccaaattaagtcataaatcactgagaagagagattggtttgaccctcaggcagtttattgttgtgattttatttactacatggtttaacataagctatagcatcacacgttttcttacaattccattactgtataggtggaggctatgctagataagacaatctgtgccatgtctagtgtgttcatcggagcccctggatccacatttacagaagacatacttcgacttcgcaaggattggggatcagcatcttcatgtgacgagtatctctgccaaggtgaggagcctaacttcatagccgacaatgaatgaagaaagaaagctcgataaactgggtcatgctttcattcttcctatggcttaatcaggcatagtgcaactttgatcagtgatctgccatgaaaggttttgatgtgtacatttagtgtattatagcagcctcagccatttacaactttgcgcacctcctcttgatgaaatgatatattttttctccctcgataataaaataacttgggacttcccaatttgttaattcatttttactttccagcattggattgaagaaagttttgtagagacataaattccaaactattagcatgagagattatataacataacactagacattcttactactatttcaatggaaaatactaatttgtatatcctatgtgagattatataataaaatgttcaaagatgagtatacaatgtctctgaatatgcttatatttttgagaaatgttgtctggtcagcttgaactcagatcccataatgtcattttatgattttgtcaattttgtaatgatcctatgtgagttagagcatctccaaggagctcatcaaatttgatgttgcactatcattaaatttggtgtta

SEQ ID NO: 259892 - DNA, 519 bp, Cannabis indica
gtatgtttttttattataattgtaaacataaaaataaacatagccaatattaccatatatataataattaataattattaccatatatatattataaaataaattgaaaaaaagattttaattatatataaaaatgtatgagaaaatgataataagtttttttgcacatattttgtaattaattaaaataatgtatacaaaattgtaaaatgcccttattattattataaataaattacctcctttataagccattcaaaatgtaaaggaataatttgtttaataaaaaaaataaaaagaaagagtctctataaaagggaagagaggcagcataatggaaaaagatttttatttgattttttttgggcagttttagaagtaaacgtaagagtgaaacatgagagaaaataagaaagagagaaggcattttgcataaaattttcatcttcaagagtttctacatagtaagtgataggtaaaattctttgctcttcattctaaatctttctttgctctaat

SEQ ID NO: 259893 - DNA, 623 bp, Cannabis indica
aaagttggtttcgttcctattctgaaagggacaaatttactaagcaacattgtcctaagaacgacttaaaaaaagaagcaatgaagaatatcccatatgcaagtgtattagggagcttgatgtatgcttgggtttccactagacctgacattgctttcatagtcgatgttcttgggagatatttatctgatcctagccatgatcattgggttgcagccaagaaagttttgagatatttgcgtagaacgaatagctttatttttgtgtattagcatgtcgataattttcaagctgttagttattcatattcagatttggtggttatgatttaaagtcaacttcttgttatattttcacttttgttggtgatgctatttcttgaaaaagtgttaaatatagactttaatcacatcatctactatatattttgagtttgtcgtatgttatggggcatctttgcaagctttatggttaaagaatttgattttagagatacgactagttgattctatttcctctcttatactaatctattgtgatgacaatattgttgttttcttttcaaagaataatgagattagtagtgcttccaacatatggaaataaagtatctcactattaga

SEQ ID NO: 259894 - DNA, 540 bp, Cannabis indica
aaaaaggactttacaagaataatagagaactcacatggacatccattaaagaaccagaaagttcgattatccagtgagttctcatgtgatgcttgttctcaaggaaagttaatcattaagccctcaccggtaaaggttggaattgaatcccctggatttttctaacgaattcagggcgacatatgtgggcctatttgcccaccatgtggaccattcagatattttatggtattaatagatgcatcaacaagatggtcacatgtttgcttattatctactcgtaatgtagcatttgcaagattgcttgctcaaataatcctattacgagcacaattcccagactatgcaatcaagacaatccgccttgataatgctggtgaatttacatcacaggctatttgttcacttgcggtgacactgctatatcctggcagtcaacaaagcaaactctggtggctacttcctcaaatcatgctgagatacttgcaattcacgaggcaagtcgagaatgtgtttggttaagatcaatgacacaacata

SEQ ID NO: 259895 - DNA, 1579 bp, Cannabis indica
tataattctaaaattagactttgttttatttatgaattttcactaaccaatggcttaattgtgaagaaaatagattttggggtcaatttattgattaagagactttgtatggtcaaattattaaattacataaatgaaaattttatttagtaattaattataattattaaataaatagttttggcatttataggattgaattggaaaatatggtattattgaaaagaagaataagtggttgaaataaagtggcaaaattgtaactagatagtggtccattattgttgacagcacttaaggatttttgccgagtattttattcttttgtaatccatataatttaaccataagccctagttgaaatactataaaaggaacatgatgctctaatctcatccacttgacatttcatcaaactaatgtcatcttgactattaaaccaacctagatgagagagttccttccatagtgatttctctcgaaccttgagtgatgagtgccatgcccacacataccaagtcaagcactcaatcataatgagtaagacggtggtaaccaaacccgaaggagagaaagagatccaagttcagatcttgataatgctttgctacataaaggaatcgagggctagagatcttgagcggaaggagtcattacattccgctgtaatcaatgtaaggttttcttaaacccttatgtgtttatttcattattttagagaattcttatttaggatgttaatcaacatacttgttagtaaatctagatcctggtaaaatatttccaacaactggcctgagagtcatggtcatgatttactttcatgaaacatggatttaaaacgataaatattgtttgtatgtttatttggatgtgttcatgttggtttatgtgttaattgatgaatgtatgtgatgtacgaattttttccatgaaaataatttatttggattccttgtgaaaaattaagaaattttgtttattacggaactcgattctgataaaaattgaagaagttatgaaggtttgaaatttttgggttcaatggtgcatcgagtgcaccagcatctcggacaaggtgggatttgcgtgcgcgtgacaggggacaaaaccctgtgcgtaccgtgtcacgcccgtgacttaagacacgataccctgcaccttgcccacgtgatgctgcaagcgccgacccagcaccctgcagcttactgagatttctcggtcaaggaagttgcatctccttctcccgtgctcgcatgagggctgcaggcagcctttcttggctgcacatgcaacctcctgggcagccacctcccaatacccaaattttgtgggatttttccccaattttgaatttttgcaatttttaacctaattttaaaataaaatattatttttaatatatttaaacataaatattaattttaaattaataatatttaacttttttaatacattattattatttttttgatattttgaggtttaaatttaaaaattgattattttattttttatttatgattagattttaaaaatttgttaatttctctaagatttatatgatatttaattataa

SEQ ID NO: 259896 - DNA, 535 bp, Cannabis indica
cgaacctagatctcgatctcatccctatcaactcgaataacaaaagggtagaggaaaaatacatctcattttaatcatcctagagtgcggcggtgaggacttctaaggttgggctcacgagggctcgcgagggcttgatgatgttatgtgctggcaaaagaggagagagaggaggtggccagaatctaggtgcttcagatttggttatgcatttttgaaaaatattttgaatgagttttcttattgtttctgtcagatctaattgctttaatatctaaaatatatttcttatctttcgtagctttatctcgcacttaaactcatcccctaaatcagatctggtgctacgaagagagcacctgaaactccttcgagggtatttcgaaacttcagcaaacaatatgagccgacagtgtaccaacagtcggaactccaatatgaactaattttttggatttatttgacagtccagtttctcatttgtgttgtattatgcacatgaattgcaggaaatggatttgagtaatgttagaat

SEQ ID NO: 259897 - DNA, 583 bp, Cannabis indica
tgtggataatacgatcggaggatcgattcctggcgagtcccgtcaactcaaccttggatacgccatgtggagacgcatagaccagtccattctcagctggcttctcaactcaatatccgaatctatgtttggacatgtgatgagttgccttacctcgtgtgacttatggatcacacttgaacgtctctacactactagctctaaagctagaatactgcaactaagatttcagttgcaatctctgaaaaaaggcagcttatctatacatgattacattttaaaaatgaaaaacatatctgacagtttatctgctgcaggacaattactctcagatgatgaactcattctatacattttgggaggcctcggccatgaatacgaagctgtcgttgtgaatctaacctcaaggcaagaccaagtcactctccaagaagtgcaatatatgcttcagagtcaagaaatacgccttgaacaactcaactcaacattgggagactccaacatgcctgctgcccacctagccacacagatgcgcaggtctcttaacattggaagtcatggacacaactcgaatcaaggttct

SEQ ID NO: 259898 - DNA, 850 bp, Cannabis indica
gatgatgggatgtgagtcgggtggtgagagttttgatttacgtaacactaaagtctttctcttgctataatataggtataaaaaaaaaacaagaaaagaaaagaaaaaaaaaatatacatatatacatatatgtacaatcatagtattaaataaaataagagaaaaaaaatgggcaagtttaaggctaagtttggggtgtaccacccctaatcaaagaaaaaggttgttatttttcctctttatctagttgatttgaaaaaaaaaataacatatatatatagtacatacatatagcaagagagtgggaactagattgagtgaacattgtgggttgagaatgaaattttgggtgagagtttgagaaaaaaaaaagtccttgataaattgaggtaattaggtcatgagcctaagaaatgtcatctttaccaaacccgaacctaaacctcacatttcaagcctattcaagtccttttgatctaagttgtaaagctaagctacattagtggagaggattgcactagttcaacttatggaagcaaactttttaaacttgaggatcgaagggtagttgttatagaaattcaaggtgttggtgggaagtatttgcacactttattgattgaattactcttggtaagtactaaggacataaatagcaatgcaaaattctgttgaaacacacaagtcaaggcatattcactaccaccaattacacttccattccatctaattctgagagcatttttatcgctaaaccaagtgtgaaagagcactattttctctactgcaagcatgttagtgtcgctgtcatttttgttttgttttgtttttagtcttttgttttcatta

SEQ ID NO: 259899 - DNA, 761 bp, Cannabis indica
aattataagatttgttttatgtacactgcggaatgtactttagacttagtttgatgtattaattttgatttttaaccgttagatcaatccaaaattaccacaaaaaatcactcccatatataaaattcaataaatacataactagtagtagaatcaattttttaataacatgttaaatttctttatgcatagtttttttttcttaaaaaattctattacttcaaattgtgccctttaaatttttgccatttgttaaaaaattctactactaattataaccaatacattatatatctataaatattattgtatatacatcggattaaagatgacttaccatgatggtcaaaggtgcagaatacatcaaaatgttgatgaagacacaagcaatgccaactatgagtgaccttttagcatgagtatgaacaaggtttaaaaccaaaaatgtaaaaatgaaagtaaaaatgagctccaagaccactactacaagcaatttaattctagttttcttgtctgagaaaagaaagtaaaataagatgaagcaaaattcgaccacaatcccagttgcattgatagttagcacaagaaatcttccgggttgcaccattggtagcccatataggctacacaacaggcaattcattagggttgcaaggtatggtgtcgctgagtattgctccactgaaccttttctccatatatctatcattgttggcctgaaaaattatcaataaatatatgatgatataagatttttattt

SEQ ID NO: 259900 - DNA, 676 bp, Cannabis indica
ttaaagttaaagactttaaatttataccaaatattcgtagtaagggtcgtattgtaataaataataaataatactatgtttggattaagtcaatgtattgtattaatattatgacttaattttttaatacggtgtatgttgtattatttaatacataataaatagtctgtattagcttgtattataatatttaccaaggatttggggtcaacaccaatctccgacttggacccggacccggacccggactcagacccaaacttggacccggacctggacccgaacacggacccggactcgaacttcgacctggacccggacccggaccctgaccctgacccggacccagacccagacccaaacctggacccaggacatggacccggacctgggacccaaacccggtacccaggaccggacccgtagttggtgttggatcgagtgtattaaaaatatattataactttacacaatcaattaatacaagtcaataccaaacattgtattgtattaaataatactgatacaatacaatacaacacaatccaacacaatacaatacattacattacaatacgacgtaccaaacgagccctacgggataaaatatctagagtgtagtcatctgtgccactcaatttcatagaagaaaatagagtgacatcataagtagatg

SEQ ID NO: 259901 - DNA, 507 bp, Cannabis indica
tggtttgctagttttttccagggatagaggaaaaggcgtctggtgcgtttgtgagtgttgttgtatttggcattttgagaagtgtgttgatagtgtatttgacttagatcaatgtcgtgaccatatgttgctgatttaacataagctcaaattcttaattgtttgcaaaagaaagacagcttggaataccatgatttggtaccctaattataaaagttagttgaaattagaagataataataggtacttatattttaataacaaaattttatttgatgtacctttgtttctaagctgtgggtcataagaatcaatgtagaagaatctgtagaaaattgttaccatagttgtaaatgcgtatgtgccgtgctggctcgactcatattttgaaaagcccgtaataatatgggtcatgtcgtgctgacccataaaagaatatgggtcgtttaaaaggtaagcctgacacgacctggaagtctatatcttcgtgtcgtgctttattcaaac

SEQ ID NO: 259902 - DNA, 596 bp, Cannabis indica
aacatgcatctcaagaccatcccaacctatttcatgcttgtcaaccataaaatcacatcagcaaattcattaaatttcagcaatagaaaaactacctcaagcttcaatgcaatgatcaagccacaactcctcaaacaattctttaatttcaagcttgaacaccaagcaaatcactaatttttcaacaaaatacaaagagggatagagaaagagggaagggggctgttttagggttaaggtaaatgcagaaaatgaatttaatttttttttacaaataatgcctttagttgaaaataaatccaaaaatccatatttaccattttcccctagggccatttctcacatactcaaacaattaagggcattgaagtcatttcatatataacacatatttaaataatttcagaatcatcacacataaataaaatgccaataatttatcccaaaattgtatttcaacccgaacccagtttggcccaaaatactcggttgtgactataccgcgccaacttgtcagaacacacctgaaaagatatcacaggcatactatataataatatagtcccataagcacgtacatatattaatttcataat

SEQ ID NO: 259903 - DNA, 619 bp, Cannabis indica
ttgttttctgaaaactgtttttaaaaaacaaggccaaacaagccaaattgttttcaaaaaacaattttttgtttttaaaaacaaaaaacagttttttagttatgatgccaaacatgcactaaattttgcttggtacttagggagcacctaaacccgtatagacaaaattgcacgagaagatatgttagcaaaaaacaaagaattaagtttgtgcaaaattaaaggttttattaggcaccaaaacattaaaagtttggaattaaaagctgtccgaccaaccgtgtgtctgcataaaaaatataaaacgaagtttaaaaactgcttggtcagctaaattgtatcaagtataaggccattaaggctgaagaacaaaagtaaaaataatgagaagataaagcaaaggcatctgcaaaagtccattggagtcagaggtttctggtactcaaccgatatgatgtcatcttgctgctggataaaaaagtttgggtcaattgctttagtctactcgacattctcaccaatagcttcaccaacatattcctatctttcctcacctcctctttgactttttccttttcacagaactccagcatgtcgatatattcctcatgagtaagat

SEQ ID NO: 259904 - DNA, 5837 bp, Cannabis indica
tatgtaaataatatatatatatattcatttatttttatttatttattatctctgtatattgtatgtagttaaatagggattgattgtaatagtatattcaataatgatgtttgagtataggttaaaattttaatttgaatatatcttctcttttagcatttttttttaatgtttggatttgaatatcttttttcttagtattttcttttttaataacttctctcttattaatatagaaaagataaattaatttaaggttcatttatattattgaaaaaacgttttagttaattcaaaaaaaaagtttcaattctttagaaaaaaaattaaagaaataaaaatttaaaatataaaatttataacagtaataaatataccagcgggacccgccgctattaatccgctgctattaataattaataagcggcggggtgtcagtccgctggtattaatgatgaatagcgaccctttattaccagcggggtattaccggcggaccccgccggtaataacttttaccagcggaatctcatatctttaccagcggaccgttccgcccctaataatggtatttgttgtagtgtcattctatgcttggacatcaaatttagtttagatatatgccttacaacagttctagcaatgtcagctacaacaatatgcctgtcaaatggagttggttggccttctataagtgtaacaaacaacacaagaaatggtgtctccaacctttcttccgttcctaaataaatcggtcgtacccttctccacttatctagtcgggatacttgtgatgctgcaccatgagctctggggattttgaatgatcactattgacttcccaatcgtctaacttgaagttgaaaggctttcactagatgaattttctccgagctaaggatgattctcgtagacgagttgaagaagatccttgtcgatatgatgctcacctcctcagatttcaccagtgttcatctacaaaaggagggagacaaaaggtgagagttggatggggacaaaagaacgtatacatatctgatatgccgactaagtcgattcaaatgaaaaaaagaaggaattttttttttccaaaatgaaatttccaaactcagaagttcaagcccacaaagaatatctgaagattctttagaaacccattagtgggtgaatttagataatttcaagccaaaatagtaagaaattcgaggcttaaaagatttgtgcatatgttagtcagagttaaacaccttaatattttctacttttggatcagtcgtgaacaattcaagaacacataactttgtaggaaaaaaatcaaaaaataattcatgtacttaaaggaaattgcataaaagagaagaaaagataccttactcactgttcgtagacttctgaatgtgcttgaaaggtttcaacaattgagactccaagaagacttctttgaggatttgagaatgaaaagagagaaaacttcttgctttggttttatgagaactaaaatggctaaacgagtttcatgaagcttaaatctccttttataagcatttggagggataattggataattcaaaatttaaaattttgggttttcttccccaaaagggaacatatatactcatcaaaatagtacaaacatcaagcacgtattatcaaataactgtcattgtgtgactcgaggtacaactttcaagacaatattaaatgtcttagacatcgaagagacatttgatcagtcacgttggatcaaaagtaaaaaccagacacgcatcctccatttgatcaactttgtggcccaataagtccacgtgcgaccaagaagatcccgcacggacttaggagaaaaatggtatccaaatttctacacaaggtgacgtagcatccactctgttgacacgtggaatagattttataatctagacgagcaattctactcctaataagtcgtacagggagatgtgatacttaaagtcataaatagaagttgggacatccgaacagagcatgtacagacacccgaccagcttccatcaagcaggaagctcgcatctaccgaataggggatgcaagttgagacaattttagagatatatcttatatatcctcacgcttgcaagacatggcattatccttgaattcatgggaaagattcacagtattgaataagaaggaaaacctacctagtttcatgttgtaattataaaaagtaagtagatttcccatttaatgccatattaattatgggaaaccaatttgatgtaaataattcctataaatagtgaactcatgtcactattcaaggggacaaattttattcagagaatacacaacagagaaatttagatttaagataacagctttcgggagagatcaaaggctttcttgattctatactcacaagttaatacaaaagggtactaagttattaccatcatcaagggattgaacctctataattctagtgtttactttcctttacattatttatattttgttatttcaactattcttaatcgcttaattttgacttactatcgttggctaaaagcgaagtcaaaaaaaattagatccaaaatattaacaagatgtatgaaagcaataatataaaaaaaaattataaattaaaagaatccacttataaactatttaatatttttactaaaaaataatgtttcaatttttaaaattgtgaggaaaataaatataaagtttgataatattaaacatgaacataatcccaatattaaaatgtaatactaaaaaaataatattacagatcaataagaaaaataaatgcaattatatattaaagaaacaataatagaacaataaaaagaaaattttattgtaagaaaaaaaaatatattacatgagttttgttacggatttattgtaagtttttttttttgaagaaaaataataaaaaatagttttgatcatgtacaataagtttaaatttaaatcgtaataagtttttttaaaaaaaaatgcactttctcttacatagctacataagtttaaaaaaataataataataaaatattttaaatatgtgcaataaatttaattaaatatgaattacaatatttaaaaaaataataatatttttttattacataaccatatttagtataataatagagataaatttaaaagaataattataaaaagatatttttaagtatgtacggtttaaatatttaaaatataaataatatttaatataataaatatatatgccttccattaaaaatatatacggtcaatattttatttttatttttcaaatactaatgtataatttatggcatagctaggattgaagtaattagctaggccacaacaacaacacaataaataaattgaggaatctgatagaggattatttttggtacaagaaaacagaaaatgatgataataataaatggtagctactagctatgaattggtgataacatagaaatatcatatcctatattttatatacagttaacatgttgtgagagggtccccttccaaattgacaaatggtaaggtgttgagctgtatatatgtccctcaaaactggcattataaataaataataatatatgtatgtatgtatggcctttgtaattgtacgtaccacggttcctgtgctttgtttcttctattttcacagatttttatttcccagtgaacccacattcattcatatcctcaaatcaaaaccactaatataaaataaaacactttcatcttggtcggcgctaaaagatcttttagtttaccgcacgtgcgctaccttccaatatgctttgaccgttttttcaatttcttttcaaccttcctttttaccctatcagttaaaaccctatattataatttttgtacctgaactttaacatgtattaaattatattttttaaacttttaaagttgttaaaaatacctcatgaactattgatattgttagatttaaggattttttttttttctaattttagtaaaaaagtctatatggataaaagttcaagagacataatttagtacatgtcaaagttcgagggacataattcggtagatatcaaagtctaagaaatttagtttagtacataaacaatcactgaaatggtaaaattaaatgaaattagacaaaaatccttaaatctaacaagctcaatagttcagaggacatttttaatgatcttaaaaattcagagaacataatttaatacatattaaagttcaggaggcaaaaatattaattaacctaatttatactatacagggtttcacactctgcctatataaggctttacttctaccttgtattcattaaaatgtactctcacagaataataaaataattttattttttcttttcgaataacagtattatattaaattatattttatacaatattttatgttaatctatacgtggtattaattttttgtgttttattacacaatttttttaatgcttcaagattcaattttaatgtaaaacttgtagagattataatctaaattttattagattttcgttaaaaatatggtctcatatataaagaaactattttaaatatatagagagaaactattatgatttgattgtaataattctgagttatgatttattttttttatatagaagagttatgaaattttttaatattgtatagaaaacgttattatatttttacatggaaaatgaaatcgaacttacaaaatagcataataaacttaaaaaagaaacactttgaaaaatgttgagttaagaaagaaggaaaaataaatttttagtaacaactgctttcgattagtagtttatttgttaaaagaatatataaacagcataaatgccaacaaaccaatggattctgcagatcaaatttaaacccgcaaagacttcgtacgtacttattaaacgagttgttggagggccactgtcatataaagtagtcaattttaagtcaaactatatatcgaatatcgatgtagactaattaaattgtattattttctattattatgtgtacagttttaatttcagatgtaaatgggtgatttatttattactaatatataatttattttgtaaaatatttactgtgtattaaaagttgatttaaatttgtcatataataaaagttaatttaaattagattatgtgaaatttgcatcacagagagaaagtaaaagttgtagagcttgtattattgattgtctgtgtaatataatacaagagcaattatatataaagtaagaaaaagaaactgagttatttaaagaaaacaattaatccagctaaaccaattaataatctaacagaagtaacaactcctataaccgaaataagttactgctttaactaattttaatagatccttgagatagagtattagatatttacttagccttaattctcgggttttgttgtattctgttattgattagttaggctgttaggttttgtttttctccttaaaccgactttgctcaggttgtatataaacctcctggctcttgtaaaatcattcagacaacatagaatatagagactctattttcttctcctctcaaattctctgtttctcatatggtatcagaagtacacttgcccacagcttccatggcaagaccttccacaagatctcaagatggtgttcctccatcaactaacgacaacatcaactctgatgttcctactgatgttacatctgcgcctctggcacaatctctacacacaaatcgtcgagctccaacctcacgatccagatctcagctccccgatgacaccgagaatcaatctccaagaatcgacccacagcctccagctcaagatcagagaacca

SEQ ID NO: 259905 - DNA, 1022 bp, Cannabis indica
aaggcgctgagcgtgtctgaagggtgggctacgtgcgcggaaatgctgctggtagcatttgtgggcatgaaacagcctcatccgcccgattgcatgcgcctggatggtatgcattgtaccaaatgcaatttttttcaattttttcattttttttcatgtttttcatggaattaatttcgaattttttgtgtagttttgtattttaatttttgctttttcaaattttaaatctatttatcagaattaaattattatttttttaaaaaaattaatttaagatattatctattttttttttttgcttagtttattatcttttttttttttttaaatttgattattttattttattttaaatataaggtcagatatttaatattttaaattatttttttaataaattgagctcatttaaatttaaaataatagtttaatcatgatattttacatagtaataggatattatgctaacttttaaattttgtaattttttcatttaaattaaattataaaatcagaaaaatgatattaaattatcattttattttgttgaatatttaatttttaaaaaataacatgaaatttgaaaagtagttagcatttttttttgtgaaaaggatttttaggttagttgaaacctaatttttaaaattataggtttaattttaattttttttaaatttatttatttattatttattattccgaaataaaaaaataatatatatataaacatataaacatgcaaagataatcaagtgattacctagggtttcctaaacattttctacaacaaagtagagggtgcatttgacatataaagatgcaaagataagcataaaggaaatcaaaaacttactcgagagtcagatatctgggttcgagcaacgtcaatccaacaagcagtttgtatgaaggcacttcggcaactttgaagccagaatctctcttttcgctctgaagcttactagcaaagagggtgatgaaaatgagtttatgtgccaatgatgtttgatatttat

SEQ ID NO: 259906 - DNA, 513 bp, Cannabis indica
gatgatgtgcaagctaaatcttttgatcagtggtttaagattgggtttaatgataaaaacaaagtgaagaagtttaaagaatgtcataggaagcttaaggttccactggattttgtggtttttcaaattgacgataagatgtggttatatgatttgcttactgttgggaagaacttgtcatgctcggttagtgtttcactatattttttatgttcatttgtgtttttctatgtattgtttataacattggattattttatgtttattgcaacatattgatgtttgtttctactatttcagaaagaagttaaagtataaccagtctgtgaaaatttatggtaacactactgattgcttctttgcttctcaaatttttgaattatataatgagtttgttgcaagtggtgaaaatgttaaaccggttaagaaggattataaggcagctgcatacatagctggttttatatgttatgtagtaaacattgggctaagcttgatttcgttctaatgcct

SEQ ID NO: 259907 - DNA, 552 bp, Cannabis indica
tttaacccagtcccaaacacgacccctagcgtcagggactgggaacaccccccacggggaggacctccaaagatggtacacaaagttacaatagaggaacaggtgttccatcgattccgcagccactccacataacgggcataactcattttcaatggggattctcctagcaaccttatgtctttctaagattttggagttctaaagtttgttccacaaggtcggtgcaaccacagaggcaggggctctcttgagagcctgcaataaataagcagactttgtggtgaaattaccgctcacatccttcgtccatatccatctatcactcccttggccacaaggccttcccccttttaggatcttggcaatagtagcagagtcaaacagggacttgagcatggcaatgtcccaatccccattaaagttaagcaggtctgccaccttaaccgctctctcaggacaagacgtattgggtttcggataaaaaacttccctatggacaacccaaagatctgtccaaacattcgtatcttccccattcgagacaagttt

SEQ ID NO: 259908 - DNA, 952 bp, Cannabis indica
tctaaaatttcaacacctttaaccgagcttaccaaaaagaatcaacgttttgtatggacggataagtgtgaagcaagtttttaggaattgaaacagaggttaatcacagctccagtgttagccctaccttcttacaaagagaagttcatggtttattgtgatgcatccagacagggtctagggtgtgtactgatgcaggacgatcaggttattgctatgcctctcgccagttaaaagattatgaacagtagtacccgactcatgatctagaacttaccgtggtagcatttgctttgaatatttggcggcattatctctacggagagagatgtgaaatttatactgaccataaaagtctcaaatatttctttactcataaggatttaaacatgagacagaggcgtcggttagagttggttaaggattatgattgtgagatcctttaccatcttgggaaagccaatgtagtggctaatgccctgagcaggaaggatcccgggcagtaactagtatggttcagatttcaccttaattagcagaggacatcgtcagatttagtatcgagtttgttgtaggcaaacttcatatcttgacgctgcaatcagacctgttagaacgaatcaaatctgctcagctaactgatccagagctagtaaaaatcagagaagaagtttgagctggtcaagccagagattttacagtgtcagatagtgggatatttttattcaagaccagggtttgtgttcctaatagtacgaaacttagaaatgaaattctcgaagaggctcataccactctatattctctgcatcccggcaccaccaagatgtatcaggatcttaaaccctacttctggtagagcagaatgaagaaggatgtggtagaattcatattgagatgcctaacccgtcagtaaatcaagactggacatcagagaccagcagggttgttg

SEQ ID NO: 259909 - DNA, 1268 bp, Cannabis indica
cctggcggagagttagttatctccaaaaggtggattagatctatgtcgatcaggattgaggatagggagttgagtactgacttaatagaaatgagtttagcagattttgacattatactagtaatggatttcttctccaagtactcagccaatattgattgtaagaggaagatggtaatcttccaaccagaagtcgaagaactgcttatttttgtcggattggttcagggatctcagatcccagtaatttcggtactaacagctaaagaattgttacgagatggatgtctagggtttttggccgttgtattggataccactcgacctgactctttttggccagaagacatcaaggtggttcgggaattttgagatgtttttcctgatgaacttccgggtttaccacctcagagagaaattgattttgtcattgatttagcacctggagcagaactggtttctaaggcgccttatagaatggctccaacagaacttaaagaattgaaaattcaactacaggggttgcttgacatagggttttcgcggcctagtgtgtcaccctggggagctccgctactatttgtcaagaagaaagataggtctctacgaatgtgaattgactaccgggaattgaataagctaacaatcaagaataaatatcctttacctaggatcgatgatctttttgatcaacttcaggggaagacggtcttttcaaagattgatctccgatcaggctatcatcaattgagaatccaagaggaggacatctcaaagacggctttctgtactaggtatggacattataaattcttggttatgtcgtttggactaatcaatgctcctacagctttcatgtatctgatgaatagggtattaaaggatttcctcgagatctgtgttattttgtttatcgacgacatccttgtgtactcttaatcagaagaggagcatgagcaacctcttcgaatggttctgtaacagcttcgagaacatgagttatatgccaaattcaagaagtgggaattttggctatgccaggtatcctttcttgggcacattgttattaaggatgggatcaaggtggatctaggaaagatagaatctgtcagggattgaccaagaccgaaaatagtgatagaaattagaagcttcctgggtctggctgggtattatcgtcagtttttggaagggttctcttaaatttcaacacccttaactgagcttactaaaaagaatcagcattttttgtggtcagacaagtgtga

SEQ ID NO: 259910 - DNA, 1100 bp, Cannabis indica
tatgaggttgaataagagaattgactgtttttgacaaaatgggaaactaggaatgatggaaaaggaaagttggaaaagtggaatgcttgcttccacattgctatggccgaccacctttgcttcccttttcccagttaattttcattttttaattccaagtaattcaaccataaccctatgtggtcttctataaatagaaggtaaaggcttcaggttttacacacagttttacattattttctttcactaaaattctctgttgaagccgccactctctctctctctaccttctctgtttttcgaaaccctctaagtgatagagtagtgcccacacacatcaagtaatacctcaattatagtaaggaaggctgtgtagaattcagagtcaacaaagaaggacattcgggctcagatcttgattatactctgcgacagaaaggaatcaagggttagagatctgagtgggaggagacatattattccgctgcacccaatgtaaggtttctcatacgtttatgtgtttaatttattatcgttttagaagttcatatttaggttgttaattcaacatgcttgtgagtagatctaagatcctggtaaaataattccaacaactggcaccagagccatggtaatttgatttgcttgcaagaaatttggacttaaattgatttgtttgtgatttggatggtatcatgttgctttgtatgtcatattgatgtttgattgttgtttgtgaattctgggaaaaatagttatttttctatctctgaaattatttttattggatagtttggaaaattctaagcaatttatttttttacagaactcgatttcgatttaatttgaattagttatgaatttttgaaaattgaaaaatcggggtggtgagcacttaacccacgcgcgcggatgggctgctagcagcctccctgcgccgtgaaatcaaggctggacacccctcctgcgcacgcgggtggtatgcaatgcataccatccgtacaacgtgcaattttttttcgttttcttcaacttttcatgctatttcatggaattaacttccgatttattgtgtagttttgtatattgattcttgtttt

SEQ ID NO: 259911 - DNA, 673 bp, Cannabis indica
tcaggtctagtgcataacattgcatacattagactcccaactgcggaagcataaggaatccttctcatgtcctctatctcctaaggatcagtgggacactgttccttagatagacagataccaaatctagaaggcatagttgcccctttggtgttggtcattgagaatctctctaaaactttatctatttaagttgtttgagagagagcaagggatttgttcttctggtttctgataatctaaataccgagaacataggcagattcacccaaatctttcatttcgaattgagtgtctagccattccttaatgtcagtcattttcttgacattgttgccaatgatcaaaatgtcgtcaacataaaggaccaggaatactaccacttggttttccttgagttgataaacacaaggttcatcttcattatgaagaaagtcgtaggtcttgttgatttcataaatggacctattgagtttgcaaactttcttttcctgccctggaagaacatagccttctggttgctccatatagatggtttcttcaagaattctgttaaggaaggctgtcttgacatccatttgccaaagttcataatcaaaagctgctgctatggagagaagaattcagatgaatttgagcatggcgaacggactaaaagtttcctcatagtcca

SEQ ID NO: 259912 - DNA, 7291 bp, Cannabis indica
ttatcttttctgatattaaagtcctattgtttagttttcctagggcatctctttctcatgttaaccgcaactttaatgttgaggctcataaattggctaagcatgcccttaggataaacaataaactttcttggatggaaaaaatccccctctttctgtgtaactttttgttaccgttgttatcttaacctatcggttacccccaacaaaaaaaaaaatcaaattttggatttttgttaaaaacccaaaaacctgtcttctgatctcacactctctctctctccaaaacccggcagccaatgccatagctaattttagccattgttgttttttgaaactcttttctctcatacagattctcaattctcaattctcaattctcaatctcaaatttatgtcttcctctaaaaccctaattttttagtgtttttccttttaataatcaattttttactaagtacactaaggtataacaatggaggactcggagggggttctcagctttgacttcgagggaggtctcgacgccggagggctacccaaccctattggcggggccggaccaattgttcagtcagattcggcttccgtcaccgccgtctccataaacccggtcggacaaggtcatgtggtttcggcggatcactctggtcctggcgccaatcataataagcgtgggagctttcgacagacggtatgccggcattggcttcggagtctttgtatgaagggagaagcttgtgggttccttcatcagtacgacaaggcccggatgcccgtttgccgtttcttccggatgtacggtgagtgccgcgagcaggattgtgtttacaaacacactaacgaagatatcaaggagtgtaacatgtatgtatgccattgctgctattctttaaagctcttttagtaccctaaaagccatgatagacactgtttggaaataggaaggaatgttgggtttttggagttttgatagtgttgttgtggttatgatgtcaattattggtatgcctctgtgtttattataaggtggtttgagattatatctatttgggggttagaatttctgttgtatgtgcatgatttaagtatctaacatgatcacgaatattgaaattgatgcataaagaagtaagattgaaacttaccactaaattgtatgactaaaagtttattaattggaatatcaaaatttgaaaggagttttccgacttggacattgcaggtacaaattaggtttttgcccaaatggtccagattgccgttatagacatgcaaagcttcctggacctccaccccctgtggaagaaatccttcaaaagattcagcacttgagttcttatggctacaataacaagttctttcagcaccgaaatactggtttttcccaacaaacagaaaaatcacaaagtgcacaaggccccaatataatcaatcagggcttggttggaaaacctacaatagagtcttctaatgtccagcagcaaccgcagcagcaggttcaatcgtccatccaaccaactggtcagaacccgttacaaaatgttcccaatggcctgcctaatcagacaaacaaaaatgcgtcacctctgcctccaggaatatctaggtgtgttcagagtcccaaggtcttttataggttatgtaaataaatttattgtatttttacacagacattattacaaagggtccattataatcaataattttccagatgagttttatacacattgttgagctgtacttagctttctttgaacttacagtaactacatccatataattttttatgctgttgtacaccacttgtatttaacattttatgtatgtatctctgcttttgactcatgtttagcccattttctcattaaaatgtttattttctgttggtattaaaaaatgtgaagtctgagtttggtttctccttattttttgatagcttttttatgcatagggatttattgatgattcacattgtctgctgctgcttgtctttttattcaagccccttttagaagagaaatgagaaaggtgttagcaaccctttttcatgggttttcctgctgcagtataacactagagaataacagttttactactactactccacctccatcatttgataaattcactcaattttcacttaaaagacatctttccttttttcttgtgttcttgaaattcactgcatttagtcctttttctattatgctcgcttgcatataggggcctcacaatttcatatctcttgaacttttcatcttagtgatttatgttcgattatatattaacggtgaaaggaaacatgtagacctctgtattttctaacactaatggttgaaggatgttcatgtatctcctgttgtgattttctttttctaaattagaaagttacctgtgcttgattttgatctgttgatacttgatgattagtaaatttcatatgaattctttatctcagggctcagaaagcctaacttgatgatgctctggttttactgaatgatattgtcttagttattgttgttttcggttagctggattgcaaaaaataaaaataaaaaagagatttagtgagtggagattcttaacttgattcctaaaatgctacaaatattatagactgatcttatgcagagatgagactgtattgtagattaaaaggctggagtgtgcttaatttcacatctttatttaatgtaattagcattcaggatagaacccattggcagctggccttgtgggaaactgtgttagaggaaattctgtgatgagctggtttgctgattgaatattgaggagtttagtgttgaataaaattttgatttggctgttttgtctgaaaggattcatgtaaactgcttatatttgtatggatggccgaattaattttgctgtatggtctaaagagtttcatttctctgtagtttgttgtcaaaactgggtgtagtggattttatacctagaacttagaagatcaaattatttactgataaagtattttgtatgctataatgagagaaaaattgatcactattactctcttttccttttggagctctaggatgacaattcaaaccaacattgcatagttgttaagtgcttgcatagttgcatgtgcttccacctatgagagcactgagcaggcacttcattgagtttttattgaagttcagtgacttcatttagactcccatcgtgtaatagtacacttttagcgaaacttggactagccctggataatcaatattcctcaataccagtcctatgttgtcaaaaagcatagtttttttttattttttatgtgaagtgttgtctctgttttgtgtgtaggtgaacttgccaacttcttattttccattcatcttttaatctttttctagttagagtgggtttttattaatttttttgtgagtgtgtacattaagaaatgggtgtttgtcttgttaaaacacaatcaacttatttatttggaaacatgtaaatttaggtattttattgttaaaagttgcaaccgtgaaaatctggaattatccgtgcaacaaggagtatgggcaactcagagaagcaatgaagctaaacttaatgaagcttttgactctgctgaaaatgttatcttgattttctcagtcaacaggactcggcatttccaggtacttgcaatttaatattacataataaccaaattgtgctctagattattgtggttcttaatgtaagtttcatatggcttgctaggatcttttaataatttcccaaattcttactatttttagcatagatgatatcaactggctatgtttttgttagggctgcgcaaagatgatgtctagaattggtgggtctgttagtgggggaaattggaagtatgcacatggaactgcgcattacggacggaattttgctgtgaaatggttgaaggtattattcattcatattatgttgtcatcatgtaatttatgcgcattatagaaggttttttcgttttttgctattctaaattagttgattagatatggtgttagaattcacgatcctttgaaactcttgagtaggttcttggagttattaattaattgttgtagttcttgttcccttttggctgtggatctcaaaagtaatgagctctaataacttaattagatggatgaattttattgtcattattattatgtatttggtttcttcggctttttttattaatatttatttagttgctcggcctaatcgcaattttttatctgcagttatgtgaactatccttccacaagactcgacatttaaggaatccatacaatgagaacttaccggttaaggtattatactaacaactaaatttttgttttgggaaattttttctctattcctaagtttgatgttaatgtcatgaattgttgcatgatatttaagatgtgagatgaaattagttgaaatgctttttagaaagttgagagtacagagtacattgcttggaagatgctgcttatgcttgcttgacttaatgcaaggggggagggacatggtccttgcaaactcgcaaaaatataagcatatgtgtcattacattggggtaggatctagtgggaacgtatagtatatataagagatatgttctgagattagtgaaatttaattcacagcatcatggagaggaattcctgtggaacttgtgactcttgacattttctgccattcaataatatctcagcttctcctcttcttccacaactaatttcaatactcctgttactgctctccagctattattctatagttctgttactgctctattgggtttactgagctactaggttcgagtcttatcaacttttttgaagttaaattctagtatatttttctaccattgactctttcaccatattttataggcacatctgcaatggtaaagaaattaaactgtctgttttacaaatgttgcatgatgggtacaaagatgcctgaacaaacccggcaaaagcaatagtactttaaaaattcagatgacttggaaattatagttcatatgtaacccaaatatacaaacatatatgcctatgctgcatttttgtcattattctggttcattgttacacacgcacaaatacattatctcattcttatgtttccataattgcagattagtagagattgccaagagttagagccctccattggtgagcagttagcttcgctgctttatcttgaaccagatagtgaacttatggtatgtttactttctgaacaatgggttataaatattatatataagaagtttggaatgaatttttttcgccattaagtcaaacttgtaagttacattaacttgatcatacgatgtcagcataatgatgcaactttgctgatcattatgcttttggttgtatcatcatcgatagtaaaagggaatgaataataggtcaaaccctacttcaatagctagttgtgtctagtgttgtaatcttctgagaaccttgaagtagttaaaaccgaagacatagcattgatgacatgttggtttctaatagaaattcaattatgtacacatttttattttcttgaggcaaggaataccgattttgattgctgtagatttgggctgtgctgtggttttacgacctgaatgagactcttttcagagtgaatatatatgtagtatttttatttgtgtttttgatgtgtattcttttaacacgtgttgcttttgatgtatgaatttgagatacgaaatgttaattgtttctttgttgttacaggcaatttcagttgcggcagaatcaaaacgagaagaggaaaaagctaagggagttaatccagacaatggaggggagaatccggatattgttccatttgaggataatgaagaagaggaagaagaggaaagtgatgatgaagaagagagctttgtgcaggctcctggggcagttaatcaaggtagaggaagaggcagaggagtcatgtggcctcctcacatgccgctagctcgtggtgctagacctatgcctggcatgcaaggttttcccccagttatgatgggtgctgacgggtcaccatatggacctgttacacctgatggatttcccatgccagatatgtttggaggccctcgtgcttttaatccatacggtccaaggttttctggtgattttatgggaccaggatccaacatgatgttccggggtcggccaacacaacctgggggtgtgtttcctggtggtggctttgggatgatgatgggtcctgggcgtggcccatttatgggaggtatgggagttcaaggtggaaatccaggccgagctgttcgtccaggtggcatgcccccacagcagatgtttccaccacccccgccacagtcttcacaaaaccgtggtccaagaagagatctgaggggaccagccaatgatcgaaatgacagatatattgttgcggggtctgaccaagtcagggggggtcaagagatgtctggtccagctagcggacaagatgatgaggctcactaccaacaagggggtggtaaggctcaccaagaagaacagtttgttgctggaaacagcttaagaaatgatgatagtgaaagtgaagatgaagctccaagacgatcgagacacggagagggaaagaagaagcgacgaggctccgaaggagacactaacactggatcagatctctaaagtaactaaggaataatcttcataggcttttgtgctttttattaggaacatgatatgggattttcattctcttttgtatgaattcattttggtttgggggttttataaggaaattttagatgttgaaaccatttttcttgtgttttcccccttctttttgacccttattagtaccctttatttaaatgtttagatgctatacatttttgtaactgtatacgcccaaatataagtgatggatgtggttcacaagaacactcgagattgttatattagtttcagctatttgtaaagaaaggtttcttatctcatcatatttttactaactagtgttgtgtatgcaatatggtacagtatttacattttttctaattttgtgcttgattataataataattcaatttgaaaaagaataaagttaaattcctggtgcctagggcccaaaaccactattattaaagagagaaccacttgaggctagcttaagtggccataagtgggtgtgtgagtgttggaggtcctggattcgagtctcggtaaaacatgttttaatatataaatgcttaaataaaaaaaaatattattaaagagagtattttagaaatgtccaaaaaaccccaaaa

SEQ ID NO: 259913 - DNA, 698 bp, Cannabis indica
cttatatattgtttcaaccagggcttaggtttgaattatgtggattaaaaaaaataaaatattgggaaaaaatcactaaaatggtcggccacttaatggaccactttctagttacaattttgtaactttatttcaaacacttattcttctttcaataataccatatttctaatttcaatcttataaatgccaacactatttggttgacaattataatttattatcaaataaaattgctatttatattatttattaattagaccatgcaaagtctcttaattaataaattaaccccaaaacctcttttttttcacaattaagctcgtgcttagtgaaaattcataaataagacatagtctaatcttagaattaaaattgattaattaaaattaattgactgagtttgcaagcagtattatgtcaactagtgatgggaccatgggcctatataacggagctttcaacaagtagatctagaatttaccaagtaaattttctaacttattaattcatccttatgccactatagatttggaattaaattgcattctcaattatatagaacgctccatatgtatcaagacatagatacgttttgattatccattgttacaatcctactagtgaaagatcctctaaagatgatctacatcgaaatggacaaacttatcgttctacccttcaatgcattttatcct

SEQ ID NO: 259914 - DNA, 2213 bp, Cannabis indica
ataaaaccataatgttgaaaactaataaacttaatctacatgtgtgtaggggtacatggagctaattatgaagctacaagatctggatctctggagtgtgggtcggccatagcctccacaggtcagccgaccacctcctcatcatagtgccttaaggatgagccttctggttggatggtgctctaacccacttccaacctactctcgaataacactttcccttgagccaatgtgatctccaggaaggcctcatcgcccatgtatgaaaggtcagcattggagttgcgcaacttgaactcatagatgagttctaaggataattagacgtactcttcccttatggcctgccagccatcaatggctgctctcagcttctcctcataccccgcgaggtcagcctccaacttggagatagtagaagcttgcgtggtgttctcttgcttcctagtaccattcatggtctcgaaacaagaaatcatactccaattttgtagactaagagcctccatctcagatatagtctggtccttcaccgtgagggcaacctccaaggtcttcacctcctcttgaagagcactcgagaacccccgggagttgtcatgcaaaatgctcaatttcatcaaggtctgaaagcaaaacaaggtcaaattcagtgtcaaaacacaacactagctgtccagcccctcaaagacacatcattggctggccaactccatgcaacataattttggctggctagcccccgaaaatgccagaaagatgagcaaagctaagtgtgacactcaccacaaataaatctcaaaggccagcagagcagagcctatttggctcactgtcaccgagctctaaagctcattatccatagaaggaagggccctctctaagcacctacgagccaactcatggctctctgccccatggttgagcctaccccccaactgggcttcggagcacccctgcccgaaggccattctcttcttgttggaggatcatcaatcatgggctgcctagctggtgcaggcactaaaggagggggagaaagagatgatccagcaacatctctaccacgggtggtctgagccaccttggcccttagacagctcaaaggctcattagaaggtccaccaacaagacctctcaacctggaagacatatctgtaaaaagaaagtagcacagtcagaaagcaggtcacaaatattcaatgcaaaacaagaatataaaagatggtgcaataaactatcaaataccatcatcctctaaaaaggaatcatttgaatcctcaacaactgccttgatcttacctctaaatgtaggcaaggggcgagtaggtcccatagagctctagccttcaggcctattccaaagagaagcatcaccaattaagcccctgtaggccaagtaccgatggagggccctctctctcctctctagattttgggctatataagacagaagcacgtcatcatctaagtcaaggacttatccatcattagcacaagctttctctgtagctagggcttcatctacacaaactaatgggccttgggctcctacaactccaaaagcaggagggtacaagccatatttctgaaagttggccacactggccaatctaattatgtttctcttctccacatgaagagatcggatgtggtttgccctatccctcatctacaatgtagggatggagtgcttgtaaaatggcacccactggaactggaagtgtaggatcctttgaatgtcccaagcaaaaaagtagtttcgagcgtacccacctactttagacatgggtgtgctattggtgtcacccaaccactggtggccaacctggctaaagtagaactattcagtcatattttggtttggggcaaacttcagatcaaaatctcataaggagtgggctgaggccagactagctccttatacaaaataaacatcgctaaaaggtacttgacactttttggggtgatttgtgttggacatcccaaaataagcagaaatggctctgaagtaagggcggagcagcaacactacccctgctctatatgactcttcgaccatgccatccaactgagggcaagccggtgtgccctctgatctctagtgggtatctcacaatgaacaatcctcactagcccgctagcaagtatcctattaaaatatataattaaaataaatgatattaaaaataaaacagtttccttaattactg

SEQ ID NO: 259915 - DNA, 556 bp, Cannabis indica
tccttgggttgaaacatatttcatattttctcgatcatcacgcatctcatctacatcattctcatcgactaccacatcagctacaatagcttcctcttctccgtgaaaaacccactgctcgtagctagtttgaaaatcccaacgcaatatgtgtccacgcacatccactggagtgtgtcgtttattgttgacgcatttcacacaaggacatctgattttaccgtcagagcccttgtgttgttcagccatttctgaaaaggctaagatacctctccagtaagcaggattagtgcgatcccgtaaaaatatccaacccttatcgattgtcatctatgttaaaatatcgagatggttaattttaaggtcttatttttgtaaaaataaaaattgaatgttatgaaaatattattatgaaaagcattagaaaaaaaatattttacattttatattttattattttttaattgattaattactctaaaaatatatttaataattattatatttttaaaaatataaattttactattctattttaaaaattaaacatttatta

SEQ ID NO: 259916 - DNA, 641 bp, Cannabis indica
cttgttccttcttattcatgacataatttgatgtatagggcagaaaagctggagtcagactattcaagataagactcacttgagttgtctgatccatttcagcaccatgattctgggcttcctggaaataacttgccatttggagaaggtgatcacgcacattctgatggggttccatccgtgcattgacgaatttcttagtcgcgtcaaaacgagactggatagatgccattccgaatagctcagttaactgcgtcattatttctacattcgtgacagtctttgcaaatctttttcaaggtgtcaaccatgctggaaagcatgaagtatcgagctttgttgttagcattctgccaacactcgaacttctttttaacaactttagttacattgtcacccggctgtttaggagacgactcagttaacacaaacagggcactttcacctatgagagcaatattaatgttctctttccattcagggaagttagatccacttagcttattttcagtcaacagtgataacatgggatttgacatgtgtatacaggatactacaaaaataataattagaaatcaattttggtttaacacaaaatcatattcataaattattaacacatagcaagtaggaatgacaag

SEQ ID NO: 259917 - DNA, 550 bp, Cannabis indica
tatttttttacttttttactatgtttttttataagtttcatactgcagtacaatgtgttaagttttcattagtgttctactggtgtttttttaattgttctaccgttgtttagttttgtgttttactggtgttttataaaaatacagtatttttgaaaatttttccgtgtgacagtatttttgtaaaagttatctcaaatcccaatatttttgtaagtttcccttatatattagatgttacattttaccatctgatctgatccaattcatttcagtcatccaatttaatgaatgtggttggatcggtttcacccattaaatgtgtttcctgtatatctattaaattaattcaaattgatctaatattttagacttagtattttttggatcagattagatccatctaatattttagatacaacatttattggattggatgaaaaaacaagtaaaattataatattaatttgtatatatatatatatatttttacgtataacaacataaaattaaattacacatctaaactaaataaaaatattaattagtt

SEQ ID NO: 259918 - DNA, 2680 bp, Cannabis indica
tattaatatttataaacttttaatatttttaattttttgttcttctattattttatcctttttttttagagaaaagctattaatatcaatgaacaagttcatttacaacgaaaaaatcttcttcatgaagtttccaccaggcctgttctgaaatatttgggttcctaccttcactatttgttctttgcatttaatgcatttagccgcgacttccactcttctacggtgatgattacacccctgatactcaaaatccaaatctttcttgcattaattgcacttgttatcttacatttacacgcacgttatttcacatttaatctggaattaggaaatttatggctctaaacccttcgaccctctcttctccgatcatcctaccgtcattttgagttatttgaggccactgagagtaatcattgctactcaaatgatggctactctacctcagggggatctaagcatacggaggccgcgtcttcccatattccaacacgccctttcttctccaagtattacatcttcactctctttttttgctatttaaggattggttttgacattcttacatgtacaccatatccagtctttagctattctagtcttccatctctttctatggcgtcctcttcgtcaaaaccctcccaccactctctctctctctcacagaagaagaaaatttcatacatgatttcgaccatgtttccctcaattctggagctgccacagattcccactaccttatcaataaaatcctcaccaccaaatcacctaagccagcttggatcgagaaagatatgactgaagcttggactcttcgttttcccatcaccatctctgaataccactctagattatttcttgccatattctagtgtgaaggagaccatagaagggtcttggaggaccaaccatggcattttgataaaaatctcatcatatttgccaacccagaaggccttgacacactcaccccagaccaatttcgctttgttcctttctggatccaagcccacaacaccctttttggcaagaaaaccccccaacttgcccagttcatagttgatgagctaggagatcttattcaaatttatcctctttcgcttcttgaaagctttggcccttaccttcgtatcagagttctccttgatgttaccaagcttctcaggcgtggtatgaatatccgcttccgtaggatagccaaaactaaatggctgagttttaaatataaaggattacaaaactgttgttatttctgtgctacacttgaccatacttataacaagtgtggaagataccttgtgagatgcgataactttgtagttcctcaagaactcggctacaaggagactctgcatgccctagccaaatcccaattcaaaaagagcccctttgatctttctatttcaacccttattgaggaatacctatcccatggaaacaactctgaacaaggctgtaataccctatgttatcccaatttttgcactctgacgtggcatcacttgatggtgacacgtggaatcgactccgagtatctgctcgcaagatatagtccgaacaggatacctcatatgcatgctcgaggcaaagcaatcaacaatctgcacagaacgaccaacacttagcgaattcagctttcgcatcgtgagtcatcaaagaaatccctataactcggggatcagattgcagagatatggcaagttgtcaaaatcccacaattgctgtattcagtatttattatgcaatctttctacttatatccattgtaacgagaaaggaaattcttcctctccaagctcatagccctatatatagtgatgcatattcactgcaaagggtcaaaggattttacttaagagatattgtctaagaattcgtattcagagatattgttgtaagagctataagaagaggaatctttctccttgttctttagttaatacaaataacgaggattaggctattaccgaactgttctaggatgaacctctataaaattcctatgtccttatattgctttattttatttcaatcgttataaactacttgtcgcttactaaattagactcactgttgttggctaaaagcgaggtcaacactttcattgagagcagaatcaagaatcgctcttcattctaaatttaaccacaagtacgatggtggtatagactcgtaggggcctggttgatccggcaaatctacaggcgatggatcctgcattacagaacccaggaaacacaagggttccgccagctgttaatcctgagcagccgtcaaacgcggtcatggtgtgacgattcctgtggatgaaatcgcgcctggtgtgcaagagactgggaataccagttccacacccagccagggcattcataacacagccgttctgcctggtaccaacgttcgaacgaccatttgagatgatactgagatccaaaacctccgcgctgctcttggactcatgcaaggtcatacaaacaccctacatcatgatcaggaggaactctgtgctgcggtaaatcttgtgttcgaggaacagagacgcatgtttgccgaatggagggacaaagagatggaagtgttaagagctcatcatgcagagattgacaatcgtagtcggcaagctactgtgctgatacgaaaggcctatcaaactattgggcaacaacccccaaatgtc

SEQ ID NO: 259919 - DNA, 891 bp, Cannabis indica
caacatacatggtagtaatctagatcctagtgaaataattctaacaatcttacctaagatcaatatcggtcccttccaatgtacactccatacatccatgagaattaaacttttgaacatataatcatgattatattccactgtgctgacgacactataatcatgaacaaatacatatgttctggacttaatagaatttacacattaaacataatcatgaaataaatcatgtgaaccatgcaacataaaatgcgatttttgatctttattaaataagaaaaccgaataaaatgaaaaggggtttatttagggcacaaaacccaacaggtagcatttttgttatccttgtaactataaaatggtccacacctagtctctttagaatttctgacaaacaagcgaacttcagttcgcgattctagtttgccttctttctttcttaagacatgagcagtttacccccaaatctgtaatggtgtaaacttggtatacgtccattccattgttcgacaggtgtcttagggactgctttagatggaacaacatttaaaatgtcatttgccatctgtatagcatatccccagaaggacgtagacagagttgaataactcagcatagacctaaccatttctaaaagagtgcgatttcttctttctgcaactccattttgctgtggagtgctaggggcagtatattgggattcaattccaagttcaattaaatgatctttgaactgcatatccatatattctccacccctatcagttcgcaagatctttaatgttttacctaattggttttgagccaaagcatgaaattcctgaaacttttcaaacgtttcagatttcttttgcattaggtaaagaaaactatatctagagaaatcgtcaa

SEQ ID NO: 259920 - DNA, 634 bp, Cannabis indica
gacacgtggataatgatttaacatttaatgactagatacctactctaaaattataatttgatattaaatttaaatatttatttacaatttaagtatttatgacgcaaaatactcaattcttttcatgtaagatttcttgaatggacaaaatacttattaatggcacataaggatatcttgcaaaaaaaaaaaaaaatacttattaatggcacataagggatatcttgcaaaaaaaataactaatataattatatgatgtaagattttaccaatttaacctacaccaacaaaactattaatatcagtatacaaggtcaaaattgacctttccttgtctatttaaaaactagacaaaaacggcagtgtttaaccaacacgacagcacttcctatgttgtttggatcccagggttaaagactctctaagaagagtctagaaaccctaaactcaaacacaacactacactcagcctcacagactcgaaaccctagcagagcaagttcttcactaagaacttgctcgatcccagtagaaaccctaggatcttcactcacacacagattttaggtttagtcaaaatgaaaaacaaagtaagggagagaaaacaccaagaaatttgtttcagagttctacc

SEQ ID NO: 259921 - DNA, 2861 bp, Cannabis indica
ggttttttaagagacatttactaggacgcagacttacttacacaatgaagttcctgtagacttgaaacattataataactgactcaaacaactgaagcttccataatcaatttacattcatgcaaaagccagtagataaataaatttgtagaggaaactcatgcacttaaaaataccatttcagtatccttctcgggccgattttctgagtcggtattactttcatcagcatgccctctttgtctactttttatggcatgcagatgtgcacgagatggggcagctttatgagaagctacagatacagccaattgaccaagagatccccaacgctcttcaacgacctatacaattaacggaaacccaaaattaaataacaaagttggttagtgatactggtaaatagtaaagactatagataaggcatcatacctcatcaacctttcttccgtcacgtgctgcttgctctcttgcacgcttcaacgctttaagtctccaacttgcacctccgtctccaacaagagatgaagataaaagttttgggtcgccagctttaggctcatcattttcttcaggataaccagatccgtcttccttaaaatatggattcaattctctgggattgactgtccttttctgggtttgaagaaactaatgtattaatactaaaataaacagacagtactgaaagtacaagtgctccgtaaagttaaatacaaacaaatacggtgtcctaattggtcaagaaaacaacgaatgtgcaagaataaagttaaagcaaacaaaacaaggaatgattatataccctatgtggtttttagttttaacattggctatcaaattttactgcatatcaagaaatattttacagcattgccatttgacttcagagcataacaatataaattgtttcactctaatttagaggaaggcatgagtagggtcacaaatatcaatatgaagcaacaaattacatacttcataacaaacaacaaacggcccactaatatcataaaaatgacatctgttaagagaaaagatttcaatgtgtctttataatgttagaccctggtcatacctcctcactcttattatccacagccgactcattctcaatggtttcttcatgtcttctatcggtttttgcttctggtctaagcatccactctaacccaatttccttcctaacaatatcagctcctctactgtcatctgtacaatatatcatgcagtaaatcatactccagtataagcttgtataaagagcacttgagtttacatgttaatatgagcacataaggaaaaacagaacatggatcataccagacatgtcttgttctgcattgtcttgtcgactccctttattatccactttccttctatgttccttacttccttcttttctaccttttgatttcctatttgatttttcattagcctcctccccagagctatcatcgtaacttttttttcccttcctcctactacgtcctctcttttcatcttcagatgaactttctgatgaatacgaagacgaatgttcatcagatgagtaccatttcttctttctagaatttttctttactctctcaagatcttcatcagaactactataccgtgaacgtctttttttactcttatgcttctcctttctactcgatttcttactttctttcttcaaatcatctgagccatcatcctatgaactcaattagtgaaaaattctcattagtgtattaagcattttaacaaacagaacaaaaccaagagatcaaaaacaaaagaacaagaatctatgcgcaaaagttcataccttagcaatctgatcacggggtatgaacttcacacctccaagcatagttccaacttccagactagaaatataaacaaattgaggttagcacttagcatagttccaacttataacacacttacaacatgtgtttaattcaattttaaataatattgaatttctgtcttataaacaagttagtttcttgacaaagcagtaaagtgagtaattctaatagaaatacttgattaagtggtcttcgagggatctgcctaggattgtgccaattaacactctcgtgctcacgtattatgaaaagcaagaaaacctgtctatttgctagactcgcgttggggttggaattttttggttgaggaatatagaaaaagcaagaattgactgtatagaaagataccacgtaatgcagcaagaatctacgatctcattatacaggataaagaaataaataattaaataaatcaaagacaagttaatcttgcatttcgattaaaataagaatgacccaaatgaaaatttcagaagatggcatagtcgaatgaaaattgaccagagaggaaaacttgataaaaggaaaacaaaaaattactaaaacagtgattaataaatggaaagcagaaccaataaagacagacccagatacacaataatactatgaaagtgttggcacagagaaagcgagagagaggaagagagcaaattagcttttaatttcaacctccccctttctctttttcaataagcccagccatagcgaaaagcattaaaaatctcaactatgtataattgtatatccattataacaaaaggtttggaacatccgcaaaatttgaattctcattctgctatgggatggaatgtgaatcattttctgtaagcatcaaaagacacaatagctacagataccacgcagtagagtacctcaaacttacaattcgaaaaatcaacaccttctgtagtgatcttccgagttgatcctaagcttggtgggctgcatccatgatcctaaaccctcgtgaagaagaacaagaagcaagccctagatttaaga

SEQ ID NO: 259922 - DNA, 597 bp, Cannabis indica
acaactaaagcacaagttagttaatactaactgaaacagaaactaactgactaacggtttttacaacagtttatttattgactaatagaggggaggtgttaaggactctaatgacagttacaacagttagttatactctattaaattggttatctctttctgttgtgttctgttattttgcttagctgtcattgtaattctgttttcattttcgtttgtaatcaccttgtatatattgctgtactggaatacagttcaatgagattgttctttcttctccactctttctctgttctttctctctttcctcatctttgttcttcaatcttcaaaccttgttttctggttcaacggtgcaatggctcggaggtttaacagtgcgcaaaagcaataaatagcaatatatgtggatatatcaaagcggtaaataaaaaacacagacttacatgatttagcaatttttttactctacaagggcaactgatattattaaaataaagtgtatatacaaaaatacaaatatagatttacttaccagtagcaaagaaaaagttatctctctcccatatgcaattaatgatagccacaaaaatctat

SEQ ID NO: 259923 - DNA, 735 bp, Cannabis indica
ttgtccataaagttttcatgatctatagtaccatgtataaaatattgagagatatcgagtattcgttactcttttttgataagatctatctcgtatgattgtcttaaacataatctcatagttttgactcatcaaagtttgaaggtcctttttatgttttaaaaggctttaaagtggaaagcacctaaagagattaatccatgcatgcatgataatatttagtcactttttaggtgtattgacaagtgcacaataagactaatataaggtcttaattgttgtattgcatgcatcttggtttaatggttgttattatatttgaatgtctcacaggccaaattatgtgtagtatacatatcctatcgatatgatatcatacataatttatttgactgcctattgcatgatgaagattaatatggtgtttgttgataatatttgtccaagtgggagagatattgaaatcttgtatggactaatataatcacaaacataattccatattcacaaccatgttagatgtttttctaaagagaccatatgagattagtctttcacagcaactctcaagatactgagattcaatggatcatatcgttttattctgaatagcctcatgaatgttgtgactgaataaggatttacatctaagactatttaaggagttttaatattatgaggcaatataagacattgcatttgacaatcttaaattttaatcatataagagaagac

SEQ ID NO: 259924 - DNA, 585 bp, Cannabis indica
aattatggctgtatattagcactgaacaccaatgctctaactctaaagtgttcatgttgggatacgttgagaaatcaatttactttttcaattttatcacttaaagaaagataattatttaggctatttattcgttcaaattcaaccttaaatgttacaattaaattacccaataaaagtctatatagctagcctatatatatgtataatcaacttattaatttggtctgtattttgtgtgaatttgcaatctttatggttcaattcaagttgtcacttaagagaagcaaaactatgtagaactatatgtctatacacatagtttagtaatttgtttgggcacggcccactgattgaaataaaatttgtgttctaattgaccacatgtccaaacttgtataaattttatcaattttaagagttataaaaaagtaaaaatcagtgtaagaactccctttaattgttacataatgttttctttatcatcaacaaatgtttctttctttttttatactcagttcttacactaaaagcattattttggttttgcttatatactatatatattaaaaagaaaattaagaa

SEQ ID NO: 259925 - DNA, 1144 bp, Cannabis indica
atactgtcacacggaaaatttttcaaaaatactgtgtttttataagtaaatcacaaagcagaacaactcaaaaccacagtagaacaactacaaaacaccagtagaacacaagtgaaaacttaacacagtatactgcagtatgaaacttataaaaaaaatacagtaaaaaagtaaaaaagtaccacctaaaaatggcaaaagttagtataccatgtaaatttcttaaaccaaacgccctcctcagactcggagcagagctcgcttacaacgggagaagttgaaaaattaccttttttttttttatattcattaatcaaaaataccctcatactatattttattaaaatatacactattttttttttgagtgggttgcccaatatatcctcactttctacttaagtctagcatataatttacactaacctaagggatctaatggagacatcatttataaaagtggctatatattaaagaatataaaataaaaattaaaacaagtaaaataaagtgggtatacaatgtaattaccccaattacaaccttagctttgtaaccaaatcactatggaccttgggaccctttttctacatcacaaactcaacgacacatctagttatggaatgactctaaatttgaaaaataagttagtaaatattacttttaaaaaaaaaccttaaaaaaatggtcaaatataataaattaactaataaaaattataagaatacatttattacatattattttttttttaaaaaaattatataataattaaattaaattatataatttttttaatattgcatattattatattataacaaaattgaataaatatattagattattaaatatatacaacagtatttgatatatcctatcactaaacattaagataccgtaataataaaattatataccacaaaaaattataacaatgctaaattaatactcaatatatacagtagaacctctatttaagattactattcaagaataacctctaatttgttataaaaaaaaatcaagtcccaatttgggccagttataaataagaataacttctaaattgtaattagttatacattttctaagtcccgtattaacaaagtatacctctatataagaataattacatcttaat

SEQ ID NO: 259926 - DNA, 515 bp, Cannabis indica
atgacagcaggaagtttgtgttttatgccaagctctttgaatagagagtggagccaagcaacttcggtagctgtttgagagagggctcgatattctacttcagtggaggatttagctactgccttttgtttttttgaacaccaggttatgaggtttccccccaagtacacacagtagccagttgtagattttctatcatcgacagatccagcccaatcagcgtcactgaagcattcggcagttagctctttagatggtttgaacatgattccttggccgattgttccttttagatatcttaggaggcgtttgcacacgttccaatggtgttgagtaggattgtgcatgaattgatttaatttgttgacggtgaatgctatgtcgggcctgctgagagttaagtattgaagacctcccagtacaattcgaaagaacgtaggctgatcgtagagtttgctgtcattgagacttagtttgtctccaacagacaagggcgttggacttgaagccgagtg

SEQ ID NO: 259927 - DNA, 1161 bp, Cannabis indica
ttaggcctttcagcatcaatcgtacaagccttcgtcaatcaccgccatcaaccgttctatccactgtcgttgtattggtaataattcgatttttggattgtattcctgcttttctccaaactgtaaaaaaaagtaaaaatttatattagtttatatatattattattattatttgttattgtaataaatactataatcaataatttaaacttacagtgttttgatcttgtatgtaacggttgggatttgcatgtgcaacgaagtcaatcatgtatttcaaaacataaaaaccacattctttgtttttaggttgtcttggacaatttactagtgaaattcatggccaagggccaagatacgcatttgatgcccctatatatttgtatgctctgtttgagactagtacttgtatttaagattttatcttagtacaaatataattagcacttgaaattcaggagttagtcgacttttaacaaatttcaaccaataagtaaggtcaatttccagatgccttttagggacttgtgccagtcgttgcacatatttttcttctaatgcgggcataataacatcttttgtcattctgttcttgaaatcgttcattaactttccaacaaggatcagaaaatcatgtttgaaatcatccgacactataaacctcgtctagtttgaaggaaaacaaacatgattagagttaacatctgaattaatcaaaaacatatcaaaattctcacaaataactgcttacccatatatctttccaaactttattttttagtgtagggttgacttctttccaatttttataggacaaccctatcgtctgacggcatctaactcctaaattcgatactagcttggagtagttgttgccacagtattgtcctttgtcattcactttgagtgccactctttttccttggtccatcaacttggatatttcattcatctaagtagcttctagtgtaggtattggcctaggacactctgcttctgggtttgaatctgagcctgaacctaagttagccatatgtacaccgttaacaaacaaaatataaagttagctatataatagagtaactacatacataaaaaaaatgcctaacaagtaatctataaaaaatattaaatacataaacaaacattatcacaagtaag

SEQ ID NO: 259928 - DNA, 1008 bp, Cannabis indica
agcaacaagaaaattaaggccttactttcaagctcatcctattcaggtgtacactgacgaaccattacgccagatactgcaaaagccagatgcttctggacgactactcaagtggtcggtagagttgggccaatacgaaattaatttccaaccccgaaaaataatcaaaggccaggccttagcagactttgtggtagattgaacaagcaagaaaaaaagcatacgagaaagcaaccctgagccggtacaaacacctcagccaagtaacaatgaagataagccgacctggaaactcgatgtagatgggtcagctacagatcagctatctggtgcaggagttgcccttgtcacgcctggggggcagctcctgcacgctgtagtcaagtttgcattcaaagcatctaataacgaggccgcgtatgaagccttaattgctggattaaaactacaccgcgcgatgaaagccgaacacattgaaatctacagtgattcacagatggtggtaaatcacgtatccgaagaatgcgaggctcgagagaatagatgatagcatatctgagcaaaatacatgatctgctcggacaattcaaaagctacggtctcagacaaattctaagggaagaaaacacaattgcagaccctttagctccattggcaagaagcaatgtaagtgacaaggcgaagttgattcctattcagttccttgaagaccctagcatcattggcacggaagaaatcgagatgattgatacttccccaaactggatgacaccaataacaacctacctcgactttgggaaactcccagataattgaaatgaagctagaaaaatgagaaggaaagcaacacggtatatcatagtagaggaaattatgtacagaagaggattctcaatgccgttgctcagatgtgttactcaagcagaagctgaacgactcctatctgaagtacacgaaagattttgtggaaataatgtcaccgggaaaagcttatctaagaaaattcta

SEQ ID NO: 259929 - DNA, 776 bp, Cannabis indica
tataatatgatatgttttaattaaaaagaaaaatttaaattattcacgtttttccaataacctcgttgattagcaacgagctacacagtaccttaaaaatcacgctaacacgcgtatgctagttagggtgttgcaattcagtatcatagccgccaggttgttttccgatgatcgtcacgacatgtacaatcatcatcaacagtcagctcgttccacggttcagtaagcttttattgctttagtagttgattttaatagtatgatttaagaaaagcttgttaggaagcatgttagtagcctgatagtagaataagcgtacgtttctaatttctaaataagcggcattagtaagtttctctttgatcatgatctgaccagactagctcttggttacgcaggctgttcagattagtatggacgcatggagaaacaccaggtgtcagggcaactcggttgaatcaaatgaaggtcagggagctcagattcgcccaaatgttcggggccgaggtagaggtcccaggggcagggcacgtggtcggggtgatgttaacccgccacaggttgcccaggctgcccaagctgctcaagatgcccagaactgggaaaacaggtttgcagaactgcaaactaaaatcaatgaataagaagtgattcgacagttaagacagcagggtgctcctacagtgcttgttctagaaataccagtggcacctgcccctgctgtgcaagcggaaccagtggttgcaacgaatcgaatggaacccctgtacgaaagg

SEQ ID NO: 259930 - DNA, 724 bp, Cannabis indica
gtaactaacagaggtaaagatccgtactgaattagttaagaccagtacaagctaattagctgaaaataacagaaaataaactgagatggacaacttataatatagagtaaatattaaacattaattgaactaggcctagttacataatatatttactagtgcagttaaattaaaacaaataaatataacaataacaattaatatattgttatatataaataaagtacaaaagattttacatttttttgtaactactttaactatttttgaaaactttcccattttgttagaaaaaaaagaacataaactacatagatgtatcaccagtattaaatagatttaattttgataagtaaaattaaaaaatcattaatattacttgacaaacaatagatattaatattattaatgtatgtcacatacattaataatgtatatggaatacttcattatatgtattactcattactgggtaataaataaatttaactataaatattaattttaaacatattaaaccattagattttggtcgatggggaataataaaagaaaaatttgaatttctatgctttatttagctactttaattaaaaaataaaaagaaatacatatttttacactatatcaaaaatatgtttatatggaaaaatgtttaagtcaaattcaactttttttaacacttttttttgtccaaaaaacttattttttattattttttttt

SEQ ID NO: 259931 - DNA, 672 bp, Cannabis indica
aaggaccatcttgcctcccctcagaagattacagatctaaacctgaatccctcgattccaacactcaagatccccttgagtaagctagataaatctcttaaccaactagatttgaaatcccttcaaatacatgatccctcaatttcaacactcaagatccccttgagtaagctagatgaatcccctcaccagctagattcaaaatcccttcgaatcagatctgaacctccgactgctctagcagcaagtgtcaccttcgttgtttggcaatctgaggactcattcacatggttaattttggaatctgactctaataccacttgttaggaccgtctaacaccatctatttccctattgttatgatattgtccactttgggattaagccctcacgattttatttttgaggacctttccaaaaggcctcattccaatagagattgttttcatccttatatactcaagatccttcctatttctagccaatgtaggactttaattgtagtcccaacaaatagtccatgtcaccactagctaattcattattttaccaacaaaaatagatttttatcaatgatgactcttaaatgtcgttggtgatactcttatttttattaagaacttaatggcgctagtgatagtgcttttattgaagtccatgattcttgtagtg

SEQ ID NO: 259932 - DNA, 755 bp, Cannabis indica
aaaaaaaaatatataagaatagaatatacattttatcttttgcaatataattgtaattatatgtattagacttttaaattactattttctttacattaaaatgttatttgtatatataattttttaattttgtataaatatgtgtggattggattggatcggttacttttacatatcaatcaacatccaatccgcacaagtgcagatatccgcactttgcggattagattgaattggatcgtgcaaatcgaattggatcggctattttatgaacacacctaaattatacaataggtaacattttccaacaataaaagaaaacaatggtagccaaaaagggctctttaaatattaccctataaattataggtcactttagattccaaaacttttgtaccatttatctatctcaaaaagattagctatggatgtttaattaggaacaaataatgaatgtactgctctattattctctaaaagataaaaggtgtacaaactcactgagttttcaagtctgcaattaagaagaagaagaaaaaaaatgataataaacctaatcttttaactacaaaaccatggctgccacaactatgaaataaatggacagctctacaaaattagtaatgcccgaaaatgtatcagtgaaattcaccaaaccctccaacctataaaacaccccactttcaaccctcacaaatttcactagaatagacatagtcagcagagcaggcatccagaactttcagcaatctaaa

SEQ ID NO: 259933 - DNA, 825 bp, Cannabis indica
ggatgaagattggtttcttgcaatgcaggatgagctacatcagtttgtttgaaacaaagtttggcaaatgattccaagagcaccatttgtgaatatcattggaaccaagtggatcttcaacaataagagtgatgagtttgggactatcattcgaaacaaggcaaggttggttgcccaaggatacactcatgttgagggtattgactttgatgaaacatttgctccagtagcaagactggaatatatcatgttacttctttccatagcttgcattcttggttttaaattgtatcaaatggatgtcaaatctgcatttttgaatggttttttcaaggaagaagtgtatgttgaacaacctaaagggtttgaggatcctcattttcctgatcatgtttatagattagataaagctttgtatggcttgaaacaagcaccacgtgcttggtatgagcatctaattgaattttgtctttctcatgattacaaaaggggaaatgttgataaaacacttttcatcaaacatattaatagtgatattattgttgctcagatatatgttgatgatattgcgtttgcttctacttctaactctgaagtgcaggtttttatttctcaaatgtaagaggagtttgaaatgagcatggtaggtgaactcaattattttctcggtctccaagtgaagcaatcagatgagggtacgtttgtctctcaaagcaagtatgcgaagaacttggtgaaaaagtttggtcttgagaatgccaaatataccaatactcccatgagcacaacattgaaattaaccaaagatgaacaaggagtaaaggt

SEQ ID NO: 259934 - DNA, 832 bp, Cannabis indica
ccctttcctgcacagtagagcacccgtgagccaagcccaacaatacagtataaaatatattaataatatgctcatcatataatataaacagtaatgccattcgaatctgtccgtgtgacacaaacctgcatgttgggctcacatgcctatttatgtctacgtggcgtagacctacgtgttgcgctcacacgtctatttatgtctacgtgttgctctcacacgtctatttacaataagaccttagaatagttcatctcggttctagttaccgagttcaacttgattatgccttgaacgcataacccttaatctcaatatgtgtaacacataattaaggtgccactgcactatttgtctatttgttatagacctacacgttacgctcacatgcctatttatgtctacgtggcgtagacctacgtgttactctcacacgtctatatacaacaaggcctcagtagggtttacctcggttctagttaccgagcttaacttggttatgtctttctcgcataaccctactcatatatatacgtaatccatacattacgttctttcggtggtttatcctggtggtatataccaggtctaacccagttatgtcttatacacataactcttaacatacatgtgtgtattcaatatttactacaacatatataatcttaggataataaccctaagttgcatactatgtaatcactcatataatacatttctatatactctgataacatttactaaaagtgttaaccctaactcatgctttcactggattcataatattctagggtaataaccttagaccgcattaaaattaaactcaaggtac

SEQ ID NO: 259935 - DNA, 870 bp, Cannabis indica
ggtaaactgagcaatggcggcggtttaagcacgatcgatggaatggcatgagggtggttgatatatggctgcacactaaagaagggtgagagatatatagtgttaggccatggtgtcaaggcagaggaccatggcattgagtgacagtagtcagcaaagaacataagaatctagacaaaggcacataggagggatttcagggttgagagtagaaaacttaagtttttgctttttgggtccaacgtgtgtaagttagggtttgactatcaacaagtatattacaatttcatttgggatcaaagttggtatcaaggataagcatatgaagtgcaatgaatataagaaaagtttcacattaattactatatatataatatatcaataaactcgtacgttgtgatatatactatgctttgaacaatgagtgcctgggtgagaaaataaagaaatgacattaaataacttgtggaaattacaatatataacacattgcaaatagtcatgattttgatgagtcacttcaaaattattaattatagctagtaatttttctaacgtgtgcattgcttagttcaaggggtggaaggccttatattaattataggaatggaataattttcccagttggcctaacactgtacaaaacaaaaaaaaaaatatttttagcgataatttttctgtcacaacaaaaaagttacttgtgactaaacataatttttagttacaagttgtcactaacttaattttagtcacaacaagtattgtgactaaatccacatgatttaatcacaacaaattgtgatttttataactaatattacttttaactacggattttttagtgacaacgtaagaatgacaatttataat

SEQ ID NO: 259936 - DNA, 518 bp, Cannabis indica
tttttattttagtcaagttttgtttatcctcacagtttttttatatttaattaatatattagtattaaagtagttttataaaatcacacacgtggcgttcctatagattagggcgttacgtagagtaagtgcccacacacatcaagtagtactcaatcatagtgtgtaaggatgtgaagaatccagtgtcaagagaaggagattcaaactcagatcttggtgatactctattacagactggatacaagggttagagatctgagagtaaggagccattgatattccgctgtacccactgtaaggtttctgaaacttatatgtgtttatttacattattttagagattcatatttaggatgttaaataacatacatggtagtaaatctagatcctggtataacatattccaacaataatattatcaaattaatgaagaataaatctattctatataaagtgtggctatgtaacagaattcttagtttaacgattctttttgggtttctacgttaacttta

SEQ ID NO: 259937 - DNA, 911 bp, Cannabis indica
ttttcgttgagatctacatcttgttcagatctgatttccttggtttttgaaaaaaaaaaaaatggtggagatttggttgtttggggtttcttggctgggtcacgaagaaggaggtctctcctccgttttttgtggctgtttggtatttttgtaaatagaaagttttgttttctatttatgtttatttttcctttttaggttataaatgtaaattgcttccctttttaatttattatagaaaaaatcccaaatatttaatttaataatagaaatattatttaaattttattaaaaaaattagaagataagatgtttacccatttaaaaaatattacataggataaattttttatgataatttttaaaatattaattatatgtaatttataatttaagataaaaatttagcaatttcttcttgttttgtttcttcaatagaatatatattaaaattcttatatagatctttgagtctttcatcttcttttgatcaacataaatttgtagtatccaacacttagttgacaatttattaaaaatactttcaatatatttaatctttttcagagaaataaattataaaaattggtattagtcttcaattattgatgatgttactgtataaataaataagtatagcttgaaatgttaggatcattatttatattacattagatctgaaaagttattttacttcgtgattaagatacactttcagtgttgccctatatttgagcatataatcttacactaaaaatataattatttttacgcttggatgaacttgtctgtatcaatgacttataatatataaatgggtaaataacttgctaaaatccttcttggggacctaaactcaaaactaaaacatgtcaagatagtgtgacttggagagttcagtctcgggacga

SEQ ID NO: 259938 - DNA, 876 bp, Cannabis indica
tatactatttatatattgtgttttaggtgcagcttattgctttaagttgtaattcttctcttctttctatattctctattttatgtgtatattttttttttttaaagatgtaggcagacgcacaagagggataatttcccaaccacaactcattacaatttgaagaaagggccaatttggccaaagaatgagcagccaaattgctttgtcgccctgtgtgattcacaacaatacagtgagtaaaagcaggggagtctcgaatctcttcaagcaacgcactccagtttgttttagtgttgtaacattatttaattcatgattttgtcctttgtattatttgtcatagagttgtaatcttgttggtttgatcttctattggagcacaacaattttcaacactatgttatagtgagacatagattttgatattggattaaagaacttgtatgatctgtgtaacaattagaatttttttgtttaatgtgaattatatgtgtaatttaccacataattgtgtaggattttatcatatgatttagattctatatgttctaataaaaatatggattgaattaataatttgctatcacacagaaattaaatggtaattagattatattttaaaattaatgcaattgaaattgaatgccctatatttctaatcaatcttaattgtttttttgttttttattttatttttattattcaattacaattattatttaaattatttatttgctaaataaaacaaaaattcaattatttgatatttaactataattcttgtaaaattagcctcattctcgtaagaattacttataaacaatacctgcactcgtgtgtttggaatttttcacaacatcagtctatattttt

SEQ ID NO: 259939 - DNA, 2110 bp, Cannabis indica
ttcattatattacaagaatttacaagtttcaaattcaaaataatatagagaatatacttatttattactctatgtttgtttttaaaaaacaagtgtaatatatcctttaattttgaaattgtacgtaattataagtaatttgagttcaaaatactaaatatataagatctcaaactcaaccaatctagatcaaaccatttgagatcgcaccaaataaattcagtgtgaatgatttgatcaatccggaccgttttaaattctctagtttagtcatgattttagaaatttcgatagcggtttaaactaaatagatctgtataattattttatatatacataatatgtattttttttttgaaaacaaatttatgttaaatattaatattgagtttatattgttacgataataaatttttattgttatttatgtaaaaaaaaataagtaattattgtaaaaaaaattagaacaactacgaaatacaaactatggtttcgaactaaaccaatatattttgaatggattgatttggtttggttttgaatttttaaagaactgtaatgctagtttggtttgaaaaaattgaaaatccgaacctaaccataattatgtaacacaaaccttaggagttccgagaatccaatcacgtatatgatcacaagcagaactcgcagcagacagcgcactcgattgcttcctagcctttataatcgccgcgcctcgctgctgcacagtgtcgatgaaatccatttgcaacctacaaaacaaaaaaacaagtcattttaatgaaagaaaactttgcatggaataattttgttaagatagataatttgagccctaccaatgatcatcatgtacaagttctttgacatgtttttctccactacaagtgttgacaatggcatgattgggatcaggatattgagttgaagaatgattgccccatataataacattcttcacatcactaacatgaacatttaatttctctgagatttgacctaatgctctgttatgatctaatcttgtgagacaagtaatattcttttctgggattgaaggagcaaactctttcaagattagggcattagtgtttgctggatttgctattactaaaacctgtttagtgtatggtatgaaacaacattagattaaaataataatggcaagtgatatggttttctatgatcttgaaatgagatttcgaaagataaaaacacaaaataatttcgagaatttttgttattatggtttttatggcaaacaatttacgaaaaatatggttttttcttctttttcttctttcaattttttttaatctaaaaatgttaaaaatataggaaaaaaataatatgatgtaactggttaccttaatacatctagatcatgttattattaaattttattcgataaaaaaataattcagaatactattttgtactaatttaaataatacgtggcctaatttgttatttaacaaacagatgattcaatcagtaacttttataaaatataagattcaaaatgtaatcaaagagttttattagaaccttgcaatctggagcagcatgttcttctaatgctaaagcttgagccttgtaaatcgatacgtttttagatataacgtcttttctttccataccttcttttcgcgggattcctccgatcataatagcaatatcaacatcgttacaagcttcaacaacatcagtagtcgcaacaacacctatgaaaaacgaataacaaaagtaaacaaaaaccccatttagtgtaagttttataataattatccaaacagaaataaataaaaagtcaaaattttagtagaaacttaaccgaacagaacataaaagcattacccttaagtaggggaaaagcagcatcaattaactccattttaacacctttcaaagcttcaagagaaatatcaagcaagtgcaagatcacaggctgatcaggaccaagcatggctccccttgctatcattggaactatagcatacccgatctgtcctgttgatcaaagtttcaaaattgtaaatcaacaacgatatgtttaatttcgatgttatttttatgttgcatttttacgtagtttcaaactccaactaat

SEQ ID NO: 259940 - DNA, 654 bp, Cannabis indica
atacctaccacgaagtctatagctatatcttcccattggtatattcagtggttgcagcaaccttgcaggtcgccggtgctcagctttcacttgttaacacgtaaggcactttgcaacatactcagcgatgtcattcttcatgcctggcaaccaaaacatggctttcaggtcctggtacatcttgtcaaccctcgataaactgaataaggagtcatgtgagactcatccatgatctctttcttgatgttctcatccgtaggcacacaaattcgatttccaaatctcaacattcccgtttcatccactgagaaatcactagccttcccagccgaaaccctagctcgggtttctatcaattccaaatcttgcttcatagaattcaactaactctgaccttttctactcagggcatcagcaaccacgttggctttaccagggtgataaaggatctcacaatcataatccttcaccaattctagccaacgcctctgcctcatattcaagtctttctgggtaaagaagtatttcagactcttgtgatcggtgtatatctcaaatttctcgccatagaggtaatgccgccaaatctttagcgcatataccactgctgcgagttctaaatcgtgagtagggtacctctgctcgtactccttt

SEQ ID NO: 259941 - DNA, 1475 bp, Cannabis indica
gctcgtgacccggcacaagaaatggaaccagactgggaccccagattgggatccggatctggaccaaggtcttggacaaaactcgtagtcggtgtctggattttggacccagccgtggacacgaaccgtgacaaggacccgaacccacacccggacctgaaccaagccccaaacacaaaagtgtacccgaacccgtaccctgtgacccaaaaatggaaccaaaatcggaagttgaccgggactggaactaggacttggactaggaatcataacttaaattggacctagatccagaactgtaaccgcacaaggacctagactccaaatcagacctagacccgaattgggagccggacaaggatcgcaacccaaacctggactcgagacccgaacatggaaccagactagggtcacagaacaagggtcatgaccgagaaccacaccccagtcttgatcccgaacccaaaatcaaaagtgggaactgggacctgaaccagaacaagaccgacacccgtgatagtgatccaaatcttaactcgggattcagactaggaccaaaacccagacgaaaaaccaaaccagaacccagacattaacctgggacccaaaattagaacctgaacaagaatcgtcgaaccaggacacaagaataatactagcacccaaacttagaaacgaacacagacctagcctcagacccaaacagagactagaactcgggcccaaacacggtcgtgtacccagaccggaactaagatccagacttggacctaaatctgggacaagatccgaaacatagacatggacctagatagtgatccggatacgagatagtgatacggatacgaacctggactcggaccaagaccatgactggaatcgaaatgctggacctagatttggacggagatcctaacccacacaaaaacttggacccgcactcgagacccgagcttagacctagacccgaacctagacccagatcggggtccagatctggacacaaacccggatacagactcggacccgaactcaaacacctactcctagaatcatacccaaagctagacccggacccggacccaaacttgaacccggaccagcataagaacaaatgacttagatccagaactgaatcgagagtcagatcgggattggaacttgggactgggacaatacctagaccaagacccaagacgcgatcccacacccgaagcctgatctggacctagactgaaatctggacccaaacgcaaacttagaccaggacaagaactccgacccgaactcaaacccaaactcgaactcagaatcgcaaattgaactagaaccgaagtagtactaggacgaggaccaggacctaaacccaaaccaaaaccaagactaggactcatacccgaaccaagactggacccaaacccacacacgaaccgggacctggacccaaaataaggatagggacctgggaaacagaa

SEQ ID NO: 259942 - DNA, 3429 bp, Cannabis indica
gagagagagagagagagagagagagctgtgattgagtgttggctcgggctagtgagttaatggatgttgagggattccaccatgtatgagttactgtgattattttcttgtagcttctgagattaatatctctaattctcattatcaataaagattggtggcaatactttcaaactggaatacgaccacgttcacattaaacttaggattaaaactagtataattctcgtgtgttgttgtgtctgacaactatttagattcatatgtgttatttttctagtttaatgtgtctgttgggttttagttcttgatttgtttgttttaatttaatttttatttatttaagtgtgcttttaaacataaaattataaaaataattcgtatgcatcagagtttaatttcttataaaatagttagtgttttctgagttttttttttttaaaaaaagaaaaaaaaaagaagcttttttagagccacaaagacttctagtcacttctactcaaagtcttatttttgggggagtgccatattatgtacaaattttcttgttttggtacaaaggtcaaaaaaagacggtgatggagaatcacatccgttggattaagtaagagaaagatgatgaaaaagttggttcttgacatcatgattagatatcgaacggttgaggttgtcttatctaatctatctatgcaaggctgtcataaatgcacaaccgcaacttttaaagctaccgacgtggaatgacaaagactgaagagagagagaaacgaaacgagaacttaacggtaaccgtagttaatattttatttatatatatggtctgatggaccgtggttcggttacggcgctggtaacggcgcgggttgggagccaacatgtcacgtgagcgggcacgcgagcaatacacgctctttaattgcggcgccagtgctgcgatcacaatgtttttgaatataatgttgactcacgctctctctcggcgagtggaacacgattacacgttttttacaatattctaatatttatatatatatatgatccaatcagaggagaccttaataataaatgagtacttgttaattatcaaatttcgattttaataacaataatataaaaataagcatctgacaatctaaattgaatcaaattaccttttcaaaaaaaaaaaagtctaataaaactatcccaccccaaaaaattcataaattaccattgttttttctaggtgggagctttgagtcttagctaaaacaaatcgaggaatcaaaaatttttctaccatttaatatttgtaatttcgatatttttaaagattatgtgttgtaaatttttgggcttaaaaaatattaagactacaagagaattgtacagtgtttataatatttcttttggtgagaaaaaagaaaatcgcttatttgtcatatactaatatacattctcattgagtattatctatgtaatgaattcaaaatacatgaatatatgaatttaaaaaatgaatatttcttagctgaaatctgacacactccatcggattccttgtttcatttgttttgaaatggttaattttggtcttatatttataaaaatgcttttgtacttcctactaaatatattaaatgtttttccaatgtaaacttcttattactaaacatggtgtattaaataattaaaatcacgaattttatgtcttgttcatggactgtttcgcacgtgacatgtttcacactgtatgcagtatctcttatttgtttttgttgcatttttttccctgtttgtttataatgtaacaattttttaaataaaaaatagagaaatgttttcatcaatatttttgtcatttttttatacatattgaggacgggtgatatattaaaattttgcctgtatatatttttgttattgagtgcgaatatattcttaattccttaacatttaactctcaattaatcgtgacggctatgttagcataaagtagatttgtgagatttaaaatgaaccacgaaaatattttctttttaataaaaaatgaaccacgaaatgttatttggctgtaaatcagaatatataactctcaccttgttgttcttctaaatatgtattatacacagttatatactttttaattaattaaattaatttaaatttgagacaaaatcatggcatactgtatgcataaatggttaggtgaatgttttgagtgcacatatatttactcattattattttactgtagtttttgcctaacttttgaaattttggtataagttatagagtgaaaatggactaaatcttaaagcaaaagcaatgcttttttttttccttttctttttctatactaatattattatttacggatgggagaagtgctatgtgtatggccaattggccatgttgcatgcgttgacaaacgtttgcttcaatatctcagatgacttaaaataaaaaattgttgtgctatacaatttgacattttgataataatacatttcccacagttacactatatatatgtactacacaaaaataaaataaaatttataattataattggggatggctaggccaaatacatataattggatccttctcaccctctcctcacgtttcggttggaaattaaattaacaaaatcatgatatatacaactggcaatggcatgacatttatatatatttgacaaattaattccaaagacttcaaattagaccataaactactcttaagattcaagaaacagatttggataatgattctcttcattaataaaatgagcccttgctcagttttattccgtgcataaatcataataactaacagccttacacagttgtaaagaattacaactaactgaaacattaactaataactacaaactgttctaacaggatatatatatatatatatatatatatatttatattagtctttttttttttagtaataatcagtatcctggaggacctggaccatgctagctataggtgtttttattagacacgcatataactaattaaggagttctctatactaattttaagttatttatttttttagaaagggtagtgtaatcagtaacgaatgacaaataatactacttaaagatattatataatatggtcaagtaaaattgcatagtctaagtcaagcttataagcacgaggcaatattttttccttctaattacgaaatatatatatgagtgttacgtacacgaaccggtgttgaagaatatgatccactatacatgataaatacacactcatttatatatatatatatttatatgtgtacatatatgagttgagtattaatgattacaatcaaaacataaggatacattttattataatctgttatacaattgattaaatggtaaatttttagtatttttaagtcaataattaaattatatatttaataaattaa

SEQ ID NO: 259943 - DNA, 846 bp, Cannabis indica
aacctacttcactacggatgaatatttaagatattcaaactccactaagcatgcattgataactaattataataacaaaaggttagtgaatgtatatacctatagcaagttaaaatccgatcaatatcgaaatatattgaacctcaaaaattagctaacaacctacaatataatgcaatacaacgaaattagaattttaattatttaattacttgctagttattaaaaaatgtaacaagttacaagttactaaattctatagattaatttttttaaaaaaataacatatacatatatatacatatataatcaattatatatcacactaacataattttaaaaactttatttctaaactaattaaattcctactacctcattctcattcacaacaaatatatacacaatacaattatacaacatccacaaataatatatacacaacatatatacacacacaatatatataaacacatatttaataaaacacaaaatatataaatatgtattatatatcaagttaacaaatatttaccttctaaacgcaatccgacgataaattgcgacaaaaatctgaccacctaacgcacacaccaacataaattaataaaatggaaaaatcccaaaaataattacaaaaacgaaaataaagcaatgtacattaataaaatgaatagaaatcatatttataccttaatggacgttgagattcaatgttttctccactaaaatcggtggctggagttataccaccaccttttttttaataagttcgggcacagtgaaataggagaaaaaactaaactttattagtgtataggtttagatattaaaaatgaaagattt

SEQ ID NO: 259944 - DNA, 720 bp, Cannabis indica
ttgctattcttaaagatttacaagttggcattcagcgaaaactacaatggtatagtactgaatatgattatcttaaagctattcagttgatccaaaggaaaaggcctatcaagatgttgacaaaatactagaccatattcgtcattcgatttgagaatgtagttgggattttcatttgtatatcatgaagcaaataaaaattctcacacacaaaactattgtcatgcaaattggagttaatctcctttgtgctaatctcgctttacactaacattcaccatgatcaaatgaaatttttttacacattagacttgtgcaaaaattacatatttatattatgctattcaatgtgggcaattacaaaatagccaacttagtgtgtcacttaaagaaaagggtggttggtattagtaattcaacttagattaacgattaagagtacatttgggtttggaagtaaaaacaacgaaaataattatgttttaattgcacattggaatgacattttcatttgttattggggttggaataaccattccttctctaaaacggtgaaaatgtcattctaatgctttaaatttatatccaaacacagaaaatgatggatcaaagattcactttcgattccaactccttatctccaaacaacccaatgcctaaattaattttcatgtgggtttatgagaaacgccattaagttgccgaaggatcgtttatcac

SEQ ID NO: 259945 - DNA, 607 bp, Cannabis indica
ttttttttttcctctctaataacacatgtattttactaataacttatgatataaagagtagtttgcgatataaatacttaagtttaattttcagttacaaataaatacataagtttaatatttgacagtaataatatttaagttataattttaaaacttgtgtgagtatctggttaagtaaattgccacatggtaatccctaattggtccaaatcattaaatttttattatttaaaaaaaattagttcaaatataccaataaaataacacgtggatttaatagcttaatatttaacggttagatacttacagagttccaaaaatataacttaggtattattaccgctaaaaattaaatataagtatttatttataactagaagttaaacttattaagtatttataccgtaaattactctaatataaaataattgtataatatttacgtattatatattaattttatttatttatttatttatttatttttagtacataacacacaatacattacacgtaatcctaaaaaagtttaacctaaaaaattcctctcagccgcaagcaactcaccgtcgattcccacacccacccgatttctccctctcct

SEQ ID NO: 259946 - DNA, 2450 bp, Cannabis indica
tggctcgataacaatgaaatcatcactagggttaaaagagtcactacttcaagtaccactaagtgttgtaccacataaattatgcacttaaccatactagtgttggtaaatcatattgtactcattgaacatcatacactgtaccaatgcactcaataccactaccgtactagtgttggtaccatacgaatcacataattagcatgcatatattacacatacacatattcatatataaatatgttctatgctaatcttaccttgtttttcaaatttaagtgtgttgattgacctgaacagaaaatcacgcgctaaatggatgccctatgtaacattcacgtaaataggtaaacaacttgctaaaatccttttcagggacctaaactcaaaaataaaagtttccctatcgataaatagcacgacaatacgctaaatatcaaggaaacaccaaaactaaggctctaaaaattgtccaaactggttaaccgaatttttggggtcctgccaagtgtgaaacggttaatcagttctacagttccagcagaaccaattaaccagtttgtagcagaaaaccccaacaatcctgaaactcaaccaattttcccccaatttcaatcaaaccttccagaacacctgtaataaccttgaaaaataatttctaagcaataacaccaagaaaaatgcacaaaaactaaaagtgtcattgttgagccaagtttgagttttcaaactcaaacttgctcaacctcttctcaaaccaacaaaaccaacaataatcaaccaaattctactcaaaacaaactcaaacatttaactagaataaagcctaattctaacatcacctaaaaccaaatattacgtatttcatatctagcatgcataatactctttacgtttaataaaatctctggaattgaaaaattatacctctaatgtccgtttctaaaagtggggctcatattaaatataaaatcatgtataattataaaatttaaatataaaatcatgtataattataaaatgtaagtcattaatgctaattgcatttactaatccataaactaatcatgcggtcattacaattatccccccattaaatagatttccttcgccaaaactcacctaaataactttagatattgggccctcatactagactctatctcccaagtggcttcctctaccttactgttcttccagagtaccttgaccaaagttatgatcttatttcgaagaactttctccttcctatcgaggatttgaactggttgttcctcgtaggataaatctaactatagttctaggactttgtatctcaagatatgagtcgagtctgacacatatttcctcaacattgaaatatgaaatacattgtgaacaactaacaatgctagtggtaaggctagtagatacgctacttgcctaactttctcgagtatctcaaatggccatataaacctacggcttaactttcccctctttccaaagcgccttataccattcattggtgaaactcacaggaaaacatgttctcctgcctgaaatgtaatgtctctacactttggatcagaataactttctgcctactttgcgaagctagcatctgagccttgatcttgtctattacctcattgattctttgaactaactcaagacccaaatacttcctttccccagtttcatccttatgaattggggatcaacacttcctgtcgtacaacattgcatagggagctatccctattatactttgatagttgttactgtagggaaattctatcaaaggcatgtattttctccgtgaacactcaaagtccatgacacaggctcacaataagtcttctattacttgaatttttctctctgactgcccctcagtctgaggatgaaaagttgtagtgaacttcagcttcgtacccatagctctttgaagacttacccagaactttgatgtaaactttggatccctatccaagataatggattttggagctccatggagacgaactatttctttcacatatagttctgcacactaatccactgtataagttgtttttactggtagaaaatgtgttgactttgtgaaatggtccactatgacccatactcagtcatacatccctgttgttctgggcaaaccaaccacaaagtccatcgtcatagcctcccacttatatttaggaagtgctagtggttgtagtaaccctgctagtttttgatattctgcctttatttactgacatgttaagcatttagacacgtattccactacatctttcttcattccacaccaccaataatagggttttaggtcttagtatatttttgtggtacctgagggtgatgaataaggtgtagtatggacctcatcaagtatctcttttctgagctcatcaccactcggtacacaaactcaagccttgtaaagtaaaattccattattcgag

SEQ ID NO: 259947 - DNA, 912 bp, Cannabis indica
gtgtgggttcgcgtcctgggtctttgtctaggttgggtctgcgtcccaagttccaatctgagtttggattcaattcttactctaagtccttggatcttacccttgtctgggtacgagtttgtgtcacggtccgagtctagctttgggtctgattctaggtgtgggtgtttgagttcgggttcgagtctgtgttcgggtttgtgttcaggtcaagaccccgatatggttctaggttcgggtccaggtccaagtttaggtcccgcgtgcggttcaaagtttgggtctcggtcaggatctttgtccagatctaggtccaacatttcgattacagtctgggtcttggtccgagtccaggttcgtatccagatccctatctaggttcaagtctgtgtttgggatcgggtcccagatttacgtccaggtccgagtctcagttccggttcgggtacacgcccgtgtccgggcccgagttccagtctcagtttgggtttgagtctaggtttgtgttcggttcttggtcttggtctgggtcttggtcccggtccttgtcttgctctatggtccgggtacgacgattcttgttcaggttctaatttttggtcccaggtctgggtctgggttcgggttcagtttttcatttgggctctggtcctagtttgagtcccagatctagacaccgaatactggtctgttccaagcccggttacccgaatcctgagtaaagatctggattactgtcacgggtctcagtcttgttctggttcaggtcccaggtccaatttctgagtttgggttcaggaacgagactggggtgcggttctaggtcccgaccttggttctatgtccctagtctggttccatgtttgggtctgagttcaggttcaggttatggtcccgagtccaggtttgggt

SEQ ID NO: 259948 - DNA, 1138 bp, Cannabis indica
tttagttcatcattttagaagttcaattttaggttgttaaatcaacatacttgtgagtagatctatgttcctggtaaaatatatttccaacactaggtcccagtcctaattctgtttcctaggtccctatccttattttgggtccagatcctggtttttgtgtgggtttgggtcccggtctaggttgagattcgagtcctagtctcggtttgggtttaggtctctgtctgggtcttgatcttggtttaggtcctcctcctagtcctagtcctagttcggttctagttctatttgcgattctgagttcgagttttggtttgagttcgggtcgtagttcaagtcctagtctgagtttgggttcgtgttcgaattgcagtctaggtccagattagggtccgggtgtgggttcgggtcctgggtcttggtctaggttgggtccgagtccaaagttccaatcccgatctgagtctagattcagttatgggtctaagtccttggttctgatcctggtcggggttcaagtttgggttcgggtctagctttgggtgtgattctaggtgtgggttttagttcgggtcaaagtctgtgtccgggtttgtgtccaggtctggaccacaatctgggtctaagtcctagttcggtttctgagagctggtccaagtttgggtatgggtcaggttctcggtcctgatttaggtcaagcatttcaatcccaatctaggtcttggtctgagtacaggttcatatcaggatccctatctaggtccaagtctgagtttgggatcgggtcccagattaggtcatggttcgggtctcagttcaggtctgggtacacgaccgtgtctgcgcccgagctccagtctcagtttgggtctgaggctacgtctatgtttggttctagatctgggtgcgggtcctggtcacggtcctagtcttattctagggtcctggttcggcgattcttgttgttctaattttgagtcccaggtctaggtctgggttcgggtttgtttcttcgtctaggttctggacctagtctatgtccaaaatatagacaccgactcttggtctattccaagccccgttacctgaatctcgagtcaagaactggatcactgtcacgggtcttggtcttgtt

SEQ ID NO: 259949 - DNA, 457 bp, Cannabis indica
atgctaaaaagtaccagtagtgtttagtaccttataaagtgtcatattgctattggtgcaattaagtattgagtcctatataatttaatataataacttttaggagatattgttaaccaattacaaggcgccacttctaggtagtgctaggcactactggtacccaatagcaatcctctatatattaattagggtgatacttagtgggatgctttttaatttgtaatcttttgtgtatatggtttttcatcccataaatctatgatttttagtaggtattattagttatggtactccatagaagaaaggcttaaccttgatccaaatagtgatttgaagctactcaatatatggctcacctcatggaatggcaggtttttttcttctcaaaatcagctccttcaccaattgggcaatggagaaattgtgtttggcttaatatcaacattatatatat

SEQ ID NO: 259950 - DNA, 687 bp, Cannabis indica
ttttttttttttttatatttaccctttttgattcgcggagacaattaatttttgtgctaaccacgggactggttgtaataatagtaggccttttaccatttccttctggagctttatttctgatttactagactttttaggggctgggttcatcttgaagtacatggttcaaatgaccactactttaaaccttcccattagtttttgccttttttagtcgatttggggatcatccatggacttaaacttcttatccctggagccgtaacacttcttcctgctaactaattactcgctcgggagaaccactcaccaagtgttagcccagagatgatttcctttgtggaaggggggaaccttcactcttttaacatttcccaggctctcgcacctttacgaagttgggtttcaggagtaatgcccgcggttgtcccatatcgatttttaggcatttctcttacttcgatccttgtcagcatgaagttttagcttcttgcacaacctaacaaacagcttttaggaactccactgagatcagtaagaaagggattcaggcaaatttttcttttcaagaattttggccgaatacgcatctcatctctagatttacacagttttaattttgaagaaggaattcaagcatgttttaccttctgaaatttggttgaaaatagttcttatctttgg

SEQ ID NO: 259951 - DNA, 1502 bp, Cannabis indica
cgggattaaaggctgccttgccaaccagttgttcaaaaaatgaaaaatacattccaagtttaaagaccgcttggccggtgaccttgtcttaaaagaaggcctattggccgaatagatataaaagaaggcccttaaacagtaggagtccaaggatccttgtacgggtcagctggatttgaaagagctaggggatcatcattctaagtggaaggagcctcaacattctgatcggtaggagaagtggaagtgcatgcctcgtgctccccataggtcgcctgagcagcgtagtagtcgagaaacatgtctttggaagcgccgagatagtcaaagtttgctttgagattggccttccaaaagtcataaaatatctcgagaccagctgtctctaacgcattcaccttctccccaagccttaccacctcggacttctggttattaacctcagctttgagttcctcctccatggccttcttttcaacctccagcctgcgaagaagggtccggagatcctctctttcttcttggagactggtcacttcctgagataaagaagcaatattagcctcaagctgtttggttgatcgcatatcctacagctccttggtcatctcgacaactttgatctcagctgctaggagtttcttgttgacttgtcccagctctatccgcacagctccatgttgaacccgggcatccttggcatccttcttggccaagtccactttcgttcgcattgtgttggaaatggcaaggttcttagtagcaaccgacttagctcgggaataagcataagccatcttctaaccagtctgtgcaaaaagaagacattacaatccaaactagttaaagagaagtgaaagggaaatgttagaaaagacttacccgtgaagtcattgtccgccccagccaactttttgttcaccttagggaccgacaaactcacatagtgggtgatcatatctctgcctcttttcgtctcctggggcaatattagaggtggggcaggagccttaacttgtttagacccgcttctgatcagcccggatcctccctttgcttgctcagattctccgaactccctcctcaagaacctttagatatagtaattttcgggacaggaaggtccacggcaggtcgttcctcaaaaagatcaatgacctctctagctggtgccttctctttggacggagtctcaccgcctttggatttcttcgccggaggggacaagttcgagcttccctccactctctttctcaaagcctcaatcattttctgagacatttctgcacagaataaaaacaatatagtcagaagaaagtataaaatatatgaaggcattaaaatcaagaaatgcaagatgtagtactctgcacgctggcaagagcatttgcccaaacaagcacggacgaagcatcatcatccgaagaatcttcctgctcttccaagatggatttcccctttccttctacaggggtggatggccgagcaggtagatcaggctc

SEQ ID NO: 259952 - DNA, 663 bp, Cannabis indica
tctttagaacaaaaccatagctttggtcaaagtactctggagaaatagtagggtggaggaagccacctaggtgttagaatccgacatgagagctcaatatatccagagtttttcaagttatattttgaggatgaaatccttttaaagggggataattgtaaagaccgcttagctttaatttagaaattagcagataattagggtttaattatgaaacttgtttattagtctgaaattattttatttatgatgatttatttgaattgagaatgcattttacatgtcatatatagaattttataatttcgcatgttttgtgcccgaaaatattagaacacggtgtttggcaattagaatcacatctgagtattttttagtgtagcggggtagtatagttagacatttagaatgtcgagattagttgagattatggagttgaccgaaatacccctaagtgtccttttatgagttttagtgtgggaagggcaaacatgtcattttgcctaattgagttttgtcttttgtggattttaattaaagttcaataatataatttttagttatattttggttggaattaatttaataaaaaaaacaaaatttattacatttttacaaaattggaaaattcttgataaaaaagcaaaaactctctctctctct

SEQ ID NO: 259953 - DNA, 608 bp, Cannabis indica
tttttctaattgatgattttgattttacctttattagaacaaatcaaattatctttattttgcaggtttgaagtcaaattatcttttaggatggtctcatcttgttgtggtagattctgaaggtaattctaaattaaaatctaaacttgaatggtctactgaagatgataaattgtctgcttataatagcaaagctttacatgctatatttaatggagtaggtgaaggccatattaagcttatatcttcttgtgaatccactaaggatgcttggcagatccttcaaactcggtttgaaggaacttctgatgttaagcgttctaggtttattatgcttcagacaaaatttgatgatcttagaatgtctgaatttgaaaccttatctgagttttatgaaaaattatctgatatagctaatgaatattttgctctttgtgaaaagcttgatgaatctattcttgtcagaaaaattattagagttcttccaaacaggtttgacactaaactcttggctatggaggaagcaaaagattttagcaagatgaaggtggaggagttaataggttctttgcgtacttttaaattgaatcaacaaatcaagcagaagg

SEQ ID NO: 259954 - DNA, 1846 bp, Cannabis indica
ttagttacttctcttttactattcccactcttcttatgaatgttattacatacagaaaacttatatttttatacttaatttccttacctcgaatgtagagtcctagccttgattgtaatgagaatgatccttgagaaattattttcttacgaaaaacctaaatttcatacttattaatcaggatttatcacaatggtacatatatatataaagcctaaccttgaattaatctacacatctcaaaagtaagataacatgatcaacaaaccttaacttaaaaaaaaactctagtcgaatctatgaacaattattgaccccaaaacttgtagaaattatccaaatcaaagaaatatcgagaaataacataacgatagcaatgacgaggcttgtttaagatattggtgatattgagaggataatgtcgacgtaaggaagaagagtgaaccttgaatgattgtagtatttgactattagagatgacaaaatagaagtaaacactaaagtttagttttaaaatgatgagaggaaaagatatgagaaaagtcaagacttggggatgatactatagttttggctaggtgagctttgggttctgaatgagtgagtaagtgaagactagagtcctctatttataggaccaaaaattcattcgtgcctttttttttcaaactcaaagaacctttattctctcaactattccttcctctattctctccaacatctttgactgccactgataacaaccacatacacactatccacatcactcacctagactctgttcctctattcttgtaactaggttcggtcaaagcttcctcaaaagtaatttctttcaatacttggttaagagcttagaaggaaaactccacctctttagcttgccatgacacctaagcaataattcaaaatttgaattgtttttcttatttcactacatgtaaaaagaataatgagactaacaacttagtcttattttttgtatctaggttggactatcactcccttgttaccacctttatttaaaagattgaaactaactagaaaatacctttcttatgttaatatgccatgaataaatattcttatttaaatccctatattactcaacaaccatacatgaacacctctaatgattagtattagactaagtctcctctattttaacttatatgtatctccataagtgtacacgtacaagcttattaggctctctgattttattaattaagtcccactaagataatgtaactaagagatttcctcatgctccatatgcatgtcctatgtaacaaattaaactctctcaccattatttatttttaactcacgaatcctataacctttactactccttagcctttatttcatttaatgatcaaataaaataataacatgcctaaatctccgaatatcactgtgccactcattatacatgtatattagacgatgagaatccaacttaaatattgttcataaccattcctgaaattaatagtcacatgttctcaccacttagttattgtgcccacaatcatctataaaagtctaatttattaaaagtacataattttcataacttaaagtaaaactattcaaataaaatattctaaaaatccactatctccatatcgagttaacaaataataataataataataataataataataatagtatatatgtaatatagtagaaaatagtaataaaaaaattaggtcattacaaaaatagatactttttaccctaattggtgttttcttctttttgttgagtttatgagagggtaataagttgatttttatgctgaacatattaggtaaacattaagttttattttacatta

SEQ ID NO: 259955 - DNA, 270 bp, Cannabis indica
agtctcttaattaacaaacaaaccccaaaacactatttattcacaatcaagccataacatagtgaaaattcataaactaagacattagtctaattttagaattacaattgattaattaaaatatgatcctctatagatgatctacattgcatagggataaaattactattataccctttcaatgtattttatccttaaaatacttgaccacctataaatgatattttagagaactaatataatcactaaaataagatctcaatcatttat

SEQ ID NO: 259956 - DNA, 658 bp, Cannabis indica
tctatgtatcattttttaagaaaaaaactatttttttggtgaattttatttttcaaatttttagtcaatgactaagaaaaaatatcaataaaaataatctatgataatgaaaaaagaaaatacaagaccatagtcctattatcaactttttgacaaaaataagaattcaaaattttaagttttaaaaataaggaatcaaaatagtgtaattaaaatacatgttcaaaatggtgtagatttttgaactaaacaaaaatttatttgcatacaatttataatttttataattaaattttaacatatcaataacagaaaagaaagattcaaaagttaattttaaaattttaaaagtaaagaatctaactaaatagttgacatggattaaactgctcattaatctaaaaatttttcgccaattctaacagtgtggaagttattataatgttaagaagataactcttaaagaagacatgttcatcaataagatgactattcaaacattgtaagagactgaatggagtgatatggtgatgacaatagatgagatacgatatttaatgaaacaatgatgacaatgagcgagatacgatgagagacaatgggtgagatacggtgataacaataggtgagatacggtgttgaatgattatatttaaaa

SEQ ID NO: 259957 - DNA, 692 bp, Cannabis indica
taaaaatacttagcttcctataaatgatgtttcagtgaactaatatataatcactgaaacaagagctcttccatttacctctattaagccaagctcgaaggaaatcatcgtttcactcctatgtcttgatagaagctatagaatacatatctatgtttagcgctcccactcaatcacactaccatgttcccaaaatctacgtatcaccctgactagaaagtaggcttaactaacaaatcaaagaacatgaatagcactcttgagattgaaccaaaacaggtcaggattaagatctttttatctaagatcaaccagtgatattgacttagaatgatataacggtaagattataatatctttactaagatcaatatcggtcccagtccaatgtatactccatacatccaaaactagcatactttgtcaatgttcatgaaagaacataacacttatgcaaagtgtaagtgcactttatcgctgattatcacatcagtgtaaatccagtgcactgatgaatcagggactttgtcttttgaagcatataatcacaatcacattccactgtgttgacatcactgtaattgtgaatgactgtgtaagtgttgttattttgtgacagattagttaagtacaatgtctagtcatgtgtggagtttcagtctgttatatctgcactagggaactgttaagtc

SEQ ID NO: 259958 - DNA, 706 bp, Cannabis indica
taatcacaaactgatttaccctttcctgcacagtagagcacacatgagtcaagcccagcaagacaacataaataacaatataccatatattcacaattccaataaatattgatgccaccgcatctactgtctatatagcatagacctacgtgttgctctcacacgtctatttacaataaggccttagattgatttatctcggttcatattaatgagtctaacctaattatatcttacccgcataattctttatttcaacatataaagcatggcattgcattcaaaatcatttaatcactagattaataaccctagaccatataaccgctcaccttagggtaatagccctaatcccagttcctcatttaatcacaattataaaatcaaacatgagtgccaccgcgcttaactctacgtgctaactactgtcttatctgatatcctaagcatgtggagattccaaacctccatatgttcctgagcaagggccggtaatcctagtaacaatttcaaggatttcacaaatagggttaatcccaagatcacttttcacatattcacataattggatttcaattatagataggcatatagagctcggaccgagctttccaacgatataaagaacatcccaaacggagtcccaagtcaaaagttatggcaaaaaacaaaaactcaaaaatttataggaaagcacggcctcgcg

SEQ ID NO: 259959 - DNA, 703 bp, Cannabis indica
atattttagagtcttaatttttttaattatttttaactcaataaatgataattattaattaatttaatacatatatttctataaagttagttttcaaaatatatatcctttacataaattaaattgttggataaatattatttttgtgtgattaaacttatattagaaaaaaaaagaattagaaaaaaaactataacaattgcaaatctataaaaaattcatcaaatttaaaataattgtcatcaccgtatcttacttgtcactaaatttaaaattgttgtcatcaccgtatctcacttgtaatcgtcactatcttaaaaaaaaatataacgattgataaatttatatgtatatatatatataaaataataataccaaatagagagaatgaagagaataaatgataatataagaataattaatttaaattgtaagataatatcatgcaattagaaaattcttttgaataaactttcaacaaaattttaaaaggtaatagattattttaatttgtaaataaaaaaaaaaaaataataagaaaattagaaagaaaaaaatatagaaaatagataaataataaaaaaaaaataattaggtgtagatattagtatatatatattttaatgttatattagtatgactatagtaactaaaaagtaatttttttaaaaaaaaaatattacaattcacatttaaattcatt

SEQ ID NO: 259960 - DNA, 3189 bp, Cannabis indica
gtcgagattttagaatttcccaaaatacccgtaagtgattttaagatagtttgttgtgggcaaggacattttggtcttttgcccattttgtgttttgtctttatgtgaatttatgtagattaataaaatcagtttttttagtgcatttggctgagaataaatcaataaaactaattttatttcattctttttactaaaaataatgaaaaaaatagggaaaaaaagactagaaaactatttctctttcaactctctctctctctctctctcgaaattcctagggctgctagggttggtattttctttagtttttactctgaatctcagctggttgttagtgatctcaagctaaggtatactcttttaaacttctactcttgttttcttgaattttaagaaaaagaattttccatgaaatggagtttttagttgttgttgttgatgtagtggttagatgttgtttttagaggtttagttatgttagattatgtttatttatgcttcatttggtggttgttgatagatttcaccaagttttgagttttagaactcaaacttggagctttaatggtgattttggattttgagcttgggtaatctgtttattgcttggaaatgatttatttggggtataatatgcaggtctgtaaagtttggttaagtttggaatcgatttgatttggctttgtgattttttgggttttctgtagaaaactgggtaaccagttttacaggtacctataaaaccgggtaaccgattttgcagcagggttccccgaaaaatttagctcgtcgattcgtcctagtttaaggtgtctagttggttgattccctgctagtttagggtattgccatattaagttgctgtagataggtttttggtttaaaacctaagtctcatttgtgatttagcgagtcacttatctatgttgttagcgatgtgatttaggaacctataattcgccgagcagttgttccactcaagttgaccgacacacctgaattcagaattgaggtaagattagtataatgttatgcatatgtttatacatgtttagcgtacatgttagttgccgtcagaataggcaaatctatagccatcagattatcatatcaaggcatcggtgaggtgtacatagagatgcaccgagatgctaacagatatatgctaggctattagatagtatgagttatctgctaccacatcagtacgactagagtaccgactataggagggattcgcagttagtcatactttgtcgagaacattcctgactcaattagggttatggttgggtgtatgggcgcctggatataatctgggatattattatattttatgttatgcttttcttactgagtctatgaagattgtaggtaagggcaaagctaaagctgaggagccgtgagaacgagcaggtgaagattgtacatgtcggggtggttaggcctggagcgtacgattgtaggggacatcaaggcttttgctgacagtcgctaggcgacaaaacttttgtattaaactagcaaacttttgtaaatgtattttgcaacgagatcccagaattttatggttgtattactttatatttttaattaagtatgcaaattttaattattcacgtttttcactaatctcgttgattagcaatgagctgtacagtacatttaaaatcacgctaacacgcctatgctagttagggtgttacaacaaatgtggccaataaagtcacaatcgaaagacatgtcacaaccaagcaattatataaagacatgacatttattttaatgttctaaatttctaagtgaactcttacaacatgaaaagttattttgatagattgctattaatttcccatactgaaatggtttttttaaggtaccattacagttgctagacatttgtttgccatgttaaaaatacattactgttaagattcctaccatattggtttcttaaaagtttcatacttttttaagttatatgagaactacaatatatttaaaacattcattataagttcataatatttttggtatagagattatgaagctttgccatactgataatttttttaacattgcataaaaattgctacacagttttgtgccatgttaagaatatactcctattaagactcctaccgtaatggttttaaaagttgcataatagcttttctttaaaaaaaaaaagttgaatgccaaatacaatatatttaaaatgtttattataagttcataacacttttggtgttaagattaagaagttttctcatacaagaatgatttttttaacattgcataatacttgctacacagttgtgtgaaatgttaaaaattatttctaataaaatttctaccatatttatttttaaaagttccataatagcttttttttaaagttgaatgccaaataaaatatatttaaaataaagttcataaaacttttggtgttcagattaagaatctttcccatactagaatggtttttttaaatattgcataacaattgctaaaacagttgagtgccatgtaaaatattcaatgttattaaaaacttgcactaacaacaaaaacattaagtcccaaattacaaaaataagaataatcattatcttaaaaaagattataatgagtcatacagaaattatactataacataaaatcaaaaataaaacaatagcatccataaaaaaatatttatcatttaacattaaaaaatcaaactaattcataaatcagttccccataagatgaccctacttcttgcctttaccaccctttgaagacttattatgcttctcatccttacattcaatattttcataatttttttttctgaccgtagacaaacaagagggcagcaagacaattgcagtaaacttcaatgttaaagtcattaggaacatctttgtcatggatgaaaaattccacaaaagcagcaacaaatgcgctacaatcactgttcaacaaaagatagaaaaacacaacaattaataaacgattatgccacacaaaaacaacaactaacttttttcactgagctaggagacttgcaatctctaccactcttagtggagctttacgatcagaacccaagtcaggaacaaatgacttatctttccgaaaccaagaagatcaaagaataatgggagcataacagaatatttttagaaattattttaccag

SEQ ID NO: 259961 - DNA, 845 bp, Cannabis indica
ttcttttgtccactcaaactttttattgcctcgcaatatgttgaagaccagtacacacttatcaattgactttgaaatgaatctgttaagtgccgccattcttcctgtcatggcctgtacttccttagggtttgttggggatgacatgtatattaatgccttgattttttcaggatttgcctcaatgctcctcgcgttaactatgaatcccaaaaattttccagaggagactccaaaggaacatttttttttggtttagcttcatgttatacttttttaatattttaaagcattccgtgaggtctgaggtatgatccttactccttattgatttcacaaacatattgtcaacataaacttgcatgttttgccctatttgatttacgaacatttcgtttactagtcgctgataggttgccttggcgttcttcagtccgaacggcatgactttataacaatagagtcccatgttggttacgaagcttgtatattcttgatctgggacatacatttttatctggttatatctacaatatgcgtccatgaaagacataagtttgtgcccagcagttgcatccactaagttgtcgatcttgggaagtggaaaacagtctttcgggcacaccttattcagatcggagaaatcaatacaagttctcaaaatttagtttggtttcgggacgagaacaggattggctatccatgaaggagaaatacctcgcgtataaaattgttgacttgcaacttgccaacttcctgttttagtgccccttgcctctcggaatccaagggcctcctttttgtctcttcgctaggtagttgggatcaacatttgagtgatggca

SEQ ID NO: 259962 - DNA, 568 bp, Cannabis indica
ctagttccatttgcgattctgagtttgagtttgagtttgagttgagtcggagttcgagtcatggtttaagtttgggttcgggtccagatttaagtctaggtcgagatcaggcttcgggtttgggttgcgtcctgggtctaggtctaggttgggtccgtgtcccaaattccaatcccgatctgagtttggatttagttctggatcaaagtccttggttctgatcctggtctgggttcgagtttgtgtcctgggcaaggtctagctttatgtctgattgtaggtgtgggtgtttgagttcgggtacgagtctgtgtctgggtttgtgtccaggtctggaccccgatctgggtctaggttcggctctaggtcgaagttcgggtaacgagtgcgggtccaagattgggtcggggtcaggatctcggtccagatctaggtccagcaaattgatcccagtcttagtgttggtctgaatccaggttcgtattcggatccctaaataggtccaagtctgtgttcgcgatcgggtcccagatttagatcctagtccgggtcttagttccggtctggg

SEQ ID NO: 259963 - DNA, 779 bp, Cannabis indica
acaattttctctattttatagatcatctttttctaaaatttgatcaatttatacattccaagtgtcgaaacttaaaataaagaaaacaagcatcattccattccaaaaaatcataatgaagaagaaaattaactctaaaaataacataaataataggcgaaaaatatcctaacactaacatgtatgttgtttaacaccctaaatatgaattctctaaaataatagaattaacaaatataaagtttagaaaaccatatactggtggctgcggaataatatgtctccttccactcagatctctaaccctcgttcttttctatcgcatagtattatcaaaatctgagcccgattctccttcaagtgttggattcttcacaatcttccgcactatgattgagtacttgacatgctatgggtaggcatgtactctttcattataggactcgaaatttatgaagaaaaagagagagggagattcgaattctatagaaggaggctcctaagtttcttgtaacgccctaaataattaggcacgctacccaagatacttacaaaatcctaatcccctaattgggattactaataagattagcgtagaaattaaactttaatataaacagaattaaaataaaacttgtaataatttaaactttacaatctaaaagttacagaagttgggatcccaaaaacatttacaaaatattattacaagtccttttctttcagccggcctaagcggcaaaacagagtctcaaaaatacaacactggtagaccccaa

SEQ ID NO: 259964 - DNA, 707 bp, Cannabis indica
tatcattaaatatttcgaacccaatatatatttacagcacgttttgctgattgtcattttgatgagacaagtttcccagctttagggggaggggaaaagaaacagttggaaaaaaattatatggaatgcacaatcattatctcaatttgatcctcgtacaaatcaatgtgaacttgaagttcaaagaataattcatttgcaaaatattgcaaatcaattaccagatgcattcactgacccaaagaaaattacaaaattacatattccagctgaaaatgctccagtttgaattgatgtcccagaaagacaattagctaatgattctaaagcacgcttgaaacgtggtagaccagtcagttccaaagataaaaatcctcgaaaaagaaatggagcaaataatcaagatgtccctaatgaagaggctgaaaatttcgaggaagatgttgacataaacaaatcacttgaagagattcaagtacctgaaaatattaaaaataatgagttctcaataaattatgtcaatataggaaaagaatggaaccgacttgaagtaattgtcgacaatatttttgcttataatgtagcgctagaaattgtaaatgaaaacgaggatcttgaacttaaatctatcaaagaatgtcataatagaaaagattggccaaaaatggaaagaagtaattcaaccagaattgaattcacttgctaaa

SEQ ID NO: 259965 - DNA, 2040 bp, Cannabis indica
atctattgtgacatattattttagtctgaaattgtaagttccttttatatatgagatgcttcatggacgaaaatgttgttcacccattcactaggatgaacccggcgaacgcatgtatcttggacctgaagctgtccaaagaacgagtgagcttatttaaaatatttgagctcgtattcttgcttcaaagagtagacagaaaaagctacgcatatccaaagcgtagagatgttgaattctagattaaggattttgtcttccttcaagtatttccaatgaaaggaattctaaggttctagaagaagggaaagtttagtcccaggtttattggtctgtttgagattcttgagaaagtaggtcaggtagcttatcagttggctctacctcctcgtttgattggggttcatacgtgtttcatgtctcgatgctttagaaatatgtatcagatacaactcatgttttaagttatgaagacatcgagcttcaaaccgacttatcatatgaagaacaaccagtacatattttaggcaggaaggaaaaggtgctgcagaacaagactattccgctagttagtgttgtggcaaaacaacaaggttgaagaagcaacttaagaattagagtcgaagatgcgggagttatatcccgagattttcatgtaaattttgaggacgaaattcctataacagagggatagttgtaatatcccagaaaataaaatgatagttaaatagacatattttattaaatatgtaattcttttggtaacgaagtaagattatgatcttacttagggtaattagaaagaatttatcgaatgattataccaagcttaatttattaattacggagcttatatcagaatatgtgggtatcgtggataccatttttgaaataaaatatttctttgggcccaacaattattgaattggacggtgtggttagagatgtcacgatatttaagaatcgcacagtaaaaattggataggttctttagagttttaggtcgtcaattttgtgggatagttaggtattatttaagttaccctaaagtatgttaggatttaagtgttaattgggttatgttttggaattattattataatgatttgtaatattattattattactattattatagttaatattatttattattattatttataaacattattagtattattatttgttattagtattagataagcataagaggtaacaagggttagaaaattcattacctcttccttccccttccattttcggctcaagaaccaacagaagtctaggagaatttcacttattttcaagctattttcttgagagaattcttaaccctaggtgttgcaaagtttaaggtgagttcctggtaacttttccttagttatttgagttttgaatgtgaattatggttgggcttttgggttttgaattgtggtgttgagttgagttcaaataatgtttttgggattgaattatgttcttttaagtgaattatgtggctattggtgtggagattacaagttttggatataaagcttaaatcttgaatttgtgtattgtgatttgcataattgatgaattatagtaaattgatgtgttggacatgttgtatttagtatgttatgctattctggaagtactatttaggtatgtgttggtattggttcgaattggggaagaaaaccaagaatttttttggtctgccagaaatcggtcgactggttggttctggtttaccagaaccagtcgactgattgcctgcaagggaaaaatctcaggttttcttcgaaccccgttttggctgttggtggaacctggtacctgtttttggttgtttatgagttatttgatctattttggacttgttgggggctaggttatatttagtttcgaattaggttttaattaagaatttcaagttaaggtattccttgagttttcaattgtcgtgacataggaccgcgttctcctagcttgtttttccacttaggtcggcccgtacgcttgagttttgaattaaggtaagaaaagtggtaa

SEQ ID NO: 259966 - DNA, 536 bp, Cannabis indica
ctcttgctgctcaagcctcactagcgtcgttcaatcgtcaccccagtgcctctgctcagtgctaaacggtggtgcgatgtcgtttggtatcacagtcaaccgaactctcgctctttccctcccaggcgcatgtaaagtcaacactccaccccttagccagtgtaacggtaataattaactaacaacaaataattatgcctaattaggatttttttcccgaacttgacatgtaccaaatcatgttccctaaatttttaaagtcgttaaaaattctcctgaattattaagattgttagatttaaggacttctgtttaatttcattcaattttactatttcagtgattgtttatgtactaaatcatgcttaaatcccctcgaactttgatatgcaataaatcacgtacgccgaactttcatccatgttagaattttttttctaaaattagacaaagtccttaaattcaacaatctcaatagttcatagggcatttttaacgaccttaaaaattcatggacatgatttagtatatgtcaa

SEQ ID NO: 259967 - DNA, 865 bp, Cannabis indica
tgaataatgattgatatttgatgatatagctgctgatataaacactactaaataatttaagttttttttttttgaaatgactaaataattaattaatactaccatgaattaataatacaattttaaataatcataaaagatggaaaggtgtggtagcagttgaaaatatattattacaacggcgattgcatacatagtcgtgatttaacatgattattagttctaataatgaaagatcattagtcgtaattaccaccgaatatattcctttttttttttcttacactcttgtaattaattaatacaagttcgttttttttttttttgtttgtttttttaagctactaatagtagtaactagtaagaatgtaccaaaatttcaatcgatacaagcgatactaaaatgataccatttagtatttactaaacatagcaaaattaaattacactgtcttttttatttttgaaaaggaattagactgtcttcattcttgctcaattaatcagtacttaaattgtaccacttaataagaaaattaaccaaagttgtccgatatttcacatcttcactcaaaagtcatatatattataagttgaattttataaagtaaaaatcatgtaaataatatatattttttttgaagagagaactcattcaaataaaaattaatctaataagattatatgaaagaaaaattatataggtcagagatctaataaaaaattaaaatctacttaacaaacacaaaagaaaaatgcaagataaagtttatgcattagggaaaaaaactcgctacgatatatttgcatattaataagctgcgtgaccagtgacgaagctagaaatttagttgagtgatggctt

SEQ ID NO: 259968 - DNA, 690 bp, Cannabis indica
aaaagaccatcttccgttgaagtcgattgaataggtaatcgatcctaggtaaaggatatttattcttgatggacagcttatttagttcccggtagataatgcacatgcgtagggattcatctttcttcttaaaaaacaacacaggagctcccaagggtgacacactaggtcgcaaaaatcctaggtcaagcaacccctgaagctgaatcttcaattctttaagctctgcggagccattctataaggtgccttagaaactagttgtgctccaggtgctaaatcaataacaaaatctatttctcgttgtggggtaaacccagaagttcatcaggaaatacatctaaaaattccagagccactctgatatcctctggctgaattgactcaagtcgtgtggtatctaataccactgccaaaggcatccatcttgtaacaaatctctagctttcaataccgagatcaatggaattcaggatccctaaactaatcccacaaatgcaaatgcttcctcgccctcgggttggaagatcaccatcttccgcttacaatcaatactagctgagtacttggacaagaaatccattcgaaggatgatatcgaaatctgctaaacccaattctattaaatcggcactcaacttcctatcctgaattcttatcagcataaacctaacccacctattagagataa

SEQ ID NO: 259969 - DNA, 775 bp, Cannabis indica
atcctaaattgtcttacgcaagtgttaagtggtgttttgggataaatacttattgatttattattgttatgacataggacacgagattatcgatcgttctccaagcaggtcggacaacatacctgatccggaacttgaggtaagaaaagtataatgtaccacatggcatgacaagttctcaaattatcgattgtctgattaggcaatgataatgtaatgatactatagatacaatatatggtctcacctgatcaggtgatgcaatatatcgggcgacgtaccaagcaaaggtacgggcgttagtggcatatgatgagtaccgagcgtaggtatgagatcgtttgattagacgatgcgatatattagtgtcaagttgtggcacgggctcacctgattaggtggcacaatgatattatatatgatattgcattatgacacgggcttgcctgattaggcaatacaaatatatgagcatatctatttctatacatatgactcattatattacctactattgaatgttatagtttattcattttgtgataataaaacatataattagttatttaatgtatacttctttattacttttcttgctgagtctatgtgactcacgggtgctttgtggtgcaggtaagggcaaggcaaaattagaacaaccatgagatggcggtcttctctagcaatgtacatattggccccaccagcctgcgtgttgagttgcagggagttgttttagactggctatgtcagttgtattttgaattgtgtttta

SEQ ID NO: 259970 - DNA, 541 bp, Cannabis indica
aattggttacacaatttatgttcatatcctattttcagtacgtaaaataatttcattttcttttattgtactacactttagttatttaatatattttgtatattttaaaaatattttaaataatttatagtattgaaaaatatagtttaaatattttttttttgcactcgtattaattttaatacaagagtgaaacaaattgttgaactaaattttaaaaaaataaattattaaaattttataaaaaatttgcaagatattttaaataactgcaatgtatattgttattttttttaatttttttttttaaaaaaagtattatacatatataaacataacgaagatgcatccgcacacctatttttgcatcatatataaaagcccctaaatataaatatataaaagaattttgtggttatcttaaaaaatacaatcatttaaatttaaatagtaaattacactcatgtatataatattttcatggtataacatttaaactttaatttgtaatgatcaaatattcaaaatttatcaaaatatt

SEQ ID NO: 259971 - DNA, 808 bp, Cannabis indica
tcttgaaaataggctaaccccgacacaggagaactgccaactgcggtggaaacttttcaaaagtttcaccataaaggcaacaattggcgcaacgagtacgcgcaacaagcttacgtaagtttacattttaattcaatttttatttatttctttcaatttattttgtattaaaattaaccatttaacttatttgtttgttttaggagcaaatggttgaaatagcggcaactcaaccagcgcccactgaagatgagcccgatgagcctgctgtcgatcctacacagtacccccgagacttacctgttatgacgcaagtactcggggaacgatctcgacatcttagaggctttggccatctccccagactgaagggagttggggccaaaagagcacctgccacgcatccttcagccccaccgactgttacaatggaacagtacgaggctttacagaaaaaagtggaggaagcggagcagacaactcaacatacgaggcagcagtatgagacacaacaactctacctcagacgattccaagatcagtttgagtatctttctcgagctgtgccgggtttcaacttgcctcccatggatcttccaccattgcccactcctggtgctggatcgtcatcggctgctcctggtgctggatcgtcatcgcagcctcccgagactcagagaaacaacgatgacgacattacccgcctatagaactgtactttttttattatccggttcgaacatcgatcttttaacattttgtttatatactgattttagtagaacataatataattaatgtttgttta

SEQ ID NO: 259972 - DNA, 1174 bp, Cannabis indica
actcgaaactaaaagtttccctatcgataaacaacatggcaataccctaaataacacaaacaacacccacagctaccaaatcctcaagcatgcaaaatttctcaactcttaaacttcaagaaaacaaagaacaagttacaaaaagcttaccaagaacttgagcttactaaaaccttgagaaaacagcttgaattacaaaggaaaacaccaaatccctgctgctcaaagaggggccgaaagagagagagctttaaagaaaatggttttgcttcttttcttttattttttttccaattttgtaaaatgaaagataaaattgtttttgttacattacttcagccaaaaacaattaaatatatcaacaaaaattcatttaattgactcacataaacacaaaacaccaaaaggggaaaaaagaccaaaatacccttgcccacaccaaactaatttaaagggtactaagggtattttgggaaaactctgaattcccgactaatcccgacattctcaatgtctaacaataccgtcccgctatactaaaatattagattgtgattctactgagccatacaccgcgttccatgttaccgggcaccgaaaatgtaaaattataaaatttcactatacgacatacaaaatgcattctgaattcaaataaatcaacataaatagttatttaaatatcaataaataattttcataattaaaccctaattatctgctaatttccaaatttaaactaagcgatctttataactatcccctttaaaaggatttcgtcctcgaaatccaacctgaacaactccggattctgggctctcatatctgattccaattcccagggggcttcctctaccttgctgtttctctagagtactttgaccaaggctatggtcttattccgaaggactttatcctttctatcaaggatccgtactggttgttcctcgtatgacatgtctggctgcagctcaaggtcctcataactaagtatatgagtagggtctgaaacgtattttctcaacatagagacatggaatacgttgtgaattgcagaaagagctggaggcaaagctaacagatatgccacttgaccaacattctcgagaatctcgaaaggtcctgtaaacgtagggcataacttgcctcttttcccgaaacgtttaatcccctt

SEQ ID NO: 259973 - DNA, 2809 bp, Cannabis indica
gggcttagggaggaggaggaggagaagtgtcggagtgaggtggtgtgaagtggagtgggaaatggaaaatattttctgagttatgggagggaattatatagaaatttattaccggcgggacccgccggtattaataggggttctgccggtattaataaacggtcagaatcccctcactcatactggcggaacccaccggcaataatccgccggtattagtcttttcaaaatttgggcggtcaaaatcccgcccaaactattagaggcggattttccgccggtaataataaagttcggccgaaaatactaaattaataaatatttaattaatttttaattattcaaaagtaataccggcggaatgctttttccgccggtaataactctattaataccggcagtttggatccgccggtacggagtaaaaatgtggtagtgtggcgaccgcagcggagtcccttttggctgttactgtgccaaagtgtcaagttaagggttgccacgtttcgctggtgaatgctaaggattaccaccggaggcacaaggtgtgtgagatacactctaaggctctgaaggtgatggtttcagggttagagcaacgcttttgtcagcattgcagcaggtacgttaattagtattattgggtctatctcttagtttctctagctaatacgttatttggatttaattaattaatgaggaagaactactgtctactgttaatacgagctttatgtgaacaggtttcatgtagtgtctgaatttgaagagtctaagaggagttgtaagaggagattagcaggccacaatgaacgaagaagaaagagctctcatgattctattgctagacactcgtcccatcatggtacgctttattattacttacttaatttttattcttttttttttttaaagaacttcaatttttatttttactatatatattttgtttgtttagagtaactccattaatatctttatgtgttctttatttattcaattgtgattaccaattgtctattagatgcttattttaaaaaaaaataatataataccaattgtacatatatgcatacggacctcaaagaaaagggaattcaaactatcatggccaagtcagagtcagacatatgcatgccaaacattttctgttgtcttctgttttgtaaatgatactaattttgatgtcacttcttctccaagagtttttagttttaaatatttaataggtttcctcagattaatattgcaaattgtactccatagtttcatgaatttattctgcaactttgtttatagattttatttatatgatcctatgtgtacatgagcaaattaaattacctaagaaaaagtcatttctttatacaataaaataagcactcggctgatcgtttgtatatagtacttacactactacctactaattagggtaagtatatacagaggctggaaacaaataaggatactaggtagtatagtaattacagtacattacatatatcgattggattccttcatgattttaaaaactgtagcaacttcatacaatttacttttttttgtgattttaaagggaaaagtagtcaaattatagtttgttctgcatttggcagttttgatgattttataattggccattatttaggacaactgcttacaattctcacacaccaatccttgttataaattaaaagcctgaaaactataagaatatttataatgacattgtatagattggatttccttcatgatttaagaaactgtagaaacttgatacaatttacttttttggtggtttaaaggcagaagtactgatactatagcttgttccggcatttgccagttttgatgaatttataatcgccagcctaaaaatataagaataattatagttgtatgtcaatatatatatgattaatttatttattataatgctctttgaaatatgaacaatttgaaagttttgtagctattaccctataaaatgcatgtgaatattcatattttatatattgagtgggtcgtttctatttaaccacgctaattttaatataatatatagaattaagataataaaagttgaagtcattgtgaacagagaacaatatagtagtgggtgggggatttccatacatatggcaacttccacgatcggacgtgctctctctcttctgtcatctaagaccgccgattattcgggtgcccccatctgaatccgacctctcctcaagatcaagcgcagcccttcgtgagctcattgctgaaaaccgcgcaaccataatggctcctcagctagttgtggacggggacgcatggccctcacatcacgcccaccatcatccgcccagggatcaactctttggttccgaggccccacgagctttcggttcaatggagtcccaccatcaccacaacatatttccagagcctcaccataatggtggctgggaaaggataggcgaaaatggtatgcatgtcacgcttcacctgatgcaggcaccgagccagggttttggagcgttcatggcttccacgggaaaaactaagactgaggaagatgattgttctgatcaccatttgtggaacttcttacagggacacaatcttgtctagaattcccgtcgaagagctgagttattatttgagaagaaattgtcttaaaatattaatcaattttattttcctttattcaacacttgtctatcttgttgtgctacgaaggagtggccctaagatgacaattcttcgttgtttcataattgcatgctttaaaaaagaaggggaattattcaaagcaaaaaaaaaa

SEQ ID NO: 259974 - DNA, 592 bp, Cannabis indica
taaataatttatatataattattagaaatttttttgttcatacatgatgttgtcacttgtattgtatggagaattaaaatcacttatccacaagagggcttacaattatagagaattttctgatcagttttattttaaatataatccgtttgatattgattttcagcttttattttaaatataatctgtttgatattgattttcaaccgttttaaattagggtgctagtttgttgttactagccaaaaggtaatacctttggctagttatacttaaaaattttgttgttttttagttttttagtattgttgagcttgtgttttaggttgtgtgttaaattttaagtttgtattttaattttattttgaatattgtcattctaatataactgtattttttggttttggtgttattatgttttttcagttttactacctctgacgacaactattataatgggaagatatttttcaatgtgacggggagttgtttgaaaacgttatagctttattgtctaaattttcgagggcaattttgtcccatgttgctcgcattatgtattctgcaggtcatggtttgacaaaatatgccc

SEQ ID NO: 259975 - DNA, 603 bp, Cannabis indica
tatatcatatcggggcgggttcgagtgggtatctattcccgcccccgtcccgtttctgactcgggtatgaatctttaaacccatatccgctcctgcccccgaaagtcaacccccgtacccgccgcattaggggcggatatccgaacccataggtataattgccatccctacctagttggtcaataaaatatattttcaatatttatcaaaatctagaagttgcatcacttaaccaactatatccctaacctacccaacccactcaatttaaaccttttattctaataatcccattacagtgattaaatcaaaaagaccaaaactctatttcaaaaattaaatccaaaaatgaaaaattccattttacaaattaaacccaaaagatgaagatctcattttaaagattaaacccaaaacccaattgagatattaaatctaaaactcattttagagattaaaaaaatttaaaaagtatattgaaaagatcaaaaccatatttaagactcaatgcaaatgaacacaactaaatcaaattcaatcaacacactatatcaaatcaaatcattaaaaaggatttgaataagaataagatgttagactttt

SEQ ID NO: 259976 - DNA, 1104 bp, Cannabis indica
aaatacaaccaaacaaaggaatgaaatgaaaattttcattccatttcattacacctagcaaacacaacctaaatgtggagagttcttcatttcctcctcaaaacccaaaagcagcataaaccataaataaaccccacaaataaattctctctctttttcttctgttttgtttttgggttcttttcattcataatcttaaaagcttaataatatattaactcattgtggaaatgggttttccatttcaagacacccagaagagaaaaaccataatattgtgaattttctcaggaaccaaacaaacaaagtagtttcagggagaaattaacaaacaaattagtgaatttttaagtatgaaagaaaattaaaaaagtagaaataagtgaggaagtcgagaatggtgtttacttagtggaaggtgttccggtgatttgggtagaatcagaagctgaggctgaggatgatgagcgagatttttgagaggttttagctcctttcgccatggttgatgatgattctctctctctctcgattcgtggcaatagccaaacttcatttgtaatatattatatgcctctctacgcggttaaacggtgtcgttttgcttgcttgaaaattggagtgttcgcggtgcgggtggtgcggtttttgactattttttcaaaccaacccgcacgtacggtttttcaatttcccaaaccgtactcgcaccgcgaaactaaaaaacggcagaaactacaccgcaaaaaatggtacagtgcggtgcagtttatgcggtttctgcggtttggattatcaccaaataattaaactatcacaaatataataaagcttgagcaacacttgtcaaaaataccataaggttcaaaaataaatataaaaaaaaaaaattcaagtttcaacaatacaataattagtgggtttgggttgggccttcacatattgaacctagatagtaataaaaattggtatttttataatatgcggtgcggtgcaatttgaaccgcaaaccgcactgcattgcgcggtttaagaaaaattcaaatcgcgaccgcaccgcaaagaatttcaaaccacattttttttacagtgtggtgcggtgcg

SEQ ID NO: 259977 - DNA, 1008 bp, Cannabis indica
aagtatttcgagatgcagatggatttacaaggagtgcgaggagacgtatgttgcagaatcttccccgcaactctgtcggaggccacacagcaatggtatttcaagttggctccacgaaagtttagttcatggaaaactttctcttcggaattcatgcacaattctcttcctcacgccaactcccattgcatctgggagatttggtcgaagtaaaacagcgaccaggcgagccactccgggcatacatcagcagattcatgacggaagcgaccaaggtgtcacgggtaaccgaggatggaaagttatccgcgatactggggggcattgaagtccttggcgaactatggaaggacataaggaagaacagaccgatcgactcaatgagcgatttcctcgaccgggctgaaggtttcatcaagctcgaagaagccattcagcgagcagaaggtgagcaaaagccgaacaaaacgaaggctccttctactggaacgtccgcccagcttccccaatattccggcagctcaagtggcaagcgttcaggcaacaaccacaagcaagggaacgggaagaagggaaagttcaccgaaaaacccggacagactccccgagatcgcgccaaacacactgcattcactatcctaactgaggatatagaaagtgtgtatatagcaactcagtcgctaattccgtacaagaagcccgggcccatgaagaaagataccagcaagagggacatgacaaaattttgtcggttccatggagactacggccacgacaccaacgaatgctacaacctgaagcgggagatagaacttctgatcaagaagaacaacccgcacctacagaagtatgtcaaggccaaccaaggtcagaacaaccaggatctgatgcctccgccaaagatggacacttgcaagtcatcattggaggcccgcacatcgctggagacacgggcaaagctcgggaacgatatgcccgcacagctcagtacgagcaagaagaagtcat

SEQ ID NO: 259978 - DNA, 3341 bp, Cannabis indica
atgattgggtagcagatgcatcttttatattgttgtcaatttttaaaattatatttataagtagtgcttaacactttatggatgtatcgtcttgtaattggctagcgatattttttagaattttttacatcaaactatatgaaattcgatacttattacttggaccaatagcaatattgacacgtagaaaaatactaagcaccaatagtgcccttcagcatttctcttttgaaaataagaataaaaaataattttatataacgcttcagctcgtgataattttaaataagttaacagactagttaaaataagaacaaacagacttacaagaaaaataaacttaaagactattgttgctatttttaaaagttagagattaatctccatcatagtgaacttttataagacttttactacaaatttttattttaattagataacaaaattaaatatagaaaacttaatttttttttttcttaattatatccattaaaatacacacatatgtaagtaaataaataaataaatatttatacatatccttatacttctatttcaagtgagtaaaatctggtttgtgacagtcattcgccaaagaaagtaaaaaacaatacaaactatcattgactggcttgccttgccttgccaccatatacacacattccctaaaacaaagaaacaaaacaaattcagaactcaaaattttgccttatccgagaagcaagtctctgtacagattgatcatcaaagcaactgtctatctttgtaatatttgacacaaattccatggcttcttcatgccttttccctctacaataaccatctaccacaatcttgtatgttagctcattgggtctacaattgttctgaatcatatagctaatcacttcatttgcctccgaaaacattgcctttgctgcataccctgtcacaaatgtgttgtatgtgaagatacatggcttaatccctctagctgtcatctcggaaagaatccttacggcctcctgcattagcccgcgtctgcaaaatcctttgacaacaatgttataggaaacgagatcaggtttcccgcccgtctcgtgtagtctcttgaggatttcctctgctctccaacattctcctcgtctagcgtacatgtccatcaacccgttgtaggtaacaagatcaggctcaagaccagcttcgcgaattgattgcagcatctcgtgagctttatcttgcatgttgtttcgagcataaattgaaagcatagagttaaacaacaccaaatcgggtttaaaaccgttcttatgcagttgctgaaaggccttttccattcccttaagggctttacacttgaagttcacaagaataagtgttctcaatagaacccagctcgggaaaatttgaccgtcgtatatttccctttcgatcttttgtatcccttttaaattccctgcctttccatggcattggagcatcaatgagtaggatgtttcattaggcttaaaccctttgtttttcatgtctagaaaaacagcttcagcagctttccagtctcctcgtcgagccagagcattaagaagagcgttgtaagttgtaatacacggactgaaccctgcattgatcatctgatcatacattagtgtggcatcaatttctgcaccacaccttccatatgcactgatcaaagtattgaatgtgtctctatcaggatcaaaaccgcagttcttcatttcccgaaacacacgattcacaaacatgtgcttacccttatcaccacacatagcaagcataatattccaagtaacacgattagggccacaaccactcaatttcatatcactgagtacttgaatcatctccccagaccgcgacttctttcccaacatcccgagcacagcattgtaagtacatacattaggaacacaacccgactccttcatcttattaaacaacttcaaagcttcatcctcttttccagctttgccatatgcatttatcacagtagtataagtaacagcattaggcataacacccttcttcgccattgtctcaattacagcagcaccatcatcataaaaccccgctctcacatacgctgcaacaagttcgttgtaagtaaccgagtcaggtgacaattactatcctccatttctgtcaaaatactcaaagcctctgaaaaaatcccagctttcccaaaaacttgtatcaaagaattataagtaacagttccaggaacaaacccctgcaactttatctcagcaaaaaactcctttgcctccttaaacaaaccctctctaccacaagcagatatcacagtactacaagtgaaatcatcaaattgaagcccttcactcttaatctcatccaaaagatctaaaattttattccaagaccttcccatctttccataaacatcaagcataacattgtaagtaaccaaagttggtgagagtccagtttccttcattttctcaaacattgtaattgctctttggtatttaccagtacgagaataagcatgaataatagtagtgtaagctctaatatcaagtgagaattcctctagagaaatttcatcaaacagtttagatgcaattgtatgttgtgattctctaccaagaattctaaccattaattcaataacttgactattgagtttcactctttcaggccataaattagataaaatccattcaaacaaaagaactgatctttcccaattcccagaaagatccaaagctttcaaaagactaatcaaatcaacctcaactaattcaaccttaacagaatcaaaataaccattcaaatcatccaaagaaaactccacaatcgaattaaaaagcattttaccctttgttgtgagaaactcaaggaacccagtttccaaaccactttcttcttcctcatccaatactaaaaccgaagtgggtttttccttaccgccattttcaagctgtttaagagaagagcgcaaatgggcatggctgaaatgatgtggctttactgatttaacagtgtgagttgtgtttggagatgaagaaaggtgtagaaggtgttggaggagagagtcaatggggaatgaagaaggagatggggttggaggagtgtgtggtggttgggctgttgttgggttgagcttccatggcgggaagtttggttgagttggtttatttgatggggtgggatatactggccttgaggggaagatggaaccctccattgatgagagtgtttgaagctctggttatgggaagagtgagctgtagaagaaagattgaatttttattgagaatgagataaagattattggtggtggtgattcaaagatggaattttggatagaaagattggttttt

SEQ ID NO: 259979 - DNA, 2852 bp, Cannabis indica
ttcaaacttagattagggtattttagtgatacttgaattattctaatccagtaggaagttacatgtcaagtttcagagattatggtttggctctagagtttggataagttgtttatcgagttttgttgtagtgacataggacccagaatcgtcgagcataattcaactcaggtcctgcacacctgttttcttgactaaggtaagaaaaagtgatacacaccacttatggttaaataattaacaattgtgattgttatagtctcgattataatggagatcttgtttatgtgtttgttatgcctcggttatgaccgagggttggaaacgatcattactgttatgaattacttcttaaactgtggttaggtttcttacttatcgttcgttgtatcaggcaacgatagtgacatacgtagctcgtggataacaagtggtgagggttggaaacagtcattactattatgagtaattacttctgaaaccgctgttaggttgcttacttatcattcactgtatcaggcaatgatagtgacatacataggtggtggataacgagtggtgagggttggaaatggtcattaccgttatgagtaattactcttgaaatcgtggataggtttcttactttcgtttgctatatcaggcaacaatagtgacattcgtagctggtggttaactagtggtaagggtgcttaatgaagtaccgagattgtgtgattaacaatatgaaattgtataagcatgttagtgtgtgatgtgttatatttgtgtttattctattatgatatgattaattggatttaataatgtttatggatttaatcacttttcttgctgagtctctgtgactcacgggtgctaaatggtgtaggtaaagggaaaggcaaagttgggcagccatgagtctgaggtctctgcagcagtgtacatatcaaccgcggttctacggcccaatggacaggatattcccttttgaatgtactttggaatataaaataattttgtaaaaacacttttggtcctgaatgtaaatattttagaaatagggggtcctcgtaaatattaacagttacctttttataaaagttgtgtgtttgttttgactataaatttttaattattcatactttttgtatatttatataattagtaaaataataaatttgtaaagcacacacatggcgtccctgtgggacagggcgttgcaaggcatatgcttttgtggcttctattattgctgatctttctatggaggttatgaaagcagtttttttgttggtttctaatcttgtagctactgtggttggtgaggttggatttattttgtctggaattgttttcagtgttgttgctatgattgttgtgcctatttttcttgtgatggttgtactggtctttgttatggttggtagagtccttgttgatgttttggtggttgtgattttgatggttgttgcttggtttgttgttggcttgggatctcagcctgcctcaaacctccttctcccccaggagactactgtcctaccgctgccacctttgccttcttggccaccttctcggagccaataagaggatggggtcacttagcaaatgtagcttctttctcagggaacagaaaaccttccccactttcatccaatggtgtagtggcctccacaccatcttggggtgctttggggacatttgtctcaaaataagctatatcaggtatcagattgaggtgttgaagaggttgaacctctagaactcctctaccaattgaaatttcctaactctgggaagcctctctcactttctcgtgggttgtctctgcccagtagaggtcttctaagcgtaataggaaggagtacttggagttcttggcttgcaggccctatttgccctactttttgtcttaccctttcctttacctctagtagtctctgaaggtccttaacccctagcagtagccttggcctgggcaatgttctggttgatagagctcatgaatgactttagcattattgcctctggtgtctctacaacatgaaaaatccacaacactgctaaaacacaactaaatattgaaagcaagaatatgcaatcagacaagtaaaataggactctagtgtggatgtaactgttaggagagctattatatggcttttcgccgagtgaataaaactatgtcctcctgatccataaagttgtcatgctctctgaaacctaggaaagacattgatagaaagagatctactttgaccattttaggtgatgacttggggttactaggactcctaatgatttcatctatgctatcaacataagtatcatgggatacttaagaggatctaagttcaaaaaataatgatggaagcccccttgatccactcgagctatttagcccaaacttggtgtatgaagtaagcaaaagggcctattacatctttcgaaggtgctagctctaggggttccctcgtctgggtatgcggcaatgaacctttccacaatttcttcttctacggtcatagggtttggatggtgacgtgcccaattttccatcatacatacatcctctttaagggcctccttcatgatctcgaaaaccctaatgatgatctttttctcaacatctgggaaatgtaaccaagttccctattgctgacattattgacacgctagaatttgtctatttgcccatattcatggagctgcttagtggtaaatatgttactcatgtttagagcgctatctagaatcaggttgtaaagggccaatcttttcatcaactccttgctcgtaggagttcgagtcacagatactgtcacaaatgggaaaaattccatcagccataaattcaaactgagaca

SEQ ID NO: 259980 - DNA, 965 bp, Cannabis indica
tttgtttttaaaaactgtctcgaaaagtcctgcccccactcctgagatggccgagcggcacatgcacttgttgactctttcctacagccttaggtcatgcgacattcttctaagcgaggttaatttgaggtttgtagatctcctaactgccaaggagtttacttgtgattacaaatatcctaagtattcttcttagcagtgggttcccgtcccacacgagctgaaagctcgagatcgtgtagctcgggctcagtaccttcagaataatgcccctcgagaagtcggtgaaggagcattatgaggtaattaatgtggttggtcacccacattgcttaaggctaagcgtaacactctagttacattttaagatagctgctttaatttttatatttggcacccctcctcatacatcctattacacataggtttgacagttggtatcaaagattccatgtctaaattagttgtactgagtcatactatggagtagccgagcagtacaggactatgatggatagggcgagtcatttaaacgcaagctggaatttagaaccaattaatctctatgatatattcaggatcaggggttttagggatgttagtggatattatggtccttctaccccatcttctagtgatacctcatcttctagtgactatggtaaattccttaggcggaaaaattatgccccaactctccttttactcgtctttaattactgctaacacttttatcttgtctcgcaaaaatgcattttgagggtctcatgcagaggaaagggaagaagagggtgaccactttggaggctccttctgatgtcgaggtggagcccctcaaaaggcaaaggaaaaactactgctaacaagaagaaggcctcctagaccgctaacctcgaggtccctgagactgaaactcaagattcaattcctcccctggtctccgcaagtaccaatgagcctgctcc

SEQ ID NO: 259981 - DNA, 868 bp, Cannabis indica
aacacggtggcgtgggggatcttaaattcgagtcctttttctacattattttatagcaattaaatgagtacaaattatattttaaagcacattattagaattaaaaagcattactagctggtactggaatagaattgttaaagtaaaggatgaggtgaagctgctaacaactccagatcagttctcttcatcagatttcaaaatagcaaccatgtacaagatgttaagtcaagaacaaagagcctttcatgtcagcaagcaagtatggagcagattaaatgtcccaaaacatagctttttccttggttagcagtgctgaatcgattgaaaacaaaggagagattgaaaaaaatgcaggttgtgaatgatactacctgcattctgtgtaataatgcagcagagaatacattgcacctgttttttaattgcaggtatacacaatgttgcttgcaagaattaaagcatggttgaattggaggattaaagctgagtctctgcccaatattctgagatggatcaatcgaacaaagctgagcaatttcaaggtctgctgctacacaacaagtattgcggctttggtgtgtaaaatattgcaagctaggaatcacaaattatggtcccaagagtcaacacaacagcaaccactggtgcaggatataaaatggctagttaaaaatagaatttctagtgtaatgaaaaaatgtatagatcaaaaagagttggaatggttccaagatttataagaaaatgttagttttttatttttgtgttacagataaatgtatagatggttgctcttctatgagctataggttgtaatataaaaggttattgtgcaatgaaactcctgattcatcaaaaaaaaaaa

SEQ ID NO: 259982 - DNA, 571 bp, Cannabis indica
tataaatatgaaattacactctttgacaagatagaattatatttatagaatttttacttgtagtctattaatataatcaatataagtaattcgccgtccaattattagttcataatcaaagttggtaaaaataccattttacccttctaattatctcttgattctttatgtaccatttactcaatgtgaacagttaatctataacttattatcgatttggatccaactgttagcactcccaaaattgacactatttggattctactattgtataacatgttctcagccactcatgttattaagctcccaaaatagaagttgtaagaatcatcttctttgagaaacttaaatgagtaaatcaaagaactcaataaatacaaataggagttcatgtatacttaggattcaagctgatctactaatgatcatcattgtgatatgaataactctttcaaggtaaatgataagttaataaaagatgcttattatatatcagtccagtcatgcataatctaattatacacggtacctttactatatgtccattgacatatgtgatctgaatcaaaat

SEQ ID NO: 259983 - DNA, 1822 bp, Cannabis indica
tagatagccttagcttatagcgttttggcgtatgatttctcctcccttgcccagtgaacattcctcactatttatagggcaggaaacttgaggaggaagagtttcctctctcgttacaaagcgcataaacacaaagatcgtgggatcattgctgaatgttaggatcctgggattaaggccgtatacaccgatagtggaatcgtgtgtatgccatatccacgcaagttgatccctgagttatagggattgagctggtgactcacgaagtgcttggctgaattcgctaagtgttgctcattctgcacggcttgttgagtattccatcatggacatgccagcgaggcatcctgctcggcatgttgatccgaccaggtgctctaagttgatgccacatgtcaccattcttgtgatgccacgtcagagtgccaattttgggataacaatattaatttgagggacaaatcctacacatagcctttaaattaatataagaaatagaatacacctacacaacccgtatataataatacacatctatttatgtacattaaggtaaactaaactaactatatttttttaataactatatttaatttttataaattatatatatatatatatattaaaaacaattccccaaaatatcatggccccccataccatgacatagtttcgccattgggtggacgtctcccctataaagacgtgtccatatctctgacaaaggattggatattgcccattatgtcagatcatggtagtgaatgcactacatgtacccattttgtccaacaactcctctaacacctttgtctactaggcgtaatctccgtgaaacacatgccctgcaccaaactgtctcctcatcagtacggaatcgtcatctcccacgagctaaatatctttagtgggtctcatagtcatgtatttatgtattttaccttaatagtgggcttatttttacaaataaaactcgaatgggccacaagtatgcccggacccaaactctagcctatataaatctcactatgccttcatgcaaatgggatggaacttaggctaaaactctgctagcttttattctaaaatctcttcttctataagaaagacctagagaaactaccttatagcaaagtttagagtttcacattgcaaaactcatttgtaatacatttcaaagcttaacaagtcaatacactgactcctggactagggatatttaacgatcgaaccacgcaaaaattccccttctcttttacttaatcactatttaatttcttaacctcttacttaattttattgtcgaaaatctcagtaaacaaaagtaattgaaataataaaaaacacaaatagtttaatatttaggtcattaattgtaataaaaatataaaaatgtgaagcacgaattcgagctatacaagaaaatatattagctcaagtataacacgacatgaaaatactgggctacgaatcgtatcaaacctatcctataaaattatttgcacaatatgacatgtgccatatcttttcatgactcattatagcacgtttcatatttttcaggtttcaaaatacgagttagatcaatacggtatgcacatatttagagatctggattttagttatgcgcgaagtctataaaacaacaataataataaaaagacatttcttgtgtgagagagaatgaagtttgtttagatggtattttttagagcattgctattgggcaccagtggtgcctagcaccttctagatgtgtcgacttgcaattggttagcgatactccataaaaattattatattaaactatatgagactcgat

SEQ ID NO: 259984 - DNA, 658 bp, Cannabis indica
ggatgatttggtgtttttagattcggattctactttcactttcttgggctcatcgaaatcttcttccacgagctaattttttgcagataaatagaaaaattgaaaattttccagcttactacctttctcttctttaacaccattgctggaacctgtaaagccaaattaaagaatacccatttctcaaatacagaagatcatgaagaggaataagaagcccctcctactaatgctcccagatttttctcaacagctaacacccagctaaatgacctgtttttgctcaatgggaatgaggataaaaaaacgtggaaagcatgaaacggctatacaaaaactagcaattattaattctttccattaaatataagagaaaaagaaagaaaacaacaaacaacagtgaagccctgaatctgatcctcgttcagattgagtaataatataacaataaatctgatttgaatggtaagatttaacagaaattttatatttaaaaacactatccagttttggtaataactcatgaattgaatcaaatttttgtgaaatgcaatttcagagattatcttagcttaccgatctggctctgagtcaagaggccccatatgggtatctcagaagctatcagtcaatggcggaattttcctttttttttttt

SEQ ID NO: 259985 - DNA, 1084 bp, Cannabis indica
aagatctgaaaagagttaggttaattaataatctgtcattcacttcaagaaaaggatagcaattaggcattaacattggtaacttaacaataggattctcctccctaatctctcatcttgattaatattcatttgctattttaatttgctgaattattttattgaattcacaaaaagtattattttgccagatagaatcataagtataatttagtagtaattagtccaattccctgtggttcgacctcacttgcgtgagctactacttgactgcgtatacttgcgtagtgttcataattttcgtaacaagtttttggcgccgttgccggggaattgtttaaagattaatattacacaaaattatactaacttctactttggtatatttctcttgctgaatttctaacctgtctcttgcaaaactacttttatctatttcaggtattttgagtgcatgcgccgccaagggcaagcagttgtattacccgtcgaccctgaaatcgagaaaacttgtaggaggaacaggaggaacaaaaggcaagagagagtttcagcacctgctgaaacactagaaatcatggctgacaacgctaatgctgcaaataatggaggaaacaacggtaataatgggggtgccgttgaagatcaagctaatggccgtagcttgagggattatatcctcccaactcttacgggggttcagtcatgtatcaggccaccggcagtggatgctaacaactttgaaataaagcctgccatacttcaaatggtgcagtcctcagtccagtttggtggcctcccttctgaagaccccaatcttcatctatcgaacttcatggaactatgtgagactttcaaagtcaatggagttagtgatgatgccattcgtctgagactgtttccattctcacttagagaaagagccaagagttggctgaattccttgccacccaactccattgccacctggaatgacttggcaacaaaatttctgtcaaagttctttcctccagcaaagtctgccaagttgcgaggagaaatcaacaacttctgtcagcaagataatgaatctctccatgagtct

SEQ ID NO: 259986 - DNA, 543 bp, Cannabis indica
gtagagacatgtgccatctttttatgcccaaagatggcacaggtcgaccatgcattatgtaggggccttcttgtacaattttgactttatgttcaagttctagccattttatgcgtaaataaaccatgtccttgttaattttcttgtgggattgaggtgtaatatcttgataaacctaatagtgaatacttagggtttaatatatatattatgggctaatcaggttgtaaagaacgcttagctttgttttgaaaattagcagataattaggtttaattatgaaatagaataataattacaatttaacattttatggagatttatttaaattcaggatgcattagttatgccatatatgaaattttatatttttacatgttttatgcctgacaacatcggaatgcgacgtttggccaatagaatcacattttagtattttaatagttttggggcaacctagttagacattgagaagagttatccgagcttttgaagtgaccaaaatacccctaagtgacttaaaagttttggttttagtggggg

SEQ ID NO: 259987 - DNA, 731 bp, Cannabis indica
tagtcacagtatttgttgtgactaaaattaaactagtgacaacttataactaaatactatgttttactcacaagtaactttttgttgtgactaaaaattacatttattcataaaaaatttatgtttgactaaaaaattatcactaaaaataacaattttttatagtgtctagagtctaaattcgcgttcggattagatcctgaaatagtaatccatgtaaaaacataacatatatgataatagttattaagtggagtacttattaaaataccaaataagattatggtggtggtcgcaaaaattaatatgagagatataattttgttaatatagacgtattaatggaatgcacgtggcctcttccccccaagcctcgacaaactttattctatatttaatgcaaaatattcgattttatttagggatcctcaaaggaaatttttgaagacatgtcgagaccttaattataatctattattatatatatatagtctttctaaattggtggtcctctagatcgatctaggtaaatataaattgcaattctcaatatatatatgtatgttttaaaagtagtattgtgtagtggtataccgtatacatattctaaaagtgaaatgctaattaatcataacacctaaatatataaattatatatctttattaatataatttaattaatattacattctacatattataatttaataatttttatataaaaaaaaaaa

SEQ ID NO: 259988 - DNA, 821 bp, Cannabis indica
gtatttgatatgtagttgcccaaatgtttgtgctacccctcttagggatgttatgatatacaagtgtcatctcaatattctatccttaatatatagggcagcataaatacataatctgagtcactacctcaattcacatttaggaaaagtcatgtcaaaattacatgaagttttaaatccaatgatatactaatgccaaaaaatggtcttaattataatgtgagtgacattaatacatataagtgttatatctttatggatgtttacaataatgatatatcataaaagatgtaaacatacttcttcatgaataggagtcaacgtgagtaactctttattgctttgggagaaccaattaaaatacaccgatgggcaattagtataatcaggattcagaatcctatcactaaaagaagtaatacaaaggaatgcaataaatcttggaaacaaaattccatatagtctagctaaaaataacaatacaactgttcgactgagataaatgaatatgttgaattctaaaccaaaattaaagataacaaaaaaggatagtttgtacagaatgacacagtcatattacctgacatcagttacctcccggatagtgtccgtactaaaattccttctccattgaagcattttagcccacatattgttctctcaaattggagcttccttgctttcacgaacctacaaatagtataatcccaaagtacattactgttgggctttgtgctctaaataaaactctatttcaatgtaatttttatcatttaattatcaataaagaaacagaagtattttcatcacttatttattgt

SEQ ID NO: 259989 - DNA, 698 bp, Cannabis indica
agtcgagtactcgccattctaggttgaatactcgcacttgtcgtttctctgaaaattcttttttgtattaataaagtaatatcatttggtgttgcgaaattcactcgacaacatactgttaaaacaggttaccatcttgatgttgatcttgatgcaattgatcaaagttcaagctccaatatagattcaccttggtggaagttcttttggtcattgcaacttcttcccctaaaggtgaatttttttttcttggagagcattccatgacgcacttccagttgcaacttcactggtgaagaggaaagtaataactgattcaacttgcttagtttgtaaacaggcttgggaatcggttggacatgccctctttacttgcaaatatgctcaagctgtgtggtgtaattcagacctgtttttgattggcatctttctacttcaatgcacaaaggtgattacatatctcatcttttaacaatctattcaaaagctgagatggaacaaatattctgttttgggcaaatggaatgaacggaatcgtgttgtccatggccaacaagcaagagcagcaaagacctcgcttctatactgtaacatacctaacaactataggaatgcacaacagaggtataaatctgttgaaactgctgctcaaatcacagcagcaacaaatatggctcgatactgctacaattagctcc

SEQ ID NO: 259990 - DNA, 671 bp, Cannabis indica
gcgccaacctgtcagaacacacctgaaaagacaacacaggcatactatataataatatagttctattaagcacgtaattaaattaatctcaacaatttacccttctcgggtcataattaccaaaatgcccctggctcaccaacggggtcttaacatgttaaattcatataatttcacatatgttgaactatataataatataattcctcaattaactcataattatctagttagggttttgctaattcttttcttaatcccgggtattacaatccttttgtttgaagagccatttgcacttgattattctttaattttcaggtcttttaaccactgtccatgtcttgtttttcttcaatgacaatttctcctcctctatggcatgcaaccaagatgtactatttttaccagtgatggcttcattgtaacttgatggctcatcactttccatagcttcaacaacactaagtgcatatgcagtgaactctgcatagccaaatttatctagagcttttgtggttcttctttctctgtctctagcaagttggtaggagctgagactagattgagtgttcatctcaatattgtctttcttagtggtttctgtgttctcagtagaactagattgagttgtgtccacctcaatttgatcaccttggctgctggtttct

SEQ ID NO: 259991 - DNA, 663 bp, Cannabis indica
agttcttctcactattcatgcctattggagtcaagttatgattctccccaaaagagtagttgttgatattgaagccatatgcataagttttttgtggaaagggcagagtgttatggctgttgctgggagtattgcatggagaaacatttgtaagccaaagaaagctggaggtataggtttcatgagcatacatgactagaacaaagctgctgtttttaaaaatatatgggcaattgcatcaaagaaagataacttataggtaaagtgggtgcataatgtctatatcaacaaagactcttggtgggattatgaggccccaattcaaagtagtttgtattggaagaaactagttgagctcaaaaatgaatggaaagatcagatcaacccaactcagttagctgctggaaactacaaaatatctgatgtatacaatcagatgacagcaggaaatcaagtgtgtcactggagtaaacaggtgtggtcgagaatgaacataccaaagcatagctttttactttggctagctgtgcaagacaggttaaaaactaggcaaaggcttgtcaaatttcagattgcaacagatacacaatgcattctttgcaatgaatctgatgaaacaaccaagcatttatttttctgctgcaagttctctaaggagtgtct

SEQ ID NO: 259992 - DNA, 692 bp, Cannabis indica
atccatagaaaaagtggaagccaagaatggcttgttggaaaattctcattacaagagttaggaggattacaatcaaaatactcaaaatacaaataaaagtatttcatcaagattacaagaaagctagagaagaagaaaaaggataacacacaaaaagcttgaccaaggctcaaggacctttgtcctaaaagtcatttcctccctcatatggacacttagggaaactctagaaatgctcttaaggatttatcaagcctcatatgctcagcctagtgtctaaggatgagcatatcctcacaaggttctaaccacaacaaatggttttaaccacttcttatacaagtgaacaatatggcctctatttatagagttttcactctcatatgaacatgaatgatcaccataaagcccttggatgttaccaatcataaattgggcatttatgttattaattgggtgatttggaggagttttgggctgttacaaaggctctcaaactttcaaaaacgtgggcaataatatgctgaaaaaaacagtaactagttactagttaccattttttcagctttggccaattcttttccaaagtgttccaaatcattcccacttgattttgaaccatttatacaccttataaatgaataaatcaagtctccaacaactatatttttaatagctatcattcattcaca

SEQ ID NO: 259993 - DNA, 814 bp, Cannabis indica
atattatattattataaataatataacagattctagctaatgtatttgtggccgaaatctcttatgtatatatctttctgagtggtccctatagtttctgcatttttctggtttaattaatcatcgacaccgattaattgtaaattatttaaccaaaagaacaagttcataaaatcgaattaaagtatctaataaatttgccacaccaaaaacaaaaagaagtatttaataaagatcaaattgatgctagctatagatatattgatgtattaatgttctctgaaaaatcgccaatatgacgtacctgatttgtgattgaataaatctgaggactgagatgatgatgataatcgatcatatataataatttaatgcatggttaattatgagaaataaatatactacattacatatatttgatgttaacatgtacgtacgatcgacaccatgtttttattattattaattgggagtaggaatatctataccgctcttctttttatttcattttcaaagttgcaaattgctgctatttgttgggcatacatgtgagtgtgaaatgtgtgatagacaccattgtgtaattcctttgattacaaacgatccatggtcgttttttcatatgtggacacgattatgtatttattgttaatatttctataataatattgtgagaatatataataattaattgcatgatggatatataatttcacatattctagggatgtgatgggaacacattaatgctcgaaaatgactatattttgattattgttattattagatgagattaaactcacttaatttgtca

SEQ ID NO: 259994 - DNA, 632 bp, Cannabis indica
aaaaggaaaattaaaagggaaaaaaacttaataattacatgacaaataattattaattgaattaaaaagttaagattataagactaattcaaattattgttcatctattgattaatcccattaatcaatatatgaacaatagtttgaattaatcttataatcttaactttaatcaaataggatttagaaaagatgcataaataatcaaatagggttagaaatacggtaattaaagaaaatctagaacccttatttttttttgtaatttaatgggatttattttattttaattttattatatataaaataaaaagtgacccatgaatttctcgtaaaccattttatttttaataataaactattttatttttaatataaataaaaagtcatccataaatttctcataatttgttatataggtatactttatatagagatagaatagatatagataaaaagtactctttccatttttttatcaattctttttaagcagtagttttcttttaaccaaaaataaaaaattacatgtatatatactaccatattatataatctctatttaactttaattttattggtaaaaaattaccatatatatatggtggctggaagtggaagaagaggtgggc

SEQ ID NO: 259995 - DNA, 925 bp, Cannabis indica
ggtagaggtgttcgcggttcgagtggtgcggttttttgattatttttttcaaaccaacctgcacatgcggtttttttaattttccaaactgcacccgcaccgcaaaactaaaaactcgcaaaaatcgcaccacaaaaaataatacgatgcggtgcgggttttgcagtttggactatcaccaataattaaactatcacaaatataacaaagcttgagtaatacttgtcaaaaataccataaggcttgaaaataaatatatatgaaaaaaaaaaatcaataatacaataattagtgggttttgggttagacattcacatattggacctaaataaatataaaaattagaatttttataatgtgcagtacggtgtagtgcagtttgaaccgcatattaacaattcaaaaccgcaaatcgcaccgactgtgcagtttaggaaaaattcaaattgcaaccgcaccgcaaaaaatttcaaacgcattttttttttttgttgcagtgcgggcggtttgatgaaaaccactaatgtctggtggttgtaaactaccataagagtgttgttgggttgtcttttttcttgggttttttttttttgaaatggttgttgggtactatcctagatagtatgatgtcgttgattctagtaaactaaaattgtgaatttgtaataaagttaggctttgagaccttttttttttttgcttaactgctttgaaacattttttttttacttggggaaacaattttattttagtaataagttgagaaatattttttttttatttattaatcaaaaatactttcatattatattttattaaaatctatttagttttatgaatgaattgcctaatatacccttaacatctaattatgtgtaacacatgatttacattaatttaagaggtataatagagacatcatcta

SEQ ID NO: 259996 - DNA, 752 bp, Cannabis indica
aaatcaaatgtgagttagttataattttaaaaaaaaaaatgtgagttttatatataatatgtgttgtgaattaacacacttcaaaaacgattagtttcaatgataatgcgaaataatgcaaaataacaattaaactaaatgtataaaataacaaaaaataataaactaatgctatgaaacaatgttgtatagcgtttaaatacaaggagcacccaaattagtgaggttcattcttaaacaatttcttgcttagatttaatatttgggaggaaccaccttgtgactaatctttattcagaagagagttgctcagaatcacagtaattgatcttcaaagatcaaactcgaaatggtgtcttggacctacaatttctttacttgagggtgttgtgatcaaacacacacagcctctgtacacccttgctcgctccttttttttattatttctctctagatcgtcacctagaactaagaactaagagccctataaatagacacacatataggctgtaagaggttaggaaagtctagctaacaatcttactaagtagttgtctaagttagttgctaactaactaatcaaagtggctaaattctaacaatatgaaatatcaaatatataatttttgtatttgtttgttactaaggtcatcttcaacccaagtatatatatatatagcaagactatggtaggacttagcaaaagttccctaccgagagggaacttttttttaccattgattttagatcat

SEQ ID NO: 259997 - DNA, 751 bp, Cannabis indica
cctaaagggaaaggtggagtcaaatatgcggtagtcgcagtagattacttcacgaagtgggccgaagccaaagcactcgcaaccatcacagcaacaaaattgcgcgagtttgtctatacctccatcatttgtcgctttggcattccacacaaactcatctcagacaatggaagacagtttgactgcaaagagatgcgacaactatgcgacgatttgggaatcaaaaaggcattctccgcagttgcttacccgcagagtaatggacaaactgaagctgttaataaaataatcaagcacaccattaaagggaaactagaagatcgcaaaggggcttggccagacgagttaccgcaagtcctatggtcttataatacaactcctcgatctacaactggcgaaacacccttctcactttcttacgggtgcgaggccatgttgccagttgagattggggcaggttccctacgcagagatgttttcaacatctcgcagaacaacgagaaacagctattctgccttgatcttttggaggaaaagcgtgaccaagcgcacttaaaaaatgcggcttaccagcagcgaactgcaagatactttaactccaaggtgaaagtaaaagccctgcgagcaggagacttggtccttagaagggtaatgccaaataccaaaaacccgtcacatggggtctttggggataattgggaaggaccatatctcatcacagaaaaaattggtgatgccacataccgactcg

SEQ ID NO: 259998 - DNA, 686 bp, Cannabis indica
gccatagaaaagtggcaaacctaaaaatgccatatttttctaactttgttatgaaatcccatatttcatgtaattttcacttttttttaagaataaggcccaatacattgcccatgttggcatctttataagtgcttaaaattaagaaaaaattacactcaaacacgtaaaatatattttatttataaggatacccatattaatttaaatagataaaaataacgaaagctatttacatatacacatatattcggcattctctctcgtcactggtgcattattcaccattctttttttttttttttttagataaaattcatcattctttttttctttcataattttttattattatttaaaaataactctcatttttttattcaactatcaatcatttattttatattttttctcttaatacatggcatctaaatatctctttcattttattattttttcaaaaaactttataataaatttccaacttcatgtatctctcttttttttcttttgcaagtttaaaaaaataaatatattttttactacacaaataattgtttggttttaagagttacatcattgtaattttttttataatgatcgttttaatacgtgagaagtatatatctttctccttcaccaaagaagatttccaagatcaaatgtagcattttagtttcttttat

SEQ ID NO: 259999 - DNA, 1047 bp, Cannabis indica
aaatcaaaatgcatccaccagaccaagaacatacaagtttccaaacagatatgggtctatattgctacaaagtaataccgtttggtctaaaaaacgctggagctacataccaaagattggtaaacaaaatatttaaacaccagatcgggtaaaatatggaagtgtatgtagatgatattctcgtcaaatccaaaagggctggggggcacatagacgacctggacgaatgcttcaaagtcctcagaaagtacaatatgaaactaaatcccttaaagtgttcctttagagtcaactcgggaaagtttctaggcttcatcgtcaatgcctgaggaattgaagctaatccagagaagattcaagccctcctggatatgaactcgccaacaaaaccaaagaagtgcaaagcttgattagtcggattgtcgcgctcagcagatttgtttcaaaatcaacagataagtgtgtcccattctttaacatcctgcgaggaaacaagcagtttgagtggatggaggaatgtgaaaaagctttccaagagctaaaagcacaacctgcaaaacctcccgtactctcaaaacctctagacggagaagaactgggaatatacctagctgtcacggaacatgctgtgagtgtcgtgctaatcagagaagagaacagcatacaacacccagtctaatacatcagtaaaagactcattgaggctgagggccgatacccgttgatagaaaaactcgcttattgccttattctagcaacaagaaagttaaggccttatttcaaagctcatcctattcgagtatacactgaccaaccactacacaaaatactgcaaaaaccagacgcttctggacaactactcaagtgggcggtagagttgggccagtatgaaatcactttccaaccccgaacaacaatcaaaggccaagccttagcagactttgtggtagaatgcacaggcaagaaaaaaagcataccataaagcaaccccgagccggtacaaacacctcagccatgtaacaacgaagataagcagacctggaaact

SEQ ID NO: 260000 - DNA, 868 bp, Cannabis indica
tccgggcccaccctgctaacgaaggggtggtcccgtataacaggcagactcacgttaaggagtatcgccatcgctttttcttctcctccggattcagggcagtggaccatccggagctccttactgagtgggtgaggattcctccatatgaacggactgcacctactcaggcctttcttcggagagcccaggcctttgcctcttacgaccgggccgatcttgacgtcgggggtctggtcactacggagaactgcaggaaggcaaaactcatccttccgcatcaatccgtggaggactctaacctttcccgggtcatctgtcccaatgtgagggcgccggtcgcggagaagaccttccgggacgagatcatcgccacggcagagaagaaataccaggagtatctctaccggaaggcccaggagaaggcgtactctaaggcccaggcggcttccgggaggacgctccgcgtggggagcccggtggagagaaggagtcaggcgattgccgggaagccccttcacattggggattcaacggagagaagggctcccaggccacagcctttggttccagagccgaacactggggctcctggtgccagcacttccggcgccggcggtaagtctcctttggtaattcattatgttccttctgttggcgagtatgccagtcgtaggcccgtagggttcgacgagcgtctgtataggtttaggatgccctcgacccggtggggagatcatttgaaggaattttatttttcaaacttaggagatttcctaggtcggtcccggatgggttctggtcctccggagcccgttcccttaggtccttcagcttacattacatccagctggttccggccttcgga

SEQ ID NO: 260001 - DNA, 453 bp, Cannabis indica
ttgattattctagatatatcaagtggttgaagttctagaatcaggggcatataaattgggcaagtatgatgaaaagatgcaactcgttttagtaccaaggtattggaacggggaacacttaagaaaatactaccagtaaaagtaccaggtcagatgaccatatcaagtacgaaatgaaagaacattttctcttaagtgaatggccttctgagtggaccacgccctaaggttcggataaaatcatcaagtactcaggttggatgaccaactttgaaagtacgattttttttattttctgcaagttgttttgtttatgctaagctaaagatcagatcaaatcaacataatagctttgatgtatgttactacagtaacagacatattaaccaataaatgaataagatgttatttaaattcaaattgtgtcgagttcattagcatgttataaattta

SEQ ID NO: 260002 - DNA, 592 bp, Cannabis indica
aattctttcaagcgtttccttcatacttaacgtttcacaaaggaatataaaatcgggtctcttttgacttacaaggtcttttaggaattgaacggcccgtaggttcccaagcccacggcaattccagcttaacacactcatggcgaatggtgggcctggaacccagagcccacccctaataagttttttggacccgctggcccattatttccattcaactcctcatccattaccacatcttgtcccactagccccatagtaaaattagttaagtgggtcggcccactactagtctccttaatgagaggcaattcattaataacaatcttcccagtacgtctacgtttagaatcaaccacattgagttgagtttgactttcctcctcaattacttccacaatcaactctttgccacctattgcagcataatcagtgttcattatctgctcaccaacggcactatcctgaaaaataggattatttactacagactttccatatctagtcacacattgattctccccctgatttcctgctgtttgcatactttccttaacggttgtttgcagctggttcgtcactggcacatcgg

SEQ ID NO: 260003 - DNA, 2188 bp, Cannabis indica
caagttgagtccctacctcttccgagtcgttaaaattttttcaaaagacaatcttaagctcttaagtcctgagctccaattgttttagtccaatcttacatattactctcacctataccatcaaatggttaaataattatcatcatcgcattctacattaaaaaccaagtccaacgatatataatatgactacatttaaaatttggggttccgaaacctcacctaagcggtgcacattaacaatcggtggcggtaaaaatcgttgtaccagaaacatcaccgaaaataggggtagtgtatatcaaaacaaccacctcgatgagtagatcacacccatgccaaccgtttgtcaaaacggtacacgatgtcatcggaaagtcgccggaaaggggcggagctacaaaaatttcaccgaaaaaagtagtgaatcgggaaaaatggtttagtgtaggttgttctcctcgacgagttgagtttagtggtgaaaacgtctcgtcaaacggacgccggaggtgaccgaaaaatccattcaaagtttgaaaccccaaactttgacttgcgatcccgagctaacgacggcgaaaggagcggcgccgcttggagggtgaggtcaccgacacttgggcttctgatttttctggcgcgtgaggtcgggcggtggccggaggtgggtcgccggagtgtggtggttatggagctttgtgggttttcttttgtgtttgagtttaaagagagagaaaaagagattgagtgaagaagaggacgagtgagtgagggaaaaaggtttgactatttacttttttttatacatatatatatgtctctttttgattttgactcggtcaaaccgagatctcacatttacaatttcttttggtggtgcagtcaagataactgggggtggtacacctgtgaatttttgagttttgatttgaagaaaagttgaatgaaaaaattaatatcacgctctagaatagtttggtttgtgttcgatcctagttattgtttgatttttactctcaaaagttatgggtttgaaacaaaaaattttgaaaaattgggtaaaagtggtaaaagtttgcatcttgaagtattcatacctacgaggaacgattcgtgtaaagccaagatcaaggaccaaatttcatctttgaaaaatacaaaatatatctaacgtctctgaaatccatcagtcatgcatttaatgtcatatttttaatcgagacaaatcaaatgatggaactcccctcgagactcgcatcgaaataaatagttgtcagttcttttgcttctccacacacgcttcaccaagcgagtagatgcttcgtgagctaataagataattccacactactataaaattggactttagcaaaattcggtgccgatactattccaggaaagttgtcttccattcatagaaaatatttagaatttatataggtttcccctttagcctccacctgtccacttgtacaggctgaagcaagccttcacaatccacaatattcttgaagcttgggggtgaatgttatatgtgttttcggcaagggatacgtggattctaaatagaagtcaaggtccatcagtaggcctaaacgacacgaactaggccgagcccaacaccaacctagcctttagggaaagcaatcacacttctcactcaggcaagcttccaccaaggttagtataaatccagaagaattctagctccgtgtttctggaagaactcttagcgtgtatttggaaggcagttgcaattttccgtttactgttatgtatagaatatggatatcaatttccttagatattagacagagaataaatatcaagctaaaataggaaactatataattgaagattatatgattaatatcacattaattattcacaatcaagggacacggtatgaacaactatgaccgtgatcaacatgccaagtcagcatatagtcactgcttcatgggatgagcttcacttgataagctcaaagtgatgtataatttgtaaactccccactagtagaaaaaggtaactaagtatgacctctactactccttcatgcaaataattagaatttcttgactcataagttcaagaaaagaataaagtgctattattcattgtaatctcttaggttttttcagcttactttataataatatagactcgtagactaaggctcatt

SEQ ID NO: 260004 - DNA, 931 bp, Cannabis indica
cattccacaccttttcattgcgcacaaaccacaacacccagcaaagcataacaactttatgtttcatcccagattcccaacactaaaatctataatgaagccatcccccaaaagatttatcaccaatctctatcattgaaatatctttccatccgccagcaagcaaaagcagatgaatacccccacagaataatgagaaatagactctccaactcgcaagcaccttggacacaacaatgagggaagcagaacatgttacacacctaatgggacacgggtaagaagacaattggaagcagccctccaaaccaaatccttgactttaggaggaactctcaaatcccacaactctttccaaaagaccaagttaccaattccaactaactcacctttaagttcttgaagaaaccaatacgcagtcttgacagaatatacaccaaaactctcatcattctactgtcaaatatcgtcaaacattcaggggagcaaataaatgctcaaaataagctttatgtccctctctaaaaaatgtctttaagaaccgcttcatcccaagatgactcaatcttcataagactggagaccttttgatttgccaatctagggtgatctgaaaccacaaatgggttctctttattcgaaagccaagggtctctaaggatattaatagtcattccagatccaacaaccatacgccccctttttcgaataagaggctttgcttcacggatacttttccatataaaactcggattactttccaaatccacccccaggtaggacccacgaggataataacaagcttggaacacacgggtaactaaagaatcttgatgagaatgaagacgaaaatcatgtttccaaccaatgcaataataaaatacatgaagcttccgaaacccaagtctcccataaacctttgggacacaca

SEQ ID NO: 260005 - DNA, 542 bp, Cannabis indica
aaaaaatgtaattaaactattataaaataattatgcaactgtaaatcaacttaaaaaccacaactctttactcaaattaacatagttgtttctcattgtgacttttcatcatgtttatttgaatcagatcaatttccaactattataaaactaatttgccaccatttacataaatcgtaccttgtatatctgctagtttttggtacacgtcaagtgacactccttcataatttgtaaaccaatgtaaaacgatattgcaactgtaaggcaacgcaaaaaattaaaaacagccttattcgtaacatgtggttccttaattagaatcagatcttattttttgtttttaagaatctgaattgcctgttgtacaccagtgaatcaaccagaaatgcaactgaatataacgtatattcattggtgaaaattttttcatatcatacctttttttggattcgagggggagctccagatctgtttaattacattgcttcaatctggattttcaaggctcgattgagcgattttgaatgataaaaaccgaa

SEQ ID NO: 260006 - DNA, 697 bp, Cannabis indica
aatcaagagccttagtgaaaatgtcagcaatttgtttatgtgtttcaatgtattccaagacaagaatttaattttcaactagttctcttataaaatgatgacgaatgtcaatatgtttagttcgtgaatgttacacaatgtttttttaaaatattgattgcactagtattgtcacaaaaaatagttaaagtgtcaagatgaaactcataatccatcatcatttgcttcatccacaaaagctaagcataacaactttcagcagcaatgtattcagccttagcaatagaaagagagattgaattttgtgttttgctgtgccatgaaactaaattgtttcccaagtagaaacaacccccacttgtgcttttcatgtcattagtattacctgcccaatcaacatcactaaaacacacaagattagcattagtgtcctttgaataccaaagaccataatcaacagtcccatgaacataatgatgagtccatatttatcttataaatatgatcgatttaagtattaatattcttaaattgattatttaaattattgattaatgtgattttaatttgttaggctattttaaagactattcatgcatttagagtctttaggaagaatttaagcatattttggtggaaaatagtagaagtcagcgagctcgattgtaagaggcagaacttaattgagaattcagac

SEQ ID NO: 260007 - DNA, 732 bp, Cannabis indica
acagacatgggtctatattgctacaaagtaatgtcgtttggtctcaaaaatgctggagctacataccaaagattggtaaacaaatgtttaaagaccaactcgggcaaaatatggaggtgtacgtggatgacatactcgtcaaatctagaaacactgaggggcacatagatgacctggacgaatgcttcaaagtcctcaaaaagtacaatacgaaactaaatcccttaaagtgttcctttggagtcagctcgggaaagtttctaggctatatcgccaatgccctaggatttgaagcaaatccagagaagattcaagccctcctggatatgaactcgccaacaaaaaccaaagaagtgcaaagcctaactggctggatcgccgcgctcaacagatttgtttcaaaatcaacagataagtgtgtcccattcttcaacatcctacgaggaaacaagcagttcgagtggacggaggaatgtgaaaaacctttccaagagctaaaaacacaacttgcaaaacctcccgtactcttaaaacctctagacggagaagaactgggaatatacttagctgtcacggaacatgccgtaagtgccgtgctaatcagagaagagaacagcatacaacacccagtctattacatcagtaaaagactcattgaggccgagggccgatacccgttgatagaaaaacttgcttactgccttattctagcaacaagaagttaaggcctta

SEQ ID NO: 260008 - DNA, 939 bp, Cannabis indica
gtaaaacactaaaactcaaatattaaaaacacacacaataaaattcgaacccagaacttaacacacacatcagaataaaaattaaaccataaatgaggatttatgctactattattgaattttggtatttattagcaataaatttaatattttaagtatttatgtcacaaattttttaacagtaaagttcaaattttaatataattttactaaagaattattattaattaaaatatataatttattttttatatataatttaaaatattttatatatccgggatgaagtacgggatgtttaataattttttaaataaataggccaatcataaaaataatagtaataaaaaaaacatgttaagaactattgccatagtagtcaactttctagtctctttagtttcaaataacatatttttacttcaattacctgctccacttaattatcaaaggtaacagtaaaatatgtcattgtcgatgcgtgtaatacaattgttggtttaaatgtacgtaattattataaatatacaaatgattcatataatgattgcccaatgatattgagtagtccaagtatgtcgacatttcaagtacttcaccttggctagctagtactatatgtttttcaagtatacaagttagtactaaaagtcggtcttaatcagaatcagtcatgcactaattaaaataaaaatacactaagttttattaacatcatgagcacatgaatattatatatatagatgtatatatattattagcactaacatcatgaacacgagaatctgtatatgtatatataaatgtaataatagtagttgcattacaataatatgtatatgtattttgtttttaataatgaaaggtatgtatatataattatgagcccataaatatgaatatggatataatatatatacatatatctaactaacaata

SEQ ID NO: 260009 - DNA, 1818 bp, Cannabis indica
gacactagaaaattgacactcatctgcacattctgaaagatttgcttctcctccatggataaatttccaacagcaacttccatacaaaggaccttcttaagttgaaacttcaccatgacttttttttttttgataaaaggtgtttatatcatagatttataaatagttagacctcacggtcattacaaaagagggttttcgggacagagtcaaccgggatagacccaaaagtctgatgggagaaagtccacctaaccacattatgagcggcaaagttacaagatctactaataaatgaaaagcaacaactactaaaagagtgggatgacttagtacaaaatgagatgtagttatctattgcccaatgagaccccttcccattgatggcgtcgataaccacactcgagtcactctccactattacatacttagagccaatatccagagcaaccgtcaccgccaaagagcaggccgccgcttcaccacaaagagcatctgaaaagttctcccgagctgtctgaactctaattactctgccaagatggttccttgccacaaccgcagtacacatactatccaaacccacttttacatcacaattcagcttaatccaatcctgaggaggaggggaccaagcttcttttatagctggggtaggactttggagcaaggtatcaaacatatctgcataagaattacaaatattatcaatgcatttgttaaaatcaacaggacaattattatggaccttctcattgcgcactctccaaatagtatccactacaatagaagcatataagaatatgtcatcgacacgagctcctttatgtttaagatcccagatgaacttgacccagtcccaagctcggattcttgtatcacacaccagataaataccccaaggagaagaacgccagagatgaagagccacctcacaggatagaaacaggtgttcaatggattcaacacacctaccacaaaggggacaactttgatcctcaatatgaaatctagagccgatcacaactcttaccgggagggcattagacagtatgcaccaccataagaccttatgtcgctccaaaattttgctattccagagtttgttccaaagctttggggcgacgtcacaatggggagctctttccaaggcttgagcaagataggcagacttccacgagaactgcccatgactctccagggtccatatccatctatcaaccccaacaccagaaggttgccctcctttgagaatggctgtaatagtttcatggtcaaaccattgatgcagcttttgggtatcccattgcccattgtctaggacaagatctgccacatggttaagggtgggggaagcatcccctctcggtttcggacagaaacctttgtagtgagggatccaggggtcccgccagatactcgtagtctttccatcagcaattaacttgcaagcccctttcctcaagatagaattggctttcacaacactcttccagaaccaagagtcagaatttttatacctgcaggtgagaaaatctttgcccctaaggtacttcgctaccagcactttgcaacataaggattggcttccgtttaggatattccacccccattttgataagaaagcttggttcatttctctagttttcctgaagcccagtccgcctaaagatttcggaaggcagagtttatcccaagccttaagatgaagaccatgatttcctttctcgaaaccccaccagaagtcacagaccagaccatcaatccggttgaccattcgagtagagagttttgtggtttgcatagcatacattggca

SEQ ID NO: 260010 - DNA, 1733 bp, Cannabis indica
ttcgggaatgtattttattttaatttttttaattatgtaggatctcaacccttggctggaggacttattctataaagagaagactctcagagtgtgtaaagatgcaccttttgcaatacttaccttgtaatatttgtaatcaaaagtgtgattttcttgagtgtttatgtatgtgaggtttagtttagtctacatttgcagtgtgtacaattagcttttagtggtcatgagaagaagaatagaagatctcaccattgctagttgctacactctagtatagggcctccacttgtatttaacttatgtatcatctatctcttaataacaatgtttattctttgggctaggcccatgcactaccatgtcatttatgtattattctttatttaaaaaaaattatatttttaatgaatttttttttttacatttttatcctgttctataaaaataacaggaaaacaataataaaaaataatatacaaataacaacaaattaataagagtacaatataaaaatatatcaaaaagatcgtattttttgtaaataaaattataaaaattgtaaatatgtttaaagttctgtactaatttttttttttttttttttttttgttattttgtgaaataatccctttatttatttatttttggtaatttatgtttttaatattcaacactttataaacaatctgatcttgcactttgtacatctaacatatcaaattgtgagtgaacctggcttgattaacttgttattgttttcactattaaatatatgtatgtgattaatcacttgatacttcattggcaatgaaaatttcacttatcaataaaaacatgggtttattggatcgggtatccatttgaaaaggtggcccttctcctaatcctttcaaaacaaaaagataacaaggaggcgttaaatagagatatatattctgaatatgctcttcaattgaggcataaaagagatcattttaaagtgacgctttgtaaatagttaatgatattttataataattattaaattaaaatatgtagaacccaatatttaaatactccagtagcaatatggcacttcatggtagtgttaggcaccattaatgttttaattaatctaaaatctctatcttattgtttattatgtcacgaaaatttaattaagtgtgagcatctcaagcaagaagaatgatcgtttgtattcatttgagacaactgatactaatcgttctctttattttactaggatttttacagggttgaggagattctccataagactactttggtgaaattgttgggacttggggcagcatgaggcaaagaaggctctttctcctttgaggtttgtcttcctaaaatcttgaaattggttctatctatggattgtgtttggaggagatttggttttgacaatgcaatctgtattggagttgtagttagctttggatgtctttgtttcatgttcaaaagaggtatcatctacaattttatttccaataataaaattcttttgtgtctattcaatttgataggaatagaaaggagacttccctcttttgcttttggatttgttattttgttctaagagaattccttgcttgtttggctaagctttttaaagcgggagccgaatcttctgtctcaaattttctctgtctctctatcccaatccaattaaaatgttccacctcaatcaaatgtatatctccttatttaatagaattaatata

SEQ ID NO: 260011 - DNA, 1316 bp, Cannabis indica
aagaaaagcaatggggctttttctgaggaatttgaagaaggtaaagaagagcaaggggctcttcctgaggaagttgaagaaagtgaagaagagcaagaagttgctctgattcgcaagtgcaagggcaagatggttgcccaggaagagcccaaacggcagcggagagttgatactccgacccctagtcttgatggcgggatctctcccgaggtagaggaacacacagcccctcccaacattgtgctgactccagttcctggagatgaggcaagacaagaactctggatagctaaacacaactacgccatggatgagtactcccgggggcatgttgacgtggaggctctgatgaggattttgcgagttgaaatgcaaaatacccttaacgatccgaactaccagaatccgtgggatctaaacttggaccccctgtcagattggttcggtcgtttcctcggacccaccctagctccctttgccgcggagatgactggcgagtttgcgtctcagcttacccggtgcgcacccaagcggttcgctgcttatgcatccttgaactctatcttccaagtccaggatctcagccactccctcaccgtggtaagtattttttagtttacttttttcctcattattttctcttaaggacttttactcacacacttgtatccttttccagcttgctgctgaggccggccgtctttccaagaacttaatcaatcatggcttcgtcctgtccgacttgggggcatggacgaagttatgaaaattcttcacgatttgactgctgaaaggcagctttatcaggaggatgccgagcgtcgggaggcccttgccaaggccagtgaggaagaggccaagcggagggaggcacaagcggaggcgatgatccgagaggaggcccttcggagggataggctagaggccaggtaccaggaggagctgagggctgagggcgaagctactgttaaggccaagcgtgagcttcgggaggctagggaagccttggatgaaatggctgcccaggtgaagtccttagaggaagttcaccaggcagacttggagtctagggacaacctggccgtggagctgaaggagctcaaggacttcaaagaccaagccttgaagaaggcaaagaaagatgagctcctttctcccgtctcctgcagccggtgcgtcaagcgtttcgacgatggcgtctacatggcctggtctacaaatgacaagaatatcaagcttaacttctaccccaaacccgcggagatgattgcaaaattccgggagaagaagaaaaagctcgatgccatgctggaggc

SEQ ID NO: 260012 - DNA, 626 bp, Cannabis indica
aagttttattgtccatctcatagcacaagaattgtggaatcaaggaatgcaaaatttcttgagaatgccttgatcagtgggagtgatcaatcaaaggacttaggtcctgagaaagatccttcagaaccttccacttcaaaagcaagattgataatggttaacactcctgtagttcaaacgaatgttgaacaaccattaccaatcactgaagatccacaagttggtaatgataatctagtagatcaagatgttcaagagttgcctgcaactgttgaacaaactgctgaaccagctgctgctccccaagagcctgttggtgaagtcttaagaagatctactagacttgtcaaaccaaagatttacaaaggctatgttgtgtatttattagaatctgatattggaattggaaatgatctagaaacgtttttacaagctatgaacagtagagaatcaaaattgtggtacaatgctatggatgatgaaatgaattctatgaagtgcaacaaagtctgggaacttgtaaagttgcctaatggggcgagagccattggttgtaaatgggtctataaaactaagaaagactcattaggcaacactgagagatacaaagcgagacttgttgctaa

SEQ ID NO: 260013 - DNA, 1146 bp, Cannabis indica
gggcataaaacccaacaaaccgatatgctacttgtccaaccttctcgagaatctcaaaaggtcctataaacctagggcataacttgcctcttttcccgaaacacttgatccccttcattggagatactcataaaaacacgtgatcccctacttggaactcaacatctctacgtttcggatctgcataactcttttgcctactctgttagacaagcattctagctttaatattctcaattgcctcattcgtctgttgtactgactctggacctaggtatttcttctcccctgtctcatcctatggatgggagatctacattttcttccatataacagttcatagggagccatccctataatactctgataactgttattgtacgaaagttctatcaacggtagatacttactccaagagccttcaaaatccataacacaggctcgtaacatatcctccaatatctgaatggtcctttcggaatgtccatctgtctaaggatggaatgctgtactaaattttagtttcgtacccatggcttgttgcaaactctgtcaaaacttagaggtgaacttcggatctctatccgaaactatggactttcgtaccccatgaagccttattatttctttaatatactattctgccaactgatccactgaataggctgttttaactgccagaaaatgagcagacttcgagaatcgatctaccacaacccaaatagaatcaaataaacccctggttctaggtaacccaaccacaaaatccatcgtgatgtcctcccacttccactcgggtagggttaaaggctgtaacaaccctgtcggtctatgatgttcagccttgatctgttgataggttaaacatctcggtacgaattctaccacattcttcttcattccgctccaccagaagtaaggtttaagatcctggtacatcttggtggtgtcagtatgtagggaatatggagtggtatgagcctcctcgagaatttcatttctaagtttcaaactatttggaacacaaaccctggctttaaacaataacatcccactgtctgacactgtaaaatctctggcttgccaaggtgaaacctcttctctgtatttttactaactctggatcagtcatctgagcgactttta

SEQ ID NO: 260014 - DNA, 782 bp, Cannabis indica
actggagtaactgagtctacaactattgtaccgccatactcattccatttagctattttttcctctgagaccggacaatggagttactcaacttttaactgcgcgattagctctttcgaaaagatgttgaattatccaaaaactatggccataagcaatgataccaactaattgaattttcaaaagtaataggccacttacattcattgcaacctaagatacacattgggttagttcgagggaggttgcgcgtgtcgcagttcttttggaataaaagaatgaagacatatgttttgaaggcttgggaattggtttatgagggtgaagaagtgtatagttggaatttggtgcattatcacaataaaatgatgataagttgtatgagtttgtcgcacaagattactttgctcgcttttcatccagatgatggagatgtgtttttcttttcacgctccaacaatgataataatgttgaagaagatgttgaattttttcaatgccgaatggttggtaaaaatacaatcaaatcgaaactcttcttcatcttccacgtagagtacttggaagaagaactaatgttgtttctctattacatccttggtgccctactcgaattcctaatggcaatacaacttcctagtataaatatttcaggacctcatgattattgaagaataataatcttttaatgtgcttttacaatgtctttttatttctggtttgtttgtttgtttgtttagagtaaggttgagagagagagaacattgtttgttttcaagaat

SEQ ID NO: 260015 - DNA, 674 bp, Cannabis indica
aaatagaagtgatttatgtatataacttacatatgcgtaaatcatagcataaaattagaaaccttacaaattcatggtatacatatatatatttatataataaatacatttgtaagaaaaaataggacaataaaacaatttagaaaatttaaaatttacaattttcacaaaaaaaaaaaaaaaaaaaaagaaagaagaagaagaaaaagagattaaaatttgaagaaacaaatacatgagagatgagatttactttaatttaaccaaaattaccatattaattttcttggaggaactcatagcaactttcatctacaaacttaacaaatatatctgcaaagagaaaagtgagagttagtaaaattaacttctattttttgaaacatgacacaaagtgagaagttcgattatgaaaatgtacaaaattaataaataaaaattacttttcactcacatagaaaaaaattgtagaaataattgtgatcatcattatatctatcaacgatcaacaattggttgtgtttctctaaatagagagaagtaaaaaatcttccaaactgaaatgtagctccaacaaaaaaaaattattaaagaatattttaaaaacaaagaaataaaactacaaacaataatagtgattttatatgaagtattgatattttgtttctttttgc

SEQ ID NO: 260016 - DNA, 1077 bp, Cannabis indica
atcaaactgggaatattaaaatacggaatttcaaattttcatttcattcttttgtttggttgcattttaaagtattggaatgacattccaatggaatgttctttccaccattttggtggaatgactattctattttaaaaagaaaggaatgaccattccaatgtaacaagaaataaaatttaatgatctttttatcaatttttttttatgcattttaaattttattccattctattcctattcttattcctattcccattcctattcttatattttcattcatcccaaccaaacgccttttaatttgtatataaaaaatacataaaagtttaagagatgaatttctaacctttatatttgtattttttaaaaaaattatctaatttgtagttatgaagatttgaagctattagagagtttttaaaatttttaccattacactaaagtactaaactgtacttttgataataattaaactctatataggaattttaaaatttaagcttaccttagatcttatatatcttaaaatccttcttgtgtatattgtagttatttacacataattttttttaaaaaaatataaataattgtgtgataaaaatagtatgtggaccaccaattaaaaaaaaatacttgtggtctaaaaaacaatattcagttttctttaaaaaaaaattaattaagttgttaaaaaaaacatcaaattgaagtatttaatagtaaattttctaatttttttttctaccaaatattcattctaattatactacacataaaattgatgttgatttatgagatattttgtcgtttgaggaaattacgtagaatatggcattttttccttaaatttcatagatatggaaaaattagagatttacttaacttatgacttttttacaatttaagttagttgtatggaaaaatatttccatatttttaagtttttattaaataaagtcatattttcattttattaacttatgtttagagatttctaatattttttaaagcaaatcattaatatatatatatatatatttatattatttttatattataattattttatttatt

SEQ ID NO: 260017 - DNA, 710 bp, Cannabis indica
aattccagtctcgttcatttcattatcacgataataaaatcgagggcagtgagatagagttgaaggaacattaccagtagaaggctcttccataggctgcttgcctttggcagcagcagaagcctttgctgcagaagcagattttgaccaaggaggctctggctcgagttctgtgtcctcactgtctttctctgaatgaagagacactgatttgtctgaaaagacttccattggatcttcttcttctgaattagaacttgaagaagccgagggtggattggtcttgagtttcttcttggttggagggactgccttatcacgactttgagaagctcgaagttccttctcagcaaaggcttgctgggctcgagttcgggtcgaagggcctattggagtggtggcagggactgatgcagcaggaggaggaactgccaatggtggaggagattccttcgaagattcagatgacgaagtctaggttcgaagaggtcttaccgatttgcgagcaacttgcttgggaggacgatttggcttctcggtttgagattcacgctggggaagcgatgaatctccaagctttgcaacagcaggaggatgaactgtagcagcagggagtgcattggaaggagttgcaacggtttcttccaactttttggtgtgccctagattcttggttctcaccattttggatttgaaagagaagatgaaca

SEQ ID NO: 260018 - DNA, 901 bp, Cannabis indica
gcttttagatgttataataaagaagagacataattttatagtgttaaagtaatgcaatagtttgaaaagataactacaaatagcagaacagtaatacttttataaacaactacaaaattcatatgtttatacttgaagatttgcaagtttgcacgatttagatgtgggtttactttatcatatcagaaaggttagttgatgaatcaaagcacagtttaaaaaatttgtcaagagtgaccgcactttcatgccttttcaatttcattacaagcattgccaacttttcaaatgggtatgttaaattttaacgttagtttctgttagaagaaaagcatattctttggtatattctgttaagtgcacaacaaaaaatgttagataggcattttatatattaggtaagattactttaatttagttttcatatttttttaaataaagttattttttattgtttaataagattttagtctaagttttttcattctatgtattataaatatttaagatattgtgtaaaattttaagaaattcgagaaaaaaaaaattaacacaccaaaaataagatataaactatttgttgaataagtgtctttttttattttatacatgtgaaaaataaatttttaaatattgtatttttttatcaagaaaaggagattttcattaatcacaaccaacaaaacaacagccaaaaccagcagcagtcgagcaacaaactgctcttgcaatcaactttttaataagctaaacattttaagtaaatagctatgatcattagtgctcctcttttccctaacaacattagccaacctataaaacaacatctttttttacctcagcaacaatataattgactgacctagagcacccttcaaaaacacacatgtttctatttttc

SEQ ID NO: 260019 - DNA, 603 bp, Cannabis indica
ttggtaaaatctaaattaattatggttaacttgatgcaaggatgcaaggatctaacttaaccatagttaaggttgttaataaatttttaccaattgttaggctatttttagcatacgttttgggtcactttttatagttattttccttttttattattatatttggaatagaattacgcttattttctttggtttcaggtttcacacttggaatgtacaaattgatcaaatttcggaaaacaacaatctataaaatagagaaaattctgcaagaaaataaagctgaaactttaagcttaaatttgactatgttctatttagattttggaaaaagtcaaaacataaaagttttagatttctttttcatcttttcaacgcatcctaaatcaactcatttggagttcttatgtgaaagttatgcacattttattaaaagatgctgaagatgtcaaattttgatccagtagtcgcgaccaccactttccatggtcgcgaccatggtcgcgaataggagccaaatagtaagtttttttttcttcgtattttgcctatggtcgcgactaggctttatatggtcgcgaccaggggcgaaatacgagattt

SEQ ID NO: 260020 - DNA, 560 bp, Cannabis indica
taactgtatcgggaacaacatgagtcgtcactagtatgctagggacatcggtcgaccttgccggagccatggagatgctgtaagaaaatttcttccttttggtggtgctttcatgaacaatccatacggttttataatggcttctagaggcgtatcatagagcttatcacaaaaagtctcacaggggcccataatgcagcagataaagcaaaaagttggaacacgttcatacttgaaattcgcccaaaaagcaactctatcacgtttttgaaacttcattcttctctttagaggagtatttaaggggacggacaccctaactctgagataatcacgccaaactccattaaagttattgggatccgatttgagaaacctgccgatgtaatgaccagctttttgaacgacctgctatgtcttaaaccctgcttgtaaatcgtgaatctggacccacatatcaagggtatcaagttcgtgttaggttttatgccctaaataaaactcatttcaatataatcagatttacttataaatatagatcagaaataacatttaatgtt

SEQ ID NO: 260021 - DNA, 819 bp, Cannabis indica
ttttatttatttttttaaaaaaaggaaaggagttgcaaaagagtgggcggtttccttttatttgttcatgggctggcggttaccatttaaattttcaaatttggtttccttttcttgtcttgcttccaagtttatataaaccaatttttgtcatttaactcaccacctacccgaacctagtttcttgttccttgtgttgtttctgttcatcttctctttcagatcaaaaatggtgagaactaagaatctagggcacaccaaaaagttggtggaaaccgttgcaactccttccaatgcaccccctgctgcttcagtccctcctcctgctgttgcaaagtctggagattcatcgcttccccagcgtgaatctcaacccgagaagccaaaacgcatccccaagcaagtggctcgcaaatcggtaagacctcttcgaacctggacttcttcgtctgaatcttcgaaggaatctcctcctccgttagcagttcctcctcctgctgcatcagtccctgccaccactccaaccggtccttctactcgaactcgagcccagcaagcctctgctgagaaggaacttcgagcttctcgaagtcgtgataaggcagtccctccagccaagaagaagcttaagtccaatcctccctcggtttcttcaagttcagaagaagaagatccaatggaagtctcctcagacaaatcaatttctctccattcagagaaggagaatccagaggacttgggagattcgtctgacagtgaggacacagaactcgagccagagcctcaattgacaaaatctgcttctgcagcaaaggcttc

SEQ ID NO: 260022 - DNA, 673 bp, Cannabis indica
ctagagtgatcgtcttaagaatataacgaaaaactcatatccacccctgaatgtacatccatcttcgaatatagatgatcttactttcagtggatataggcatattgactcattgcagagaaggatcttgtcaaaatcactatgaacaagatacaaatgccatagatttataaaatatgttgttgtggtctttcgatgacttaggtctagttacaaaataaagttcttagaatagtccaagtggatccttgtctcagaatattaaactcaaatccacacataaacatacagtttgaatccattgacagaaaatagatataaaaagaacttgtgaaagtcatactgtaatgtgtaatgtgttctagtaaatagaaatataaaatttctatttggaatctaaaatttaaagtcaaagacttaaatttaaccaaatatacatgagtaattattctctcttggaccaccactactaatctaactctaactttaaattgcatacagtaaacatataataggagattcaagattgaggatttatatcatttcgggatagaatgtcgggaatataatcatatgcgccattcaatttcttaagagaaaacagaatgacatcataagcaaatgatttataaaccatttatccaataaagattatttaagctaattcgaaatg

SEQ ID NO: 260023 - DNA, 1057 bp, Cannabis indica
gtttttatatttttgtgaaaatcctattttttaatcaatatttggactctaaccccaacttagaccttagagcccagacttggacccgctctccggtccctacctcacgacccggcctcggacccgacataaataaaatcaacaaattaatgaaaatgatatataaaatttacagaacacacttttggtttttgtttttataattaaaaataaaaaagtgtttatagagcacattttattttatttttgtgattaaaaaatgtaaaaacaaaagtgtaaccaaataccaccttaataaattgtttggttggtcattagatataattttccaatctagctacttaattagggcttttttttcccctagaaaaacgagattttttctttttaatatattaggaaaaaagaaaattttttttacataaagtactaaatttttatatatatatatttctataaattttgatttttacagattttctgagaaaaaaaaaattattttcaccttaagtagcaaaagtaacgtgaaaacaatgaaataacaacattttacatttttaataaataaaaaaattcataaaaatacaaaaatatatatataaatctgctaaaaatataattttttattacaaattttctatcaaaaatgaaaagaaaaaatggtattgccttttgtttattattctcattaaggcctcgtttggaacgtcgtattattaggtcgtattgtattgtattgtattatattaaattgtattttatttaatatttttatgtaaaactatatgtggtattaacttttatggacacctaaatatgtaatattttagtataaattaaaatttaacatagtattatataaaaatataatatataatccaattcaatataatataatacaatacaacctaatacttcgtcttctaaaacagccccaaaagtctctcaaacatcgaatataaattaataatatatatttgtgtatatatatatgggtgcacttttaatgggtattacccatgaatagggtaaaattagaaaattttgagcttttatg

SEQ ID NO: 260024 - DNA, 690 bp, Cannabis indica
catttcttcaatcgaccgaggccattggaaatttcccatccattgttgacagctgcaaacacctgaattgcatagctgcaagtaaaaaacaagtgatcatgagtttccaaagccgagtcacacactgggcagagattgctcggaatgactaaaatctgctgtaagtaatccctcgtaagcaaatgtgtgttaaaaatctgccaatatatgaacctatgtttaggaacaacaagcttatcccatatggcacctgcattgacagcttggtttcttccacaaacaagttataacacctcttagcactaaatttattgcctctagttgcttgtcttagcgttgtttcatccaaagaatctcttaggctcaggattttcttgaaataccaacttagatcttccttctttggccaatcccatattttttggtctttcaagtagattgaattgatccatttcacccataagcaatcctcttttgagcaagagcccaaagatgtttagccaaaagagctttgttccatttcttaccttcccgaaagccaacccctcctaggtttttaggaaggcaaaccttatcccaagaagctctatgaagcttgctcctattccctgaacttccccagagaaagtcacgacaacttttatcaatagcttccgttaccttagagggaagaatgaagatactcatcca

SEQ ID NO: 260025 - DNA, 3319 bp, Cannabis indica
agctcaatcagttgttaacaggaaagtatttcatttgttactgtttcataacggtctgtttcatcttcctcctgtgtaggaaaccctctttcgggttgctggacttcccatggtggagaattgcttgtctggttacaatgcttgcatgtttgcttacggtcaggtaattgcatgaatgaataaataaatgttcttgtttcaataatcttttctctctatctttatgtttttattgtatttgattcttttacagactggcagcggcaaaacctataccatgatgggagagatatcccagattcaagaaaacctcaatctagattctggtctaactccccgaattttcgaatatttgtttaagaggatttctgcggtaagatactcactttttcttttctttctcaattccttgacactttgtacatcttcctcttactcaaaaccaaattgccaatctatttgtaggaggaagaaagcagaagagaggaacagttgaagtacagctgcaaatgttcttttctcgagatatacaacgagcaaattactgatcttttggagccttcctcaactaatttgcaagtaatcaatgcttttccacttacctatatcattatcaggtgaacttaactaatatttttttttgtttgattgagacttattcatattttcttcctttttgtagctcagagaagacttgaacaaaggtgtatatgttgaaaatcttacagagtacattgtcaggaacgttaatgatgtggtcaagcttttgctgcaggtttgacttttacaatgaagttaatttcatccaattcttactaaaagttacaagttttaatcttgtttaatgttttgtttagggtgctgcaaacagaaaagtggcagctacacgtatgaacagtgagagcagccgatcccacagtgttttcacttgtactattgagagccgctggactaaggattccttggcccattttagattttccaggttgaatttagttgatctagctggttccgagaggtaagtttcttttatatgattgattaattctggtttgatttgtgtgtatgttttcccatgcttccaagtttgaccaacttgttaatctaggcagaaaagctctggagcagaaggtgatcgtttaaaggaagcagcaaatatcaacaaatctttatcaacccttgggtaactttaagttccattatgctctatgtcaacacattttcagtatctgtgtctcatgacaatacaaatcatttttcacttctttacttgatagaaacttttagcatatatagctttccttgtagaaatattctttggaaaaagtgattatcagactaaacatgtatgaacattcctacagttctcatttaaaaaccaaacattgacgaagtcatttctatttatgcataaagaagctaatgcttaacgaatgacaattttttgcacggggtgctcagtttgattagctttcttgatcttttctttagcttggtgataatgtctctggtggatttagcacatgggaaacatagacatgttccctacagagattcaagacttacatttttacttcaggtaagagaaaagtaccgagacatgaaaatggttataattttttctgctctttttccttttgataactcaaatacataataatttcaatggatgtaggactctcttggtggaaactcaaaaaccactattattgcaaatgtcagcccatctctatggtgtgaaatgattctgaaattctgcgctgttccaatttttattttgttcttcattaaatacaagtaatttttgttttcatgcagttcggttaatgaaacacttagcactctgaagtttgctcagcgtgccaaacttattcagaataatgtaagtactatgtgactgaaacaataccaaaccaagattcatcaactttgtgcctaccgattgattctacaattagctgatatacttaggatcttatagaaagtgttgtagaaaatatttattgtagaaactaatcattattctgtattgctgcaagatcttatttggtatttatttttgcttgattctggagaaatattccatattgttttgcctctctgtttatcgaagtgtaaacttactagtgacaaatgtacaaaattattgttcagtatttttaattttttataatcaaagtcatagaaaaaacacataattattgtcgtttttactcattttctcccataggctaaagtaaacgaagatgcttcaggtgatgtaaatgcccttcagcggcaaatccaacagttaaaggtatgcgtgtgaaaaagcatgttcatgagaattttactgttatttcataatggcctggaattatggaatgtttttaaactataatagggtcaattgtcctttctaacgaagcacaactacattgcaaagtctttaccaagttctgtgccaagtgctcaagaatctaggttcagtgacttgtctgaggaacatgattctctaggtgataacacagagtccgagcatcaagtgtttcatcctgctcaaaacaaggtaatattagctctcacctttatacatttccttcaatcatacatactgaggacatgttcgctattagtactgacactcatagcagataaaaacattggaagctactttacttggggcgttaaggagagaaaaaatgtcagagactgcaatgcggaagttagaagatgaacttgaaaacatgaaatgtttggtacgtgtctcatgccaaggacttaccatattcttatttttcagaagtttttgatcagtttgtatgttacactgtttgtcaacgttgtaaaagtggtttgctgttatggggttaatttgttgatactgcatctctttaggcacgccaaaaagaagaggatgctcaacacagcaaaactatgctaaagtttcgtgaagaagaaattaaacgtcttgaattgttgataaatggaaagttttctgctgaagagtatcttgtggaagaaaataaggttttaaaggaagagattcagctgcttcgagcaggaatgaacagaaacccagaatccacccagttttctgttgagaataatagacttcgagagcaattacaaacgtaatttctatgaatagtctacatatgctagaaattgtgctattttgtttttttttccttttggatcatgggatgctattgacaatttgcatcaattttcatgtcaggttccaaaacttttatgaacatggagagcgagaatcattgttaactgaaatgtcagaattacgcaatcaggtcatattcctttttttttctttcttctt

SEQ ID NO: 260026 - DNA, 508 bp, Cannabis indica
gctttgcttcttagttctttattctgactacccattagttgtttaaactaacaatggattttcatcacaagtgtcttccaagtcataatagggtagttccttgaaaaccctcccactacgacaaggtaccgtgactttctgtctaggaatattggtattgttctcatcggttgcgtcaatacaatagaggcagtgggacaatcttatatagaataagatgatagaacactttggaatctcctctacttttctactttcatattttagtcatcttcatagagaagtagtatttgttgaaacaaacactttcttatcttaatgaccataggatggtccacccctaatcactttagaatagctatcaaacatgtaaaccttagttaacagttttagcttttcttaagttcatgatcaggtcatccgtaaatctagaagtggtttacactaagtacacaaccatttcatcattttaaagttttctatccctagggtatttccctagaaggac

SEQ ID NO: 260027 - DNA, 1719 bp, Cannabis indica
agtggttgaattgaaaaaatggcatttttgagaaaataagataaatagttgagaaaaatggcgaaattgcaaagtgggggtccacatccatggccggccacttatggcttaatttaccatttatttatctttttttaatgctaaataattcaaacctgaacctaagtggtttcctataaatagatagtgatgacctcaaattgaaggatgatgaaaatacttgccttcattcaaaaatatttgagccttcttccctagggtgctattcaaacccttctcttctctttttctctttatactttcgaaccctataacgatagagtaagtgcccacacacatcaagtggtactcaatcatattgtgaagaatccaaacacaaggaaggagaattgggctcagatcttggtgatactctgctacagaatagaaacacgggttagagatgtgagcggaatgagtcatttaattccgctacaaccactgtaaggtttctcaaaatttatatgtatttaaattctattgttttagaaattcatatttaggatgttaaataacataaatagtagtaaatctagatcttgataaaacatattccaacaattttttagttagctaggtttctaattgattgcattagttgtttacgttgcaattcttcatgtttgtaagttacaaagaatcatgtttaaatgtttacagataatttcatttaaaagaaaatgtgtattatgtttctcactttcttgtaacatatgtgtattatgaatttttgataacaacataaaggttttaaaaatgtattttcttgagtccgttttattttgaaattttagtactaatgactattctagattatttgttctgctaggatctttctagttttagtctttttatttatattataaattggtttttgtgttaaatttgatttgttaactacaaactatatcgagcttctatttatctacataaataatataaataattgtattgtgttcataccatgttgcaaactatattaaggaaaattattttgtcaacaaaaatttatcctatatatatgcaatattgaagctttgtggcaggaggggcagagctatgacttgaatttgaatgctaaggaggctaaattttaatttagtattaaataaaatttttgtaatacatatttatattcaatactaaaatgtaaaatagttttttctttgtcgaaaataattataataaaatgttaaaataaacaaaaagtattctattattcaaatttctactctatattatccaattggaaatattactacaattctactgaaggcacacattcaattttaaatttatatgaataaaataattttaacataatttaacacttaactagaggagaaggagctcttaaatctcaacttttactttagtgattgaaagttatcaacttctatatatattgtatatgtttatttattattaattttttttatttatatatactttattttataaatatttttatatgtatatatagaatgggattttgaaggcaatgttcaagtcgtgtttacctcgatcagattcgggatgacaatgaatttaagttttgatacatgtaatatatgtatgtctcacttatgtttgaaaataaatacatttgtatttagattgtatttaatttttttagttagatattaattcaaaatatacttaaagaatttgagtttgtgt

SEQ ID NO: 260028 - DNA, 675 bp, Cannabis indica
attaagaaatttagaagttttgtatcttttttttaattaatattatatttatatattataatttttttaaaaaatatatagttaagtgcggattggattgaatcggtactttttgaggtcaaacacatccaatccgcacaagtgcggattttagatttttcaatccaatccaatccgtacaagtacggatatccacattttacggattgaattagattagatcgtgcgattgaattggatcggttactttgtgaacactcctaactactattggaaatactcttatataacttttaaaaaaataaaaaattacagttaactaatcaaattacctattaaaggtggtagcgtacaataacaatcctgtaaaacaaacacgttcacgccgacatgcctgccaatgggctaactcttaggtacgttctttctcgaaacgtgtccatatatataaaattaaattatacaattcctgttttttttaagaaaataattcttcaagataaataaattaataaatgataataaataataatagcccaaacaacggaagaatgaaaaattaattaaaaaagtcaatagagaggacgtatttttaacgtcacccgaaggatcaacgtgagagtgtaaaatttaagaccacgtgacatgcatttaataattttagctttttttttt

SEQ ID NO: 260029 - DNA, 2639 bp, Cannabis indica
tttttttttaactttataaataacatgtgtttaattagaatgtacaaactcattacaaaaaacaaaaacaaaaacaaaaaaaaaaaaaaaacgacatacaactgaagatcatgggaagaaagattaaaagggtgtgtgcatggggaaaaatgattttgtattgatcagaacaatttgcagtgaaaacaagtagtactatatatatatctagggtttccaaggtgatgagcatattatacatattacagaatcaataagacaaacttctttttttttcggtaaaatagagaattaaattatgtatgtatatatatatatatatatattttaaaagctgtgtataaaaagctgtgtatgtgagtgtgtgtgtaattgtgtatgtacctaccagctttgtttgtgatcagagagtgtggctcattcactctctccactcctaattaacttctctggtgccaatgagggagactttaacgcttggtttgggttactggctgttgcctcgaaaaggagctttttatggagcagcgcacgtgtgacccaatacccaatgcacctcccttcctacctagcttcctccacattattattattactactactactactaaaaatccctaatcacatagctcacactctaaattccttatttaaccttcaattacatataagatttatatcaactatttagaaaaaaataaaaaaacaaatacagctaattatactggtgtttaagaagaaaaagagaaaaacaattggtaatgataataaatatagttacattaagttagcagattggcagaagctataaattaagaaaagtaattattaataagtaatgaaacccataatgtataattttttgggagtttggagcctccacagaatcagaaactaccagtttctgttttcttttcctgcaaaaaaaagtggatgaatatatatatatatattatcagacaagttagcagaattagagtacaacagcacccctcagaaaagaaaattgaagaaagaataaggagctattttttggtggccaacttatatagcttagcttgtatatctatatagctagctacttaagctttaagctaccgtcagttgggacctcccgaaaattgagtaactatttcgacaaacatcaaatatatacatatgatcatcatatatctccacaaaaataaaaataaaaaaaaagcataaaatcataaaattaagaaaatttgtacattcttcttcaatatcaaaagaccgacgatgaattcttagcatctccaataaattaaacattaaaaaagaaaaaatcgaaacttgtaataaagaagaataatgaaaaacctgatgatgatgacaaaagaagaagaaaaaaaagttgaaacaaagagaaagatcgatatcaggatgcatatagtgagagagggagagagagaaagagagccaaattaactgatgatggaataacatgatattgatcatgaaagaaagttttcttttgaaaagaaaagataagaaagaaagaaagaaaaaaaaaagaaaaaaaaaaagaaagttaataaggtggtctaggtgttccccagtagccctgatccgaagtcaattggcatgaattcaacaaattctgaggcacgttattatggaatagagaagggtttggatcttgcaatagttgctgagactgagatggctgctgttgtcctcctcccgatccagctcctccgattccaggcgattccattcctccgcttccaccgggaatcgaaacctgtccttcatcttcctcaagtggaagcctctcatacgcagcattaccaaacgaagccgccataataacaaccggacccgaagccatgagtgggcccacaacactcccacccaccacctggccttgtcccccagccaagtaaatagtcaacccagaagctgccggtggagcaggcggtgggagaaaagatcccgatagagaaagaatctcaaaccttccatgtaaggtcaccacggctccaggagaagccggttgccttagtgtgacattagtaacagttccgctgccgctgaggatgcaaatcccgcgctggcggcggcgagcgaaggcggacatgctttccatgatgtcacagctgttggcgatttccataacgtgggatcggagggcgttggcgctgtctcgggttatgatgattgggggtttcggcttgttcttcgatcccgctggacgtccccggggtcttctagtgatctctgaatctccacctgatcctcctccgccactaccgggcgagactaataagtctttcccttcaatggcgttgttttcgtctctgtctcttttcattcctcctccgcggtggtttaaaccgccaccgcctccaccactgctgttttgttcgtcctcagaattttgttgctgatgttggtggtgctgttggaattggtggtggggatggtggagatgaagatctcttgctaagaaaggaggcggtagtggacggccatgagcagcagcaattggatccatattcttttaattttgtttttcaatttctgatactatatactcacttgctcaaatcgataactgagtgaagagagagagagggagagagttaatactagctggagagctgatcttaatctct

SEQ ID NO: 260030 - DNA, 586 bp, Cannabis indica
agtcaatatcaatggttgatcttagatctatggatcttaatcctgatatcgttaggttcagcttagttgtattatttatgttcttcaagttgttcgtggatgctaacgaatggttttggcggatatttactgtaatgccctgactctcagggacgccacgtgtgtgcttttacaaacttattcttactaaccatttagtttagtaaaagtgtggtttaattaaaaacctttaattgaatttaaaataaaactttacaaatagaagtattgttggaatatggggatcccctgctaataaaattcttttacaactaatttacaaaacgactaatacaaatatagaaaaagaggtcaatcttgcttcccagaagccaagacatcggggctgatatgtacactgcttggagacctctgactcatggcttaacacatctgctattcttcttatctgcaccatgaagcacctgtgagtcacaattactcaacaagaaaagctactagacaatagtatagtaagtactagcattacaacataatatacatattagtggatcaatacatattcagtttgtctacgcgaacacct

SEQ ID NO: 260031 - DNA, 949 bp, Cannabis indica
ctgaacggaaatctcgtgctagatggatgccctaatcacattttgaaactgggtaagttacgtgattaaaaacctaatcccgggaaacctaaaaccaaaaccctaggttatgctatattctcaatgggttattctaactctggaaatggggaaacacccaactgaggcatcgaaaaggcaaaaattgagaaaatgaaaggcctggggaaccctgccaaaaccggctggcctatttttgtggcactgcaaaccggctagccggtttgcaccaggtttcccaaagctcttcatttgttgctcaattctccaccaatttccatgaaaccttccagagtacctaattagggcataaacaataaatttcagccagtatttcacaaaacaaaacaataaatctcaagttgtcattaaagctcaaagctttgaactcaatgttcaaagttgcataaaaccaacaatacccattaaaaacagctactaggagttgaaatcaacttaaaagaaccctaaaattcgaaccctaagcatatgaaaacctaacagtcacagatttacaatttcacattctcaaaccaaagaaaaagctttaaaaacataagccaatgatctagggttttacctcacttgcaataaccttgaatccttgataaaacccaaataaatgaaggaaaaaaactggtccttgcccttggtttgtcccagccgaaagaaagagagagagagttcaagaggaaatgatatttccttctaatttccttttcttttcctttttgattttcctaaattggaaaaaggattttgattaatcctttgctgcccaaaaatggctaggtgtcaccctcaaaatcagccacctaatctcccctttaaaaagactaaaatgcccttaaggttataacttaggtatttttaaagctagggctaaaatggtcaaaatccataaccccgc

SEQ ID NO: 260032 - DNA, 656 bp, Cannabis indica
aatcattattttaaaaataaaataataaacaaataataattatccaaattatatgttaagatatctcaaattaagcctttttcaaatttctacaaaaatatctaggttatttaaatatttaaaataccatttataaatttttgataagtaaaatgatataaaatatcatttttctaactcataatttataaacaattaaatatttaacaaaataacttatttttaaatttgaaaatattatggttagaatatcgataaaaaaaatatctaggtgaattttaaatttattaattatttaattcatcatataagataattttaatataatatttcaaaattaaaaagatcgtgctctcttttaatttaaaatatacctaatattaaaatatctaaccttataattaaataatatataaatattaaagaaattaactaaattttaaaatctaccacagataaaaataaaataatcaatttttaaatttaaacctcaaaatatcatacattaataataatctattaaaagattaaatattattaatttgtaaaattcatatttaagtttaaatattaaaataatattttatttagatattaggtgtttgaaaatcggaaatatcaaaacttgttagaaaaaaatccaacaaaaattagat

SEQ ID NO: 260033 - DNA, 792 bp, Cannabis indica
atactttgaacaaactgattgatcctttgattccactgtttgggtgattgtttcaacccatacagtgatcttttaagcaagcaaaccagatatgttttaccattttccacctgaaaaccaagtggttgctccatgaaaatttcttcatccaaatatccatttaagaaagcagtttgacatctaactgttcaacctccaagtcattgtgtgcagcaatggctagcatcattcttatggttttgtacttcacaataggtgagaaggatatctgtgtaggctacctcctcaacctgtgtgaaccacttaactaccaatctagctttgtatctaggtggctcaccctctgccattccctctttttctttaaacaaccatttgcatgagacaaccttcttgtcttgtggcctaggcgccagaatccaagttttattcttcttcaaggactgcatttcttctcccatagcagcaagccactttttctttgatttgcaagcaatggcttcttcataggtagttggttcaggttcactctcatattgaaccacagctaaggcataggctatcaaatcagcctcagcatacctgctagggggtttgatctctctccttgtcctgtctctagccaattggtagttggttaaatcttgttgagtatcttgaccagtttctagagtttccacctcagatatgcctgcatcaagttcttccatagtactctgtgtttccacctcagtttatgtccttacttctagtgtgtgtggtgattcaattgagacttccatcctgtcaaaa

SEQ ID NO: 260034 - DNA, 703 bp, Cannabis indica
tcctggatagaaaggataaagtcctttggaacaagaccataactttggtcaaggtactctagagaaatagtaaggtggaggaagccacttgggagttggagtccaatatgagggctcaatatccagagttgtttaggttagattttgaggacaaaatccttttaacgggaggataattataatgaccgctcaactgtaatatgagaattagtagataattaaggcttaatctcagatttagatatttaattattatttatgcgattatggagatatatttgaattctaggtgtattaaatatggtatatgtgaaattttatgatttttatattttatgctcgataacagtggaatgcgatgtatggcctatagagtcactctattatggtttagtaccttagaaatagcgaggcaatatagttagacatttagaatgtcaggatcatttcagggttatggttttggaccatactacccctaggtttttaggtttactttttagtgaagaaaaagggcatataagtaaaaaaatttaccttattcttgtcttttagtaagattagtggattgtagtaatcctttatatttttattaagtcagattttaaattggaaaattagctcttatccccttagttttcatttaggcaattaaaataaaaattggaatatctagtctcttatccgactctctctctctctc

SEQ ID NO: 260035 - DNA, 665 bp, Cannabis indica
aattataattaattaaatctaaaaaaggaaagtctacctattagtaacctgctattacaggttaaaaaaaaaatgtaaccatatggttacaataaaaatgtaaccattgaatagtcacccattggtatatttatatatatatagcaagcataatttcttcttaacttattgggagattgagaagtactgtagacagctgacaagttaaattgttccaaaacatgaattgattaaaaatgcaaaaactatagcagaaattgtaaaccaaatttctacagttgatattacttttcagtctatgataattttcacattaaatcagtagaaatcaccaactaataaagcatatagtattagctatatataaaaagatcaaataaataaaaaaaatttatatatctttttatctgattagtaggaccggccctaaggtgaggtgagcaagacgtgctttttaggcccccaaatcctcaaagccctgaaattatgaaaaaaaattattagtatatagataaaatagtaataagggaccaatatttaattacttcaataacaatattcccaagctattggtcatcaataccttgaactcaataggagtgtcattaatattcctaagcttaaccactatatttataagagtattggtattagttccacctaaa

SEQ ID NO: 260036 - DNA, 1024 bp, Cannabis indica
aacaactcacaacaactcataaacaattaaaaaagttgacataactatcaaataaaaaagattttaacaaaactaatatgcataccataatttttaaattattgatttttttatgtaataaaagacaatataaataatctgaaaaaatagatcattttaatacaagtttcaaaatgagtacatttaataaataagtatatgatttgaagttatttactgtaatttttctagaaagattgtgtgtttgaattcaacatgggagagggactaagcagactaatgtatatatttttaattttgctatttggtgattggataaatcaaacatagagaacatcaacttatttggggattcttgttacaccaagaccccaacatgtaggctgccctaccctatgttccttccattccaagttatgcttaattgcattatggtccataaactataattcacatattgtcataataattggatctgattttttttattgttttatattatataatatttttgaattaaaggaaacaagaaaagacattttcactatcatcatcctagacaaagagagaaaggaaagggaagatgattaatgtaaaagattagattaataaaatgttagattataggctttcaaaataaattatttatttatttgagttaattgcaatattacatttaatactttcattttagtagcaattaatatctaaagttcaaattttgatagcaaaatcttaagaccagctttcagttagcatttaactttttttgtttagttttagtagttaactgctaggttagttgactagttgtccatgtgtacttaattaagatattgttcacatggacacaatttatacggggtacaatattattgggccacataaataaagatttaaaaataaaattaaaataaattaatttttataaaacgtaacaaaataattaaaaattaaaaaaaaatcattaaataaaaaatattttttttctgccttttgttttcacctttcttctctctctctc

SEQ ID NO: 260037 - DNA, 1361 bp, Cannabis indica
gcagattcatgacagaagcgaccaaagtctcgcaggtaaccgaggatggaaagttatccgcgatacttggggggcattgaagtccttagtgaactatggaaggatataaggaagaacgggccggttgactcaatgagtgatttcctcgaccgagctgaaggcttcatcaagctcgaagaagccattcaacgagcagaaggtgaaaaaaagccaggcaaaatgaaggctccttccactggaacgtccgcccaacttcccaactattccaacaattcaagtggcaagcgttcaagcaacaaccacaagcaaggaaacgggaagaaaggaaagttcaccaagaaattcggacagactccttgtgatcatgccaaacacactgcattcactattctaactgaagatatagagaatgtgtatatggcaactcagtcgttaattccgtacaagaagcccaggcccatgaagaaagatgccaacaaaagggacatgacaaaattttgtcggttccacggagactacggccacgacaccaacgaatgttataatttgaagcgggaaatagaatatctgatcaagaaaaacaacccacacctgcagaagtatgtcaagaccaaccaaagtcaaaacaaccaggatctgctacctccaccagtagatggacacttgcaagtcgttattggaggctcgcacatcgctggagatacgggcaaagctcgagagagatatgcccgaatagctcagtatgagcaagaagaagtcatcctggttgtggaagaaaggaagcccaaagttccacgaccagaagagccaaccataactttcaacgatgaagatgctgtcaagatcagatttccgcacaacgacccgctggtcgtggaattccagatagcaaaaaaaaatggtggctagaaccatgatcgataaaggagcttcttcaaacattctgttcaagactgcctaagagaagatggggctcaaacacaagaatctaagtccatgcctccagcctgtgtatggtttctccggtcaaggagttgcacctctaggacaaattcggctacccctcactattggacaagctccgactagcataactatcatggcagagttcctaatattggatgttccttcatcctttaacgcaatgcttggccgaccagccctctatgacttaaaagctgtcacatcaatatttcactcgtgcctgaagttcccaaccaagaatgcggttgggtgtcttagaaggaaccaacaatctgttcgggaatgttacaaccttgcagtggccaaggctaagaaggaaatatcctccagccagagcccacaaaagggaaaaaaacattcccaagtaggaaacttcc

SEQ ID NO: 260038 - DNA, 618 bp, Cannabis indica
aaaattaagaaaattcaagaaaagaaactctctctcatagttctctctctctctcttttttgaacaccatagaacccagctatggttggtgttttgctacctaattttgtggatttacagcaagttctaagtagattcaagctcaagtaagttcttagtacctctccttgtgatttcttgagttttaagttatggtttttgcatgaaattaggtttatgagttctgtagttgttgctgttgtttgatgttgttctgaagttaaattattgttagaaatgttgtttagacctggtttggtggctgtttgtgaggtttgttcaaggtttgagcttaagagctcaaactttgctctcacatggtgttttgagattttgtgcatgttgaggtattttgttgccttgtttatgttttttggaatatatagatcatgtctggaagcttttgttcgatttagggttgaattgaatgagttgtgaatttttaaagctttcctgcactgaaccggtcgacccgtaggaactggaattctagttggggaatcggtctactggttggggcagtttagggaaccctagtttttcccgttgttgaaatatttagggtcttgccatgttatt

SEQ ID NO: 260039 - DNA, 1021 bp, Cannabis indica
tatcgccaagacggtgaggaagggatttgggtccgggtctggttgtaatctaaaagattgattaagaaaaaaaactgtttaaaaaaatattaaaagtaattttttttatttttaaaattttgatttctaattataaaattgaaaagtaaaaacaattttatagaacatgtttttgaaaaatattttcacttacttttaaaacagaaaactaattaaaaaagtgttaccaaacgccacctatattttttgtaaataaaattaaaaaattataaaagtatttaaattccgtaaaattatattttttgtaatttttgtgaaataattccttaaagaaaatggtgcatccatacataatattcagttattcacccaagaaaagtaaaataatggtaatgcaatttggtgcatcttaaaaaaacagggcgggcgggctaaaagtaaaaaaatcgtttgggaagcgccaaatttgagcaagattttcgagaggaagacaaaatagaagtgaatggataggacgtaatcatgaactacgccactgcaccaatcaacgttctacaaacattaatccaacggtctagattttgctagacattcacatcatcgacagggaggcagacgtacgtgtagtgtagtgtagaccacgcttcaatccaaaaacaggccttacatactgccacgtgtcactgtattattttaagtctctcggcccaccgggcccaaaataaaagggcccaataactaaatggtttacaaacaaagccctactagttctgagttctgaagaagatcccgcgccccacacacgcaatccatggttttgaaacccttgcttcccaatttctccctccacatcttcccgcctatacttcccttcttaagaaacccccaaaccccactatcttaccatcccctctctctctctctctaaccctagccgttcttcttcttcttctttgtcttcttttctctttcttttttctagtaaattcaatatcatagtcttcgtcgtcatgaatcgtag

SEQ ID NO: 260040 - DNA, 749 bp, Cannabis indica
cttcgaaacccttggggaaggcagcaacttggagtgttttcagctggtttttactggtttaggttgattcttggaggatcctttgaaggtatagctttagtaaccttctctctagctttctttggttttaaagaaataaatttttgcatgaattggtatttttgttgttgtggttgctatagctgttggatgttgatttctatagttaaaatatgatttattatgttgaattaagcatgaattattagttgtttgaaggtttaaccaagttttgagttttagaactcaaacttggagctttcatggtgaaatttaattctgagctttgattgttgttttattgcttggaaatggtttattggggtataatatgcaggtctggaaagtttggttgagtttggaaacgagttgattagggtttgaacttttttggtttttcaaggtaaaaccggctaaccgattttacaatgcttgtaaaaccggttacccggattttgcagcagggaaacccgaaaattcagcttgtcgtttcgcatcagtttcagatttctagttggttgattccctgctagtttagggtattgtcatattgagttgcagtagataggtttttggttttaaacctaagtcccggttgtgatttagcgagtcacttatgcgtgttgttatcgatgtgatttaggagcctataattcgccgagcagttgttccactcaggttgaccgacacacctgaatttggaattgagg

SEQ ID NO: 260041 - DNA, 566 bp, Cannabis indica
atagaaattcaaatttccctactgtatatataatataaatattttaacaaacggttttttttttgacaaaagaaaagttccattatattacttgagaaaaaaaaacttcatttttttgtctcaacaaatccatatcctccccaaacaccattctcgtaagacatcaacaaaaaaggtaacgctattgaaaacagccaactgatcatagaaaaccattccaagaaacaaaaatcaaagatgaagacgttaagagcatgtttggtattgttttctgtcttttgttttcaaaaaattgtttttagaaatgagaacaaaaaattgtttttgaagtttttaaaaataagtcatgtgtcggttggtgtgtttggaagtaactgtgtaattactaggtagggtaattactagggtggtaattacacagtttagtaattacactatattttaaaatgcaaggtgtgtttggatatgaggtggtaattacatatgaattcttaatatcttgtttgacaaaatagttagtaattacatgtgaaaataatattttttagtagctaacgtttaatatg

SEQ ID NO: 260042 - DNA, 753 bp, Cannabis indica
ttgaaataatttttatattttttaaataatattattaggtgtacaaatataaatgtgacacatgtacaaaagtgtacataaaagtattctatattggtaattaactgtagaaaatgaatggcatcttgaatttgctaccagtttaatagtttggggagttttaccgccaaaatttaaaattggagaattaaatacaaatagaataaaagttgagagaatttagccgtaaaaaactttattcataaatataattattgattattttgtgtgaaaatataactatttattttaatctcaatataacatctccaacatcattagcttaattattattatcttcttttcttttctttttttttcttatggatcattatttttctttacatttccaatcataacacatgattaacatgtaagcatattattaccaatttaaatttgttattatagcaacttttgagtaaatatctatctatcactataaaagatgaagatctttcaagatcaacaacctaacaaaaagttcttaaagacctaacaatggacatcatggaaacctaaatttggactagaagaaagagtatttcaaaactaattataggaataagaataaacatacctaaaattataatacctttgtactctttgttgcttgaagaaaagtatatcaccataaagttgatcattagttagaataagatgtatcaagaatcggtgggttaacatgagcataatataaattatataatgatt

SEQ ID NO: 260043 - DNA, 747 bp, Cannabis indica
gggagcagagaattcatgagttaaacgtgactacaaaaatcatcataaattgaactctcaaactccttaccatgatcactccgaattcaaacaattttcccaatattacatcctttttcaactcttatatcaaacaaagagttttaaaaggatcaaaagtgtcagacttttctcttaaaaaatctacccaagtaaaacgagagaaatcatcaacacacacaaaaatatatcgtttaccatttagactttcaacttgaatttgacccataagatccatgtgaagcaattccaatacttttgaggtattgatatcagacacacgtttgtgagtgatttttaattgtttaccaagttgacatggttcacacttaccaacactttctttaccaagcttgggtaggcctcgaacaatacctgcatttgacaatttttttagatttttataattaatatgtccaaatttggcatgccacaaatccgtggtgttgttgatggctaaatgacaagtaaacacaggagttagggtataacaattctcattggatcaaaatccttgcaacatacattgattctgatcattaagtacataacaatgatcactgtcaaatgagacagactaccactacaacaaacttattaattaccggcggaattagtacaagtggagccaaaccgccggtattaattggttattaccggcaaaattggtcattcgccagtattgttttttgaaaattaaaaaaaaaa

SEQ ID NO: 260044 - DNA, 671 bp, Cannabis indica
actgctcgggcaaaccaagtttcagccagtcctgaggcccctgttgccagctcttctcaacttcaactcagccagcaatttatctcactactcagtcagcaaatccaaagcgctccatccatcagtgaaaatcttcctgtggtctcaaacgtctttggtaatgataaacttttccctcttttttttttttaatggattgtagatagtggagctactcatcatatttgtcattctcttcattgttttacatctctaaacactaatctcgttcctaatattgttactttacctaatggccatcaaattcacatcaacaaaagtggcaccgtaaaaatatctgataaactaatactgaccgatgtattatatattccataatttaagtttaatttattttctgttaatgcttatcttgaacattgtcataacaaactcacatttacttttactcaatgtttgattcaagatccctccctgacttctacgattgggatagctaagaaagttggcaactatttttctttgaacaagagcaacattttctcacttccaatatttctatctttgcaaactctacttgtactttgaaggcccctggcatcttcgccttggtcacccttctatgaacattactagtatactaaataaaaagtttgcaattctgtgaaaaa

SEQ ID NO: 260045 - DNA, 721 bp, Cannabis indica
atgttttgcgatatcgtcaaaaactagaaaaaaaaatgcagaaaacaagcgctagatgggtcagcaaccagaagaaaaaaatgcgttggtcgtgggttgtcttgggtgcttctcgtgggtcgttgcgagtcgtcatgggtcttatcggtcgtgggtcgtcttggtcggtcggagcttgtgacagtcggggcttgaaaggtttgggactggatgggaataacagagagagagggggggggggaagttagacagagagagtgggagaagagagcttttgaattgtaagggtaattttggagttttagagtgtttggagaatatttaaagtatttatttaaaggtggtatattaaaagaatagtttaaatttttaagtatattttaacaaattttccattttttatgtgtaatagaataaagtagtgtactttttttttaagattttgttaattttatacctaaaatatgttttatttacaaaaatactttcaaaaaagatatttgtataaatactgtcacgtcagcataagtacgaaatctaaaataattaccaaaaatggaaaaattacttccaaaattttcattatcttgtaagttttttttttaaaaaaaagtaactttttagttactttttatgtaaataatatatcaattagttattttttattaaaaaaaattatttcaagataattttttcacatacacatttggttgtttatttt

SEQ ID NO: 260046 - DNA, 858 bp, Cannabis indica
tttatatatgtatcataatagaagaatgcatctaattcataataaaaagacaaaaaaggacttgtttttgtataattttttttttttttatcttttgtgatacttgacactattaattgtatggcaccatttataatgtttaactacttctttagtattttatttatcatctctaataaataatatataatttaaatttaaaaacaaaatgagtaaattttataataatacttcaacacatttaggctaaatttaaccctttgttgatagaatttagtaaaaaaaaaattaataaaagcattaaatttttattaaaaaaaaaaaaaaaaatctattaattaaatatataaataaaatataaaaaattattttttttttgaataaaaatcataagatttattaattaataaattcgttcaaaataatagaacgcacttcagaggaacagtcctccaactgaagcacacgacctgtagagaaacaagagtctcttgccaagcaatgagccaacttatttgcagatcgttttacaaaacacaaatcaacaaaagataaagccaaaagcaaatttcgaacatcttgaacaataagaccaaactgtgaaggcataaaaatactgctctgaatcgcttggacacacaccaagctatctgtttccaacatgactctatcccacgaatgagttgcaatccaactcaaagcttctttaatgcctattatctcagcaatttcgggttgaacacaaccaatcttccccttcttgaatgcttctaccatagcaccatgatgatttcgagctacacaacccatgccaaagcgcccctcttgctcaaataaagccccatcaacattaacttt

SEQ ID NO: 260047 - DNA, 465 bp, Cannabis indica
ctgtctaagtttgctggtgatcaagtacctgtagatttaaccaggaaacaaaaatatgtgagaggactgaatgccacaatcagtcgggacttgaaggttaccacttcacatgacacattgtacaagaaagtgatagagctagccttgattgctgaggaggctaagcaatatgtagtaaaagagcagactgtaaaggatgtcgtcatggcatcgaaccctcctgcttttggtaatgtcagtaaggggaacgacagtggaaaccctgatcataaacggaaggctgaggcttccggagcatcaaggggtaatagaaagtttcaaggaaattgaggtggtcgtcaaggtcatggatcctcttttagatcatatctagaatattcaaaaagtgtgaattctggttatcttacgtctctttctggggcacatagtggataaagatgggatcatggtggatccggccaaatt

SEQ ID NO: 260048 - DNA, 726 bp, Cannabis indica
ttttgggaatttcagaaccccatccggaattccggatgcacaaccgaaatttcggttcctcgcaggaaactttcgaaaattcataactcattcaactcaaacccaatttaaaccaaaccttccagacctgttctaaataccccaaagaacaataccaaagcatcaaaacagcgcagattacacaaatactaaaaatgcaattaaagcttcaagctttgagttaaaatctcaaacttggttaaatctaactaacatgcatccaaatcagttcaaacctacttaaaaatgcataatataacctctgaaaactacagcaatcatcaacaaaacaacagcaacagatttcaacaatttctcttgaaaaaccatagttttgagccaaaatttcatatcttgataaaacaaagtaatcaccaacacattcatgcttgaatcaacaaaaacatcataattaaacctctgaaaacctttcacaaaatcacagcaacaacatcacctaaactaagcatgcaaaacatcatctttttcatcattttccacaaaaaaccaagaacaaggttaaggatcttaccaagcactttgaacaacacttagattgaatgaaaaaggcttttaaaatcaaaagcaatcccagccctagcacaccacaccagccaagagagagagagagggaaaagagcattgagtttttctaaatttctaatttttactttgaatgaaaaatga

SEQ ID NO: 260049 - DNA, 986 bp, Cannabis indica
agatcctggtaaaataaattccaacatgagtggccccagagtcaaacaacacaaagaaataagagttgttgaccgagagctgacctattaccactgaagggctggcttctgcatcagcctgagttatcgcgaacacccttgctggagtgggcttcgctgcagtctttggtgcttcagttcttagttggggacaatcccttttgtaatgccctagcatgccacactgaaaacaccccgacacttttaactcctctagatggtactttttacactaatttagttttagtcacattcacaacaaattgtaatttttgtgtctaatacttttagctacggatcttttagtcacaacataggaataataatttacaattagtcacaattattttttcacttttagtcacaagttctgttactaaaagtaagattttttgtagtggtatactaacttttactattttttacaaaaatactaccaggcagtattttttacttttttactgtatatttttataagtttcatactgcagtatactgtgttaagtttttactggtgttctactggtggtttttagttgttctactgttgttttgagttgttctgttttgtgtgatagtattttgaaaacttttccgtgtgatagtatttttgtaaaaattaaccaaaattccaatattttggtaagtttcccattaatatttacactgtttagtttattattatttcataaactaactctttataatcatacaaaagctgagtgcctataaatataaacaatgatgaaccaatagcacacatatatatgataagtttgtttccatggatctactctctaatcttcattcttacttcttcttcttctctttccatgccttcttcttcattgtgcctatttcattcaaaaattcataactttttcacataaaaatctaccaactgaaacaagaactcaagcatgcaattcaatctcattaaactactg

SEQ ID NO: 260050 - DNA, 1058 bp, Cannabis indica
gttttattttttttttttgctatttttatggaattctacaactaaaaaccactattgacaactagcgatgacaacctaaatcgacaaacaaaaaatcgtatacgaaaccactattgcaactagcgctgcaaccactttagaaacccaaaccgtaaatttaaaaaaaaaaattaaaaaaatagtatatggaataattcccctaaaaagatcttacatagcatgtataatttttatcttatatatatttttttaaccatattctctttctttgtaaatttttttacttaagtttacatttttatcttaaatcatctatacaaataaataaataaaattattatatttaatacattatatcaataattcttattctattatcaacgatattatatttatacatgaatacatactaattaaacattaacacttttaaaaaattcaaaacgttaacactttcatataatttttgaaaaaataaatatctaaataaataaaagatcaaaagatataaaaatgataactttatttatgtgcattttctatatcctacttttttaaaatctataaatcaattgttatgaaaaaggaaaaagtcaaaataatcttttataaggagtagctaaatttaagagtaattttagaatgagaaagaaaaaacataaaataatgatttattttttttagaaaaaaaatcaataggtaattagacaaaatttaataaataacactattttctattattattaagtatcattttttcagttttcaattctcatgttgcaagaaaccttaaaataaatgtataattatgtgaagtaaattaatttattgttgtttcattagtaagaaaatttacaattttaaattagttttattataaaattaatacatttatttggatgttatgattaaaaattaaaaatataaactatataatttcattattcaaaatgtgtaataattatttatttagaaaaaaaattcaataactacaaaaaagataaggtactaagtataaatatttttgtattataaaattttaaaataaacaataaaaa

SEQ ID NO: 260051 - DNA, 2361 bp, Cannabis indica
aagcggaaaaatggaatttctacacaattcctattggacccaactctcgtggtctagcttggctgaaatatgtacaagtcatcctcaaagtcctcgatctcatgcctgacctgacattgctttacccttgcttgcacaatagagcactcgtgagccaaggcccagcaaaacagaaaataatacaatatgataattataataataattacacttcatacagtacgacactgagtatagatattgtgccaccgcactttatgttacatttttccataataatttcactgtaataaatgtctatgtaacatagacctacgtattacgatcacacgtcttttaacatttaaggtcttactagggtttgtcttgattataatcaccgagtctaacttggttatgccttacatgcataactctacacagagattcaattaatagattattacacacttataacaatatgcacttagggtaataaccctaggttgcgaattcataacaataatcaaatatcataaaattgcaccaccgcgatatagtctatgtgcttagttctctatcttacctgattttcaaagtatgtggagaaatcacgatccactagtgattctgaccaagttccagtaatcctaatcacaatttgcaagttttacaagctagggttagtcccctaaaaatcacattcataatattcacaattaggactctaacactagaccaaataatagatctcaaaatgagctttctaacaatatatagaacgtctaaaatgaaattcggagtcaaaaattatgcctaaacaggggctcaccctctctggtttggtgccaggtcgcaactactaggtttaaaaatctaaaaaatgcctaaaaaatcatatttaacccaatctgaacatcatccaatcaaacctaaacttggtacaacttaagcaattgacttctacaccaaatcaaatcctaagcatcacaaacaccaaaatacatgctcaaacactataaacaaacaagattcaattactccaatacatgctttaagaagttatgaacacaatactcatgctcaactctaactcagaattgaactaatcaaagcaagaatttcaaaatcacaatagcaacaccaacatacacaaatgacctaaaattcattctctagctcaacataaatacaatcctaacaaatccaaatttagctccaagaatcaaagcataaacacaatgaaaacttaatcttcacctatgatcctcatccaaacacacaacatgcaacaattagatataatcaaatttcaaaactaaagacaacaaaggatttaagaaaaaactacctcaagtatttttccacaactttaacaataatttccctgaagaaattaactccaaacaccaattttacacccaaaatctcaagaacttcaagaaatttttttatttaaagagagagatggaggttggttgggaaggaaataatactttacttacttcatatcttgtaaaatactttacttagttcatttcttgtaaaataggccaattgaccattttgccctcaaggcaacaaatccacatataactcatttaaggatactttaatcatttcacttccatacatacatccagatattctcacataaattatgtgataacataattacacaataaaattattttagacctcgaatctagtttaggcctaaattacccgattatgactaaatcgtgctaacttatcaaaaattacctacaataagataatataaacatactatacaataatatagtctaatcagaacaataaatattaaaattatgattttaccattctcaagtcagaattataaaaaatatccctaactcataaatgggatcttaaatataatatttctcaaataatttcatataattaataatataataatataattactcaattataataaatctatcttaattagagttgctcatccatttactaatcctgagatattacattaaggctgctatcaagtatggcatagatgtgattgcagtagaggatgctcttgttgcactaaagttgaaagatttcaaattataattggataaagaatctaagaaagaagaagtgtatttggcaagaggaaaatcacccaagaaagtgagttcgaagagtaaacatcatcactttcaatcaagattgaagtccaggaagaaggaaactcgtaaatgttacttatgtggaaggtccggacacttgcaaagattttgcaaaaagtacaaggagcaacaaggattcaaaaaatctcataatggagataggaaggacaacaagaagcatcaccatagtaatgatttagctgtagtcacggaagataatgac

SEQ ID NO: 260052 - DNA, 516 bp, Cannabis indica
aaaaaattattagcggtggagttctatcgctaatagtctaattttttatattttttttaaaaaaattattagtggcagacctggcgaacggtcccccgctattgtccgccgctaatagtctaatttttttttttaataaaaaataaggttcgctgctaatagtatattttttttttgaaaaaaaatattagcggcggaggtccgtcgctaataagtgagcgaaaaaattcccgcccattcagttcaaacattttaaatacttattagctacgggacattagcggcggaccccaccactaataagtctataaataccctcaccgactcatttttcctatttttactctcgactcttcaaccctctttctcaaccattctccacctcctccactgagtaacaccaccaccactaccactaccgagttctccaccaccgagtaccaccacgcaccaacaagaataatacgcaccatcaagtatcaccactaccgagttcatgtaagtaatttttttttt

SEQ ID NO: 260053 - DNA, 514 bp, Cannabis indica
aaaataatttccaacaatgaattgctgaaacagctggaggcaaagctaaccgatatgccacctgaccaacttttcaagaatctcgaaaggtcctgtaaacttagggcataacttgcctcttttcctgaaatgtttgatctccttcattggagatactcgtaaaaacacatgatcccctacttggaactcaacatctctgcgtttcagatccgcataactctttcgcctactctgagaggcaagcattctagctttaatcttctcaattgcgtcattggttcgctatactgactctagacctaaatatttcttctcccctgtctcatcccaatgaatgggagatctacatttacttccaaacaacagttcatagggggcaattcctatcgtactctggtaactgttgttgtacgaaaattctatcaacgacacatacttgctccaagagccttaaaaatccataacacaggctcgtaacatatcatccagtctctgaatcgtcctttcggactgt

SEQ ID NO: 260054 - DNA, 621 bp, Cannabis indica
aattaaaataaattcttattattcaaaaaagaaaaacattatatacatattaaatgaaataataatcaatttttctatcttcttccagccatattatctttacagattaacaataaactttgattctcaattcgaatgctatttttcaattctattttcatatattaaaattctcattccataaactttctactatatttttcaatcaatgcaatgaaaaagtaaactttaattcctgtatgaaaaatcaaactctcaatcccaataattaatagaaacaacatcaaatttcaagttctcaaaatctataaaaataaataaataaaaaaaacaaatctcataaacacaaagtcaaatattagaaccccagtaaaacactaaactcaaacattaaaaacatacacaaaaaattcgaacccagaacttaacacacacatcggaataaaaattaaaccataaatgaagatttatgctactatttttcgaattccaatatttattagcaacaaatttaatatcttaaatatttatgttataaatttttgaataataaagttaaaattttaatataatttaactaagtaattattattaattaaaatacataatttatttttttat

SEQ ID NO: 260055 - DNA, 597 bp, Cannabis indica
ttttgttttgggaatctaataatgtggatggctggaaatatgatctacagttatggaatcccgactttcctaacggatcgaatgttggttccctttaagtgttaattctaaaatgaaaaaattgtgcacaaatttaaattggatctaatttatactttcactagtgaattaacaatactaaaggataaagaagtaattagaatggtaaaatagtaatttgaccaaaactacttacaaattgacattaggagaattaatcactagaattgattatatcaatgaatactacagtaaaactcagtaaatataattctataattactaagagttcaattctatatttataatggagtaatcatggaattaataaatatgattatttgattgatgagattcaataaataaatttagtttattagagcttagaattataggtctgtggtcctcaaatcgtcaccttgaaacactgtcaagaggtgagataaaagttgtatatgtaagttcaaaaaaattaattttgcattatcaaaatagtaatttttatttttgtaataaataatttattttttctaaattaattaaataggaaaaagacaa

SEQ ID NO: 260056 - DNA, 714 bp, Cannabis indica
aagccttaaccttttgttcaatgtacttccgagaagtagaaactcgatttaatcggcaagatcgaaatagtgatgtcctcccaaataagcctgaaagggaattctctgtatttaagcatgttgggcgaccaattggtcagaggaccattgttgctttaccaatgcaagataaattgaaggcagagtggtacattctcaacaattgtaatgaagtggagaagtatatcacgtaagattactttttcatattcaatttagttctctttagtgacgacattatctaacattttccccatttttcatgtagtgagcataggaacaagctacaacttaggggtcatcaaaatcttgagacaattcaagagaatgagtttcctagttggttcaagtctcgagtaagtattgctttctacttattttgttattaaaatattgtgtattaatctagcatcaatgattaaattatttttcttaatgatagatcaatcaactccgagcagataatcctgcagaagtatcagatgagttgtacgccatcgcaaatccctctaacccaacatgttattgttatcctggatgtattgttaacggtgttaaattcttagtcgaggatcgggatgaaaatcgtaagaccccaaacagtggtattttggtgcttggagaggatggtaacaatttttatggcgtactcaaacaagtgtacgagttcactta

SEQ ID NO: 260057 - DNA, 1218 bp, Cannabis indica
aatacgtcttctcccatgcggcattaaatgcgaggtgactgttcaagtggggtctggtgcctcgcagatgtgctttaccatagctctatcctccgagagtacgtggacccctcatatcttctccgggaggtattttcttgttgatactcttgatctaaaaaagacttagtcaaattttttcagaaccatatttctcaactccacgtgtcccagtcgcactgatccacgtattttgggcaaaattagggcaacaacgtgtatgtcactttgactgcttcatggactgacgacaagccctacggaccaatgcgagtgcttctagcgtatactttgtccctacttgcacacttcttaagaaaattttccaaaaaaacttatagtgaatttttgttggtgatgtccatacatggtaacatgaacgagttatatatactacgagagatataagtgctctttttttaaaaaatatatattattagttacagtgtttaattaacaattaacataatcaatttcataatttttttatatgttgtgattatatatccatctgttgtatcttttaaaaaagttacaatatgtgtactacgtgttatcaaaaatacttttattctaaaacataatttattttatttgatttgttgatttttgttttataaataacattttagccgagaactgtaatttaattataaacttaacagtaacacaaaaaaaaaaaaaaaagcatatatcaacactaataatgctagacacatatttaattaaattatatatattttgagatatatataattagtttttcaaaaaaaaaatggaattctatataattattaatattgattaataattttataaacgttattgtacaaaacaaatgaaattaaaatatatataatatatatacaacgactcaacctttttaatttttttttcagtaaataaaattctcatcagaataacatattaatttcaattattttaatgtcaactttttattctttccaaacaaaaaatttctgagagatatataattaacattatttcagtatcaatgtcagctttggaccagtactgttaacagaaagaaacgatcaattattctttaataataaattggttacaaatagacaagtcaactgaatttttttacataacaactataaaaataatgaaagaataattatttcttcacaagatgtatttgaagaaaaaaaa

SEQ ID NO: 260058 - DNA, 923 bp, Cannabis indica
tcacaaaaaagcgacaaggcgtacttcgttcctcggaaggataagaaaaaaaaggctccaactcgctatcacggtcactagaaccaagctcctgtcgagacatcccagaacgctacaattaaagacgtgtttaaatacacgattgttttgacccaataaaagcgggaaaatcacagctatatgattttcaaataataatcgcatttacactacgtgtatgtaatcaaaccccatgattttaggggataattgttgtaaaaagattacagtcaactttataatgaactgcctactatgtaatcataaatagtggcaagtaagatccaaaaggagacgaaaaaaatcatacaagaaaggccctgagaaaactattagaaatctgaataagattgactcgtggactatgcagaattttaactgcaaaaccacgtaaaaaatcccgtgtgttcatactttttattttatagcctttattattttttttttgtatgagattgtcactattaggctcaaatttagttaacgaaaatttatgttaacaggttcttcattgcagggaattgtggaaactctcattggatgatcaaatcaaaattattgttttagcttgtctaagaagatagttgagacataagaattgagagagatgagagagtctagagagaatgagaaattcatatattcttcattaattggttaagtgagccaatagttctatttaacaagtcaccactctttacaccaataaccaaatatgttcttacactaataattactaaactaaagagtaatatttgttattattttctattgtttaatattggtttaagacaggagtgtatcagcttgacttagcaagtcttggaatgatggctggttcgagagtgagatataagaagagtagctcaatgattagacatgtt

SEQ ID NO: 260059 - DNA, 1650 bp, Cannabis indica
ttgccagaattaggtcaaagttggcaagtaaacccgactctgagattgggtgggttttaagaaaataaaaattattaggccttttatttaaaaattatgtactatttttgaattttacttaaaaaaaggtatattttttaaattatgtactaagcgcagacctagtcggccttagcccaggctcgaccctaagtgcgaaaaacttacaatgaatatcctccttcacaatctctagacacattttttgttggaactagtaaatgtgcatgagaggatctccttgttgttgagggtccgaaagactagaggcgttgaatcttttggttttcactcattgaggatttaatcaacagatggagaatttttagctctactcatttccaattccatcaagtttgcagtgccttgcacttagaatggaccgtattgttgtagcacctcatttttcatgatctccttccagttagctaaaagtaaattatggatgcaaataattttcgttcgaggaacctactagcttggcttatgtggatccttcttgcgtgttggtagatcaaatgtagcaggatttgcattcgcgttagatcgacaatgaatgcagagtttttgaacttggtggtaggcatgtttagatcagtggtcttggcttctgcattctcgtacatcccacacttatggaaagattcagtggattcttcattgactaaattgcttgttgagtgagtcaagcattgttttctttttgcattttggccatcttagcattctacctgtacttgccctgcattaatgacagtgatcacaacacttgttaagccaacattttaatgatgttagctccatagttggtttgttttggagacatgatgcttctttgtttgaatctttgagttattgtttagaaattttacaaaatcttccaatcaacttagatgtacttatcttcaagcaagatcaaggaagttcccacataaaacaccaatttttaaggtaaaaacatgcactacaaaaacttgctaaaataggtaagctaagattctttattgttcatcatcttgaggatctttctcctttctggataaggaatgttcgaggagccaagggtttccctacagaagaccgttcggtgatcaagttaaaaagagttttagtgagaaggaaaatttaagagtcttactttcaattctacctatttatagtagtaagggcaggaattaatcaaagtcagttaggttaacaaacttaaccattatttgaattcaggctctgaatttcccacttgcccttgttagattattcacaaggattgatgatgtcagttaaacttattttttgttcatgcagattgatgacattagcaaagcttagcttcgttagttgatcgattccaagattcttctgcggtcttagacgcacatatccagggccatccgagctgtagtattttattaatgggctttgttgggttttgtgccctaaataagacccattacaatctgattagttatcaatttagaattttgaagtgatttatgttaacatttatttttcatgtttatggtttaatatacatatttaatatatgcacaaaattagttaagtccagaacatatattcaatcacaattacagtattgtcaatacagtggaa

SEQ ID NO: 260060 - DNA, 643 bp, Cannabis indica
gtatttttgcatatttttgtactcacatcgtagtttgctgagatttaacttataatatggttgtttggatatgaaaaatttaatgaattgaaagttcacaaattataattaataacacaaaagttatggcagatctttttcaaacttgtacttaatcgtgttaatattgctttgtgattagagcattaatgctattaggcacccattttatagatgtgttgttttacgattagtaagcgatactctttaaaagttattatattgaattatatatgacccgatatttaattaaactaattaatagcgatattgacatgtaagatagtgttagataatattggtaccttttaaaatttctcttgtgattattagcaatgatgcgttagactctaattatttagtaaaagcattgttattatgcatcataatggtgtcacgcaggtcggccctataagcataggcgggctaggcttgtgcttaggacctacttattttagggatctaaataaaaaaatacttttaaaaaataaacatattttttaataatttttaaaaatatcatttatttttagagtaagggctcaaaaaattttgtttacctataattcatttcaactcagtgaggaccacattgcaaatagct

SEQ ID NO: 260061 - DNA, 654 bp, Cannabis indica
gcgccgccccccccacgcgcgggctgtgcgagtgggcattacggctggacatcaccttcaacctccagccggatctccagcgggtcgcgcgacccggttcggccccaggcgggtctggacgaaatccggccaaaaaacaccacgaaaacttcggcaaatcgaggggttttgatcgggaatcaatttctactcttaaaatcggttcaattcggtttggaaaggactaaaaccgagcatattttactgattataatccgaaaaaaaaaataataaaaacaaactatcaacccgattctacaatgtatgtcatacaattcgaaaaattaaacgtgtagaaacattgtaaattagttggtaatgagatttgcaccatcaattttagtgtataaactatagaatcaaaaatcccaaattgaatttcataaagaaaaaaaaaaaatacataaaccctaaaagtttaatcttaaaattctcctaatttactcaatgattttatgcaagtaatatatcaaaagaaagagaatttaatgaggaataaaacccctaaacttttaagatcgaaaaataaaaaattcaacataaaataataacgaaattaatatgtaattgggaaaaaaaaagtaacatatacatattaattgttataaaaattat

SEQ ID NO: 260062 - DNA, 719 bp, Cannabis indica
cccacatgtttcgaaaaattgggatgtttggattcggatatcttaacagccatggaccaagcgattgtagtgagctgaattatgtccatgttacttttccaggttgagaatgttataacacagataaaaaaatattcccagatgataatttgcttcccatcgatcttgacccacatagaggtacaaccgcgtactctacaataacctttggtgctatgggagacaggtactgcaattatttcattaatgtttcataattttcattcagatccctttatctaataaatttctctgtactgaatttgctaacctgtgcagtacctctttgtttttattgacaaaagatattgtttgcagcttttatgaatatttgctcaaagtttggatacaagggaataaaactccagctgtaaagcgatataggtaagtagctcttgcaaaatgttctgtttatttatcggcttaaaataaattattgtatgtaacttaatcttgtgacggaatcagaatagaacttctgtttgctttgattgtactactgcaaagtgaattttgttttatcgcaattttcttctcatgtcaatgtttttatttttggtttatttttcatatatgaattgtttggaaaaatgtctgtaaaaaaaataaagaaagatcaattcttttatgtaaatctgtaaatagtaccaatatattaagttagaggagcaagaatatgg

SEQ ID NO: 260063 - DNA, 506 bp, Cannabis indica
ttccgcgcgcgcagtgcatacttctgtgccacaaacttgttttcttcatatcttttgattcaaaaattgttttttcattggaacaaaagccaatttttggtagaattttgtgtagaatctgaattttcaattaaaaatctaatttccagaataaaattaatttttattaattttttttagttacttaaaattagttttagatattactaggctttggcttttgaaaatttgatttctcacaaaaagagccttatggttaattttgaaattttaaattattttattttaattataagatcagatattacatattttatattaaatttgaatgatcttactttgatattaaaatattatctttaaaaataatcttgttcaaatttcaaagtttgctaaccatatcattttttttttcaaatttttaatttttaaaatttattttattaattaaaattataagattaggaatatgttagtttcaacattttatcttattagacattttt

SEQ ID NO: 260064 - DNA, 592 bp, Cannabis indica
agtgactcagcaagaaaagctattaaatcacacgcagtgtaaaatgcaagtaatcacaacatgacataataaacatactcatcattcatcacatattcaacatgcatatacaattaaacgtcaataagatgagacaatctcagtgcctcataaagtacccttaccactcgttaactacgagctacatatgtcactatcgttgccggtaaagcaaacgataagtaagaaacctatctgcagtttcaaacgagtaattactcataacggtaatgatcatttctttccctcgatcataatcgagtcacaacaaatgcacaacattacctcgatcataatcgaggcaccaacgattataatcgtttcttatctaacatattgagcgatgcataaaaattttcttacctcagtccagaagtcaggtgtgcacgccgacctaaatggaaacaacgctcgacgattccagtcttatgtcacgacaacaaaatccggtgaatatcttaaccaatttctgacacaaaccctaatactaaaattggacaaaccctaacttccattagctccaaaataggctatacaacacctaaataaccta

SEQ ID NO: 260065 - DNA, 764 bp, Cannabis indica
cgaatggacaaggaaggttctctaagaattcgctggccctactagctagtagaagaaacctatccttaaacacccactagttttcgatataaaaatcgtttaggtgttgatagttgttgagcataacataaggtgatcatcctcacctaaacaaagcgtggatgattgatcacaatatgcgaaagtgcactagattgatcgactacgagatcaccataaccattgatgcaacaacttggttatatggaacaatggaatggacacggaagtatggtggattgatcagaatatgcaaaagtattcaatgttggggctttcattgaaagggagcagcttgggaagaaagggtgtgttcgtaacataaggtgttcatgcccaccttgacaaattcatgcccaccttaacaaagcatggatgattaatcacaatatgcgaaagtacactagattgatcgactacgagatcaccataaccattgatgcaacaacttggttatatggaacaatggaatggacacgaaagtatggaggagggatcagaatatgtaaaactatgcactgtaggggctttcactgtccgaatggacatgggaggttctctaataattcgcaggccctactagctagttgaagaaacctatccttaacacccactggttttggatataaaatcgtttaggtgttgatagttgttgagcgcaacataaggtgttcatgctcaccttaacaaagcatggatgattgatcacaatatgcgaaagtact

SEQ ID NO: 260066 - DNA, 642 bp, Cannabis indica
acaccaaccaacaaaaagagacgggtttctcttttaaattggtttacatagttctaggttattagttaaacacaattggcaaataataaaaactacaaccatagagcacaatttcataatctatcaacattttaagagtctgtcaagatgaatgaaacaaccaaactaaaacagtcaaagtgatagggaaaaaaggcatggttaaaagcaagacgccaaactcaaaaagattaatttaagcatgtaaaatatgaatgaaatcttacttcttgcaaatagttcacacactcgttatatcgattgtagtccaagttgctgcgaggtccatcttcaaattctgaaccatatgtagaatgatcatttgcacattctggaaacagccttgatttttcagagcgtggaaaagtggatggcatgtacagcacattgagatatgaatccgctgaaagagaatcatctaagattgttggagcactcttggccaaatgctcatacctgaagaagtattggtcacacattagattctgtgcaacaatcagggtcttttcctttcttttgtacttttggtaaaggagaaagaagttgaccagcattcttaaagtataaggtaaagcctaattactcaatgactagattatattt

SEQ ID NO: 260067 - DNA, 549 bp, Cannabis indica
agatagaacctgaacaagagtcgctgaactaggaccctagaacaagactaggaccgtgaccaggactcggaccgaaacctataaccgaacaaagagctagcctcataccagaactgagacaggaactcgggctcggacactgtcgtgtacccagaccggaactgagacccgaaccttgacctaaatcagggacccgatcccaaacatagacttggacctagatagggatccggatacgaacttggactcggaccaagtcccagacaaggatcaaaatgctggaccttgatttggaccgggatcctgacccagacccaaacttggacccgcactcgggaccccaacttggacctggacctgaacctagacccaaataggggtccagacccagaaacaaacccggccacagtctccgactcgaactcaaacccacaactagaatcagatccaaagctagacccggacccggacccaaactcgaacccagaccaagatcagaaccaaggacttagacccagaactgaatccagactcagatcgggattggaa

SEQ ID NO: 260068 - DNA, 689 bp, Cannabis indica
gaggagggattatcgttttgatcgtatctttcagtttttggatctctagactccaatgatatgaaaatctttttcatatcaaatcttagtaacaaatcaagcattgtttgaacaacaccaaaagattattcttgataaactattctcaaaatgaatttgcttcaagctcaaataaaaattacgtaggtaaactaaacacattatacattagtttttatgacagtcacgctagaaatccatttcttgatagttgatacccatcaaaatggtcatccattaaaaaaaaaaaaataatttggaaaattttatgacagtcacatccacatgtttaatgctctcatcagttataaatttaccacacacagtgcacccttaatttaacataggtataatctagtacaaccattataaccattacttcgtcccataggaacattttcaactaataaaaattcaacaataatcgaaatatggatgtgtccgtttattgggtgtctactccaaaatatttataattcttttatttttatttttataattattttaaacaaatatcatataatacatttcatcactattaattattattatttttacttttgcaacaaaaaacacataatcatgtttggtattagtataaaaaataatcagtaattttaccctctaaacttttgataatattgattttg

SEQ ID NO: 260069 - DNA, 1514 bp, Cannabis indica
acttgttggagtagaggacctaaatgaaatatggggttgtggattgctatttctagcataagttccaagatcttgaactgaattgtgttattttcctaccaaaactattacaagcattatatattaatgaactaagtttagtcatgcaatatagttaatttaattaacaacaaaatactaaccgagtttgctttattccttacacaagtttggaagttatgccatgatatatctcaaccaaaacatctaaacttcattcctatccttcttactttgtgtgaatcttttggagctagttgatcaagttctacccttcacaattcttaagtctacctggttatactttactttaatagttttatcattcccacctttccagttttaggccattcatcttgattcctaagtagaaaaatttgattacaataggtcttcaagtagtatcctttggtgtaccatttactcataggatcctctcttcttgactatattgcagccacaacatgactacaaggaatgctagtgagctcctatattctgcaagaacagactcagttacccaaatcaaaagagtacatcccaccatatatggtgccaacttgacaaaacatgtctaatgatttctgaggcagatgcaaacctacttgaatcttatttttttcaagaatggttgatatcttaggagcaatgttggtcttcgacattaatacaaaatttctatttttgacatcatttgcatgaaatacatcctaatacgctctagaattgacagtattggtctatttctggtagctaatatagaaggagttctattaaaactcttacacatattgttggtaagtatatcacacttaggaccagttttaaagtgtgatctagcctagtgtacagaccttcaaccattgaccatttaaaagtctcctcatttagtttcttaatctcttctatggcaacttcaaatctacgaatagttggttctctaccagccttccacattagatctttcaacctcttatccctatataccttgataaaattcttcactaaatgtctagcacaacgcctatactcagcctcaggtaccccttcatctcacataccctttagagcttgttccaaacctttttgtttgtttgtgatgaagctccaatggttcgagttttcaatttttagatccactctcaacaagttcacaaactaactctaagagtcattattttctatttcaacaatggaaattgtaattggaacatttgattgttttcatatattcctactgaagtaagtaactgccccaaccatctaaactagtgactggtctacaaccctcattgaatcccttttttaacccaacatagcatatgtgcatctttttaaaacgacgttgtccattctcacctagctttgtcgaaaattcgataatagaacctttgtttctactcttaatctccttaccataatcccacaaagtagcataatgctcctcataagtgtcctcattttttcttgttaca

SEQ ID NO: 260070 - DNA, 1088 bp, Cannabis indica
ataggtcccatctaaggatggttagtgttggttgctacgaatttaaggtttaaccgaaaggtttaatgaaattcagtttttgagaaacaagcatctctaaaagttgcaaatatgttataagaattttacctatatgaacttagaggtgatgccgcctctcatgggagtagagttttctccttggatagttcatgaatggactagcacaaggccataatagtgctaagcatgtaaaagttggagtaacacaatgaaagtgtgtggatgttcacttgaacgaataccactgatcttatcattaaggacttggaggttcaatccatatgagtactgattagcaccgataaggctttgtagtgcttctactaaagtaatattcaactcgaaagagatattgttttatgcaccgaacattgtctatttagagatgggaaaggcataagtatttaatcaagtggggagattgttggaattggttaaatacttaaggttaaaatatgaagattagtatagactaatcaatgagatatgtttaacctaataatgcaagttaaaatacaaaaacacattaagagaatgtgtactttaaacttgtatttgtaagatgtgttaaaacttatttttgatcctaaaacttagttttgagtaagctaagtcacctgagaagttttgggttgttcgaaagtgtcaaatgcatgtttcagagaaaaatgcacaatattgggtgacatgttgcctgaaacatttctagaattacggtaaataataactatcaaagtcacaggagatatatcgccaattataggcaatatattgcctgaggtgacatgttgcctaataagataggatttgagtttttacattttttatttcccgatgctgcgatatcttacccagtggttggtgatatattgccttgagctttgcatgaaaaatttcaaggtttcataaaatacaagaaatgacccaaatgacctcattaagtgacctaaccacatgggttaatactaatgaagattcctacactatataagagtgatttttttttttttttataaatcagctatgtattaatccacaaaccattt

SEQ ID NO: 260071 - DNA, 8281 bp, Cannabis indica
tagaattttttttattaaaaattagacaaaaatttttaaatttaacaatcttaatagttaggaagaattattaacggtcaaaaaaattcaaagggcataatttagtacatgttcaatagaaaaaattactaattagttatttttttttaataaaaaaaaataggaaattgaggtgaaaaataataattagccaataaattatatacacaactaccctataaaaaaaaaacaaaaaaaactagggagacaaagacgacagctataaggtgtgtaaattacccgattacccgattacccgaccttaatgagcatcttctgttttcttcaatggtgatcaatgctcacttttaattcatgtacctttccttcttaatcactctttcacttcacaacctctatatttaactaccttctttttcttctacccatttttctcaaccactgcttcttctgagtcgcacttctcctttcgcgtttttcaccatggcggatctcggccccagctctgagatttcattcgctcaaacttttatctgcagtgctttcgctgcctgttttgctgaggtacgtgtatggtttcttgctgatgttgttcattgcgtttcgtagttaggctctttgctcggtttggtgaaaattgagttgaatagttgttggcagccttacttttttaatttgagttagataattttcaagagtgttaatgtgtagaattgattccagttttcttggagtctagcttatgtatttggattatggaaatgttaaacaaatcgtgcgtaatttgcaaatttggttgtagctcgttcataatttatacagatacttctttcgattggaatatgggaagtttggtcagatttcattttctgatatgcaaactgagttctaacagcctttaatgggtctgagctatcaacttgggtgcattttggactcattccgagtcaggatataattttaaattcatttgggttcttttttttttttttcttttcttaaatcatgaaaaaaattatgaatgataattcatgttgaaaatagctgcattctttgttctagaatgatcattctagcattgttattttgcagttctgtaccattcctttggatactgctaaagtaaggttacaactccaaaggaaagcagctacagtggatggagagaaatcagagtcagtgaatggaggagcttctccaaaatacaggggcttgttggacactattgccaccattgccagggaagaaggtttagcttcactttggaaaggcattgttccaggattacaacgccaatgcctttatggtggattaaggattgggttatatgatcctgtgagttaaatttactttccttccttgatagtagctaagagagtttttgtttaacaatatgtatgcaattgtaaattttatttgaacaggtcaagactttctttgttggcagtgcttttgttggagatgttcctttgtattataaaatacttgctgctctgataactggttagtatactggtggcgttaccacttctttgggtatcacacaacttgcactacaatctcatattacgcctatataggtccctgaccctgaccttttttcatatgttccttgacctttggaattgaaagttttagatgtttttaacaataaggcatttttttaatggataacaggagctctggctattgcattggcaaacccaactgaccttgtgaaagttagacttcaagctgaagggaagttacctcccggggttcccagacgctattctggagctcttgatgcatattatactatagttagacaggttggttttatttatatagtactttacttttgctctcatcattttgttttctcaacccatgaacataattttttcaatatttttttattcattttgtacatttgtaggaaggattaggggctctatggactggactaggaccaaatgtagcccggaatgcgacaataaatgctgctgagctggctagttatgaccacatcaagcaggtaatagtgtagtgttttatctcttattttgaagttccattttttcaatatttaacttattgctaacatgctatatctagggcgttacttctgtggtatcctgatttgttatacttatgcagacaattttaaaaattccagggttcatggacaatattttcactcatatcctagctggtttaggtgcaggtttgtttgccatatgtattggttctcccattgatgtggtacgtattcttttactattcatctgtagatttaagattttgttttcctaaaataaaaccacaaatacccataaatatggattctgactcaaaactattaatctgcattcactttaaattaaaactgtagtaaattgttcgcttagaaaaataaggaaactgttatacatctttttattactgatcatatttgaaatcttctaaaacttcaatccgttaaaactagctcaagtggttgggtggatgtagtcctggttcaagttattgtaaatatatcatataaaaataaaatcaaaatagaacaaaattctaaactttatataaacaatgaatggatgattcttttgtcatactcatgtataatcatgatttatatagatgctttttcttttgtttttgcgttgaccttggccaatcaaggttttgctaaaactgtatgggacatttgctacactcggaactacaagaaagtataaaggattaacatgaagcatttaaatgataaattggcaaagataggccacaccgttgtcatatagactattaactatagtaataacatatattggattattggagtgaataatgaaatgatcagacttcagcttcctgtctctcaggcatgttgtatactaaactgaaagcaagaaatattgagaattggtaggcttaatatttagagaaattagatatgctggtgttgcaacttgcaacattggtacaattgctagccattaatgatagttgatagactttgtcggcagtagggatgtctggttttgtttatatgaagcaatcttctatactctttgaggaatgagctagtcttgcaatattggtttaacgctgtatatgttttcaggtgaagtctaggatgatgggagattccaattataaaaacacccttgattgcttctttaagactttgaaaagtgaggtatgtgaattagtttaacgttaatctaaatttgcgttgtcaatgtggttgcacactattttacaatatataagtatatatacatatgcattttgtgtgaatcaatctgtaacaatgacacagatgggattcataacgggaattggaccatcatatttgaccttcgttcgaatgcatatatataagtttgctttcttttgacctctgtgactgaagaaatttcgtcacattgtggctactcactatcctagttaatacagattaattaaaagcaacttggaattttactatcatactatctgttaacttaaaaactcaaatatgtactataagtataaaagaatatattttggtatgcccgcatgatgatcttgcaaggtaatctaaaagaaaccctattagctattggatttaactcaatgacaaaccctatcagctgtaagagtaagagatggaagattgaaaactgagaatgtaccatgcctttgcagctgagtcttcttgttttgtactggttgttttttttttattactgtaattcatcgtgtttcataagttaccatcctgtaatttttgtctgttgcaattgtactgcagggaattttggccttttacaaaggtttccttccaaacttaagtcggtttggatcttggaatgttattatgtttctcacccttgagcaagtaagataagcaatttatagtttgctctgtaattattatgtctttctttttttttatatgcttaactatttgctttgcttgaactacttaaattaatatctaattttttatttattactttacatgacagacgaagagatttttgactggggctccataaggactggtaatgggatccgcagattaacttcccatttttttcccctcctgggctttgttatattgaactttaccttctttcttttcaacttggtgaatcatatttaaaacatggccaactctttattactttgtatcattggttgaattgatgatagttccaaaatgtagatttgtcaaaactcattagtcattataacactatatttaatacccgactatatgtagaggagcacgtcacatgttgcttaacacccttttgaacagcaggcattgatttgaattttaattactttatttggatgagccatgattacacatattgtcacaattgatatccctgcaataacgattctcacctaatcaaacactttgctagaaacttttaataacatgcaacattcctttggctttcaatacccatgaacactacacctattacataaaaaaaaaaacagtacttgaaaattacaagacatactatgtcgtaggacaatccattagcttagccctaattatatcacttacaacacttacaacaaaatccaaacactgtagtcttcatcttcaactccttggtaccaagtacaccctggctttgataactgacccgttccagagcttaaacccgggactaacaggcaaagccacaacctgacccggcgtaaccctcccaccgggaaacttaacgacgctctccatgtactgaggatgaaactcggctcctctactagcctcgaactgactaggaaccgggtcaagcgagaaagccaacaaatgaagaagccacacagtcttggcaagttccaagaactcgctgtaaaactgactgcgggggtggttcccagccacgacctggcggtgctgctccaaatctccaaacaaagactcctccattttggggtgaacaatggcaaggtacttcttgaagcagaacttgccgaagtgacaagtgggcagtactccaagaagctccgtggggtccatagccttcatgtcacggtactgagtaaagcagtctcggcggaactggtccgggttgatgagcgacgcgaggcttccgtccatgtaaaacgtctcgtgatcaaacccttggaacatcttgtgggctacgtaggattctagagcgtacttggcgtgttgggttgtgacggaggaggatatagtggatgcgtctccggtggcgctttcagcggcggaggccaattctatggaacgaactgcggctgctatgtcccaatgggcggagcgcatcaatgagaggagtagagacgtaaatgtccttaatgcatcggttactctactcgttgtcacctcgaataattccggtgatgtagatagcggcactgtaagtcggaaaagaacataattaaaatccttgttcagagctaaaaagtctgtttggctgatcagaaataaaaagatcattcttttcgtacaaaagacaatagacttttttcttttaggtcaatgattctaaaccaatgattacgtgccacatcagatacaaaagtcaacaaatcaaaattcaaagggtataaaaatcatttcatcggtaaaagacaaagattactgtgaggaacagggcaagtaccttgagcaagactacagctgaccttcttcctagagaaagaccttcctttcttcccgttcccaccgccattgacggtgaagctcttgagcttctccttcaggttctcaacttcaacttctctagccttaacctctcttttcagctcatcgaccgccgcttcatacggcgccaccacctctttaatcgtcgtagcagccattaacatcctcccggagccagatctccctcctccgttaccgccgacaacaacattccttctgaacctctctctaagcacactcagcctcctaatctctgccaacacggccgcatcagccaccctcatcttctccgggtcccacggacaatgcgcctcctgtaatttcaggtacgctttcttcattgccgaaaccgcatcaaacacttgccccatcgtcatctccatctccaccacgacctccctcgttcttggctgccaaacctgcttctgcttccttccgctactactactgctaccgccgcttctcctttccaacactccttcaatttgttgatcatcatcttcatcggtttcttcctccttttcatgctcatccgtctcgtactcgtacacttcctccgcatcgtcttttccttccccgtcgcttgaattttcacggcgttcgatgccggtgagcggatgaagcaagcaagacgccgtaactcgttgaatcagatccgacaggttcccaaccttgctcattttccccccaaatttcttattcgccttgacgattccaccaccactgagcgataagaaaaagagaataagatcagattcagccgagccaagttaagacaagtagaatatgagactgagttgctatctctcaagtagaggccgtaatgtttttattactctatttattaaaattaaaaaaaaaaaccaaatcgagaataatgttaagtagcatacctttttgtgttattgtagtcggatcggagtgataatttgggtcgggtttccaatggtagcccgtagaacggaaccgtttggggcaagtactgtactgagtcgtcgggtaccgtttcgaactggtccctcacgctccagctggcgtttttcttcttcttcttttgcctgggcaccgggaaaaattgttaataaggtattctctcccagtagtctctactataatgtattttattaattttttttctgaataataatgtattttattaattagatcatcggaaagtgtggtacgttttggatgacagcgcatatgtcatctcgaccgtacacgtgtaagtacgataaactagctagatgattttctacataaaatgataatatacgaattattattattattattaagggtcctcagcttttttaatattgagatttaatattaaactacacaaataacaactgatataatccaattcaaaaaacaatataaaacaataatttctctaccgtttttgtctcactcatcaatctggtccactacactggaccttacgaaaaaccttttagttaagaaagattatatataatttgtatataaattggatgtatttgttagttgtttaaggaaaaaataaataaattgttagttaaaacataagtaagattgattttgcatcagcatgttgcgacctctagtttttttaatttgtttagtgagattgagttttgtttaaattaatatatgacaagttgagttttacatcacgtggggtctaaatctaaactaaaaaatctagcagaaagtaattgtacaatatcctgatacttgatgatgtactggaacacatgcagctagtagtgttacagagtaactctcttatcagttaagatgtttctttaattaatttcattgccacttgtaataatgcacatgatgcttttggcaaaatcaaaatatacatataaattgcattttatatatatgatagtatgacatctctatattatatataccatacctaattataattagtacatcacaagcagctgatcatattgacgtaaccaattaggtgtggtatatgtatcatatataaaatataaagtaatgaggtaaagaatgttttcatgattttcactacttatatttcaattggtacgaaagcgaaagaaactcacaaaaataatatcagatataggtgctgatataagtagctatagagaattagtttagttgagaattaatacctttcaacattcgaagaacaaaagaagatattagtaaacatattttgggcttttcttctagctaggccaattgataaagagaaaaggaaaaagaaagagacacagagggaaagagagagagagagaatttgtttttcctttgtttttattgctgaatgagaaagaacttgtttgaagaaggaagtgcaaatattaaaacacacttctaggttccacctatagtcttgcaaaaactaaagcactagaagaatatacaaatatatattaaaacattttattctgtttaattatgtattttgttgaagtcagagtagttcaaactaaatatataatattaaaacagaactaacaagatggccaaaatctattatgaactaacaggagttgttatactctactatattatatatatatatatatattcatacaaggatttatatatactaggtgaatgtacttgccgagccacgtattgctagtt

SEQ ID NO: 260072 - DNA, 1430 bp, Cannabis indica
gttcaaccccgtcaccaatgcaaactcgacctgactgaatgtgcatgaataactgatggatcaatgccccaaaaaaatttatcaaattcctcttaaagaattgtttaaatggggattccttcaccttatcccataattggaactcgtcaaattttgtcttaatctttggataataataacttccaccacgccaagtgacacgaccggtgtaatgctctgagattagaattataaggcgtggtggtcttgaattctgtaaaaaaaaaattcaagtaagagattatgctgcacactatcgggccttatattggcctttatcagaccaatatcgaacaaaaaatgaaaaatgcaatgaaaaaaattaaaaaatgaaaaatgaaaaaaaaaaaaaacaatatccatcgggcctacttcggactgggtatcagaccaatatcggacaaacacaaaaatgcatgaaaaatgaaaaattaaaaatattcatgaaaccattgggcaatatcgagtgtggtatcgggccatcgtcccatcgggcccatcgggcagggtatcggaccacatcgagcccattcacccagcacagggccaaaatggggtaaatcgggccctatatcggcctatatcggacctaggggtaaaaaagggtgtatcgggcctatatctgcctatatcgggccactatggggtaaattatcttcaacctctagcccatacccatcgggcaccccatcgaacgggcatcagacctgcatcggtctccatgcctgtaacccatacacctgataaacccaaatcacacagatttcaccctaaatttaaccctaactaacagatttcataagagatttcacaagacattgtaacaaaacaatcgatttctaccataaatcaataaatccatcaatttaagaccgaaaatttcatgaaaaagttgaaaaaaaactcaccttagacattgctgtcggtgatggagtaatcgttggtgggtgggtcctctcctttattcgtcgatccccttgtttgtcagtcggtcctctcacttgttggggcaatttcgtgtgggcagttagggtgtgggcggttagggtgtgggcgaccgagagaaagagagaaagagagatgcgatagggaaagagagagggctaattttgaatgaggagggtaatttggggatattggatttattgatatatgttagcaatattaagtattttgggtttaggggaaaagttttcccctaatacatgtataaaaaatcaaaatttccttatttaattgggttggatttttttttttcgttaaataacaaaatggatcttgtattttctaaaatattacaaataggacatttacctcaattttcaacatttttttttcttgtaacactaacttgaaaatatgtaaacagttttgttataacacctttagat

SEQ ID NO: 260073 - DNA, 574 bp, Cannabis indica
cttctaaaacagataaaaagaaaacacatataaagttaagaaaaccttacattgattgcagcggaataatatgtctccttccactcagatctctaacccttgattcctttctgttgcagagtataatcaagatctgagtccgaatgtccttctcttggatgtgatccttcacagtcttccaatctatgattgaggtactgtttgctgtgtgtgggcactactctctcactaggattcgaaattgtatctctcttgtattgttgtgtatggttcaaagagaagaagaagagatgggcggctatatatagagaaaagggaagctcaactttctgaaagaggcagtttcctgaattacagagtaattgcttaattgccttatttggtgtgagccaccactttccatttatagataactgctaggtttaggttggtaaatatttggcattaaaaaaataaaaattataattgggaaatgcaatacaagtggccgaccatgggtgtgatgggcctcacttggattttgcagtttccacaattttatttctattttcccaaaaatgccaattttccaatt

SEQ ID NO: 260074 - DNA, 605 bp, Cannabis indica
gaaagcaaccttcaagaagaatgtaagcaagctcgataaaccattcttcgctgcagcaagagcatacacaaagagaaaatttgaataccatatgagcgagctggacagcttggacattcgtgtcagaccatatttacaacaagttggatatcataaatggtcaacataccacggcaaaaacaacaggtattcaactatgacttcaaacattactgaatctctaaatgcagcaaacttagcagctagagaactactaatcacaacacctatggagtcattgagagcttgatacaacaatggacatacacaaagaggaaaaaggcacacaaaacaacaacatttgtaaaacctacaatagagaagaagttagtcaacaactttgtggactcattgacagaaaatgtaaaatctctttaaactttaagttgcattacagtttttaaatagtttattttcagtttcttgagcaaaatgacgatttataaaattgacttaatttgcaggtaaagccaataaacgagagcatgttcgaagtggtagaagtaacaagatcatgggtaatcaatctaaaggagaaaacatgcagttgcaaccgattccaactt

SEQ ID NO: 260075 - DNA, 853 bp, Cannabis indica
gaatgccctatttgtgttgactgaagaggctcctgagtagccaaatgagaatgcaagcaaggcagtgaaaggaaagttcgagcgttggcaaaatgccaacaacaaagctcgatactttatgttgtctagcatagttgacaccttgaaaacaaggtttgcaaacactctcacggctgcagaaatcatgaacctgttaattgagttgttcgggatggcatcaattcaagctcgctttgaagcgactaagaatttcatcaatgcatggatgaaacctcattagtgcgtgcgtgatcaccttctccagatgataagttacttccagcaagctgagaatcatggagctattatagatcagacaactcaagtgagtttgatcttaaacagtctaactccagcctttctgtccttcacttcgaactatgtcatgaacaagttggagcttgactttcacgagttaatcaacaaccttcagacatttgaaaatttgattggaggaccacaaaaaggaggagctaaagctcctaattctgggactgctaatggtgcggctaaggctgaggcaaacattgcctctacttccaaactcaacaataagaagaagtggaaaaatagcaagaagcatgttcaagctgtgaaaatagttaaaaagaaaaaggctgctaatcctggagataagccaaaaggaaaatgcttctattgtaatgaaaagggccactggaaacctcaatgccctaagtttctagcaaagaaacaaggtatttctttctatgctaaaaactcatgtgttttagagaataaatatccccttgggttattaattctggacctactaacttgttgggttttatgccct

SEQ ID NO: 260076 - DNA, 742 bp, Cannabis indica
tttaggctgtattcagaaatcggcatgatccaggattttaaagaaactgttttgagaaaacatgcataactcctaggttatagctccgattttgatgatctttataccgttagaaaggtctttcaattaactaaaaactttgtgaacagtaggacttctaattcaaacgttttataagtcaaattctaggctaaacttgctgtacagtaagagtaataaatatattgagtttatcggtggactaagggtttcactaattgttatagggcctagaaggtatcgtaggagttaattacagcggagttgaggtaaggaaaaataattatactttatacttgctttttatatggtttgagtatctagtatgactgcttgaataaattgtattgaaactgtggaatgtgatagtttcggtgaaatagtgttttatcgatgaattgtatatggctgtttaatcatgttccaggtacttggaagtggttggaaaccacacatgtatggtgatgtggtaagtgaggcagtgtacgtaagggtgcactggttattggtactgcgttctggttaagaacgtaagacactccagatttgtatggaagctggagtgtgattgtgtgatatttttagtatggctacctctatttaaaaacatgatgggtttgttgtatggttgatgtatgtgattatgctatgatgtgtgaatgttggtacatagtattttgtttctccttactgggctttacag

SEQ ID NO: 260077 - DNA, 804 bp, Cannabis indica
aaaaaaaatattaagagtaattttttaaaaattatttaaatgtacattattttaataatgactgtatttatcattttatgtagtataaatagaattctccttatttttgcatatatgtctagtaaattaaattacctttctacccctgctggaaagatgattgtacaacatcaaatttattttttcttacaaatgttctattattatataattgttaaataataattttacaccaaaaaataactttcaagttaaaaaaattctacacaatcttttgggataagttgatgaatatctcttttttgtatccattaatcaaaaatattctcatattatatttcattaaaatatacccatttttataagtacgtacgttgcctaagataccattaccttctacttaagcgtagcacatgagttacattagcttaaggatataatgagaatatcatctataaaagtagatatatcttaaataatataaaaataaaagtaaaaaattaaaacaaataaagttaagtggatatacaatgtaattataatattaaactataaatattttgagataacatcttacaaaaatgaatataatttggaaaaaaaaaaagaataatatatgcatttgaaatatatgagcttcatacataatgtggtattattttttaaaatattaggtttaaatttatataaatataatgaattagaaatcggtctcgttattacttgttgttgtaatatattggatggtatattttaaattttatttttttccttcttagttcatctccaatagtaaaacttaaa

SEQ ID NO: 260078 - DNA, 2047 bp, Cannabis indica
attgagagtgcaattcaaaatctatagtggtgcaaggaggaattaataagttagagaatttacttggtaaattctagatctacttattggaagctcggttatataggcccatggtccccatactagttgagacaatactgcttgtaagactcagttaattgattttaattaatcaattataattctaaaattagacaatgtcttatttatgaattttcactaagctagggcttaattgtgaagaaaagatgttttaagatttatttgttaattaagagactttgttaagtctaattaataaataaattaaatagaaattttatgtgataattaatgttaattattcaataaatagatttgacatttaagtggttgaattggaaaatatgacatttgtgaaagaaaagaataaataattgtataaaatggcaaaattctaatttagtggggcccactctatggccgaccacttaaggtgatttttgcccaatttttatcaattttttaatgtcatataatttaaatctaaccctaagagaaatagcataaaaggaataagacactcggcgttcagtctcaagctactgcatcttccttgaaaaatctcttgtctcctaaaaatcaaaaaaagaaaaataacaagtagtttctcgctcataagctgaagctgagtatcgcacaatggccaatgcaacctctgaactaacctggctccttgctctactaaaagattttggcatctcccacaacatatcagccaacctttactgtgacaacactactgccatacacatcagtgaaaattcagtgcaccatgaatgcacaaagcacgtggaaattgattgccatttcatctgagaaaaagttcagcaagaatccatccaacttctccgtgtttcttcacaaaagaatttagctgacatttttactaagcccttacagccaactcccttctccaatattgtatccaatatggatgtattaaacatctacactccattttgaggggaattattaggcttagactattatttctgtttttactgttagttatttctgttaagttgttaagtaaggttagttaggttgttagcttgttagttagaagctcactgtttgtatcacgcctatataaagactgttctgtactaagattattttcagattaatgagagtttttctttctattctccaactctgttttatatttgatatatgtgcctcgtcccatcccaccaaattttatataataaatacagaaaaatactgagcttataaactcaatctttaagtccaaattaaaaaactaatttattcctccattgaaaaattatgtggctgtgcttcttctgaaagccataaatactatctgatattattaatatataatcatatatgtaaaaacttttagatggagaaatatggctgaagataacccaactcacaaaattgacaaaatataagtctgactcttggaagtgagaaacaccaattgccttttttttttgcttaaatcttcttcttttcctgacagggactttccaaggctccattcaataaaactaactcactttaattttatttatgtattaataaactctctttgaaataacaaaggaaaactagtgaaggacaaatgatctatttcttcagttccatgtgatatggcaggcttcaattattacaagaaaaaaagaggagaaaaagtacacataatattgaagtagatcaagaagaatcaggggagaaaataaataatagtgggctctgaaatgaagacaaaaattgtattaagttaaattgaaatagatcaagaagaatgtgcattttaagtgaatattgtatttggctatagagtatattctatacaagggggaagagtgtatgattaacgccatagaaggaaatatgttacaagttttcaaaattaatatgccataaaaggaaatagttctcctaataagtaataaacagcccaatgaattagggaagaaaaaccagggaaaatatctttttattaatcaattaattaaatttacctctaatt

SEQ ID NO: 260079 - DNA, 1045 bp, Cannabis indica
tttgtaaagacaagtttgtaacccgatttaggttttttcttatcttaaatgccttgtactattttcatttgaacttaatacaattgtgtttgcttgcatttttattcacaatgtaaacaactatattttgatcaaatgtacagtacttttgggtttttccattgctcgcaatcttcctgtttaagtagttagtgatctagcaaactttttgattttcgagtaattatcaattctgcctcgctatagcagttataatctgccttaagcaaacttaaatatactttaataattttctcactttgtatattcttaatttgcttgtatgaatagttatattatctatccattttctaagttcaagtacttttatcaaggtgtcgtgatgcctcgtttagtactttcctagctcgtgagaaccgttggtattcagttttatacgcgagttataacttttaattttcctttcccgtcgaataggttttaaatcaaaaattaaagttgtttgaacccttcttcgttgaaaaggtttgatcaaggtgttataacgattcgacccctctctcgtcaaaagggtttggtcagggagttataacggttcgaatccacttttgttaaagaggtttatccgagaacctttgaatttcaaaagaaaaattgaaatggcgggtttggattatacaatgtatttccagatgaattccagttaatcatacataaatgccccttaagtaatttttaaagaacaaaactttgtatttacttgatataaatgattctctttattcataactgaagtttaaagtttacacctgtaatgcgaattacatcatttatttattggtagtagggtcaaaaattttctacgttctagtagttctttattagcgagccatcaagtcgagctaatttataaactctaactccaactactgcttcgatgacatatggaccctcccaattcgggttgaacactcctacagatgcatctctcgtatttgcaaagactcgtcttagcaccaagtctccaacattgaatagtcttttc

SEQ ID NO: 260080 - DNA, 502 bp, Cannabis indica
atgtacagcagggatactttaaccttagatgatgtaattagtacactcagatcaagggatgctgagttgaattgacagaaagctgctaagcaagaatcaagaactgatgatgcacttatggtttgaggcagaatacctagaagaggcaactcaaaattcagaggtaactctaggactaattcgagatcaaaatcaagacctagggaaacaaggaagtgtcatcattgtggcaaagttggacacttgattagaaactgttgggacttaagagacaaaagaaagaaaaagaaggataaagaatatgaggacagcaacaatgattctaatgcagtaattgaagattctgatggagatgttcttaccatttcccattctgaaactaagcttgaaagttcaacagatggtgatgtctgcaccagttcttgtctcaaggatcaagattggatcatggacagtgggtgcacatatcacaggagtccaaatagggactggttcatggatt

SEQ ID NO: 260081 - DNA, 4589 bp, Cannabis indica
aacaatgtcttacttggacacaggttctagaataataatcccctaaaaataataaaatttaaaaaaatataatgtgggggtaaaatagtaaaaaaataaataaaaacaagataagataaggttacaaaagattaataaagagaaaagaaaaggaggcatgcccacgtggaagtgaaatgaaaagcttaatttttttaatatttattttttctttaaaatttaaaaaaaaaaattattactatttactattattatagagtaattaggcagtaaaaaaaaaatttatctttaaattttatacacttagttttttaattttttagcaaaattctttaagtttttattttttgacaatttaaagcatcggttaaatatcgagaaaagttgaagaatatttattttttatacattaattaaatataccttcaaataaatttaatttaaatatatctcttcgaagatggacgtgtaagtttgtaaaaagtttaagcaaaattttgattagagaaaaatatagactatcataaagtgatatgaataaaattagcagaataattaaaaaaaaaggtaaacatgataaattttgaaaaagagggtataaattaaagatattaatttaaaaaaaatatgtagtatatttttttttttaaaatattagtgttaaatgctaactaaataattactatataaatttgtatatgtataaaaataaaattataaattaaatattaataataattaaattaatatttaatgatgatatcttaaaactttagaattttatcaaaaaattaataaataggctaagtataaaaaatcaaaacggtttcactataaatacctcttactattattattatcttattttattttgtattatataaaaataaataaataaaatttgatgcttatgtgtgctgtccaaacgactcttgtccgttgccgtcgcagagctgagctggcattttatggacaattttaccctttcttctaataattttgttactaatcacctttaactgccacgtggactttgaattctccaccacgtttcctgtcggtgagattattaatgttttttaatatattttttttatctctggaatttcatggttcacaaaattatatattaatatatttattaattttaaaaataacaaaaataataataaataaaaaatagaatgaataataatatttggagggtagtagggcccatggagagaaacgcgtcagcccataatcgacggacggcgggtttgttgaggggaccgcgttgggcccattctctgacctttattgcggcccatatgtactttccatataatcttttactgttttaccctttgatgtctcttcctagcaacttattggtaagtaaatagtattcatttattaattactcgtttttgtggttaggtaaataatattcataaaaggcaggcatccacctcttgagctttgagagaggaagtttccattaacttgtttctgaattattattagaatcctcttattcatcctgactatcccgaccattcgaattcatgtggtaaatataggttagtcgataaatttacaaatagatataccaaccaacctgcatttgacacgcaaatcaagtaatcagaatactcttgacaaatagatgatgtcctcgttatactttttaagttaatgtaaattatgtgttagatttaagtggaggatgatggtatattggacaatatccactcataaaagtaggtacattttagtaaaatataatttgaaagtatttttaattaatgaatacaaaaaagaagtattcctcaacttatctaagaatataaatactaacaactaagttatactagtccaaagaaatcaattttaaatgacattagttctcaatatattaatataagtctctttctattgttttgacatcaaataatttctaaaattaaacttcaaagcattgttaatgttgattgatcgatttcgatttccttttgacccctttcaatttcaatatatgcattcaaaattttcggttagtgaaaaacgtttttgttgaaaaatcaaatataatacatttcaattttctttaaaagtcaaatgagatctcaagtttaaaaaatatatgatacaaaattatgaaaaatatattttgtttgtatatataataataattatgaaagagagatgggctatttccatgcatgcaaaatcataataaatatacggaaatgcaatacctatacgtacaaatatatatgagtcatataatttgtgtaacatatatttacataaatggttttgtttaattaaaaattaaaatgacttgtgacaaagtattactaatactattatatatttattaatcaaatcaaagcattattgtttttgttggcaaaattcgaaccaccaattatatatattaatattataatgttacatacataaatgtgtgtgtatatatatatttatatataaaatatacgtacactcaacacaaatacacatgaaatcttatcaaaccaaatagtaaaattattggaaattttttaaaagtaatattaacaatgtagtggtgggagtggggtgataataatgatcgaaaggactaataggaagaaaacaaaagaaaaataattgcaaaaataattgtttacgtggatggctaacaaaatttcaataaatagtttgtctattttgtttgtttgattgattgaaatatatatatgtcactatatattattgcaaatattattattagttgagtcttctcttgagtattaatatatatctatatgtaaatatttgtattgtacttgcataacacaatttatagcacaagattaatttggacacatgcatgggctcctcctagtcctacatataaatctacttgttcaaattactaacctaataaaaatctaacttacctataccttagttattaaaatacatctttccattattattagctaacacctgaactaacgaatattaaaaaactgcatgaattattgagtagcactaaaataccacttgaaacatcgcaacatacattactacaaaagacactttgatatccgttgaagtttcgtttattttaaaaaattgacactataaagtatcctaattttaggtattggtttaaaactaatattcgaataacctaatgtagtgtcatttagtataccaacactaaaacctaaaccgagatttacgagttataaaaaacacctacattatcttggtttataaccgaaacttaaagctcattttgtactccaacactagcttcataagatagcatattgatatttttgttgtctgtggaagaatttaacaagttccgtgtttcgtaagagaaaatactagataagttgtgcaatcctacattacttagaaaatgtcaagtgtgatgattctgagactgtgtaggtatgaagttatacaattgaagagaacttaaatatattaattggtactatacttaaatagactgtgtaggtgtgatgtttttatattgttttctagtagcccattacaaaaaaactccttaaaagattagtaatagactttgttagtgtgtgggttacaccatttaggagaatacgaaatagcataataagagccaacacatactgcagctaaaaatttacataatagactaacaatttgaaaaaaaatataaaaatacattaacatgattttttattttttatttttatgctttaagttctttatttacataaatctatcttcaataaaaacattaaactgttttatagctgttttatatttgtattatagttatcatgagatactttttaattgttttatagtttatttatagttttcgtgaggttgatttctcgttgagtttaattgctttcttactttttgttagacaaatgtatttttgtaatttaaaactttacaagtgtacttccataaataaaaattttagactataaaattgtaaataaaacatagagaaaaaaaatttgaaaattttcctaaataaattacatcctcaataattagtggaagaacaatatagattattaacccaattacacacaaagctaaatattattttggactttgtgtttgtaaaaattattaattagactatttgttttgttaaataacaaaaataaaccttgtattttttaaaatgatacaaaaagagccctaaattaatttttttgtcaaaataaaacttaataataatctaatttatgataaaattagttatattttcttttattcgtgctaggaattgtcttcaaattggttatcttaaaaaagaattatcaaaaattgagcttagattcctatttgtatcgttttagaaaatacatgattcattttatcatttaacaaaataaatgactcaatttataacttttggcaaaaatagtatttacccacaactagggatgtactttgtatacgacctaacccaaacaatctactcaaaccaaatcgaggtaacacgacaaaaaatacaaactgaaaaactaaacaaaaatataaccggcccaatttttatattagggagattaaaattagaggaaattacactctat

SEQ ID NO: 260082 - DNA, 938 bp, Cannabis indica
gcgagttaagcaccaataccacacttacgcacttaatgccttaaaccctaactcaactatttattccacataaataaacacttaattatatagcatttaaagcatggcatcacataacacataaatactctagatgcttgcatactgcctaaaatggtaagtggtaaatagatgatcacataaacagtaaagtatttactctcaatacttactgcaccatgagtcgagcttatctctgacgatgaatgtacatgttcggccggtctacaggaagtttaaaaaccttggcactctgataccaaattgtcacgccctaactaattaggcatgctacccaagatacttaagaaactctaatcccttaaatcggattactaatagaattagcacggaattaaacttcaattacaaatggaagaaaagtaaacttgtagtaatttaaactttacaaactaaaagtttcatgtattgggatcccaaaaatactttacaaataatattacaagttcattttcactagccgacctaggcgacaaaacagagtcacaaaatacatcactggtagaccccaactcgcttggtctagtatggcccgaacatgtacattcaccgtccaactcccacactcatggctaatcaaaaatagctttatcctttcctacacagtagagcacccgtgaaccaatgcccaacaagacaatataaaaatatcaatcacatgtttatcacactatataaacagtaatgtcattctcatgtgcctgtatgacacagacatgcatgttacgctcacgtgcctatttatgtctacgtagcgtagacctacgtgttgcgctcacacgtctaaatataataaggccttagaacggttcatctcgattctaattaccgagtccaacccggttatgccttgaacacataaccctaaatcttaacat

SEQ ID NO: 260083 - DNA, 692 bp, Cannabis indica
tgttcggtgtttgggtttgaccaaaccttttgtacgcactcgatggtaaattagtaaacatagttgatttatttcgacttctaattttaattttgaaattaactatctttattcaattattgatcgagaatgtatttgttaccgtagtaacttacatcagagctatttgatccaatctgatcttttagcttaacatgaaataaaacaaattgcagaaataagacattgtactttaaaatggtctcctgacctgagtactttgtttcttttatcgaaacctttgagcgtagttggctcagcaagccattcacttaaatgtaaatgttcattcagtacttaatgtggtcatccgacctggtactttattggtagtattttcttaaatgttccccattccactaccgtggtactagaatgagttgcattttttcgtcatacttacctaatttgtatgctccggattcgagaacttcgaccacttgatatggtccctcccagttaggtccaagtacacctgccgtactatctttggtgtttaggaatgcccttctcaggaccatatctcccacgaagaatttctgagccttcacttgtttttttgaaatatcgagctactttttgttgatgggccataaactttaaatttgaagtggctcgtctttcttcgatttcatcaagtgattatgctagga

SEQ ID NO: 260084 - DNA, 4227 bp, Cannabis indica
ttgggtgactgtgttgacatgatgaattgatgatcatcattcatcatcacatactatacttcaatctgcaaaattaacacaacactcttaaatcattctaaccctcctctctcctcatcttggatcttctttgcttccatctcttttgccctacaccccaatccatccattatccatacatattacatattttggcacacatcgcatatatttatatactcgtacatctctatagctgtatatgtgataatcgatatggagcctccaactttccaagaagcagcgcgctgcgatgtctgcaaatgcagcttcaacaccttcaggcgacgggtaaccttaattcatccccaatctaattttgtatttaattccaccattacatatgaaattgattattgtaaattgatcacgctttctgccaacatcgattgcccttaacaatggtagtgtttagttagtgtcgattggagtatttgtggacttatccaatccaaagtcttgaatgatgtttttttagattttaagttggcaatgttgatgctttgaattgatagtgattttggtgagatttgttttagttggtccaagagagaaatttgtattgtttcaatctttatagggaagataatactgggtattttgtctgggcttggaaaatggaatgcgttttgacctcactattagatataagatgggttgccattgtgttcaattctagattaattggggtgatcctgattcgtgattcactatcctacttttgagtgctcaagtcccacttattcatagaaggtttcccctgaacaattcagtttcaggcagactataaatagctctaaaattcatagatcttttttcttttaaaacataaacttaatggatccttttgaatagaaaaggcagtcaattcattataattttgttggttgattatttatttatttatttttttttacattttcaagttataagatattctgctgggtagtagaataaacattgagcttttgtctttcctcaaaaactcatagcctagttaatgtttccattactgtttctcttttgcagcaccattgtcgatgttgtgggaggacactgtgtaacgaacattcatcaaatcaaatggtaagtgaatcttcttgtgatggcccactcatccattaccaacttttgtgtttctctggagtttatctcattttggggtgaatattctgttttgtgcacttctcaggctttacctcagtttggcattcaatcggctgtcagagtttgtgctgattgttttaacaactcctcgcggtactcaatccaatttcatattaaatttatagaatctaggattctaggaatttatttattatgaaatttgagtattagagtatggtgtggtgatattaaacggcctttccttccttatgtattgtatatacagctatatggcgctatttaatacgacactttagaatctcacttacataaatatgtcgggttgaaatgagagtgcaaccctttccttcaagcaacccactttttcaggaatgcagtccgggtttatatagagattttgtagtatcatggagatttatggtgtattgcatgtaaatttatggagttttaaattgaagttccaagttaaaataggtggaaacaaaccatagtttaaggagatttccagtacaatctcttctatttctgcttcttactatatttggaaaatgtggtattcttttggaagatgtgtttgcacgtactaggagctttcagcttctgtttccttttctttcttgttcattgtttggaaaataattttgttcgtcctggcttaagagttttttctttaattttttcccctcattgactttttattttaatcaaacttaaaagaatgtgttttttggttttgatacagaccagggcaaagcagtgtacgggtttctccaaatgaagctaattctataacagatgcagtttctagtttaagcattgccgacgatacacaaagtaagacagagccaactgtagagcatcaacctgcagtaggcattatagagtgtaagtgtggaatgcctctatgtatatgtgaagctcctgccccatctgtggatgtgcttcccctgccggtataaattgttcagtttccttggatctatccattgcattctgtgtgcaccttttagatttaattatgtttcattggcagaagaaaccctcacccacatctatccctcgggcaaatcctaaaccgaagaaaacagaaactgcatccaagaataaaagttccacgtcatatagcaagcctaggtagggaccctcaggtgctttttgattctggtatctgttcttcctagcagagtgaatgattaaagaatgtgaatttatggattctccatcattcaatggcttaattttatttttaatttttagttttcgttctctctctgactagtacatgttttaatcctgaattgtaacgagaaaatatataatcaaattagagaggctcgtggaggatacttgtcttttaaatctgggtgaacataaaggtttatgaactttcctttcttttccaaaaataaaaaaattatagtatttcttttgacaatctctttcagtttacttgcttgttaaagaataaatgattaccagagctctaatattattttgcaatgatgccaataatcctcaataaaaggaccagtttgttcttgactcttttgttgtgctataacaatgtgaattatggcttcacaccgaagctggctctcatattctatatgtgatttcttattgtgcatatgcagttccgttttcaatccaggacaagtatacaatggtatgtcaaacaaatctcagatggattatgatgtcaatggagaggtatgaattgtcaattgtttagataaagtgatattttgctttgcactgcaacaagtaatattttgctttgtactattatttgtatgtattgcttagggaatgagagaagctattaagaatggtgacactgctgcggtcaagaagcttctaagtcagggtgtagatgctaattaccatgacaagcaagggttgtctttgctacatttggtacattcctctttacatttggtgcctgttttggctattatctattatgtttcaatgtaaatgatactaatatctgaataaatggggtgcaggcggcagtttttaatcaaaccgagatagttttttccctcatggacagtggagccaacctgaactacaagaatgctcaaggtaacaatcaaatttcaccctcttaaaagtatagtttaggttgctaactggtagtgatagaggtcattgtaataacactgttctaacattgttattacaaagaggcagaaaaggtcaaatttacttactagttttagcttttggaaaaggtgagattctaatcagttgtgtcttgtttcaggggaaactccactggattgtgctcctgctactttgcaatataagatgcgagagaagataaaagagctggagcagttggggcagcagtagagctgagaatgttgtgtatatgattttcaccacattaaggctttaagttacttttgcaattcatgtgtttcctcttaattatgaaagttgtttgagagaattactatattcatgcatttgctttctgtaagaaccacggtattggacgcatgctacaattcgtgaatcaataatcatgatagtgcctgtaagatgcccccttataattttataaggcaaatggagaattttctcaatatattcatcataatccaataataatacgcacatttggtgaaatacaaaaagaatgcctcttaattttggaaaaatgaaaaatacccgaagattcttttcgctgcatggatatattaaaaaaaaacaatcatattccaagtttgtaatttcgaaatctcctttaaggaagaataaattttaaacgttcgaaaagcataatatgattcatgtacataaataagagctataattcataacaagacttctgccacttttacttatactagtttttagacgtgcgttgcacggattgcatattattaatattaatattaattgagaatagttcggttcggctcaacgacgtcttcagtttcacatttttatttttatttattaatttactattattagtttaatttcatttaatgttttttatagggttagaattataaagagtttgtttcttaattaattttaatgttg

SEQ ID NO: 260085 - DNA, 5100 bp, Cannabis indica
gtgtgtgttgcctatcaaaagagaaaaaaagaactcgtgttgtgtttggtagggcagcatggtgcactatggcagcgcaatctaggcacaagcaaaggtagaattccaatacacacctaaagctttgactttttgctatcttaaatttcattcattcattgcatgtgacctgccttttaaaaaatcacattatgaaaagcacaatcaatctacttaagactttggacacacttgatcgtcattgctgacgttgaattttcatttaatttaaaattagtaatcaatatattaccattcttgaaaaaaaaaatactattctcttacactatgaaaggagatgacaatagtgacttgtgttgtgatccaaaatataacaccaccttcttaaattgatcaaacaataagattacatttataaacaacccaactacttgtgaagatttcactttttcttttggtactatatatcgttgaaaattaatttgtatttatatgaaatatattaaacacgaaaaaaagaaacgaatgattttaaacagtcttggcgctcatatgaagtgcaactaaggaagcataaacaccatcatggatgttaatgagagtgtcatgcttccctttttccactatcactccgttcttgacgacagcaataacatcggcgttcttgatggtggatagcctatgagccaccaccaccgtcgttctgttaaccatcactctatcaagcgcgtcttgcaccaccttctctgactctgcatcgagcgcgcttgttgcctcatccaatagcaatatctttggactctttgctattgctcttgctattgccaccctttgtttttgtcctccagacagttgcactcctctttctcccacaattgtatcataaccctgttcatcgaatttccatttaatcaactctaaataactaactaatattatgtaaaacataaacatacaatggtacaagcacaatgtctcagactctcacctgatgtaagctactaatgaacttgtgggcatttgccagttctgaggctgctaaaatctcagcttcacttgcttcgccttccttcccataagctatgttagcgcgaatggtgtcattgaacaaaacaggctcttggctcactaatcccatctgttgcctcaaccatttcagttttaatttctgaagttcaactccatccaatgttatgtgtcctgagtcaggatcataaaacctctgcaacaaagctataactgttgatttcccgctcccgctttctccaaccaaggcgaccgtctgaaccaaataaaaccaaacatattagttaactagaaacagctcaacttctactagtagtaatgtcaaatgaggaatgattattgtttattaccttgccagaatgaatagttaaactgaggtccttgaagatttgaatatctggtcttaatggatacttgaagctcacatgacgcagatgaatttctcccttcacatcatttaaggtctccccagactcatcacttgggtctatctgtgatttgcggtctattatggagaatatagaagctgcagcaaccttagctttacttgaatcaggagcaaaggaacttgattgagatattcccactgcagccattgtcaaagcaaagaaaacctgccaaaaatcaccaataccttactattaattcttctctttctctcactatttatataaatataaatttgtgtgtgcgagtattaacaatagttcatattgtcaagtctgattattaccttgaaaacgtctgaaaatgtaatttgtccagactcaacaagtctggctccggcatagaaactcgttgcatagacacaaaagagtagaagaaaggacaccccaaatcctaaaccactgatcacaccttgccttatccctgtcatcataggtccctcacatttctttttgtacaaatccattactttctcttcggcgcagaaagaagcaacagttcttatgctccccactgcatcattagctacttgacttgcttcttcatacatcacctgcaaccatataaatattcttctattatttaaaaatttaagcaatattatgatcagttccaacatgactaatttctatttagcaactaatacctttgcatcagcactgaatcctttcatgaactttgcttgaatgtatccattaactcctattaatggaagtaggactagaattataagtgccaactcccaacttgccagaaaagcaattagcaaaccagcaacagcagatgcaaggttctgaaccagtagcccgagtgcatccccaactaaggcacgcaccattgatgcatcagcagacagcctagccccaactgcaccacttgagtgctctggctcatcgaaccatcctacttccatgttaaccactttctcaaaacacatcactcttatgcgttgaattaacttgctccctgctacagcaaagaagtaaccacgtgctggaattgcgactaacgatacgataccaagaaccaaaaacatcagtgcccaaaactcagaatccttcttctgcttgtgagatttttcatagaatacctttatcatactagaaataagcaccccaaaaagtggaagcaaaacaccattaatgatggcagctatagctcctatgagaataacgggtatctctggcttgttaagagcagcaaggcggatgagtgagacacttggaggtgattctgatacttgttcaggggactctgtatctttcattgtagtgtcatggattccagtaggtaaaccaaatgagactgaaaatgaatggcgactgctatttcctattgatgatcctcggctcagagatcgaatgattgaccctctttgacttgactgtctaaacgattctgtactaatttcagttttgttttgatcacctgtttgttctgattccttgttcacttcttgtaagcgtataagttgactataagctccttccgggtctttgactaactcatcatgtgagcctgagtatcatcagtttccaaaatgttaagtgacataaatatctttacattagctaaattaatcatcaaagtgaaaaaagttcaagtaagtacctttctcaaccatctttcctctatgaatgacagcaatggaatcagcgttcctcaccgtgctcaaacgatgagcaaccaccacagtggttcgattaaccataattctgtccaatgcttcttgcactaccctttcagattctgcatcaagtgcacttgttgcttcatccaaaagtagaattcgagggtctttcaatatggccctggcaattgcaaccctttgtttttgaccaccggagagttgagtcccatgttcaccaaccatcgtgtcaaggccctgaaaatagttttacattcccatcccatgtaagacttacaatgtttaagaggggtttgacaaaatagaccttttcttattgccactctgaaaaataactctgtgataattctttgcagagtaacctagctgacatatcaacatcctatcaaatatatttgatctcttgtagggaaagttacttagcaaaaaattgtccaaaagtttacattcaccaattactccatgttttaatgaataagtgtttgtaaatttgaggaaaatagaacgaacctgaggcaacttatcaatgaacttagctgcatttgcaagttcagtcgcagcttttatgtcttcagtagttgcatcttcctttccataggcaatattttccctgatgctagcagcaaatagaacaggttcttgactgacaagaccaatcttttgacgaatccatttaagctgaaactccttcaagttggtgccatcaatcaaaacttcacccgagtgaggatcatagaatctctcaataagacttatcacagtggatttcccacttccactttggccgaccaaagctgttgtggtgccactaggaatctcaagtgagaaaccattgaagatttgctcatctggtctagctggatagctaaagtaaacgtctctcaactctatgtctccgcgaacatcatccaaaacttttccgtttgtgtcatatgaatcaatctctggcttcctactaatagtctcaaacatcttaaacgctgcagcttgcccagctgcaaatgcactcatgcaaggagatgcctgcccgagagacctgaggataaaacacgctcttatctatccatctttctatctgtgagtagtatatggatatgtaaaatgaaaaaaaatcacaactcacatggatccagtcaaaacagcaatgatgacattcaaaacatcaccaccattgtatcctttttcccttatcatcttcactccaaaccatactgctagagcatagcttccaaagatgacaaacatgaccaaaccaaggccaagtccagcggctgtgccttcaaaaacacttgatttataagcactgacgagaaacttgttgtagtttattattgcttgtttctctccagtgaatgatgcaacctagacaaacaacaaaaccaataaacgtgctaacatggtaactgaaaaacactgttgagtttagtacttgataatgatgacttacagttctaatagagccaatggtctgttcaactacattagctgcttttgcataggcagtttgtcccttagacgccatcttgcttataatcaaagccatagctgcaccggccataaccataagaggaatagaggtcatcataacaagggtgagaagccagcctttgaagaaagctattacaaagcctccaatgaatgtggatatcagttgaataaattttccaacctacaaaataaataagattcttcatcaaaacatgaagactactacatatagtctttctttccttctttctatttgtattacgagatatggtaccttctctcccatggcgtcttgtatgacaacagtgtcaccagacattctgccaaccacttctcctgtgttagtttctttatcaaagaaagcaacatcttgtctaagtatggttttcaaatacaaatttctaattcttgcagcttgtctttctcctgtgaccatccagcatgccacctctgccagaccaaatcaaacaaacatgagagagagagagaga

SEQ ID NO: 260086 - DNA, 558 bp, Cannabis indica
ccatgtttggtagaggtgttcgcagttcgagtgatgcggtttttgattatttttttcaaaccaacccgcatatgcggtttttttaatttcccaaatcgcacccgcaccgcaaaactaaaaactcgcaaaaatcgcactacaaaaaatagtgcgatgcggtgcgggttttgcggtttggactatcaccaataattaaactatcacaaatataacaaagcttgagtaatacttgtcaaaaataccataaggcttgaaaataaatatatatgaaaaaaaaaattaattttcaaataatacaataattagtagattttggattagacattcacatattggacctaaataaatataaaaattagaatttttataatgtgcagtacggtgtagtgcagtttgaaccgcatattaacaattcaaaactgcaaatcgcaccgactgtgcagtttaggaaaaagtcaaattgcgaccgcactgcaaaaaaatttcaaaccgcaatttttttttttttgcagtgcgggcgaattgatgaaaacccctaatgtctggtggttgtaaact

SEQ ID NO: 260087 - DNA, 781 bp, Cannabis indica
tttcttctatgccatgattaaagatgaaaggagaaggaggaaagattatttgtaatctgcagtatgggatcaacagttgagttggtccaatttttgttgataatgtccaaagcttcatcttcattcaaccatatttttcaaagcgaaatcgtgatctgaattgtgtgcgagtgtctggtgcaaacgggttaaagaaactagcatagctcgacgatcagatttaaagaaatccaagtgtgaaacctcattagctccaaactgatgaggccacacattattgacgaaggcataattaaatctctctttaacattcgttccattgacacatttgttatgccaggtgaatcgggcaccagtaaaaggtagatcatgtaaaccacaatagtctattgcattacgaaagttatcaatttttgtatcacaacgtaattggataggacaatagagttgaaataatagaattgtcaaataccaatccaaattgagcaccatcagacatttgttcctaactaaacaaagtttagggaaattttgtagaagaaccctaaagggtcgttcttatctgtttcgaatttgaaaatttttttagcatatcttttttccatgatcgcttacgctgttcctatttaggcctacttgtaaattttttagaaaattctgtatagtttataatgtcgaaaataagatttaaacagttacttatcatgcgtataaagaaaacagttgttcgtacaacataatatgtaaattttgttttcggcatggtaaactactcgatttt

SEQ ID NO: 260088 - DNA, 605 bp, Cannabis indica
tatatttctagaacttcgtaggtacctcgccgttaaatgtcaaattattatccacgtgtcattttattattggtatatttaaactaatttttcttttaaaaaaacgtggactaatccatcattgccacgtgacaatttacttaatacttaacagtcaaatacttataaaagttttcactacaagaaatatcacttttaccagcacagttcgctactgcgctggtaaaagtaacttttaccagcgcatttcgcaaactgcgctggcaaaaaggtcaaagttttaccagcgcacatttgcagtggctaaaatctaactttcactagcacatttacgcgctggaaaaagttatttttgccagcgcttttcattttgtgctagcaaaagttctaatatcaacgttgatttgtcaattccttttgccaacacatcagaagaattctattttaccagcataatattaaacttttgtcatcacaaatgtgctggcaaaagtgacatttcttgtaatgtttcaaaatataacttaggtattattaccgtaaaaaattaaacttaagtatttatttgtaactagacgttaaatttaaatatttataccataaat

SEQ ID NO: 260089 - DNA, 1777 bp, Cannabis indica
catatggtcaacattataacataaggcaaatgaaattttttgaattgcatagcttttttttttctagggtcaacattgcatagcttgattattgttggtttatttctcggattaacatttgtttagacttcaaattaaatcaagagtttgctaagtattataaattcataaaatatttacagcaaaatatgttattatataacgtgtgactagccaagtataaaaagtcagtaaacagtagctatatatttagtagaagtcagtttattaaacaccagttatcaacacacaaaaagtcaacaaacatcttacaaaatctataccatcaacaacagaaaaacaagacagaattaagtctatattgaagttaaagatacatttagagaataaacattatcaggaaaacgtaatgagttacatgacgagcagtaagagttcaaattagagattcataacgaacagaacccaaatacaaaattactatgaaagcatgggtacatttcttgtaagatgtaagctttcaaaatcacgaaacagcttcaaacagcaaatgtgctccagagaaattgaatccagataaaaatcacaagacaacttcaaaagtcaggtgtgtatcaccaaaagtgattgatcaaataacatgactgtgtcaccaactgtcgcaaacaaaacataccaaatacgttcaacaaagccattcagaaatagaacgatcaaagaatatatagcagaatatcaccaccctcttgaaatagagtctgaccgaagaggacatcaccaccaaccaaatgtcaattcaccagtttttctataaatatttataacttccctgagcatttgacattttgacatatcagagagaaatgcagactatcacatcctaataagtagtccacaccaaaactagaatatgatcaaacattgaaactcatagacccagtacattatcacgaaaacatacttaaaaaagagcttgttcagaagtcccactaatttttcaaaggattataaataagacaccaatcaagcttcccacatataaagatgttgtaaatcagcagttggcggagcatagcaagttgaggggcaataacagtaattaatgataaaaaccaaatgtctggtaccaaaaggcaaatgagttcaaacatacgatgccttgctctgcatgaatcataatttatggataatgagttcaaccaagaacaaaatatttgaccttataccgaaaaacaactgacattgcatcaagagcatcaaaccaaaggtcacggcagtggataaatttcacaaaaccaacttcttccttgcaaatgagtatacaacggggttctagtccaaattcgtaggttactcgttactcttaagaaattcaaggattcagaaaagtcaaatcaaaagcttagatacatacataccccaatgtcgcatatcaaaaacccagatttctttcacaaatggtgaggccatatggatcaaaatttccaaatgcgtatatagatacacatgcaaagtaccaagtgtaagccaaaccattggtgatgctctgcatccatcaaagctaaggaaaacatatagaaaatatgtgagcttataccaagacgtcaaaaattaaatatctgaccttttaatgtgaaggtccaacacgccttggttgcaaatgtatatccagatcccacatagaattcagaggaaagaggatctgcaaaaaatatcacagggtacccacaaaacccacagcaaatcaactattgtttaccaacataacaaacaaaag

SEQ ID NO: 260090 - DNA, 1047 bp, Cannabis indica
ggaggagtaggagccccgccaacaaccggagtccctcgagactctagggtacactccactgcgccctcagctcgcagtgccttacccaccatataagcataggtggtgttgtcatcagtagtaatcattaaattgtgtctgatcttcgcattcaacccatccaggtatttctatttcttactgaaatcagttggcacgattcctcaggccaaccttgtcaagcgatcaaactgagtcgtgtatttagtaacactcatgttttctttctgagtcagctgggtgaattcttttcttttagcacttctgactacctcattgtaatacttggcattgaatagttcctgcaacttttcccaggtcattgcaataacatcatgaatcatagacaccatgtcccaccaaaccagatcgtcttcttgaaattggaaagtggcacaggccaccctatcattaccggtgacacccataaaattcaagattctggtgatcatcgttagccattgctcggctttcatgacatcgagaccccccaggaaaactggaggttcctgcttacggaacctttcatacaggggttccatccggttcactgcaaccacaggttcggcctgcacagcagaggcaggatataatggtatttctggagcaaggattgcagaagtaccctgctgtctcaaccatcaaatctcttcatcttgttcattgatcctggcttgcatcagtgcaaacctgttttcccaatcatgggcagcttgggcagcctgtggcaggttagcatcacaccgaccacgtgccctacctctaagacctctaccacggctagaaatatttaagggaatctgagctccctaacaaccattagatccaaccgaattgccctggctcctggtgtttcgcctgacgtccatactaattagaatagcgtgcgtaaccaagagctagtctggtcaaatcgtgatcaagaaaaacttactaatgccccgaattcggaaattaaaaacatgtacctattctactaacacgctactaacatgcttcctaacaggc

SEQ ID NO: 260091 - DNA, 2866 bp, Cannabis indica
tgtagttgcagcttaggaaattagtgttctacatatttactttcttatggctctctattttagacggaattgattttctatgttaacctgttttcttcacattaatcgtctttgaacaagaattcatgttttcctgttcggtgattgtaacaaattattggacctttttcactaaaattatactgcttattttacaggatagtgaagagtgcacgttctgatgtttctaaggttgtccatggtgatgaatttgagtacaaagatcctgttgatggttccatttcaaaacaccagggtattcgatacttgtttgaggacggctcaagattggtgagttcaaatttcatcaccttaaacgattaattatgtgcttaaacaccatgttatttgtggttatgacaatttttattaatagctgaattaactatctgcaaagaattcacagctggttttcatattttagccattttcatcgaacttgtaaaatcctctccccccaaaccatattgagtattttgtaatcttttctttcattgattcttattctctgccttaacaaaattgcaggtattccgtctctctggcactggctcagaaggcgcaaccatccgtctatacattgagcagtacgaaaaggatccatctaaaattggcagggagtctcaagacgcacttggtcctctcgtgagtctccacctaacatgttttttctttttcccttcatcgattcagtttattaactaaaactctgttttatcacaggttgaggttgctcttaagctttcgaagatgcaagaatacaccggccgatctgccccaaccgtgattacatagacgagcatcaatcggtatggaatttggaggtttcattaaaaatggttatgaaatggtgaatggtctttctttttcatttggttctcttcttttatatatgctctaccaaattgagtagattttcatacacaatcacacaatgagagtattggggtaccattaatgtgtagtgtattgagatataaatttttggtttaaaataaatgtataaataaggtaaatgttgtggctatcctcagccatcagtatctgaactccataaatttgaagtttcaatcttttttttttcgtgttgatttgtacgtgtatttttcctttgcaagtgcttatagacatcactggtgcctattcaactttctttggtgtcatactgttagcttttaagaaatatcgttaaataatcgtatgacaccccacttatagaatgtgttgggcactactagtgtttaataataatgtttattttctttgagaataactaggatttttctattggccaataatgtgttgtggactgaggagggagaggagacttggattaaaatttagaatatgatatgattgacatgtcaaagcaattgcaattttttcacatatttgactgaaactatcattgttgcaaataaatggtgtgaacgattcaactatcaaattctagatcattccaaattcgttaagacctggctgtgccaatctaaaatttacattttctaatacttaaccatttaaccatataaacttaatttttaatgtaaaaatctattgaactcttattctgttttgctctttacttttgtctaaaaatttcagttatgtgccacaatagaccttcccctgttttatacttataattaatattacgtagaccattacaaatttgtcacgtgtatacttatgtacacacagtcaatccgctgtggtatttaattgaggtttttggattgaagtgtaaagagcaaaacagaatgagggtttagtaaattttgccatcaaaaattgaatttatgtggttaaatgttacaaaacgtaaaattcttatggttttgccactaatatttctataatttgaatggattgtgaatagaaataataggtgcagattcaaaatagattgaacttatttggcatgatattttttagagttgcgatggagttaattggtgtcacacttgataatttttattttgtcgatattttgagataaattatttgaatcatcaattttacttaattatacatgtgcagtgtatcaacagtcaaataaatattataatagtatgtaacagatctatttgatatgtagatagcatgaattaaaacgtgaatatgatatagaatagattagtgttgagatttgttgacacaaaataaaacctgttcgattaggttgactaaagtaatacatcaatctactaagatacgacacgaatatataacatgacacaaattgctcccctagtttaaattgtgatacaacaatgtttcatccaaaagtaactaaaaggtttatttttttttttcatctttgacattgaattggaaaaatttacttggacaaaaataagtgaagtcactttctccaatcaaagacattacttcaactttttcttccacaataattaatgcccttaagtagtggtatatttataacattattaacgagctaatatctcctaaaaatagctgataataacaacgtttaattaatagtctaattagtgttgttagttaggtcttagatgtgttattaacatttttttaagtacaaatttatatttgtgtccatatatgtttattttgcacatgaaaatggtaatggaaagaatctatgaattggaaagcttacattattggagctgtaattactagtaagattggccgattatagaacatttctaaaaatagttaattgttttctaaacacggaacaaaataattaaaaaaataactcaaaacttaagctaataatattatccataatcattatatatatttataagaaaattatttttatacttttttatttttattt

SEQ ID NO: 260092 - DNA, 548 bp, Cannabis indica
attttattttaaattatattttctttatatataagattgtaatatatatttgatttattaaagttttaaaatatattagttttgtatgtattatatttttaaattattattttttaacattaaaatattaattgtttatatatatttttaaatatataaatatgtaagggttggataagatcagttactttacatgtcaatcaacattcacgccgcatatcaagaagttgttagaagttagttagttggtcttagctgtcagttagttagagttggttatggttgttatggctgtaacaattctgttattgacagctatatgtagtgattgtttcccttgtatttttagattggttgtattcatttttcaatctcagcaataaaggatttctttccttcttcattttcttctctgttttctctgtttcttactggtttataccaggtaatatggtatcaaagctcgtcttcgagtgagctttcttcttcatgttgtcttcttcgttttgcttccgcttctgtttggtgttcatggctaggggaggagg

SEQ ID NO: 260093 - DNA, 1485 bp, Cannabis indica
cacaagggtacgggtttgggtccatgttctagtttggactgggttcgagtttaggtctgggttcgagtccgggtttgggttcaggtcctagtctgggtttgggtctggggctgggtcccatatccaaacactgactacgggttcagtccaagccccaaatccagatccagatcctcatctcgggtcctggtcttgttccatttcgggtgatgggtcacgagctgggtactagattaaagttcgggtcaaggtcgggtcttaggtcccagtcctagttccgttgcacacgtccctatcccatttctagtccaggtcctaggtctggtctggttttgggtcctagtcttggtttttgtttttgtcttagtcacggtttgggttttggtcttggtttgggtttttatttgggtttgggttcaggtctgggtcctggttcttgtcctagtcctagtcctagtcttagtttgggttcgggtctgaatctaagtttaggtccggatctggctccgggtgtgggttagggtcctgggtctggggccgtgttaaggtccgagtcccaagtttcgatctcgatctaagtccgcgtttagtttcaagtctatgtcctgggttccatcccattctgggttcgagttcgggtccgggtgcagctctaggtttgggtctgattctggggttggatctgagttcgggtccaggttcaggtttggtcctggtatgggttcgtgtccaggttcctgtgctggtttgggtccggggaaggtttcgggtctgggtctgggtccgacttcagattcacgggtctagttcaggtcctagtttggattcgactccttgatttagaccttcctttgggttctgcggactaggtccctggtctaggtcccccatccatgtcccgttcttaggtcctggtctgggtccatgtccgagtttgggtcccgagtcttcgttttagtccaactctcggtctagatttaggtccacgttttggtccctattttgatctgggttcaggtttgggtccttctcaaggtcgggatcctggtctgagtcgcgggtctcaggtcccagcgagggtttaggaccaagtcacgtccatatcccggtctaggtttgggtccaaggtctcaagtcccagtctttatcaaggtcttagtccatgttctggtccgagtttgggttatggtttgggttcggttctggtctcaggtccgagtgctagtcatagttccagttctgatctaggtcttggttttcttctgggtccgggttgggttccaagtccaagtcctggttcaagacccgttctcggctcccagtctacttcctgtttcggttgtaatttcaggtcatagggtacttgttttggtataggtttgggtcttagactgggttcgggtttgggtctggggcaaagtcccaaatccacacaacaactacgagttcggtccaagcctcaagtccagatctggattccggtct

SEQ ID NO: 260094 - DNA, 597 bp, Cannabis indica
aaaagaaaaatgaaaggaaaaaagtcaagtcgtatatggtttatgtatatatagcaaaaaaatttatctcattttttactcaagcacagatgcaattgtgcccacacctcgtaaatatacatatatatattccttctcactaactctaaacgtttgccaattgatagagacaaagtatatataataaatatgtctatactataactatatatatgtacgaatgaggcttgataaaaaaatataagaaaaaaaaaatatatagagcacatcatatatacccatagtcagtaaaggaaaaaatatatatatatatatgcactcttatgtatatgtaagcaaaaaaaataaaagcttactgtagtgaagaaaatagtcactattatgtgtatatatgttatgtcgtatgatatataaagataaatgggtatatataatacattgccggttgtataattcaatttaaaataggaattgaaaaactaaaataaatatcctagatactatctttaatttaaatttaaatttaagatagtatatgataaaagataaattgttattccctaaattttagaataaataattaaatatcagtcaaat

SEQ ID NO: 260095 - DNA, 637 bp, Cannabis indica
ctgactggaacgaactgcgcggcagtttacatgctcctaaaccataacaatcacaacactattaagtgatacgctaaatcacttcccggggacttaaactagaaactaaaagtttccctatcgataaaaagcatggcaataccccaaataacataaaaacgagcaaaactagggttcctaagaatccccttaccggtagaccggttctataaccggaattctggttctgggaattcctgaaccctcatccggaattccggatgcacaaccggaattccggttcctcacaggatactatcaaaaattcataacttgctcaaatcaaatccaattcaaacaaaaccttccagacctgttctatataccccaaataacatttctaaagcatcaaaaccatccagaaaacacagaatcaaaaatcaccatgtgagctccaagctttgagttcaaaagtcaaacttgactaaagctcacctacaagcctcaaaactagatttgaactacataatcatgcataataaaactgcagaaaccattctcaaactcatgcaacaaacacagcaaccaatttcgaaatttctctttgaaaactaaagcttttgaaccgaaaattgtcaaacttaaacaagggtgacaa

SEQ ID NO: 260096 - DNA, 1076 bp, Cannabis indica
gacgacatccttgtgtactctcaatcagaagaagagcatgagcaacatctcttgttggttctacaacggcttcaagaacacaagttgttttacaaattcaagaagtgcgagtttttgctatctcaggtgtcctttcttgggcacattgttcgcaaagacaggatcaagatggatccgaggaagatagaatccgtcagggattggctgagaccaaaaatagctacagaagttagaagtttcttgggtctggctggttattattgtcggttcgtagaagggttctctaaaatttcaacacctttaaccgagcttactaaaaagaatcagcgttttatgtggacggataagattgaagcaagttttcaagagctgaaacatagattaatcacagctccagtgttagccctaccttttgataaagagaagttcgtagtttactgtgatgcatccagacagagtttggggtgtgtactgatgcaggccgatcaggttattgcctatgcctctcgtcagttcaaagaatatgaacagcagtacctaactcatgatctagaacttaccgcggtagtgtttgctttaaagatttggcgacgttatctctacggagagagagattttaaatttatactgacaataagagcctcaaagatttctttactcagaaagacttgaatatgtgatagaggtgttggttagagttggttaaggattacgactgtgagatcctttacaatcctgcgaaggccaatttagtggctaattccctgagcaagaagggtcccaggcaggtaactagtatgatttagattttacctcagttagcagaggatatagtaagatcaaacatcgagtttgttgtaggtaaacttcataacttgaccctgcaatctaatatgttagaacgaattaaggctgctcaattaactgacccagaattagtgaagatcagggaagaggtttcagctggtcaagccagagatttgacggtgtcagatagtggggtgctgttatttaagaccatggtttgtgttccaaatagtgcggaacttagaaatgaaattcttgaagaggctcat

SEQ ID NO: 260097 - DNA, 121 bp, Cannabis indica
ggcaagactgatctaatggcgattggaagcagtgttgcattaacgcattgcaatcatgtgatttcacacccattagtttcagttcagcctcatttaccaagtttttgatgttagacgagta

SEQ ID NO: 260098 - DNA, 1693 bp, Cannabis indica
cagtgctgcattcctagaccaaacacatcaaattagacctctactttgttcaggaaggcatactcaataagtagcttcatgttaaacacacaccagcccttgatcaactagcagatatcctaactagagttctttctaacactcgattcttgttacatagagaaaaattgagtttgtcttacttggcctagctcagtttgaaggggtgttagttaagagtttgttagttaggttagctgggctaggttgttatttattttgtgcactaatttcagttattctgtttagctcatttatgtaaagctacaaatttttattttaagaagagcagtttctctaaaacattaatgagatttcattcacattcaactatcattttctctcaactcaacaagttctacatttcatgtttagaagtatgtcacataacaataataaaaaatgagccatacatttgatggaggctgcagaagtttacaatggcaatggtgaaaactaaaaaagagagaagcaagaaagacgagaaaaatagaacattttcaaaaaaaagaaaagcttttttcaattgttagcgtctgtcctttatttatatagctcaagatttaagtttacacaaactaaactaaacaagaagttgttaaaaaattaactaaagttctatctgtcaactaacataactaattttagtcacattggttaacatcccccttcaaaggaaaagggaaagattccatttgaagtttggactttaggtaacaaaatgtgtcaatagacaaaggttttttaaggcatcaacaacttgatccaatcaaggaacataacaaatgtagagctatttttccaaaatttgatctaacaaaatgaagatcgatgtctacgtgcttgcttcaagcatgaaaaatgagattgggagccaatgctacaacaccttgattataaacccaaattataggaggttgaggaagcatcacttgaagctcaaatagaagagaagatatccagttaatcctagaagctggattagcaagaacacaaaactcactatatgtgcttgatcgagaaatgaccttgctttttggtagaccatcaaaccaaattttctcccaggaacatgacatagccacctgttaagtttcaataatcaatacaattagcccaattagcaatactatatgcttggaacagcaaatgtgaggagggtttaagccaaaggccatctgagatacaccctttgagatatttgagtaattgtttgtaagcttcccaatgagtagacgtatgggcacaaataaattgactaaatttattaatgataaatgaaacatatggacgagtaagtgtcaagtatttttaatcctctaatgtacttcaatatagtgtgatattagcaaatggttcaccatctttcaagttgagtgtaacagtagagctagttggattagaacaactttttgcaccctccaattttagcttaacaagaaaataaaaaatatactttgtttgactcaagtccatcttagtgtgatctctatatatctcaacactaaggaaataatgaactagccccatatctttgagagaaaatgtgttgttgagatataaaaaaaaaataagcttggaattaagttcttgatttggactagttaccaaaatgccatccacatacactaaagcatgtttttacatgaatctt

SEQ ID NO: 260099 - DNA, 1115 bp, Cannabis indica
ctaattcttgtaatttttttttataaaaaatttgaagagaaaaattgataatttattttgttgggttaaaatttagaatagatacagttatataagttttaatataaaaaaaaaatggatctagaaatctagatatgatctgattgagataaatcggattagatgagatccgatttggataaatgatccagcaagacagggcaagacagatcatcaactaatgtaaattgggtcatagtcggatcggttctgaattgattcatttcaactcttaactgagagtatgttatcaggtttaaaatcacaatgaacaacatattttagaaaattaaacaactgagagttgataaagttgaagagagatattataaaataaaagtttattatcactataaccaataaaaagttattttctcataacaaaacatctttcttctatatgtattttggtacaatcctcttttcttactattaagtttgttcatatcatgtaggtgaaagtatatgtatggctaatacataaaagggatatgtgcaacaaaattacatgattaacaaggaaatatttatagtgaaaatacttaagttataatcatatttgatgttgcgtagttagatttaaggatttttgaagttgatctccattatacccaattttttttaagaaatcaaaaagttaaacattaaaactttgaccaagataaaaaaaagactatacgggaaaaaactcgaacgatggaccacatggcatcccatttgagtgtcacatggcacataggaaatgccttgcaagtattgaccattctttagtgtcagtactcacttcttggggtttcaaacctaggcttagaatttttcgtaaatttgagatagggttattcgtcctaaaactctaatccgagaagaaatccaacattgttgcaactgaaaccttctcgatcaccacaatctgatcacacatgccatggacatttctcaccataaccgagaacagagccttatggctctcacataatacacacacttttaagcactgaacaagagagagatagaaatatatatagagatataatatttacacaattacttctttatttcatgtaagaatgattaca

SEQ ID NO: 260100 - DNA, 1330 bp, Cannabis indica
tcatcccaatatttcaagggaagtgaggcttgaacaagtaaagtgagcccagtttcaacaatgtgtctgtgtttttgttctacaaacccgttttgttcatgtgtgagtggacatgcaagcttatgaacaatcccatttgtctctaacatgttagtgaaggacctaaactcccctccccaatcagactgtaaagtcttgattttggttccaagttgaagttcaacttgagttttgaatttggtgaaagtggaaagagcctcatctctggttcttaacagatatagccaagtatatctagagtaggcatcaacaaaacttatgtaatacctatatccatttgaggagtttgtaggtgcatgaccccacaaatctcaatgtaatagttctataatggtgcattgtatgttgtggtagagtttggaaatgaaagtttgtgtgatttaccaagacaacatgctttgcaaacatcaaaggactttttatttgaaacaggtatattacatttggataaggccattgtgacaattccagcagcagggtggccaagcctgctatgccacaaggaaaacaaagagttatttacatctgtgtcatgattattaccttgagaaataagaggggaagtcgacagagataagacagtaactggttgtgagttggatgaagaactgagctgactggtttagaatttgtagaggccatgttcaaggttcccagccaagaaggtcttctgggttgcaatgtccttggcacaacaagaaaatgagtaaaactcaaagaaaacaacattatcttgaggaaactgagaaacactcaacagatttttggtgataaaaggaacatgcaataggtttttaatactcagttgtttagaagtaaaaggggagagtatagaggaattaccaatattttcgatgtttaaccccatgccattaccaacataaacttgttcattttcggagtaagggttgctggtgctcaagtttgctagatctagtgtgaggtgatgtgttgccctcgtatctggataccattgctcatcactaacatactttggagtagcatagagggcttgtatctcagctatattggtcgtgggagtgaagtttgcgaagccttctggccctgtaaaggacttgtcaaagcgataaaatcaatgtttgacagtgtggccaagcttgtgacaaagctggcattgtaccttttgtccccaattgttgttctgaccccggccatacgatgcagaaccacctctattggatgcatttcgtgagggaccacgtgttggaatttattttaccaggatcttagatctactcacaagtatgtt

SEQ ID NO: 260101 - DNA, 1823 bp, Cannabis indica
aacacctaacataaaactaaatatacgtgtcttgcacgtaactttcttctagtttctaaatagcactatttgtcatatccttagttctcttattttttttaaattttttattaagtttataaatattattatttctaatttttatattatattaataataatttttttaaaaaaaatctacctaattactcaccttatatattacatttaaaaaaattattttaaaaaaataataataaatttgtgaaatattttaaaaatatctatcactttaaaatttaaaataattacttagatcataaaaaaaatcataaaatattattaaatttagaaattgaattttaattatcactaaataaaatataaccgcacgcgaagcgcgatttgttttctagttttattaataatgtatgcataatgtaatttcccataatgtgtatggtattagtcacactaatttttagttgctaaattaagaaactgagttaataataattaagttataattttatttttgtaggtacctagttaaataaattgtcacataataattttgtccaagtgaaaaaaaaatagttacggaagtgacaaaatgacacgtggatataatgtctttaacatttaacggtggaagtcacaaaattataactaaattattattaccgtcaaaaattaacttaggtaagtatttatacggtaaattcttattgttttttttattaggaagaaagcaaattctagaaactccattatgaatttatgagttattttcattaaagagttaaaattctagatcaatgtagaacaaaagaaaactcttagaattccccagaacatttatccagaaacttctcatctctcactataaataccccaaaaccttcttctccgatcaaaaatcattacagcaaaaaaccaattaagaaaatctcatcttaactgaaaaaaagaaaagctcagttcgatcgaagaagaagatcagcagacatggatttcagaatcttgggattggactctccactcttcacaacactcaaccaaatgatcgacaattccgaagactccgccgatcacagcaaatccatcaacgctccgaccagaacttatgtccgtgacgccaaggccatggcggccactccggctgacgttaaggagtacccgaactcttacgtcttcatcatcgatatgccggggctgaaatccggcgacatcaaggttcaggtggaggacgacaatgtgcttctgatcagcggcgagaggaagagagaggaagagaaagaaggagctaagtatgtgaggatggagaggagagtcggaaaattcatgaggaaattcgtgttgcctgagaatgctgatactgacgccatttcggccgtttgccaggatggtgttctgactgttactgttcagaagcttccaccaccggagccgaagaagccgaagactattgaggttaagattgcttgaaaaatcaatgggtactgttgtaggctgtttggatatgaggaatgtttctgtttggtttggttatcctgtgtttgcttcttttgcttttgttgtgattaaatgaaaattgggtacgttttcgtattcatagtagttgtatgaattttcatcgagttttaatcgaaattagtactgtttgttttcgtttaccgaaatttaaagaaacataaattcatatggtaatggtatattttggcaattcgtattttcaaatcacttcatttaagcgctcttcacagtgtgaaaaaggcctgaatttttacatacgagcaaatattttatggctgtttattaaaccgctaaaactgtaaaaaaaa

SEQ ID NO: 260102 - DNA, 627 bp, Cannabis indica
ataaaaagaggtatgtttcaattaaataaaaattagagataaatttagttaattgataaataaaagaggcatttttcaagctcgaaatctagagccacagcgattccgtgaattgtattgggtgaaaatgccttaattgggtagtagttttggtaatatgaatgatgagaagaatggtaaaaaaataatgaaaggatttggctaatattttcttttattatttcacgctgattttattgattaaatcttattatttttttaaaaaaaataaaaaattattagccaaatactttcatcatttgctaaaataaacagaaaacataaaataaaataaaaaaagagagcaattgatgaaaaaaaaaatatttacggcataaatattttatgttttaagttttatacacttaaataccacatatttttttcgaaaaattaaatactttatgttacttctgctattacttttcttttaaatataccaaaatttaatttatatcccacatgttgatcaattattagtccacataattattgttaattcaatattaaaactaataaaattataataatacaaataataataataataaaatcatcatcttgcctctctcctttcaatcccccttc

SEQ ID NO: 260103 - DNA, 1014 bp, Cannabis indica
atattaacttagaaagatataaaggtaagtttatgatatcttatctaagatcaatatcagtcccttccaatgtatactccatacatccgatactggtaaactttgccaataccctggaaaggacataacacttatccaaggtgtaagtataccttatcgctgattatcatgccagtctaaatccagtgaactgacaaatcatggaaattaaacttttgaacatataatcatgattatattccactgtgctgacgacactataatcatgaacaaataaatatgttctggacttaatagaatttatacattaaacataatcatgaaataaatcatgtgaaccatgcaacataaaagcgatttctgatctttattaattagtaaatctgattatattgaaatgggttttatttagggcacaaaacccaaaaaactcccacttccaataatataaaataaaaaagtgcatttcaaataatcttaacaccttgatatccagatcaagtgtagtatgtagcattctctgtgtaatagaatttgacaaattgtatacaatacaaactttcctccaccattacatttccttaatcataaaatccatgatatgatgaaattcctctctatagtctactcctctagggatactggattctttactttttggcaactacttctgtgttaatcaggaatcacgaagtaacactagtagttaatttactattggtacgatgccaaaagtgtatagaactttcttcaaactgaactttataattcagtctctctagtagtgttagagactccagattttgtttttacacttctccaaaatcactgctccaccccaaagtaatcaccatctcatctgtagactttatagcatcaaggcaagtctagaaacctgacttggtgtagtctaagagtataaaataccacccttatcgaccaacatatagttcatcttcctaatcttaagcattacttgattttcttccaatgttcatttcctggattaatctg

SEQ ID NO: 260104 - DNA, 588 bp, Cannabis indica
aaaattgaagtcagtacattagttttatgctaaattaaattcgatgttcggttgaattttagtttcgtagtagtttttctacattttttttcttcatgaatttgaaacagtccctgttttgatttgattatgctcgtcttttcaggtgaagtcaccgaaattaatggcagttctctttcgggttgaatttttgtttcggttgcgttgggttgttcaatggttgcgcaataattacccacgaagcatgaatcttgagttgaaggtgtgtgtaagtggtatttgtataattttttttttatttagactgtatagttatttatttggccaactaaaattatttttgtaatattattattatttatttttttttgatttacaaactgaaaaaaaaacccaaaaaaaaaaaaaacttaactctaaaaactttacccaaaaattaattttctatgcataattgtagaatgtaatatggtcatatatatcaatcaaattgactaattttcgaactgcaatccgtgcgtggcacgtgcgtccaacgtggattaaatagacatagttattagtcagaagacagtcgtactcagcgct

SEQ ID NO: 260105 - DNA, 1421 bp, Cannabis indica
atacactagagtgtattaccattcattataattaactctccaaataataataataataaaaaaaacatgaaataacatttattattaccattcatttttgtaaaagaaaaaggaaaaagatatttggtgaaatcaaaactttaataaagtgtggaaaatctgaagaaaatctgaccaagttgatgttttatctacaaatgggcacgtgtacatttattcacctcaaatcacatcaaaagtccaaaaaatataatctcaataattaattaatgagaatttttaagtacacaaaacaaattaagctcactcaccactcaattatatgtatctaaccctaccataaattaaaatctccccctaatttataataataataattattattgtgtttttacagttcattctcgtattgttgatattttgataacattatgtaatattttaaaatttttgaaataatttacaatataaaaaataaaattcaaaatctattttacattgaaataaaagattctcatgtaacaataatttattagaaatttatttttgttctgaaattataaaatgtttacaaaatatatcgatcaataactactattttagatcatttattttgtaaaagttactaattggactttttattttgttaaatgacaaaatagactttgtattttccaaaataatacaaataggatactagacttattttttatcaaaataaaatttaataataatccgatttatagatattatgataaaactgattatattttctgtatatgttcgggttagaaattgtcttcaagtttgttataaaaaaaatatagaaaattgagctcaaggtcttatttttactattttaaaaatataaggttcattttatcatttaacgaattagaaagttcaatcaataatttctgtaaaacacaaagtctaaaataatatttactgtataaaaaatatcaaaaataaaactattttaaatgttaaaaacacaaatgtggtgcatccattcatcctcctttcaattagggcaccattaaatttccatactaataacaataatacaatttcactattctataagtacgtaccatatataccatatatacaatttgcatagctttatgatgataatattatttagagatatatattgatatttgtgcatggtgtaagtagatcttaatatacataattaattaatataattactaagttgattagtgtggtgtttgtatattattattatgatgtttatgaaaagagtagtacgtaagtgagactgaaaacattgttccctacacatggggactcattcctcaaaaaacacacacgagcacaccacaccacactatacacttcatcagaaatcatgtgccttttttatttactttttaatccttaactttaacccttca

SEQ ID NO: 260106 - DNA, 700 bp, Cannabis indica
aagaattttaaatttttactagcagtcgtgaattatgatatagttatatcattaaatttgttattctgggtaattaacttaaataatataaaatacgagattttttaagtaaaatatatttatttaattgaatatttagtgccaattattaaaattattgtacaaaaagtagaagattctacactaaattagtgtaatttccacattaaattagtataattattgaagttcatcttagtaatacaatatctagtaaacatgattgttatttttttcttttaaaaaaaaaagtactcaacatatatattaaaaaaacactagatttagaaattatagccttctaattaagtaagatagattaattatttgtcactaatttcaaaattacaattgtgacataaaaagaaaaatattgacaattaaaatatttagcctcaatccttttaaaaaaaaaaaaaaatagtcctcaacaaataaaaattaaaaacttctatactactagaatggtcactgaaaatgcataaaactatgatattaataaaaaaaaataatatcttattattattaatttgttttttcttaaataattacaaaaattgttgttgcatccatgactccaaaattataaaaatagactcatcttttatacacacgcatggaagaattaattattagtactttttgctggtgttattgatcc

SEQ ID NO: 260107 - DNA, 537 bp, Cannabis indica
tcacatatcctgtggagatcaagccttgttgaattttctcacgaacaaaatgacaatcaatctcaatgtgtttagttcgctcatggaacacgagatttgaggcaatatgaagagcaacttgattatcacttacaattttgccggaatagaagtcttaaacccgaattcaatcaaaagctgataaatccatattacctcacacacagactgtgccataactctatattctgattcagcactggatcgagacacaacattttgtttcttactcttccaagagatcaaattgcccctaacaaatacacaatatcctgaagtggatagtctatctaccttggagcctgcccaatgtgcataagagaaatactcaatctgggtatgtccatgatccttgtaaactatacctcgtcatgaagctcctttcaagtaacataaaatttgctctaatgctgcacaatgatgaactgttggagaaaacataaactgactaatgacactaactagaaaagtaatatttggacgagtcacagttagata

SEQ ID NO: 260108 - DNA, 576 bp, Cannabis indica
taatcttcttctattttaaatctgcaaaaataaaagagaacaagcgtgaaaatactccaaacacgattaacactaaattaaaaatatactaaacttaatctaaaattattactcaaattaacctaacatgtttgcgcttaacttttccattttgagttgaagtgtggggacacgagtgaataaattgaattccatgttctacaataatgtctcaaaaggcttggtattccccaccccaatcaattttaagtgtttaaattatttcctcaaattgatttttagcaagtattttgaactgtacaaaggcttcaaaggcatccaattttactttaagtggatagatctaagtgtatttactaaaatcatctacaaagtgtatgtagtatttgtaatttgtttggacaatatgggtgcaggaccccaaagatcagtatgagcaacttctaagactttagaggcacagtttgaggacattttgaatggaagtgcatgagatttgctgaatttgcaagcatcacaaaagtaaatatttttattgctggaaaaagataccttctcagtagctaagatatgttt

SEQ ID NO: 260109 - DNA, 573 bp, Cannabis indica
attccaacattcaatggatgttggatcgattggatgattgaattgattaaatcggatcgaatcggatggtaaaatttaacatccaatatatgattggatcggatctgaatagacctaaaaatattggatgtattgctaaattttgagccaaattaatgcctcagaaatgagtcattaattttaattcgtaggaaagaaaagtgtaagaaaaaatcaacaaaaacattaaattcttatttattttagaagaacattaaattttaatatgtatataaaaattatattaaatatataaataaaaatataaaaaactattaattacattaataatgacaaaagagtaaattaaaaagtaatatttattgtgatataaaatttaatttgtactatactttgtatcaaatttagtatattttttaacatgtgctaaatttagatcatattatacactattattagagttcaattttttgaatataaagtaaaaaaaatacatatacactatatttatagcacttcattaaaaatgttttaacaaatattatatctgtgtcaaatttacatcacattaaa

SEQ ID NO: 260110 - DNA, 511 bp, Cannabis indica
aattatgctccattaaattatcacatagtgctctactatgtccgtcaaacgattaatcttttttggaagtgataggtatattctcctcttcttcaattggttggggtgagttcgagcaataagaagcgtattggtgacctcaaccctaaaatgatagatcccaatgccagtcgtaatcaaaatatgccatatcattcaataaatttattatatcatggtctctccttaacacaggttatctctgttccataatcaacccaacttcttgtttcatcatcaagtttgttataaaagaaccaagtaaaatacccagttgagaaattgggataacatctctctccaagctccttaaatctctcccaagcagaatagaatggctcattgtgttgttggacaaaattcacaaggtatagcatttggatttaccttgcaggtcaaacatattcagtaaaatattagtaaaattaaataaaaaaaaccaaattagaataaaattcaactatattgatat

SEQ ID NO: 260111 - DNA, 1003 bp, Cannabis indica
atacaacagattatttaaattttggttttggcacaaaaatttattttgaatttataattttataaaatgtcttaaatatttacgatgtacaatatcatataaaggaaatataattaatactatctaaatattaaaatacaaaagagatacatcaatataattatttaaaggattttaagcgactaaattcaaatttcagaggtgtaggtaggctcttagccaattttttgaactgcaccacatatgcagtgtgagcaattttccaaatcgcacctcaacaccacattaacctcgaaacaacacaaattacatcacaaaaatgtagtgcagtgcagtgttggcaatttacgttaatcaccaactaatttaataagtaaatattataataaaattgcatcatataatttatagataaaaatcataactaaaatcgttcaaacaaaacaaaaaaaaataagatacataaagtactaattagtataaaaaatacttacttttttaagtacatagttaataaatgttatgcctaaactaacccatatttataaagaaacaaaaccaaattcaaattcaaatgaaaagtataaattatattttaaaaaaatagttcaataaaagtgggtacgacgtggtttaaataaaatcgtattaatcgtattaatgaaattccaaaccgtaaatttggacgaatagcttgtctgtcactaattcgataggatttcatgtttaaactgatacttgttctagattcataagtgctcttgtaacagttgatttaatttaataaattaccattatgcttttcttcaaaaacaaaaaaataataataataataaataaattctaaaccgtaaattatactgtaccatgcaattgtgaaaaatcaacctgcaaccgcacaacggaatattctaaactatactgtaccatacattatacaatatgggcattgggcagtttgataaacacatcgaagccacttcttcttaactaccgtaccaaa

SEQ ID NO: 260112 - DNA, 820 bp, Cannabis indica
gatgatcctcctaaagaaaaagacgattcaaggaaaatatggctttgtgaggatgctggcttgttccttcaaattcgaatttctatcgacaatgaggtaattagtttgattaatcattgtgaatttgttaaagaactaatggattacttggagtttttgtattctggcaaagacaacatatctcgcatatatgatgtttacaaagcgttttattgtgtggagaaacaagataaagtctcttatgagttactttgttgcatttaaaaaaacatatgaagagcttaatgtgttattgtgatttagtcctgatgtgaaagttcaacagcgccaacgagagcagatgactattatgagttttcttgtaggactcccatatgttctgatgtctcctctttacaggatgtgtttactcgtgttctttgacaaaaactacctcttcaactcctcttaatagcgccttggtgagtcgcaacaattctgctccatgaaaaaactctactccaagtgcatacaaaggaggtaattcacaaagacctgataatcgaacaccaaattttgagagcatcatgtgcaactttttgtaagaaaccaggtcacaccaagtttgagtgtacgaagttacagttcaaaaatcgacaacaacactatgccaatactgcaagcactagtgatgcatttgacaaatctgtccttatttctactgattaattcaccaagttctcaaggtatcaggaaacacttaagtcttcatctccttctgtcactgtgattaccgattcaggtaactctaatgcatgccttctttccaaatcctcaaaat

SEQ ID NO: 260113 - DNA, 3977 bp, Cannabis indica
tcgatcctatgatcaccacccgaaagcgaatggtatgcagataactgaaacccttgatggggttggtagcagctgttactattgacattgggatgatatgtcttggtttggtgcattttctgcatactaagctcggttgactcataatgatctgaagacgaatcagatgacacgggtttggtgctcaatgagatgattggatctgttgaaattgcagcatcagcagcagcactagaagtggttgtgttcatttcgggtgcagtgttatgagccgttttattattagtcttttttgtgttcagaaaacggcctcccgtccctcttgccctcctcatagcatgtagatggcgcgattcgtggagatagggctgtataatatgaaattatgatccaaacactaggaaattttataataccaaaagcattgtttaattagtctaattctaccttgcgaacttttataagcttcttttcgagctcagccttagcacgcgactgcctacgcctcagaattccatggtattgcttggcattaacatacacaggttcctctgttatgtcaaggggcaaagccattctcgacgcagccattccaagcccgtgagactgtacctacacaaattgttacaacatgttttatgtcttaacaactttgccacactgtgaaaacaatgcggattttaagacatagattggcgaagcatgctctcgggctattccaaatttatggtaatatagtcactcattaccaaatccaagactttctttgaacacttcattcaaatgatagataagtcacattcaatgttgctctacatttttctcaatacttttcatctagccaaatcgtacaatcaaactccttgatcaaaccatgtgcctaaacatttactgatttttacgtctttaagcctaattttaacctaaaaggttatcacagttccaaagaagaaactataattaaagacatttgtaacataccaaagcatgagctccaaatggcataactcccccaaaataaggctcagaatatgcgtatgatccacaaccctgtttacaccaaatcatattttcacaaattcagacttttaatttcttgtgtgtatgaacatgcataaataagggataaaaagatacaattgagtggctggaaagctccagctgggtatgcggcacaagatactcattcaccggtggtggcggcggcggtggcggcgcagccgaagaaacttgctgctcctctccatattttccatctagccaagccagtagacatgtttataacacatgaagagagtaaataatcactaaacagcttaattagagcatagatatatttatactgaataccgaatttacaataattaaggttgcaatatgtgcttcaacacactaaattcacacttaaaataactattattaatcacaaacatgcactcattttggaaaatcccaagtaagaaaaaaaaacttcaaagtaattctatacctgattgtagcaagtctttatgatctgcctcatttttagacccagacccagtaacctgattagcttgagaagaagaattggtggtttggttgggtaaatcagcatttaaagtagtgtttggtggagacaaagtcatcatagtgatagtggttgttgttcctccaaacaaggctttagaaatggtttggtgatgacctataccattaccccaccaaggttgagaattattaccaatatttgtactgatccctaaattttgagtactagaaatatttgcatcagattccaggtgatttgaggagccatttattagtttctggtgcatgcttcaaaaacttcaacacacacaattcgatctcttctctcccaaaaaaacaccaaatcacaactcaactgatccaaataagtaaaaaacaaaaaatcactactttccaagaacaatacatgcatgcatgtgtgtaatataatagaattgtatattcttacaactcaatttagaacatgacaacaaaaacccatgtgtcaaaacaccatcaaagtgtgaaactgaactcagactgttcgatcagacaaaatataattatgaaaacccagaaatggaattatatatatttttaaaaaaagaagaaaagaaaaaaagaaaagttaccgttggttaagaattgagaaagagtgttgaatagaattttagctgaatgaagcagcggtggaactgggatttgtctgtgaatttagtaactattgtatttgtaacaagtgtatcaactattactacagagaatttgtcaattgagtttatgaaaattaataattcgattcaaatagaaaaaaaaattaaaattatgaacatttatttattattataagaatatggtaggggagaagtcgttttccttgtcacacttttattttttctttaattcttttttatttcaaattctttttttaagaatagagaaagagataattctgtgatttgatggatagtctgaggattttcgtggagatgaccttcttaatcgaaaatatgacgtcaatgtcctcacttcactaaggttcttttacctttttatttttgtcagaaaacaaaaaatctttaattcattttttattagttattctaaaaataatctgtaattaatttttatgtttaaaatttacaatattaaaaataaatttttttaatatttttatttgctgcgcctatttaaaatttttaatgttatttttgacactaaaaactatttaaattttttaaaaaacttttatagataatgttgtaattatactgcaccgttttaaaaaaatatatattttaatatatattttcatgatcgaaaattaattaaaaaattataataaaataatatatattatatataaaagaactgaagaagaatgtcaagtaacaaatctatatcacaattcacacacctagtaatgataatcccaaatgaattaatttcataattgaattttcttaatccaagtgtttaaaacatgtacattgaaaataatcatttgttgttaatatatattccatgaattttccaattaaaaagaaagtgctaaaaaatgaaaatgaaattcttgaacttccaaaaaaagaaaaaccttgaaagaccaatattttcaaatgatggctttaattatcatggatttttactagctaatttagttatgcaaataataataaattgaaatatattatcatattttcgtaaatttgtaagtggcaaattcagaagttgagttgaaaaagataaatttaaataaaaatatgatattaaaatatgtgaaatattagaattaatgagaatcattattaaatatatatatttatgaattcacttagctattttttttttattgttttacttataaatatatattacaattaataaaacacatatgataactatattaaaaaaaattaaaatttttcgtttctaaatttataggtaatagaagttgtcttttatctttggttaggcctatcaacctcttttaggtataggtgcgacttgactgagattgtgttttactattatgattcgatttttgctactgtgagtagtcttgtttctgtgatatagttttgagaattttatagtcttgtctctgtgatatgattttaagtattttagtcttatctacgtgatacaattttattttatttagttgttggtttttttttgtttttcgatggttcgctatcaaattgatgttgatagttagaaataacaatttctctgcgactaaaggtgttgtaattagtagtgcagttttgtaccttatacaataattgactgctcaagctatgagattaaataaacttgctacaatagtatattgtgtcttctgatcaatagataaatctgaatataagtgtttttaaggttaaatgatacaatttttttatttaattttattttttagttttttattcaaacggactcaaaattaggcagctcattgttttaatttt

SEQ ID NO: 260114 - DNA, 750 bp, Cannabis indica
gaccctaaatttaccttaaagttctggggaagtttgcagaaggctatgggaactagtctaaaattcagcacggcctttcatcctcaaacagatgggcaatctgagcgaactattcagatacttgaagacttgttacgagcttgtgtcatggattttggagggtcatggagcagatatttgcctctgattgagttctcctataataatagcaatcaaagtaccataggaatggctccttatgagttgctctatggcagaaagtttcgttccccaattcattgggacgaaacaggagaacggaaatacttaggccctaagttggtctaaaagacaagtgaggcaatagacaagattaaagctcggatgcttgcttctcaaagaaggcagaagagctatgcagatcccaagcgtcgggatattacatttcagcagggagatcacgtcttcccgcgtgtgtcgccaatgaaagggatcagacgctttggaaagaaaggtaagttaagtcctagatttataggaccttttgaaatactggagaaagtcggacaagttgcttaccggttagccttacctccatcattgtcagcgatgcataatgtatttcatgtttccatgctgagaaagtacgtgtctgatccaatgcatgtcctgagttatgagacattggaattacaacctgacctatcttatgatgaacaaccagtgcaaattctagataggaaggaaaaggtccttcgaaccaaaaccata

SEQ ID NO: 260115 - DNA, 588 bp, Cannabis indica
agcctattgatcaagatatcccagatattgactcctcactgataatgctccttcctttaaagctctcatagttttcattgatcgaggtaacaattaatttatatatatttttaattttatatatatttgttttatttttatatatttagcaatttttatgttatatataatgttgatccaacaatttaaattattgtagaaatctttaaatcattagttttattaaatgtggtgattctttagtttattctaatttttcaaaaattaagaagaaatataatgattaattaaagagttttttgttctttgtatatttaaatgtaatttcattgtgcttcaaacctggatactttgcatcagaataagtatggatctttatttcgagaaattaaagatgcgcataaaaaagtagttcaaatgcacaatttgcaaagtaaaggatgttccagcgaaggatctcagcaattggaaaataaactcaatgatctgctattaaaggaggaggtcttctggcagcaaagggcaagggtccaatggttacaggctagtgatcagaataccaaatttttccacaagaaggcaaatgca

SEQ ID NO: 260116 - DNA, 1314 bp, Cannabis indica
atatagattagtaaagacaattagcattaattaattatattatatggctatatatgattattttattttgtgggcctattttcaagaagtaggcattagggttatattttttaaattccggagattttgttaaattgtaaatgtattatttatgttatgtatgtaatttattatttttgtgatttttgctcggtaatgatagaaaatgcgacgacttgtccattagagtcacacgataatgatttagaacctttcttttaatggggtatatttatttgatattggaaatatcgagattagacgaggttgtggtatttgactattttacctttaagctttaatactgtttaaacttggagtaaagggcaaattaatctttttgtccaagaggtaagtttttccttttatgagaatgtagataactccatagctgattattattatgttagaattaatcaattatatgattttgcatcatttataagttaatcaaaatccaaaagaacaaaaccaatcccttagtatctctcttattcgaccaaaagaacccagcaagagcctaggatttctcttcaatttttgtgtatttgagcttcaattcagggtttttaagtagttcaaactagaggtagatctttaacaccgttctatttgggttttgaagatttttctttaagtttaagcatgcaagagtaagaagagatttttgtccgaagctggggttaacttgtgttattttctgagttggttttggtttgttttataagcttgtttaggttgaattcgaggactagttgaattattgagcaagtttaagttcaaggttcaacaatggtaatttttgttattctgagttatagctgcttttaatgtttgggttatgtttattaggccctaattaagtgctctgtagattatctttaagtttggagttactttgaggaagaaattatgagatttggtgtgtttctgtattaaaaaatggcacaccgttttaccgtttttctggcagtaacctagaaaaattgtctatatcaaaccatataggtactttgccctacatcaaaatttgttcctattttactatagcataattgatagtcacttctcagattttatatcaaaatcataaacagttaattgatgactagacagttaaaaaaaataagtacgaatgaaatagaacaaatagaaaattggaaagaatcccataaatagatgtcaaacaatattcatcaataccctaataactatctagctactcatagtcattgtgaacaattgataacaactaattaagaacataaaaataaa

SEQ ID NO: 260117 - DNA, 950 bp, Cannabis indica
attaacacacaataaaggttgtttaattttatatttaaattaaatcaaaattactaatttagaaattcaaacagttcaaaattttaatcaaataaaaatcatatcacttagttgagtattattaggatactcataaatatcttaacatcaaatattaaaataaagatatatttataaatttatttaaattttaaataaaaataaaaataaaaaatgtaaatccactccaaaattattaataaaaagtagtcattaattattcttagtcactcaagctcctataagtataacgaaattaaataccaaccttacattttttatatttctaactaaaattttcaaaaaatatataaagaaaaaattttgctctctatagctttaggctatggcaaaattttaaatgggggttttattaaaaaagtaaaatatcgtgtttttgaaaattataatttatttctttacaccaatttaggcagtcatttcataaaaatattttaaaaaaccataatatttggaggaaaaaaaatcacatatttgtattaaaaagttactaaagtgtcgaataaattcaggttacaataataattgatgtttatatatgtacctactcaaataaaagtagagacgatttgttttttatatatgataatagtaattataaatgactccttatttaaccgcttctctaatgtttttcttgatctttgaactactctattagtctatcttcctttttcaactaatctttctcaattctaataagattcattagtttagatattttcaacataacgtctacttttcaaagtgttcaaaatgtttaatattttcaacatcgtttgtatttcttgattaggttataactttaatacaatgcttaaatgtggaagagaatcgtaacaagtcttttgtaatagatgttaggttttatgccctaaataaaactcttt

SEQ ID NO: 260118 - DNA, 1379 bp, Cannabis indica
aagtaaaagtttaattttaacgtacttaactacactccctgtgggatcgacctcactcctggtgagtctactacttgaaacgatacgtacacttgcgtgtgcaaattatcgcaacaagtttttggcgccgttgccggggattgttagttaatattattaaaaattaaattttgttctaatttggtttttcttttcaattatagtactaatcctgtttgttttagaatcttatctttttcaggtttaagtcaaggtgcaatcgtgagattacttgaaatagagaagacttgtaaaaagaacagaagaaggaagagattggaaagagcggcagtagagattgaacaaagtcatggctgacaacgccaataatggcaacaatgaccgtagcctgagggattatttgcttcctaacttgacaggggctagatcttgtataagaccacctgccatcgatgccaacaattttgaaatcaatccagccatactgcagatggtccaatcttcagtccagtttgggggactgccacagaagacccaaacatgcacctcgccaacttcgaagagctgtgtcagacattcaaggtgaatggagttagcgatgacgccattaggttaaggttgttcccattctcactaagggagcgagccaaaagttggttagtttctttaccaactcactcaatcaacacttgggaggaattggccctgaaattcctgtccaaattctttcctcctgcgaagattgccaagctgagagctgacatcaacaacttcacccaacatgacgacgaatctctttatgaagcctgggagagattcaaggacttattgaggaagtgcccaaaccatgggattgaaaagtggttacaagtgcataacttctatactggattactgaacaacacccgaacactgatagatgctgccgctggtggagctttcatgaggaaaagtgctaatgaggcctttgaattacttgaagaaatggccataactaatcaacaatggtcaacagagagaggcccaactaaaaaggttgcaggtatgcaagaagttgatgcaataaccaagttgacagcccaggtggaggcattaacaaagttggtgactgcacaagccaaacaagctcaagttgtctgcaagttgtgtggaggacctcatactactgacacctgccctataaatgtcgacagtttgccaatggagcaagcccacgccattggaaactatcagaataattatggtcgtcagcagaacttccagaagcagtttcctaatcagcaacaacaagggttttatcctcagcaaagccaacatcaacaacaacaggactctagtgtagggtctaatcctcaattagacatgttgctacaattcat

SEQ ID NO: 260119 - DNA, 643 bp, Cannabis indica
aagtgatcctggccgtagaagaaaggaagcctaaaatcccacggggaggagagcccaccataacattcaacaacaaagatgttgtcaacattaggttttcgcacaaggacccgttggtcgtggaggtccagatagccaacaagatggtggccagaaccatgatagataatggagcctcttccaacatcttattcaagaccacctattaaaagatggggctccagctcaaggacctaaccccctctctcctacctgtatatggtttctccagccaaggagtcacacctctagggaaaatttgcctacgcctcactgttgggcaaggtctaacgagcataactataatggcacaatttctggtatgggacgttccattagcctttaacgtcatgctaggccgaccagctttgtatgacttaaaggctgtcacgtcgatagtccattcatgcctgaagttcccaacaacgaatggggtagggtgtttgagaggaaaccagcatatttcttgggaatgttataaccttacagtggccaaggttaagaaggaagtatcctccacgagagcacggacaaggaaaaaatatttctaaatagggaaattcccaaggcggggatgaagatgtggatcctcgacttggggacc

SEQ ID NO: 260120 - DNA, 620 bp, Cannabis indica
aatataaaacacgcaacattgaaattggtatatagctcgaatgtcatcaaaaattaatctcaaaaatgaatttaaaactattgaattataaagtttacgaatcaagcatttgcaatgattcgacttgattattgtgaatccaaatgtattgcattgagagatatcatgccggtttgcaagagcttccacccattctggtggaaggctaccctccacctttccaagtgtagaaaatagtgaatcgaattgtgtatgtatttcatagaatagtatatatttatatacaaagctaggagactaaaataggaacctaccaacaaaataggaaactactaaatatctaattcttttacaactaatatacaactaatactctaacattccccctcaagctggagcatagatgttaatcatgcccagcttgttacaaagataatcaacccgcaccccattcaaagcctttgtaaaaatatctcctagttgttctccggtcttcacatatcctatggagatcagaccttgttgaattttcgcacgaacaaaatgataatcaatctcaatgtgcttagtttgctcgtggaatacgggatttgaggcaatatgaagagcagcttgattat

SEQ ID NO: 260121 - DNA, 1464 bp, Cannabis indica
aaaatcaattattcaaaaatttacaaaaaatttcatgatattctaattaactataatgaaaattgctatataaaaaatattaaattataatttcttcaagtactaaaatacaaagagatattctatcaataaaaaacatgcacccaccatataaatatcttatttatatattgagttactttgactaagaaaggaataagagaattaagtaatgaactaataatatgtaatgaacattaattacactacaaatcaggaatatctaattaaacattaattaattaatttcttattcacttctccatatataaatcttgtaattaagatttcgttagatctcttttcaataaagttataatatatattaatttttttctaatataataaaatctctaacaaatttatcctcttagattaaatttaggatttttttacttatttttatacttttaaatagtttcttctgtatttttacggaattctacacagaattctctataataactaatgaagtaatttaaatcgcaaccaaaatccgtataacaacctacatagtaactatcgttgaaatgtgaaaccaccacatcaacctaaaccgtaattttaaaaaaaaaacttaaaaataatatatagagtaatttctcttaaattaattaatctaactaattatattaaaacacatgtaaataccaaattaaataaaaaaatatcacaatttattatctttcatttttaattccaattctataatttatcgtccctaattgtgttaataaaactcttcccatttatataaatataagtggttggattaataagtttaattagttaatatttatttttagtgaaaaaacaaaccctagattaattcaaacaataataattcctaattaaacaaaaactttgcttcaacgttatacttacataatatcaagtactacaagattcttaattaatcaaatctatcaatcaatatctgtctttaattatatattgtaaaataaatataatttatatgtgtaaacatgatgtatataaccatatatctcttttttattttttattttttaaggaatatatccacatcttatgtatatatatgtgtgttttattaccatgttgacaaaaaacattactactactatatattgagcacgattaattaaaataggtatccaatcctctatatttatataaattattacatattttatggtcccatttggtcaaactagttacttgttacctttcccccatacaattcaattcaatgtttttttatatgtatatttattataattatgtatgatatttgtggtgatttagatctcattaatattattatatatttgatgagattgattaataaaaataattactgtgtataaagttagtacatgcatgccgttacttttactaaataagggatatggtaccacataatctatactactataaatatgt

SEQ ID NO: 260122 - DNA, 536 bp, Cannabis indica
tactttatttgttttgatttttatatatttatgttcatattctttaagatatacctatttttacaaataatgtccccattatacccccttaagttaatgtaaattatgtgctagacttaagtggagggtgagggtgtattgagcagctcactcacaaaagtgggtacaatttaataaaatatagtataagggtatttttgattaatggatacaaaaaagaggtattcccgaacttattttcaaaacaaaaagtccatacaccattagcattatttaattatgccataaaaaagtaaacccttaaattttcttccataattcatgttattttttactataaaatagggtgtcaagtgaaaaacttctccatattttatgttaagtgagctatattttcactttgcatctccattggtaacttttgggtttataaaaattttattttatgttgaaaaatactaaataaactgagtaacctacaaaatatcactactcaaatcaaataaaaggaaaaactaaattcattgcgattatgt

SEQ ID NO: 260123 - DNA, 733 bp, Cannabis indica
gaatctcaaaagatcctgtaaacctagggcataacttgcctcttttcttaaaatgtttgatcccttttattggatacacctgtagaaacacataatctcctacttgaaactctacattcctgcgttttggatctgcataacttttttgcttactctaagaggcaagcattctggctttaatcttctctattgcttcattcgtccgttgcactgattctggactcaagtatttcttctcccctttttcatcccagtgaatgggagatctacactttctaacaactcatagggagccatgcctattgtactttgataactgttattatacgagaactctatcagtggtagatacttactccaggagccctcgaaatccataacacagactcgtaacatatcttccaatatctgaagtgtcctttcggactgtccattagtatgaggatggaaagttgtgctgaattttagtttagtacccatagcccgctgaagactctaccagagtttagaggtaaacttcggttccctatccgaaactatagactttggtacaccttgtaatcttactatctcttgacatacaaatctgcatactgatccactgtaaaagttattttaactggtagaaaatgcgcagactttttgaatcgatctaccacaacccaaattgaatcaaacaaacctgtggttttaggtaatccaaccacaaagtccatggtgatatcctcccact

SEQ ID NO: 260124 - DNA, 951 bp, Cannabis indica
tggacgagttttatgaaggcttggcggcggtccagtcggaaccatggcggcgtaatcttgggcattggcatttccacgccgatggagataagggttttgagggaggggttgcggcgttggacggtggaggtgaagttgagaagtgttgggcattttgggaaggaatgaagagttgatagttttgggggtcgagtgaagcgaaagcacagtagagaactgtgaatagtgatgagtctatgcttgaggctgggaatccgctctctgggaaccaatacgcagattttattgtcgtttgggcgtttgagaagttgagcttgtggagaagggccaaaattaagattattggaaagaagtggggttttattttggacgccataggattaactggaaactcttaacctattatttgtttttttttttttttttggtttgaatagatatatttataatgtattagattcatttagcaaaactctaagtttgacttgacaataaggttccgaatactgcatagttggatttagaatgttcacacgtactacaataatcatattgttaataattgcctaatataaactattactttagctgaaaaagtccaaaaaaaactgagatcacctctcccactaatatgtctcattctttgtctcggacttaagatttaaagtggggtgtaatttttttagtagatgagggggataaaagtaaattttaaaaaataaataaataaataccattagtgggattaaaatctttatttttaacttacatggtaagtaacttaatattatgcttgtagttattattttttattacaaatatctgttttaactaattaaaatacatatatatttttttttaatttctttttgcacaaacaactatccctcgcttatatgtgaatccgcccgtgctttgtactactaattgtgtgacatctcatttaaaatt

SEQ ID NO: 260125 - DNA, 5326 bp, Cannabis indica
ggggacaatttcaatacccgaagggaggatggggcggggataatactatccgcaccatatccgaccccgatatagatatatataatttcctttttattcttaacatatatatagtatatatatgattgataatcaaaattattttgattatcatccataatcaaaattatatatcatatgcttaaattatgaagatctaatgacgatagtgaactgatgatcattgtggattacatgtgtaaagatattttcttctcgattcttaatttcatctttgtttactttttaatttgttgggaggcttgagaggtatgagactatgatcctatacttgggttatgatttttttgttttttttttcaaactttgagacatatttagtttttattttctactaggttatgctttttttaggtaggtttatcttttatcttctatgaattatgaatgcataataaatatttgtgagaatattggtttaatttatttttttcaattattttaaattaattttttttttcattttaccttaatggatacccgatgggttccccataaccgatgggtattcccctaccccgaatccgttggttattagacggggatggggcggggatgggggtataaataggtagcggggatggggccggggattgcattccccgtacattaaccgcccaatttccatctctaaccttcaacaacaactaaaactaattaaacctttcgcaaggaaagaagtcaacataatgaaaaatacgcaatgtctaataactaaattttaaaaacgacactaactttaaaattcattttgaaacatatatattatatcaatacttaataacttaatttctaacttcattctctattttcgattaaatttttatttaattgctcaaaaactagagttgatacaatatgaagcaaaaataaagataataaaaaactaaaaccagagagaaaaataaaacaaaaaaaactaaagagacaaatatacaataaaaactactaatgataataaaaatagaagaaggagataaatcatatataaaaaacaacaaaaataaaagtgagttaatattatacactctaataatcaaataaaacccaaagcaaacacaaaacccactaaaaatattagagttggaggaaaagatagagaaacaaatacctaaaatataaatgcaaaataaaccaaagaaaaagatatgagatatttgcatcgaaacccccttaacatttataattgttacacatatgaccttaataaaaaaaaatagcgataaaagtaccttatcttatgattttgttgcagtcgtattattttttaatcattaagtgtcaactcagaaacacatagtgacgtattattggatcacatattaaataagctaaaaagatatatcgtcgcgtatttttgagctgacatttagtgggcttaattagcataaaaactaaaaaaatatatgactgcaataaaatcataagataaaccttttttattaaggtcatatgtgtaaatgttaaaggaacaaatatcccataaatataagagagtcttgccatgttaattttagtaaataaaatttagctaatcaattatttcattgcaaaatgagtaacaaattagcttatgaaacattaccataaaaccaagtatgaaaaaatatcaaaagaaggtacaaaaagcaacaaatcacgcttttagctgaatttttactttttgtttctagttttttaggaagctcttcctgaaaaaattattaaaactgatttatgttgaaagagtttttagagctaaaagttgaaagttactagttactcaaccaaccaaagaagtacttttccagtattagaagcccaatcaacgtagaagcacaatatactttgaaatttcactcaattcaaaacaaataatgctaaaagcacttattggaattaattgaaaagaataacttcaaaccaattagaagttttcttgtccaatccttgattcaaattgagcatttttcatactccaagcattaagatttgagatcttaacactctttgttccattgttgaatgcatataaatgagatcctttgttaattgccaactttggataaactcttgcagtaataacacttcttccttctccaccaaaactctcaacaattgaatgatcaatctacacacatgaattaaaaagttcttataaagtaaactacaaaatacattttaatacacaacatgtatatttatccataaacaaaacaaataatataggtctatattatataattctaataacaatttatgaaaataaaaaattatttgatggtgacagttcaaaattttaaattagggaactcaaataatttcaacaaataaagagtattaattagtgaatataccaaaagaacttaaatatatatatattttcaaaacaataaaaaaacaacctttcctatttttgtaaaataaaataaaatctgtaaaaatttgtatagattttaccatttttaattatttatgaaataatataattttttttttatcaaaactataaaataaaaggactgataaacataccaaaattcttaatgttattttctcttgacaaggatctaagtctaggaaagtcccatatatgtgtttgtcaactccatccctcaatgaagacctgtccaaaaataagtttcacactcaaaattttaaaaaataacaaagttaaaaaaaaaaaacttgaatgaaacaaaattataagtacctgttttgatcactacacattagaattttgaactttttctcagtttcattggttttcaatatgtgaaagaagattgaagtttgttctgataagtcatttgaagccaaaaccttcaaaccaaagggtccaaatatgccttttacacttgaatttttctcattacaaagtaattgaggattaatccaactcgggttcattggctcagcctcttctaattcagatacttcaatttcgaacgaaacttcaatatccacctttaaatatttatgtaaatacaattgagaagacgaaattaaatataaaatattatgactcgtaatagagaaagtaaattttgcttggtttattttaattacctgtgaagctgtaataccagaaatttcgaagattgaatcactatgaagctctttgttttgaagactaactttctcatcacgtcttagtttttctatctcttctattggccactgtattaattgcttcccagattcactaagaacaattgttctgggaaacgactgatacatatttacatgtaatcgatattagttttttcagggaaaactagtgaaaacatactattttacaatgtaaatttacaatttgtttttttgcaaaataatattttagacaacacgtagataatagttataacaaatatcttattagttttcgacaacatgtagataataatttactttgtcaacatcagtgttcaaaaaacttattttagacacttaaaaagataattaaacacatttgaatcctaatttcaataaattatccagaattaaatacattaatattattactattattattattacctgaagtccagaccagcctctaacattagcatcaacatcattatcagactccataatccaaccccatattactcttctcttttgttcatgatcataaaacgatttcgaagcataaaactttccataatctaatcttaaatcaattacttcactttcaggattgaactcttctgtttcaggacaatattgccctaatacataataatcatgtttattgtctaaaaaactcactttcaaagcatactttttcttcatcttctcataattatattgatcattattattcatataattattgtcaccatctgagccgttgattcccacaggaaaaaaatcaggacactccaatattaaatcattattttcaaataatttactaaatgggctcttagtggaccgagtccaattctcaaagtcactactcttgaataaaagtccggcccatttaccatttcccatcttagctccaatcactattctccaaatcttgtctgggcccaaccaagcagttgttgggtcacgaaattcttttgggtcaaaatctgggcttgggcttattattgggttgagtggagatttggcccattctctaagaaaaggatctgagggatttttgggtgtggccaaattttgaacttggtgttttttagagtctcttcctgtgtatagaatggctaatttgtcatttggaaggtgcgtagttgaaccggaccagcaaccattgatatcgatatctggatcggtagggttcaaggctatgtcgaggtgaatccaatcgacgagattgtatgataccgaatgagcccatgccatattaccaaacactggaccttttggattgtattgatagaacaagtggtatactcccttgtagtacattggtcctgtatttttatcgtatttcgaaaaacgtcacacaaatttcagttaaaatacttatttagtatcctgtattttttgttttcgctattgtctatttggtattcctaaacccaaatttgatctaaccaagttattcttaggtttcaaattcaaatttatttacaaatgataactaaggctagtttagtaatattcacatttattcttttggttcacaatgaaattttttttaataatatatatggtttattttttaaataacatttttatgggaaaaaattaaaaataaaagccttattttataaacattgccaaaaaaaaacccataaaataaaaattctccctataaaacatagacttagtttaattttactaaattcataataattacaaagatattcaaaatcaaaaggttaattttttattattattattaatattttttgcatttattccttaattttattcataatactcctttaagcttaagtatactattcttgtaatatatttatatattaaatttctcatctttagaataaagaactaaactttcccaaaaaaaatccagattttttttccagttattttatatagatgtaaaacttaagattgagtagaaaaatctataattgttaaaaaggtaataatgtttatttactaaattagcaaaaatccacatgaaaatattaatggcattattcttaaagtaaatatatatagaaaaacataccattaggatctagaatatatatatgagccaccatcataaatcaacatagaaaaattaaaaaaaaaataaaataaaattagaaagaaaaataaaaaaaaaaactactctaatataaaaatcaatccaaaataa

SEQ ID NO: 260126 - DNA, 546 bp, Cannabis indica
caagacttcttagttgtcgacttgcccttggcttacaacatattgttgggtcatccagcactgatcggattaggggcagtcagttcgatcaagcacctatccttgaaattccaaacaccagatggcgtgggagtggtgcttggcgaccagatgcaggctcgcgattactatcgtatagagctgcagcatagaaaagtcgtcatcagttgttggcgatctacacagaagaaactgaacagaatgacgaagatcttgacccctgagttcaagatgagaaagaccttctaaaaccaatcgaggaatcggaagtggtcattctcgacccaggaaatccagcaaagggtgtatacattgggaagaacctggacgagcagctcaaatatcagctaataagctttctaaaggtgaaccgggatcagtttgcctggagccatggagatatgatagggatcgaccctaatattatctgtcaccacttaaatatcgatccaaaccacccagcgaagctgacaagttgttagccaacaatgttatacgcgaggtatt

SEQ ID NO: 260127 - DNA, 872 bp, Cannabis indica
aaattccgtcccaacacagctaaagatgcacataaattggatccaaaacataggctaaaaatagcctaacaaaaaacacaactaagcaaactcgcactggaagtacacattcactttcataaactattttggtgtgctttaagcaaatctcaagattgtattttcttatatctcctctctctctcattctcttttcctttatttcatcattttatgttattgatctaataataaaagtctctttcatctacggttgttcatataattttcaatttgtaattccaaattccaatcaattcgaactaaatgatttgagatctaaacaagtaaattcagtgtcaataatttggtcgattcgaactgtttataactttgtggttcggtcacaattttaaaatttttacttgtagttcaaaccaaatcaaactgtttttatacatatataagaagatttttaattttttttaattaaatattaatatgtaagaacaatcttaggcataatatttatagttgccttaatattgactttaccaatatctagtttcattgttgtttacgtataatactttaaagtaaaaaaaaaagaataagaacatttactaattacaaatcaacccgtttaagtggattagtttggttttgtttgtagcatttaattagtttggttcggttgaaatttatttttttaaaaaaaaaactaatattactggtttggttaaaaaaaaaataaaattttgaaccaaactaatccattgataacatagtcttttgaataatattgtccttattaagccacatataaaaatataaactactctactcatctctaattaattttgagataaaatttgataatgtatcacatcaat

SEQ ID NO: 260128 - DNA, 637 bp, Cannabis indica
ataaatataatgccaataatttaatccgaaattgcatttcgggcccgaatccagttcggcccaaaatacccagttgtgactataccgcgccaacttgtcaaaatacacctgaaaaagacaacacagccgtattatataataatatagttctataagcacttaaataattttatttcacgattttacccttctcgggtcaaaactaataaaatacccctagctcaccgacggggtcttaacatgtcataaattatataaattctaacatattaaattatataataatataattccacaatactacataattagctagttaggattttgctaatccattaataactctagggttttacaattaccccctccttattgaaatttcatctcgaaatttacctgaataactctgaatatttctgttgaaatctgtctcgagttctcaggttgcctcttccactttactgttcctccataatacttttactagtgcaatcgtcttgtttctcaagactttctctcttctattaagtatttgcactggttgttcctcataagaactaatctggctagagttccaatgttttataactcaggatatgggaccaatgtgagatatatttctgaagcattgaaacat

SEQ ID NO: 260129 - DNA, 3587 bp, Cannabis indica
caggtgcatctacatattcccagactttgttctttttcatggaatccatttctgaatccatgccggccgaccatcatttcaaaatggtatatcatttataattataatgttagactcagttaattgattttgacacatacttgttagtaaatctagatcctggtaaaatatatccaacatatatcaccaggataaaccaccgaaagaacgtaatgtatggattacgtatatatatgagtagggttatgcgagaaaggcataaccaggttaggctcggtaactagaaccgaggtaaaccctactaaggccttgttgtatatagacgtgtgagagcaacacgtaggtctacgccacgtagacataaataggcatgtgagcgtaacatgcaggtctatagcaaatagacaaatagtgcagtggcaccattaattatgtgttatacatattgagattaagggttatgcgttcaaggcataatcaagttgaactcggtaaccagaaccgagatgaactattctaaggccttattgtaaatagacgtgtgagagaaacacgtaggtctacgccacgtagacataaatagacgtgtgagcgcaacacgtaggtttacgccacgtaaacataaacaggcatgtgagcccaacatgcaggtctgtgtcacacagacagatttaaatggcattactgcttatattatatgatgagcatattattgatatattttatactgtcttgttgggcttggctcacgggtgctctactatgcaggaaagggtaagactgttgttgatcagccgtgagtgtaggagttggatgaagaatgtacatgtccgggacatatcagaccaagcgggttggggtctaccagtgctgtttttttgagactctgttttgtcgcttagggcggctgaaagaaaaaggacttgtaatactattttgtaaatgtttttgggatcccaatttctgtaactttgagatcgtaaagtttaaattattacaagttttatttttactccgtttatgattaaagtttaaattccgagctaatttcattagtaatcgtgtttaggggattagggtttcataagtatcttgggtagcgtgcctaattatttagggcattacagttggattatctccaacaatgaggggtaatttgatatacccgatgggtccgatgccttggctaaaaaggccatacatcacttgactgtagggtgccaagtcagggagttggaccttcatcttttcatgtgttgatttgaaaagaatgttaaaggaggctccattatcaaccatgtatcttgccacagttatattcttgatttgtgcagcaacgaccaaggggtcattgtgtaggaaactgtcttgggcagcatctccttctgataaagagattatgggcactccaacctttagttgcttagagtcacgctctttgcctgccatgatgtcgcttttgggttcgtgacgaagtgtccatgtatagcgctccctagctttgctggtctcccctacaatatgggctccaccaacgacaacccctacgtttcttttgactacaggttttggtagagttgctggtacctgtctgtgtgcctggaaagagatggaggccaaccttcggagatggaggtcagccttcaaacttcctgttgctgactttccctgctaagacgtttgggcatgctttgctttgggagttttggtaggagagtgaagcaagcgcacttcttctccctctcccttagaattcatggcgtaatggaacgttgaatttccctatttttccattatgttgttcagagccatcgttgatgcgcttgcctctgccattctcattgtcagagaattgacagagattgtctacactggtcggcatgtcagacactgcttggggtgctataaggccctatgtttcttcgtcattgacctgccctcttttctgggcttcctggacagcttcttccaactttatgaagccatcaactcgcttaaggagctccttaatgttttttgttgagatcctcctaatatctttctagaggtcactcaatggtagggtgcctccgagtatggtcgcatatcgaccttcttctgtcaggcttttgaccttggtggcctcagccataaaccgttgaatgtagttcttcaatggttcatcttgtctttgctttattttgacaagatccttcagtcgtgaaggtatttgtcttgaatcagagaactgaatatagaattcttgggagagctcttcttgaattacaattgttgggctacttcagctagagtttccaaaaagattctgcatcgcagatctccaaatactttttagagatctgtttggatctcaaagtacttcaggtgtactaggggatcttcttttcccgtgtacatcttctaagttggcatcttgaatttgggcaagggtaaggcattgatatatgccgagaatggtgatccccttgacttctctagctcaagatctgaaggttttggaccagctaggtgcttgagcatgtctcgtatttgatccaacagtgcttgcacggaacaataatagaaaatcctaaattcccgttagttttacaccgtagggtaaagaatttccaacattccataaaatcgttgcttatacgagtgtcacgattactagatagaataaacggcggttaaaaacagtcagggaaatagtatgggccacgatttaaaatcatcacctatagtaaacactataggtgacggtttagcctatagtatatgccacggtttaaaacgatggcctatactatagcgtacggtttaaaaccgtggcctatactatatgccacgattttaaactatcacctatagtggtataagcacggttttaaaactgtggcctataatatagactacaatttaaaattgttgcctatactataggccactgtttcaaatcgtcacctatagtggtataggtacggttctatcctgtcatctatctatggtaaagttttcagtttaattataagtttcttatttttcaaggacgatttttgccagtcattttgttgcaagaaaagggaaaagaataaaaaaaattatggtagttttcctttgcactaattaattcttactaatttatataatgtcactaattagttaagataaagtataaacataaaatgaaaatgaacagaaactaaaagatatacaaactacgtagtctaacttacttaatcgttaggtatatgaaagtaacttgttatagtgtaaagtataaataaaaacagaaattgatcatcgtaatagcccttgtcgcactgcctgtgctcggacgtattcaattcactgatcacgcagaagattcatctcgtcatttgattacaagttgctcttaccctgccatacaaaatagaaaaaaaaattatattaattagtaaaagaccttatttactttaacatgtacaataaaggatatggaaaaaggaaaacactactatactagcataccaaatcattttcaaaactagaaagggacatattgtgaactatccataccatataccaccaagcactatttcttgtaataataataataataa

SEQ ID NO: 260130 - DNA, 1940 bp, Cannabis indica
acatgtccttgcatcacccaagtagtcaaaattggcctgaggattagccttccaaaaatcaaagaagtgctcaagaccggctgtctccaaggcattgaccttctccttcaacctggccacctcagctgaaagctcctcctccctggcttccttttcctccttcatctgatgaagaactgctcgaagggaagtcctctcatcctaagactgtttacctcagcagataaggtctcgatggtctcctcaaaatggtcagcaacctcgagattcttagtcagcacagtgatcttcttctaagcggcaaacaacttcttgttggcttcacccaactccaactgaacagctccgacttccgccctggcttcttcaacatccttcctggccaagtctgcctccgccctcatggtgtcggatagagccgtgttcttggaagcagcagacttagccttggagtaagtgtaggccaacttcagaccggattgcacaaggaaaaacctttagcatttgagctaagtgtggaagataaaagggaagtatcaagaaagacttaccctggtgaactcctttaagactccgcccactagcaattcaaaagaagagtcattgtcagcaccagccagttgatcactgacctcaggaaccagccgattcatataatggaccagtatctccttgcccttcttggcgtctggaagcaccgacaaaggttgagtaggtgcccgcactcattcaggatcactcctgaccagttcagacccaaccttcggtggtcctgactccttggacttagcagctttgagggtagaggggtttgcagcagtcagctcctcgaaaagatcaatgacctccccagtaggcctcttttccttagtagaggacccctcacccccctaagacatcttggccggaagagaggcgctagagcttccgcctattctcttcctcagagtgtcaagcatctgccgagacatgtttgtacagaacgaaaatagcatggttagaaaacagacattagaaacataaggcatgaaaatcaagaagctcaaaaacaagacaaagtaatatgcaaggtgactgcgggaacaagactcagaagtccatcattacctgacatcgatcttatttcaggcataacagctttcccttttccgaacacgggaggggatggccaaacaggtgaaatgggctcccttatacgaatcgcatgttcaacagccctgggcggggccgggagtttcttcttccttttcagtggagtcacctactcttcctcagcctcatcctcaggattcaagggctcctaagcatactgcttggcccttgcacctcccttcaacttagcctcccgcttcagttgaatcaactcatcctccgaatgagcttgttcgggctggcaaccagatttcctcttcttccccgtcacggacttaggagtaaagtcattgggatagagcccatacctcacaagattatcctcagaggtcagctggataatattccgttcttcccctggaagccgggcaagtttctgagctctatccctaagagcaagagtgaggggagtgcggtgatatgtcagaatttgctagaaccgagtgcgggtgatgcccgtgccatccaccatgaagtactcatcaacggaatgcccaatctggatgatggtcgtatcgtctgtgcccgtcaaccacttgaagcctggttgagagaagtagaagtaccccgacctaccatgcttgggggtggacttcaaataaaagaaccaagcaacctcatggggagagggcataccccatttctaggaggcatagaggacgaagagggcaaacagatacttgatgcccttaggagtgaactgggccgggcagaggccgaagaagttcgccacatttttgaagtattgattcaaaggcatcaatatccccttgctgaccatgggcacc

SEQ ID NO: 260131 - DNA, 691 bp, Cannabis indica
atattatgggttaatcaatcctactaatctatttctgtatataatttaaatttgctataagtgagtaaataaacgtaatttataaattacggagatttttatgacatatgtgaatgtaatatgagctatatgtagaataaaaatattttcaggttcggtgactctgaagactcgataagtggataaataagcgtaatttgttaattacggagatttatttgaaatatgtggatataatatgagttatttgtgaaataaaaatattttcaagttcggcgaccctgaagactcgattagagacaaaaaatgtcacaacgattttagttagaaatattgatgggattgttggggttagttgattttgaaaataccgaagtattttaagatactctaagttggctaaatacactaaaagtataagtttcttagtagttaagaaataataagataattattaataataaaattttattaatattattatattaattattaatatattattataatactgttttgttttatatatataaaagtttagtacatatatgacgaacgaaacctttgttctctcgttttgacaaactttcttcttttatatctatttgtttttatttcaactcgaaacctaacgatctaagctctggtagtagcgataacaaatcctcgaagaggaaaagcttaaggtata

SEQ ID NO: 260132 - DNA, 522 bp, Cannabis indica
ggtgcgtctacatattcccagactttgttctttttcatggaatccatttttgaatccatgtcggctgaccagtgtttctctttcggacttgccattgcctgtttataggttaatggatcgtcatcaataccatcaccaacgaccatattcatttcaccatccaagccataacaagatggttttgtggaaaccctcccactacgaagaggagccgtgatcttctgaacaggaacattagtggtagattttttagttgtatcaactttcaaaagttcaactgagggagtgggattatcctctacttgagtagaagaggatggaacattagaaggagttatatctgaaagcatttcctccaatactactttgttttggagcttgaaatccttaatatagtcatcttcaatgaaagtggcatttgtggaaacgaacactttatcatccttgtgactataacatagtccacccctagtctccttagaatttccaacaaacatgcaaacctcagttcgcttttctagt

SEQ ID NO: 260133 - DNA, 892 bp, Cannabis indica
ccaaatatatttttgtgtacaaaattaaggttatgatttttgagtttattaaatatacagccgttatgctgtcgaatttttagaaaataaaaaagaatatgttcttttgttattcttattaattgcctgctttggttatactaatgagagtcatgttgatcatgttcggtgcatattgttgtttcacgacctagtctttgtgtcatcataggtagatcaggtgtatgcactcacctgtaggtgaaagacctagaatctgtacagggaatgaattaaatctgagccccgatattatggtggatatcagctgcgactacccggttttggatgtcgttttctataattggtattgagagctaggggtctagtggaaggtgtgatatgcatttgacgtttgatttgtgattatttgtggtctctctactttatttatacattttgatactggtaatgagatattttatttttacaaagctaaccatgcgagaattttatcaaaccaagggtctgttgatatatattagttgttttcctactgggctttataagctcaccccctattttctctcatttcaggaactcagtttgatgcttgtagatgaggatggtacggtaccattgagtaagaaagtcgttattagtttagtcttattctactctttaaccttctaatgaaactgtatttaagctgaaatagatgacctggatgacttaaattaagtatgtactagttagaaatgaggaatgatagatgctagatattattttagtattttattaagttaacatttatctatttggtgattatataattatatagaaatattattgttcttttatattgatgaatgatcctgattttgttactaatattttcttattaatataggag

SEQ ID NO: 260134 - DNA, 877 bp, Cannabis indica
tacctcaaaacaacatgaataatgtactaccttggatttatgaaatggattagcaaaaccctaactagataattatgaataattgaggaattatactgttatataatttaatatatgagaataaatatgatttatgacatgttaagaccccattagtgagccaggggcattttagtaattatggcctaggaagggtaaaataataaaattaatttattaacgtgcttataggactatattattatatagtattcttgtgttgtctcttttaggtgtgttctaacaggtcggtccggtatagtcacaacctggtatttcgggctgaactgggttcgagccccaaaatgcaattgggattgaattgttggcattttaattgataatgtataatctgaaaatatattgtgtttaaatgggtgtgaaaggacatttttgcctttggtttatggttaggctttatttggcctaggggcaatttggtcttttgacctttatgtgataaatgataaatgaagtgaatattttaaaaaagaacaagaattttctggtttgcctcagccccaaccgaccctctcaccctctcaaaggcttttcttgttcaactttgatttttgaagagaaattgcttggaattgaccttgaattgaagctttgagtttgttcttggattgagtttgaggtaactttccatggttttaatctaagttttattactgaaattaattgttgaagatcatgaataggtgttgtggttgtggttaggggtgttcaataaaatttacaaaccgcccaacccaaataaactgccaaaaccaaacaaaataaaccgacaaaaagtacaatctgaaataattcaatgaaaatccaaaccgcccaa

SEQ ID NO: 260135 - DNA, 1299 bp, Cannabis indica
taagggaccaccccatcatttgaagggtgggcccagaatccataaaaaccgtctttaagtttgtccccctttttggggacagaaacaagttcataaaaatataaaatctccgccagactgggagagccccatccccgggcggagtaaaaaataaacaagcctgaaagcaggcggtaagcttggggaatcagttggtatggcgcaaggccgaaaaatactaaaaaattaataaaatagtcttgaagaggaagcatggccccggccatcaggtgcgtctggctccaagccccgaagccgccatagttatggttgggcgtctccgcatctcggggcggccagtgatacgtcccggatgtcgagggtttaattccagccacctccacgatgttctccagctggtgggggcaggttagggtggaatgaagctcagccgcctcccatcctgtggcccgaggtttatacccctcctgggcaacgagacccagcgtgacgtcttcaagggtagccagacgcttaccactcttcttggacgattttgagccggacgcagacatgttttgattctgaaaaaagagttaagattccagcaattaggccccataccaaaccctaaatcaaaaaagggaatgggggtcccctaaccgctggaaagaggccccctccggacatctgtcaaccagaaaaccttagaaggacttcctggacaaaagtcgggtgcaaagaactcacagaaggcgacattacgcgtaaaagaaaaggaaagggcagaaaatcgagaaaaacaaagtcttctctatgcccttgaaggccagtacaagaagagtgtatggtcctttagaaaaaaaaataaaaaaataacaacaagaacgtgacaagagtaaccctaacaccagagaaggtgaatctagacctgttacatgaaaaactccaaagaacacattcccagaaacttcaaataccaaacccagaaaaacaaacagataagtaaagcatgccataaacacgaacagtaaagcaagggatgcgagaaacttacagtgaagtgttgaaactgagggttctgttgtcgatcaaacaaaggacatgtaggctgacagtggtgaatgaaggatagcagggaaatttgtagagtgttcaaaggttttttttttcttggtctggggatttcgctctgaaaaactcgaacaaagttggcaaaaatagaaagtaaccaaatgaaggaaagatggtggcttttataggccaaagtgcatgaggaacaggcgctatcacctaccaatcgaacggctggggaggcgc

SEQ ID NO: 260136 - DNA, 878 bp, Cannabis indica
gtagttagttagaatttctattagagttagttatcttttagttattgccaactatactttgagatggttgttatgctcatctgcactgcatatatactgaacttatgctcttttgattgaatgaagtgaattatttttttaaatctgttcttgaatctcagcacttgggtcacagttatagttgaagtatgagtttattttaataactttaagctaccaaaaatttaattattggcatgaaatacacaaatattactaagattctatataaatattcccataactaattattacttactgttacttatattttttatattttttttatctgaactattgtgctagattaatgttacctaagataaaaagttctcatatactcatcttcacagttagaaaatgaaattgaataaagagaatgaaagttataattcaataagggtacaggttgggaaatattatcataaaaagatgggtataaatagagatataaatacgtgcgtgtcgtactagtagcctgacctataattgttgggcttttcaaaatgcaagtcatgctttgccgggctataaaaaaaaataattgtgttatgccgtgccaaaaaaaaaaaatggactacaccgtgttgtataacaattttacaggatatgtccagcgcggcctacaagcctggtagttttgtgtcgttctttattcgaatggacttgtttttataaatagatcaactcattttcttatacgggctcaaattcgttctccatatttttatatttgtatcataattaataagctaattactaaaatgtatgtgtattttatatttttaattacttttattcttttttaataattattacacacaatcatataaaaaata

SEQ ID NO: 260137 - DNA, 1083 bp, Cannabis indica
gtagatttagtgtaattatgttcaacttttgcacaatggccctcttgctgagataatagcttgccattcgtggcacttttatttatgtaattaatttcatattattttttcggatggccaatttagatccgttaatcacatttataccatttacaatatagatatttcctccacttttgtgagaaattttttatccgagttcgatttttcacaagttgtttaattatggaccatcgtctattggtatgcttatttaatggttacataatgttttgtttaattttgtctcaggattccttactcattatttcatcaagtaaagagtgaacttgaatgttttcaaacaaataatttcttgattgtttttaaatatttttgatttattctttgcgagtagttaattgtctattcgcatcttagcttatgtattattaagattcactctaggatcttgttcataatatatgttatatatgtgatttttttattaattaaactcgcattaatgttggcaagatttttaataatctcattttttttataacaagtactatttttattcttgctaataataaaattttaatattggatttttttgttgttttggaccaactttaaccgaatattgtatcttttgtaatttttttatttttagaatttcaattatcttaaatttgttggataaaaatatgtgttgcccaagtaattttaaagtatactttatgattacctgaaacaaatataaagaatgaaattctattcaaacataaatttaaaaatttacatattctcaggataaattagtatttataaatatacaaccattggtaatatggtctcagatgttcgctattccaagtattttttaccagcaagccatttagtcatgctaatttataaactcttggtgctattatagcttcaacaatatatggacctttccaatttgggttagatagtcatgctgcaggatgcgaatactcgccttaacaccatatctccaatgttgaagagcttcttgtagagtccttttttgacaatttagatgccaaaatattttttatttatggtgagatttctttg

SEQ ID NO: 260138 - DNA, 507 bp, Cannabis indica
aaaggacaaaagacaacgaacatctatgattaaatctgaaaaacaagataaatctgtagatgtatgaattaaagcattaaagactcttagcgcatcggtctcaatatgtgtgacttgtagctgctgttggattgcccaattgagactatgaaatagagctttagcttccatttcatcggaacggaagcacccttggacaggctttgagatggcagcaacaacaaggcctttatgatcccgtacaatggcacctactcccaaggttttcgaggtagcattgacggctgcatcaacattcagcttcaagcctgatgcaggagggggctgccatggagtgtctctgcttgctggttttttactggtgtgtgcagcagtaggtgaaacacttgttacagctggtgttgtatgggcttgcgttgtagaagcatgatacttccctaggtagtctttggcaaatcttgctgtaatcttcccttctttaaaaactcctccatgtagcactttatt

SEQ ID NO: 260139 - DNA, 2326 bp, Cannabis indica
ttcaatgatttccatattgatgcttggatcaatacggatgatgatcttaattggcagttcacggggttttatggggaccccgatccttcgcagcgaaaacactcttagacacttctaaagcggttagctagaagctacattggaacttggctatgagggggagacttcaatgagattagatgaatacatgagaaatttggaggaggggggaaacctagatacttaacgaaaaactttaacaatgctattgacacttgtgctctaagagaactcgaattcgatggtagcaacttcacttggtgcaatggaagggcgaaaaatctgatttatcagcggctagacagagtcatggtgaacaataaatggtggaatacttatgcaattgtaaaggtgaaacatctaagtaggtggtgttccaatcactgccctctattggtaaattttaaagccattccaaatgatgataagaagcagccgcaatggggatataggttccactatgaaagtgcgtgggctgacaaagaagagtgccatcaaataattaaggagattaaggaggggggcaacaacatacactcggcagaggagttgggtataagaattactcattgtgggcaaatcctgggtcaatggaatgcgaaggaaaaaaaagaaacccaaactaaaataagagaattgaaaaaagaagtggaggctttatctcgggatcactcaacacaaggttttaccagattgaaagaaaaggaaagagaccttaatggatagcttgcaaaggaggaaatcttttggaaacaacgaagcagggcaatttgacttgcacatggggaccgaaacacacgatactttcatcaaaaggcttcttctcggcgcaaaaaaaaaaacaaatctgtggcctttttgatcacaatctaaactggcagagcacgaaagaggagattgagaagaccatatgtgatcattttcaggttcttttttcagacaatgaacccgaaagtgacctcataactcatctacagtggtttgttccttcgagactaagtggaagacaaaatgaatacctccttcaggattttacagcaacagatgtagttcaagcattgaaacaaatcaattcgcttaaagcaccaggagatgatgggatgcctcgactattttatgaccaccattgggatgtggtggggtcggatgtaacacgtctgtgtctggatatactcaatactaataaggattgcaggcccataaacaagacgcttctttgtctaatccccaaaataaaaaacccgatccaagttggtgacttccgacccacaagcctctgcaatttttgctacaaaattgtggcaaaataccttgccaataggatgaaagatagtttaaaggaggtcatattagaaaatcaaagtgcattcattcggggtcgtctcattcaagataatgccattttgggatttgaaagcctccattgcatgaagaaaggccaatttgggaatggaaaaaagatggcgctcaaatttgatatgtccaaggcttacgatagagttgggtggaggttcatagaagcaatgattatttgtttgggttatgacaagagttgggtggataaagttatgagttatataacatcggtctccttttcagtccttattaatggagaagctagtggacacattcaacctcaatgtggccttcgtcaaggcggccccctctctccttatttgtttctcctttgctcgaaaggtttgtcatgtcttatccaagaagcagaaagagcggatagaatccatggtattaaatttggaaaagagggcctcaaattatctcacctattttttgccgatgatagttttatcttcttagatgctacggcaacggagtgtaaaagtatgaagactatcctagaagaatattctatgttgtcaggacaacaaataaacctagcaaagtcttcactatgtgttggcagcaagataaagcaagagcagggtgctattctcgcggctgaaattggcgtaaagttagttgaatatcacacaacgtatcttgggcttccgacttctatagggaaaaggaaaaaggaagtattcgaagctattcgctctaagatccgagataaattacaaggttggaaagcaagtttattctctcaagcaaatagggaaattctgttgaaagcggtaattcaggccattcccacctatgtaatgagctgttttcgtctccctaaggaactaattaaggaaaatcatggaatgatggcgaggttttggtggggatcgttgcattcgaagaataaaatccattgcgggaagtgggaaaaactttgcaa

SEQ ID NO: 260140 - DNA, 853 bp, Cannabis indica
catatggtataaaatatatatattaaagttatctttcgagtttagtaaatataaaatacgggcgttacagtttggtatcagagccaccaggttgtccactgaagaccgtcaagatatgtacaatcaaggccagtgtcgagctcaactcacggttccgtaagctttatttctttttgcaaactgttttaagatatgttgtatatatgattaaatagatgttataaaccctaattgcggtcttgaaaatattttgaccactgtctgacctacgtgccttgtgggttcgcaggctaagtcctaataatggacgcccagcgaaacgttcaaaggcagggtgaaatggttgagaccggaggtggtcggggtggtagaaatccccaaaacccccgtggacgcggtagaggccgcggtcgtgccccgagaggtggccaggagaatccacctcaggctccggttgattgggagcaaaggtttgctgaaatgcaagctagaattgaacagcaagaagaagagatccgacgactcaggcaacgggatgctcctgttgagcttcccccgcaaccgcctgctgcggttcctgcagcccctgcggtgccagctgagcaacatgttgctggtaaccgtatggagcctttatatgagagattcagaaagcaagcacctccagtattcctgggaggtcctgatgttcttaaagctgaacagtggttgactgttattgaaagaatactgaactttatgggtgtgatcgggaatgatagggtggcatgtgccacgtttcaatttcaagaggatgccctgattttgtgggagatggtatccctcaccagggatgttgccagaatgacctggg

SEQ ID NO: 260141 - DNA, 2032 bp, Cannabis indica
caagtagaatcagctaatgattcacatggtggtcatggcgaagagttcgagttcagtgaagtttttgtccatcaacttatacacacaatcgagtttgtacttggtgccgtctcaaacaccgcttcataccttcgtctttgggcactgaggttagtctttacgaaccttattatcagtatatttatgggccaatcgacgacattaactttgccttttcccctttcctcagtcttgctcactcagagttgtctagtgtcttctacgacaaggttctgcttcttgcttgggggtaagtagatcattccttaattctcctttcctttccaaatttctaatacacgattttcgaatgccctcttattctttcttgaatattatgcacaggttcaacaatgtcttcatcctcataatagggatcgtggtgttcgtcttcgcaacagtcggggtattgctagtgatggaaactcttagcgctttcctacatgcacttcgtcttcactgggtcgagttccaaaacaagttttacgaaggagacggttacaagttccaacctttctcgttcttggtcaccgaggaggaagaggaatgatagaaagatcgaaaatggtatgaaaaaaaataaaatatatatatttaaaaagtacctactactactgtctagtgaggtggattttgcgtgtggataggcaaaatggatgatgatatgatctttgagttaattctttgatttgtaatttgatgagttaagtgaggcaattggggggatgtaattgaattatttataaattgtttttgggagaggaaagaagattattataggaaggcttttactccccaactccctttttgcttgtttatttaattattgaaaaggaataagagagttgttagggtacatggccctctatgtattaataaaattatatccatcctactttatttatatataaataatgtcttacattattaacattcttatgaatatttattgatttcttttgtttttctatcctaaaataatatttttatataataatacacaatgggggtgttgatctattcattctattttttgctgttaaggagttacccacctgtcgtagatttactatgaccaataagatttgagatctcggtatcaaccttttggcctaaaaaagtaatctgtcttagtagtttttcaaaagagtaatttccgacataaatatttaagttataacttgtattagtagataaatacataagtttaatttttgacgataataatatttaaattatatttttagaacttttgtaggtagttggctattaagtgtaagttaacggtcacgtgacattctttgattgcttttgttcattaaattttgattttttatttgaaattaatttaaatttactaagaaaataatacgtaaataataatttgatatttaacgattaggtacctatagaagttctaaaattataatttatgtattattattgttaaaagttaaatttagatatttatctgcaattgagagttaaagcttaaatatttataccacaaattattatttttcaattaattgtttatttataaatatagtaaatatgcaaagcaacataagatcattttggttatatattttcaaattagaagtgtatgttgtttaggacataaaatatatttggaggcttttttgtttcctttgttcatgtaaacattttgttatctttaaggaaataatgtcactgtcaacaaaaacaaatgtataaagataatatgttgatcatttgccaaattatagaatcaaattgaatatagaaagttgtaatgttttcttgtttagatggaccatgcatgggtatcattaaattattccttttaagaagttttttaagaaaaacaaaggggaaatttgaattaatatgcttaaataataaaaaattttattattataccaaatatttacactataaaaaaactatactttttttcaaaaccccaaaaataccccctcacaattctctctctctctctgcatcatct

SEQ ID NO: 260142 - DNA, 557 bp, Cannabis indica
tgtagatcatctatagaggatcattgattattgggattataacaatgcataattaatagcgtatccataccgtagaacatatagagtgttctatataactgagagtgcaattccaagttctattgtggttcaataaggaattactaggttagacaatttacttggtaaattctatatctgcttattgggagctcggttatataggcccatggtccttatactagttgagacaaactgcatgtaagactcagttaattaattttagttaatcaattataattctaaaattaaactatgtctagttcatgaattttcactaagatatggcttgattgtgaagaaataggattttagggttaatttattaattaagagactttgtggagtctaattaataaatattataaatgaaaattttatttgataattagtttaattatgaaataaatagttttggcatttatagggttgaaattgtaaaaagtggtatttgtaaaaaatagataaatagttgagaaaaatggcaaaaatctaactagtgttgggcccactaatgg

SEQ ID NO: 260143 - DNA, 1169 bp, Cannabis indica
gatttttgagaaaagtttgaaactttaatttttatatttatttagttcagtcttcttcttatttgatatatttttatggttgttggacccatttaaatttaaaacgatctgcatgtgagggagggtgagatttatatttatttattattatttatttgggttatttgaagatttgcagatgcatagctttgctttgttcttgtttcagagagatttttatttgtgggtcaatggagtttgtttaaatcttcttgtattttcagatatgtaggtcaatatataatgaaagaggtagattttttcagaccagcttaaaaagagtgaattttatctaaaatttttatttattttttttttcatcaaaagtttactgcccatgaaaccattttgattcttctttctctctctctctatctgaaaataattatttgttgagagtgacatgatttctctctctagaaatgtcttctctttcttactcttcattaatagattgggttaaggtgggagagaggtggtgtataatcaattatttatttgtacaaaataaataaaaaaacaaggcaaacccctcttggactaaattttcctgagaaaatgaggatggggtagaaaaattttctgtttattcaatagcaagatttaaattttaagttacaaactgtcaaccctttacagtattttttaagttaccgtttttctttattatcagtttcttggagaccctttatattaaatgcccatctaccattttttcacaggtaaggcatgagatgataactttcattttaaagaccatataacgacttattcttcgaccattggagcttaattcaggttatacaaacatcaccagatcgttctgcaccaaattcactgccaccattggatcaagttctctactttgtgatgtcaaattccaaagtctcatcatcttcatcatccttatgttcaatatcagtccctgatattgatcctttgctcaaggatttgaatgagagaaagcagagttttcggcgaaacgtggtgtctttggcagctgaactaaaggaagttcggagccgcttggcatctcaagagcaaatttttgctaaagaacaacacaagacaggcatgtcttttgtggttttggttctttttgtattttgttgagttttttttggttggac

SEQ ID NO: 260144 - DNA, 603 bp, Cannabis indica
ataaagtgaaccaaaacatacacaaatgaatgaaaaatacttctgtttttttattgatgttgaataaaataaattacattgaaatggagttttaattagggcataaaacccaacactaactttctcaatgaattgattcaaggacatccacgtggatgttatgacttattacgtatgaataattcatgctttttgcgacttgcaaatgagatgaaaataagaggactactgaatgattccagaatggttagtgttgaggaacaactagcaatttttatatttacattagctcataatgagcggaatagagtagtacaaaatcgttttcaacatcctggagaaactatcagtcgtcattttaacaaatatttgcaagcatgtgtaagactagaaaaactttatctcactctagcaggtagaggtgttcgacaagagatatcctccaatcaattattttatccttggtttaaggttagttttcttttaaaatctaatatgttatttggaattatatatattttattaggattgtgttggagcaatagatggaactcatatccctgcatgggttccagtagaagatcaacaaggataaagaaatcg

SEQ ID NO: 260145 - DNA, 577 bp, Cannabis indica
aaaaactaggtcggaaaaagcccaaccggcagaccggttctaaccggaagcccggttcctgggtaccaactggtcgaccggttctaatggtcccccagccaccggtcgaccggttctgtgctgggaaccctaaaaccgatccccacacctctattcaatcccaaactttgcaataacttccagaatacctgtacataccataataaactaaaaccaagcaacaaatctcaacaacaaacactgaacatcaattcaccattaaaggtcaagatttgagttcttaaactcaaaccttaaccaaacctcaacaaagcctaccatatcaattcaaatcaactacataaacctattctaaccctaagacacgaaatcaaaccaccctaacacctacaactgcctaaacatcaaaattcaagcttatccttacttgaaaccatggaaaaattcatggagaagagagagatagagctataccttgagttgagatcctctaaacagtcaagattacacagaattgagctaaacatagccaaagacccagctggttcccttggtgtttgaaagagagagagagaga

SEQ ID NO: 260146 - DNA, 501 bp, Cannabis indica
ggcaaggctaaagttgaggagtcgtgagaacgagcaggtgaagattgtacatgtcggggtggttagtcctggagcgtacgatctttgggacaccagggccgtttgctgtatagttgctaggcgacaaaacttttctatatgtgtatagaaaacttttataaatgtattttgtaacgggatcttgaaattttatatatgtattagtttaagtttattaattaaatacgaaagttttaattaatcacgtttttcattaatcttgttcattagcaacgagctgcacaatacgtttaaaatcacgttaacatgcctaattagttagggtgttacaacccaactgattaattatctgtgatgccacatgtaagtgtgtagccccaaagtcaaataacaccgtaaaataggagttattaaagagaaacagatatgacatcatagaaggaatagctgcaatatcagcttgagtaatagcatacacctgagtaggtacgggttttgctt

SEQ ID NO: 260147 - DNA, 959 bp, Cannabis indica
tttacccataaataatagttgtctttttgtaatttattttgttgtcgttttcctcaatagtgttgcttttcattttcttctttattatgttgtttattttcttctttaataaaaaaaaaaaagatactgttgttttagacatcattagaaaaaaaaatatatattgcgttttatcttctgtatcgttttcttgaaagagcaactgttttgtaatacatgtcgttgtttacatttattgtcgtttttgtagttattgtcgtttttatgatttggtcgttttcttcaataatgtcgttttttaatttatgtcgttttgatgtcgtttttaaatttgtgtcgttttcttaaagagatacttttttatgtcgtttttttatagttaatgttgtttttcaaaattagtgtcgctttcttatagagctagttttgatgtcgttttctcagatttgtgtcgttttcttaaacagctatctttatgtcttttttatagtttatgtcgtttttaaaaatcagtgtcgtttttctaaaactcttttgatgtcgttttttgattgattatatcgttttttcagatttgtctcgttttcttacaccgctatctttatgtcgttttctgtagcttatgtcgtttctcaaatttgtgtcctcttcttcaacaactatttttatgtcgttttttatgtttaatgtcgtttttcaaaatcagtgtcgtctcttactcttttgatgtcgttttttaagatttctgtcgttttctgaaacagctatttttatgtcgttttttatagtttatgtcgtttcttaaaatttgtgtcgttttcttaaaacaactatttttatgtcgtttttctttaactcttttgttgtcgttttttttttgttgatgtcgtttttttcagaatttctgtcgtttttcttaaacagtctatctttttatgtcgtttctcaaagttgtgtcg

SEQ ID NO: 260148 - DNA, 2588 bp, Cannabis indica
tgttttgaaaaatcagaaactcggacaatagaaacataaaacacaacttctgttctgttaagaagctcgaatatacagacatcacccacctccaaatcgttttctgtcatgaattcattccaaccatcatagattacagctgcagattttccagttgcatagctcgtcctcctcttgaattgagcaggccattgtccaccatttggaattgcaagagccatatcaccatctttcgtaatgtattggtcagctatttctaatggcacacgctgccaagaaaagataagaaagaagattatttgatgcaatgtcaaatgattatatgtttcttcttaattagaatacctggcccgtcattgagctcatagaaattcttaccatataccacttatttgatggttgtataacagccttgaagaaaggattttcattttcaatagcatctttttcaatacttttaactctctcaacgaaagtcgaaggaagttgcttcctaaattcttgcttttcagaagaactatctttttcaatacttttaactctctcattgaaagtcgaaggaagttgcttcccgaattcttgtttttcagaagaactattgggaaaaccaggtgttccaacttcattatcagctgaaaatgagcacaagaaaagtgtacgaaatgaattttaatattgcaggtaaatagaatagaagacaaaagaaaagtgatcataacttacttgtgcctagaatctttcgagctttcttcagcgcgaaaaattacaacttcaaatgaaatatcgtctgtggccttaagcaaaacaaatacacacacatcacctactttcaaattattgtccacaacaaatgatcgccaaccaccttggaacctgggtgccgcactcttatgttctctatatgcgtacttaacatgccaagttttgtttttattttgaactttgagggttacatcacaaaatctgttattatttagatatatctgtgcaaataagtgtggaaagttctgcaacaaagcaatatgcaataaggaaactaaggagatatgagagcacattctaaaaagatacaaaacagaaaagtaaacaacttgttctaaggaagcatatctgttaagtctaatatttgactaacttttacaactcttcctcaataagatttatcaaatattgtattggtgtggcactctagcattttttacaaaggaagcttaccaaatttttaccaagaatatagtacggttgcatgaccatcttgaaaaatgggtgttcagatgtaaaagcattagtcctctgaagagcaatcgctctttcaatggtattcaatgttttcatagttttaggaatcccatatttcatcttttttggggtggtagtggcgaattcatctccgctacttttagaaggcgaatcaagttttcctgcattaaatgaatcaaacatatcataattaaatctcaataaattataataggagttagttcacaagctttccagtctggtttagaattctttgagctcctccattggatcatttaattagcaactacttttgcactataatgagtctacaactttcaaacaagatagtttgcttgagttttaccaggaggatttgttttcactctcttagaaggcggagaacatgaagattttactcctgtttcggggcaagaagagatatcatccaagatttcaaacctgtcatcatcatcatcaataacttccctcttgggaactctcagttccccgttgtctatgttagacttaccaaaatcaacaggggcagggggataatctatttctacattatttgtaccaaatatgacaacataaatctcagaattcccatcatatctaaaagttagcatatagcctctttctatggaataatgcttcacaaattctggccaaccttcttctaaccaaaacttttccttataattttctaacttcattttccacttggaaccacatggaagcttaacaaacactgattcagttaaactttctccactttttttgacaaaagattgtggaaccagctgcaaagaaaacagaacatccttaaataaacaataatggttttctgaattgatctaaactaccaagataaacaagcactaatactattgtgatttcatttataataataaaaaaagcttatttatgtatgtatctgctacccttttgagtgtttaaaggctagatatcttttttccactaaatccatcacaaactaaagcagaatttcctctgcatattattcacaatcctaaatttttcatgaaagaaaaagcaatgaaaattaccataatgcaataaaaggacaatctttttgattaaacttgattgtacagttagctacttgaactgtttaatgttcaatcaaagattgatcactctacttagtcagtaaaatgttaaagaatatcatatgcatgcaatgcagtatgcaagcttacaagtctgttctctttaagagtgctttccaaaattatcttgaaaaactgaggattcgtagatgaaagcatctctgagctccaaaatcaaaagctttgacttgagactcttgtaaatataagagg

SEQ ID NO: 260149 - DNA, 1270 bp, Cannabis indica
ttattcttgcactgtttttattttcctattttaatattttcttaatttttattcaaccaaatagaagtagaagtttaattttaacgtacttaactacaatccttgtgggatcgacctcactcttggtgagtttactacttgtaacgatacgtgcacttgcgtgtgcaaaatatcacagcaaagataattgacacgcacttctcagatctcgcatcaaaatcatagacaattaattagtgatcaggcaattaaaagtgggtaaatggcggcaaaacccccaatacttttgttttggtttcactaaacccccacgacccaaatttttgcgagtaaacccccaatactcgagttctgttagcaatttaacacttccgtccaaatttagctgttaactgccaggttagattgtccacgtggcacaattttattggtccacgtaaataattatttaaaaaactaaaaattaattattttaaaaattaaaattaaaaaaaaataaaaaaaattctttttctttctttttttttttgtttttttccttttctttctttttttttcttttctttctttttcttctttagtatgattctctctctcttctccacagctacgcccctctacaactccaaaaaaaaaagcttcaaacttttcgtcaatggcctgcccgtggtggagcaacagacaaagacagtattggagtttttggcggccggagtatggctggtgtggctggccgtgctggtgcgacagagaaagacgggagaagtcgaattttccgtcaatggcctggccacttgaatgcacccacggagaagtcgacggtggtgatggagatgcactctggcatgcgtttcaactaagaaatcgagatctacgcccccaaaactcagatctacgcccctctctcgtctcttttgtttcccctctctctctgtatttttttttacaggttggacggtcgaggacgacgatggggtttgtggctcgaaggggatggggacagatttgtgggtttgtggttcgaccgggatggtctgggtttgtgggtttgttgtttggtgatggcgacaatattcttggttcgatggggatggatgggttcgttgttacgctgatggtgggtgaatcaagtgatgggtgatggtgggttgtggagggtggtggtgggtactggtaatggtggtgatgattgaagaagaaggttgaggaaaagaaagaaaaagaagaaaaaaagaaaaaaaaatatttttttttttcagatttttatttt

SEQ ID NO: 260150 - DNA, 585 bp, Cannabis indica
agtgtagtgtacttgactaaacctaaattacaggaattgtaagtctgtggtaagctactgctttctccaccattactttctttgtgttcataaaacattatgcaacatcattttctatatgcattactcatatagggatattgaattctttagtgcttattaagtgcatctgaatatacagaagacatatttctaattctatccaaaacggaatagagataaaccagtaagaactttcttcaattgaataacttttcagtgctttacaaaagcaacaaagttatgtagcttcactgatgaaacttaaattattatagaaacgtttttacatcctttagaataattcctcgacccctagagtaatcaccatctcgaataggttatgagttggtgtagatataaggattctaatatacacccctatcatctaacatataggtcactttcagaatctttcttaattgtctcctaatgttccctgtttgattacatcttagatggctcccactcaacagtaggagtctggttaagttcgtacacaagtgtacacttagcttcttactattggttctcagggacatcttg

SEQ ID NO: 260151 - DNA, 658 bp, Cannabis indica
ttttgtaacattgtgaaaaatgtaagatatttcaatgtgaagtaaagttaaatgtcactaaataattaattttagtaacatttgaaaatgccactaaaataataattaataacatttcaaatgtcactaataaatttttatatatttatttaaaataattttagtgacattttaaaaatgttactaaattatattacatgtacttttgtaaaaatgtcatgattatttatataatttaaaaattaccaattttgtcgattaaataattataaagatattaataatatattttattatttaaaatatcattttgtgtttaaatattattaaattagttttacaatgaatacttcttatgcaaagatagcctacatcagagcaaaagtattttgaacttgcaaattttataatttcagtattcaaatattttataattacatgaaaatatttttgtacatacataaaaagttatttctatcatttaaaacaacaataatggaatggtatctatacatacaaatatatcttttttagtgaaataataccaaaagaagaagaagaagaaaaaagagcatttacttcaacattttgcaacttaaaagaagaagagtagtatgaattatcttgcaataaaatatatatgtgaattttttttttt

SEQ ID NO: 260152 - DNA, 872 bp, Cannabis indica
ggtaaaataatttccaaaagtagttcccagactattgctacatacgcggccattctttctccgcgcatctgatactctcttgacacctggttcactaccagttgggagtcactgtagactcctcgaagtccacttggagatatcattgcaacccctgctccggatccattctcgttggaggctccgtctacaaatactttccatgccgggaccgatggtgtcggtatgttcgcggttgcttcggcttcattacactcggtgatgaagtctgctagcgcttgtccctttatggaaatgcggggaatgtagtgcaagtcaaattgacttaactccattgcccatttgaggagccttccggacgcctctggcttttgcaggacttgccggagtgggtggttggtcaacaccttgattgggtgagcttggaagtagggtctcaactttctcgaggccattaggaggcaaaaaactagtttttcaatgactgggtatcgcgtctccgcccctatcatgcgcttgctgacatagtacacgggatgctgagttttctcctcttcccggactaaggctgcgctgaccgcgtgctcggagacggccaagtatagaaacaggtcctctccgagaacgggctttgacaggattggaggcttggccatgtgctcttttagttttttgaatgcctcctcgcactcgtcagaccattcaaatttctgacacttcttcaagatgttgaagaagggaatgcacttctctgtggacctggagataaaacggctcagggcagcaacctttccagttaggctctacacatctttgtgtttctttggggatggcatgctcaggagagcttgaatttttttaggatttgcctc

SEQ ID NO: 260153 - DNA, 613 bp, Cannabis indica
attgatttcaaacgctatctattgtgtgtgaacacattcaacaacacagaaacacaatccttttttgcagctacccaaacaatagtgagcaacaatgtgataatgacagaactccaaatgcacttttgatgaactagtgagaataatgatggaagaactccaatgcaaccctgaaacaacacaaatacaactaaaagaaggaggccaaccactacaaatcaaggatgacaaaagtctgctgttctacataaagttattaaccaaagaggttgatttcacaaggtacccattgtgtgtgaacaaaatcagcaatacagcaccacctaaccaaacaatggtgtgcaacaatatgatgatggcatcatatgacaacaactcagcacaggccgatttgcagcaacctgaaaacaacccggcaacaacttccaaggaacaactatctgcgcacataattggatcagttcaagatgatacattttttttaggaacagggaccgtgacatcataatcaaccatacaacaaccagaaaacaacagagaaaaaactacatcagtagataaatataaaaacaaccaaaaaacaactcaataacaatacaaaaacaacatcaac

SEQ ID NO: 260154 - DNA, 2132 bp, Cannabis indica
tggtaatgtgtcgtttatgtaaacatattgtcgttttataacacagtatgtgtcgttttttagttttatgcaatcttactgtcgttttcacacctttcttattttttcaagactattgtgtcgttttgtgcttttctttttctgttattggtaatgtgtcgtttatgaaatattaatgtcgtttgcacctaatctttaatcaaaaatcaatttctttatttttcttcactgtactttcttctatttttggtattctgtcgtttccgtttatgctaactttattgtcgtttataaagttttttgtcgtttcctctatttctagtattctgtcgtttatgctaaatttattgtcgtttacaaacttttttgtcgttttgtaatctattttactattttttattaatttgccgtttaaagatgtcattgtcgtttttttgttttcctttttctatgtgtcatttatcaaatcttatttttgttttcattccttttttaattattgtcgttttttaaaaccaatttatgtcgttttatgcttattttgtcgtttaaatatgttattgttgtctttatgttttctttttttctatgtgtcgtttatcaaatcttattgtcgttttgttctttttgtttagaaagttatatattattgaccatcgttgatttgccacaaattccaagtgaaaaactgccggagaaagactgagagtgacggtggcagtggtggctcaggcgtcgattggcgatcgagattaatctggtttcacttataattttccaagaggatgattcttcattgttggtatgtatccaagtttgtttttccttacttaatactttttccttacttaatattattgtcacctaccaagtgtttgatcaaatgtttgttaagttaagatacttcttgctaagcctattgtttgtatatcattacaacaatttatacaaatttcaggtgtgatacttgaaacagagtctgttagttcttcaagtgctcatgctcttttgcttttttcttttttaaggaattttctggaacttttactggagtggttggtttatatcataaattttcagttgaccaacataaattttagcaataatggaagctttttacatcatttttttttcatttgtaataagggaactgccctgttagttcttgaactgctcttgttggtgttgtttctttttcttgccaaaattaaaacttgattagttttgtttgaaatatctcatggtaattttgcaatttctttttgcagaattgtgcttaattttttggacattttgttgtcatatgagatgatgatacttaggagaaaaatgggtcatcatatcactgcactcttcccttcatatgtgtacaagttgaaagctttttcgagttcgatttctgttcgtgggttatctcacatttgtttagccaatcgaaatgaggtggctgcatttttaggaaggaatgatgaattccctcttgagatgaagtctttatcaactatgacaggaacaatcttggtgcaggctggagacccagctaagataagtttggaaatagagaatgcaattgatgagcatagacttgacgatacttggaaattttatgaacaacatatgcagatagatgggttccctagaaagtcggttgtgaacaaaattcttgcggcattgtctgaaagccttgatgttctgtggttagagaaggcgtttgggatagtagaacgaatttttgagaaaggaaaacagaatttgttacagaaagagacactaatttatctctctttttctcttgcgaaagttcaattatcggttcctgcatcaactgttttgagaaagttagtggaaatggagcaatttcctcatgtttctgcttggtctacaaccttggcatatatgtgtcaaactggttctggggcttatcttgcagctgagttgattcttgagattggttatctatttcaagatagtaggatagatccaaggaaaaagagtaatgcacctttgcttgctatgaagcctaatactaccgctttcaacattgctctagcagggtgtctcttgtttggaacgcatggaaagccgagcaactccttgacatgatgcctcgagttggtgtgagacttgacact

SEQ ID NO: 260155 - DNA, 820 bp, Cannabis indica
aaatttgtgttttttactctctgttttggttgaggttcaaatatatggtaaagtgagcatttttagaccataaaatctagtttttgggtttttcgaacccagtggccgcggccataaaacctagcagagagccatctttttcccgattttgttttggccataacttttgactcgggactccgttttggacgttctttatatcgttggaaagctcgttccgagctctttatgattatctgtattttgaatgccaaatttatattttgtgaaagtgaaattagggattaaccctatttgtgaaatcccgggttgtgtgactaggattaccggcacctgatcaggagcacccaggggtttggaatctctgttattgcgggacaacaggtaagacagtagtttgcacgtagagtatgcgcggtggcgcttatgttgaatatgatatatgtgagtaattgtaaccgggattagggttattaccctaatatgagcggttaatagcctagggttattaccctagtgatataagttgagtaaatgctatgccatgctaagtatatgattatattgagatttaagggttatgcgttcaaggcataatcgggttggactcggtaaccataaccagatgaaccattctaaggccttattgtatttagacgtgtgagagcaacacgtaggtctatgccacgtagacataaatagacgtgtgagagtaacacgtaggtttacgtcacgtaaacataaacaggcatgtgagcccaacagaattcgtacacttgatgtaaagtgtaagtacacttcatcgctgattatcacatca

SEQ ID NO: 260156 - DNA, 932 bp, Cannabis indica
gaaagaaaaaaaaaactaaaaagttctagagctcataaaactgaaaattgttttacaaatgtgcattaatcttaaataactacgacatatatagttataaaaaaaaattagacaaaaaaattctcaactcataaaacacgagaattatttttttgggatgtacaataaattgtattttttcaaaatattatcttgttaatatgttaccctcaaaacacattttcttaaagcatgatgggtctgtttccctacatcccctaattaattataaacatctctctcaattcttccatttaaaattcgttttaattcaaataaaaaactttgataaagtcgcagacaaacagagttatcatttgtcatcagttattgaacgcgtttcttggcaacttgattttttgtatggaaaacgtcctttggctaattaacaaaccagatgcgatttcgtgacattcatatcaataattggatgattacattacagtgacagtttgagaatggtcttgaataactataaatttaaaagattcacgcggaggatgctggtgttgttgacgacatgtccttgcacattacttacatttatttaactctttatacaacttttcattttacatggaaatttatacgtgtaaacatcaaattggaccatgatttcttcctttctcaattattgaattgaatgaatggacaccaaaaaacttggtccatctgtttctgacttcatttttcatggtatgagctgttttcttgacagatattttaccaactctttacttgttttattttattattatgcgatcccagttgcaccaaatccatgtttaaatattgtgtatggcattacagatttgaatattgtgtagtatggcactgtagaagcttcactgtagcaaaattagaaaaatggtaaaaaccaaaaaaaaaaacaa

SEQ ID NO: 260157 - DNA, 623 bp, Cannabis indica
taggattcggtctagcaaggctaagatttcatatggtgaatagtccgtaaaaaacttgtgttattattaggttgtgttattagtgtgttgtttagtttggatttgggaacatttggatttagacatctgtttttattagttcacgtttggaactggttattatgttgacagacttgtgtttattttagttttcagaatatattaactttgagattgcaccatacttagcaaatctttgtactcacaccatattaagtttgacaatgtacccatacttgagaaatatttgtcattactgtttaaaacacatcatttcccatttcttttatccatcgattctaatttgatgcaaagcaattttaagttaccgtaatgatataatttgtacatgattgtacttcactgaaattatttaaccccaaaactttatgatttgtactataccattagaaatcacgacaaaggtgacttcttaattatttgaagaaaatcatgttagttaccaaatctttgtactcattgaagtttaaactgagttttgacaacatatgtactataccattagaaatcacgacaaaggtgacttcttaattatttaaagaaaatcatgttagttaccaaat

SEQ ID NO: 260158 - DNA, 937 bp, Cannabis indica
gggtgattatgatagtcagtagatcccatgatcagtaaggagaaatattgggtaagctatgcaatctcacactgtctggagaagttttctcaagaaatgtgcgaatgatgacccgaactcgaaaataatcatgccacactcctaaaaaattcttcagatcaatttctactaactttcccatcacattggccacattacaaagaacactcccaaacatacatctcgattgcatatcataaatctaaatccaaatgtctaatttgtttaaaaccaccatctaaggcttgccatcgttcttcagtctctccaatatcaattgcatccaaattaaaagtccaagggctactagattttcttttaatgtccacctcgtgataaaattgaatgagatatcgatcaggttgcaacttcccaaccttggtttataaagagatgccaagacattttgcatagtttcaaagtcaacctcacgatctgagaggaacctcccaactaagcaccatctcgcatttatgccatcatcttcctcttcccctccaatcgcaatcatttcttctacatcctcaacctgaacacgaagcacttcctcttccaatactctcatgtcccaacttacaattttttttttcatttttaaacattaaataaataagaaaattgagatattagaaaaaatgaaacaaaactcatttatgatgacatatgtccttttaaagtttttctttatatatagcatattaataaggagtttcggcttgggaatggttgcacgaaattcagatggtttgttgcttgaaggtaggatgaagtacacttcggtccaagtggatgtggctgttgcagaagcaataggcatccgtgaggtattgagttggctaaaagagagacaatggcctcaagtctttatcgaaacagattctctgtgtgtggtgcaagc

SEQ ID NO: 260159 - DNA, 992 bp, Cannabis indica
ttatttaaacagatttttatttttaaaaaatagattttttttcaagattttagacctgacccagctattggaatttttttttttctttttttttttttgtaaagaactaagagaagttcattgctttctatgctgtcacatacttaacaaatttcaggaatgctcaacacaaatatcaccctccagccattgcaacacctggtgcatcgacttcacatcaggtgccttcggttactgttgcaacgggttcaacagttggacatctgcctcatccattggcgtccattcctgctgctcaactatggagaccaccagaagctgatcagtacaaatttaatgtagatgcatctgttgacagaaagcacaatgtaatcgggcttggtgctatcattcgagattcatatggttttgttgttgatgctttctccaaaaaaataattggcaacttcacctcacaagaaatggaagtcattgcacttttccatagcttaaattggataatccaacagcaacttccatgtactctggttgaatccaatgctctcatagttgtatctgcactccgagctcccttcaattcaatctcatcttttaatgatttgattgtagatgtttcttgtcttttatccttgttccctaatgtaaccatcacacatgtcaaatgtactgctaatatggctgctcatggtttggctaagtttgcgttaggggtggatgaaacatgtttcttgtttgaggatatccctccaccaatttactttgttattgtaaatgaatcccacttttaatttataataataagtattttcacttaaaaaaaaaagttcattgcaataaatagttgggaatcacaataagggatccctccctgaaaatgtagccattacattggctattttctttagcccattttgctaagtgaaaattacatgaaatatgggatttcataaaaaagttagaaaaatatgacatttataggtttgccacttttc

SEQ ID NO: 260160 - DNA, 610 bp, Cannabis indica
ttttggaataaagtttatgacttaagggtatgattgttatgattttaatatgtggataccataaggacaatttctaatttgataaggggctaaatagaaattgtcaataattattaccaacatttttgtctattggtaatataaacggtaatggtccccaatttgcagtatcgtatcttttcattttcttgaaaccccatcatcaagagacaaaggttacagagaaagaactcactgcaaaattggaagatcataccaattaaagattataaaatcgattctatggactccaatacgcttccgctatttcttaatgtggtatcaagagcatccctaaattagttcttgagaatttatggtagtattgatcttccattaaattattattttttgcatttggaatatttagttaatcatgctatatatatatatatatgtcccagcgcttgaaatttgtttcgggtttcaatcgctggttaatatatattgtgattgaagttgttttttatgtatataatgcgattgaaagtttttcgatttaatgtaatatatatataaagtgtaaagtaatctattgttgctgcgagatatatgtgatgcatgtatattg

SEQ ID NO: 260161 - DNA, 569 bp, Cannabis indica
agcagatttcgtgaatcgatccaccacaacccagatggaatcgaacaaacctgtggttctaggtaatccaaccacgaagtccatcgtgatatcctcccacttccatttaggtagggttaaaggttgtaacaaccctgctggtctctgatgctcaggcttaatctgttgacaggttagacatctcgatacgaattctaccaaattcttcttcataccgctccacaccagaagtaaggtttaagatcctgatacatcttggtggtgccgggatgtagggaataaggggtagaatgagcctcttcgaagatttcatttctgagttccacactatctggaacacaaatcctagttttaaacaaaagcatcccgttgtctgacactgaaaaatccctggcttgaccagctgaaacctcttctctgatttttactaactctggattagtcatctgactttaattctttctaacagatcagattgcagcgtcaagttgtgaagcttgcctaccacaaactcaatgctagatctgccatgtcctctgctaactgaggtgagatctgaatcatactag

SEQ ID NO: 260162 - DNA, 1230 bp, Cannabis indica
aaaattaaatgaaaaagaattaaaaatgtgagaaaaattattaaaataatatttgaagaatgaatagtaattctctacatatagagatagctcacttgacagagccccttttaataatatttctttatattttcacattttcaattattttagctcagatgtaagtgctcttacccttagaatatttaaaacaaaaagtgtcaataataatatagaatagagattaaataaaatattatatttttagattatggggaggtttttaacactttttaaaaaaatactatcattgaagatgcttttaacatttctcacctattaattactatccctgtagtttattttttttttctattttatttttgagctgaaatataactagaaattagaaaatgccttttctcaccactgtgacaagagaatattgtgattctcgttgtgattttttcaaatatacaaaattaattcatttgaacaaaccaattaaaggatttccaatcatgctctttaaacacatccattagctaacataggtaatggtcttagtgaacttagaaaaaataagcttcagccatacaaaaataattctatcgagaatggatagagaactccttaaatgtagtagcttatattttaatcttttagctattgtagccttcaaaaaataaaaagtaacggttgaagatgcttttacaagagaaaaatatcatttgaacaaattaaaaaattacatttaccttaaaaaacaaaacatttttgtttctagctatgtgagtgagaagcaaaatttgaaagaataagaacaaatgatgtcaaattgcttgaatatcctttcactacgtatccagcaaagaaaaatttatatacagttctcttctcttctcttctcttcacttattatttatttattgttattatctctgtccagatttcacaaaccgagaatagcattccaattccaaaagggaaatttgaatttgtatgcttacattattgaataatttttttcctaaacttaaaatagggaatattggtaaaatgggataacattttcttaattcccacaatacccccatttgaaaccatcagccctctctctctttcgcctctctttctctctttctctctcgctcggtgccgcacccacacacccacggcagaccacccacgccgtcgacgttcaaaccatttcaccgccccaccccaaacgcaccaccacggctcacctcc

SEQ ID NO: 260163 - DNA, 496 bp, Cannabis indica
aactttttaagggacaattgttatacccgaaattcggttgccatgtgagtggaggacacgtgtcacgataaggggaatacgaatcgatgcaatctccttatatggaataactcattaattaggtgagtatcagtttatatttgtaacctgtagactgtaaggttttaggcgaggaactaatatataaactggtacttagcatatttgggagaaaccatatgtcgctgaatgcaaattccgaggcatcaaggaaagtacacattggaaaatgaaagcgacatatatcaattgcaaaagtccttagaatacaaactcagtgttacagacggatcggttcaagaacaagtaagtgaggtgcccatctcgttatgggaaggactcatataacttcatcccgttagcatcagcgatgctcacaaccctggcaagtcagaagctaatattcaaatgagtatcaaagaattctttgtaaataagaactgcaatcgacaccaga

SEQ ID NO: 260164 - DNA, 519 bp, Cannabis indica
tttaaatactattcttaatctaaatattacagaaataaactctaattccataaccggacaactctaactctccaccaattcaaaataacttaaacatcactaaaacaccctagtttaagctctgaaaaacacctcgaacaaaattggtttcaaagccaaaaactagggtttcccctgctggcaaaaccgattgaccagttttatagtacttgtaaaaccggttaactagtttctctgctgcagaaagaagaccctagttttcgagctaaaacccaaccatgaccttaaccaacctactcaaaccttccaaaacgatttcataacacaaaataaatgcatacaatcaaacaatacccaacaattcaccaaaatacaagttgtcactaatttagttttagtcataacaagtattgtaactaaaaacacatgagaaatttgactaattatgcatttattggaccaaagtttttttttttaaatctaaactattcaataatggtagaatatgtcatttttttt

SEQ ID NO: 260165 - DNA, 175 bp, Cannabis indica
ccgtaaaaaagcaaaaatttgcttaattttttcacaaggaataccaaataaaatattttcaaaaattgaaaaaatatatttcatggaaaaatttcgtacaactcctcttttactagtgtaaatttattaactgccttatttagtgtgatccaccactttcctatttttgctaggc

SEQ ID NO: 260166 - DNA, 1894 bp, Cannabis indica
agaatcagacccaaagctagacccgaacctggagcctgatctggacctagactgaaactccggaccggaacccaaactcagatgaggactcgaactctgacccgaactcaaacccaaactccaactcagaatcgcaaatggaactagaaccgaactaagactaggacaaggacgaggaactaggacctaaacccaaaccagaacccaaataaaaacccagaaagagacctaagccttaaccgagactaagactcgaaacttaacctagaccgggatccaaacccacacaataaccgggacctagacccagaattaggaaagggacctgggaaatagaactaggaccgagaccgagtacccgacccaaacccgaacttgaacataggacccagctcgtgagccggcaccaaaaatggaaccagattgggactagagattgggatccagatctggacccagggcttggacaaacccgtagtcggtgtttggatttgggaccaagccctggacccgaaccctgacgaggacaaaaacccacactcggacctgaacccagtcccaaacccaaaagtggacccaaacccataccttgtgacctaaaattggaaccaaaacaaaagttgaccaagactggaactaggagtttgacttggaatcataactaaaattggacctggattaagaactgtaaccggactaggactcggactccaaatcagacctatacccgaattgggagccggacccagatcccaacccaaacctggactcgggacccaaacctgaacctgaactcagacccaaacatggaaccagactagggacacagagccagggtcgggacccaaacccgaacccaaacacagaaatgggaccggggacttgaaccagaaccagaccgagacccgtgacagtgatccagatcttgactcaggattcgggtaacggggccttgaaaagaccagttgtcggtgtctagatctggtactcaaactaggacctgaacccaaacgaagaaccaaactcgaatctagacctagacttgggacccaaaattagaacctgaaaaagaatcgccgaaccaggaccctagcacaagactaggaccgtgacaaggacccggacccagacttagaactgaacacagaccagtacccagaccagaactaagacccggacctggaactaaatcttggacccgatcccaaacacagacttggacctagatagagattcggatacgaacgtggactgggacaaagacccagactgggaccgaaatgctagacctagatctggaccggtatcctgacgcagacccaaagttggacccgaactcggacctggactcaattctagacccagatcgtggtccagaccttcacacaaacccgaacacagactcagacacgaactcaaacccacacctagaatcagacccaaaactagacctggacccggacccaaactcgaacccacaccaggataagaaccaaggacttagacccagaacagaatccagactcagatcgcgattggaacttgggactcgtacccaacctataccaagacccaggacgcgaacccatacccgaagcctgatttggacctagaatgaaatccggaccggaacccaaactcagactaagactcgaactctaacccgaactcaaacccaaactggaactaagaatcgcaaatggaactagaaccgaactagaagtaggacttggaccaggaactaaaccaaaaagcgaacctatatcaaaactgagacagagacctaaacccaaatcgagactaggactggaacccgaacccgaacctagaccgggacccaaacccacacaataaccaggaccttgaccaagaatcaggatagggacctgggaaa

SEQ ID NO: 260167 - DNA, 1176 bp, Cannabis indica
ctgccgagctccagctcactgtttctcttctagcttagcttttcctttaccgaaacaaggtatcaaactgatgagtcaatagactcagtaagatatgcaatacatatataggcaatgctagatcggctttatgcttaagccaccctgagctcaacaactgagctcaccaaatggttaagcacgttcttaagggaagtacgaccattgtaccaaatgcactaaaataccaaccttgtactcgtgttggtagagccattattgtactcctgggagtcactaagtgttgtaccacatgcacgacgtaccccctggtactcgtgttggtaacaccgtaaccacactgatatcgtacaccatactaacacccttaaaatcacaaacatattagtgttagtagtgcaaacatccacaacgagcatccattcacatatatgtaatatttatgctatcttacctcgttccgtgctcgagtgtaccggttagcctgagtggaaacgcaactcgacgctttatagggccctaaaccataatattcaaaattcgatgagagacacgctaaaacacttatcggggatttaaaattgaaattaaggataaccctatcgataaataggatgctaataccctaaacaacacaaaaagggggaaaactagggttctggaaaatggtccaaccggcagaccggttcccaaccagaagccaggttcctgggtaccaaccggtcgaccagttcaaatggttccccaaaaccggtcgaccggttctgtgctgggaacccaaaaatttctcctcacaactcaattcaaatccaaacttcccaattacttccagtacacctatttacactccccagtaagcccaaaacaagcaataaaactcagccagccattctacaaatgaaaacaccattaaagctccaacttaagctcataagctctaccttaactcaaaccttaaaacaatcacttcactaagcttaattctgcaagaaaattctccatctaacatcagaaaatagattcaaacaacccgaaagcaaacagccacacaatccccaatattatgcatataatcaactttaagctaggaaaaccctaagaagaaaagagcaaaacttcatagcttagctcaacatcaaaccctcctaaaatcttcagaattcaattgagaacaaa

SEQ ID NO: 260168 - DNA, 1035 bp, Cannabis indica
aaaaaaattatacaaaaattaagtgcatgattctatttttatcattttgaaaaatacaaggtttattttgtcatttaacaaaatagaaggtccaaacggtagcttttacaaaatatatggtccaaaataatatttacccgccacaaaataattacctaaatgtacaaggccaatcaaacaattcttttttttttctttaccaaagatttactttggagaaattttttcaataatatacttaatatataaattaattacaaaagtactttaacaaatctcaattacaataattttattttttatttttaatttacatatgtattttcaaaagtaatcttttggtataataaattgattaattacttttacataaaaaaaattctttatttttttatatcatataattttgataaacaatttgactacctccacaatttatttgtaaacatattaataattaattatttattttttaagttatattatagtatcttattatttaaaatatactttaacaactttaaagtttattaaagtaacgagttgttatgtaatataataagccactaattttatatattaattattttgtatacattttggatactttacaacctatgtgtttattttaaatcattattaaattattttgttattttaaaattttatattattttttaaaacaatatttatgttaccttcaaatttgtttaataaattaataagttacaataataattgtttagcaggatttttagaaaataaattatttaatattagagctaaagaaaatacgatttaaagaatcaaatatgaagagaacacttatagtttttacatagttgggtcgttaatgagtttaattctacaagttagtattattatgaagtatgatagaaaagcctaagggattacaatgaatatgagcactctattcccttctcaagctttgtgtagtttagaaatttttaaccgttttactatgaaggattcaatgtgtaatatcccgaaaaataaataatatttaaatagaca

SEQ ID NO: 260169 - DNA, 725 bp, Cannabis indica
aagacaattcttaacacgaataggtgcagaaaatttaatcagttttgtcataatacctcaaggtcggattattattaagttttattttacaaaaaattaattcaaagtcttatttgtattattttaaaaaatacataatttattttatcatttaacaaaataaaaaatctaatttataatatttatatttatataaatataaagtaactaatattcttccacataacatataatacaaattttaaggtgataaggtaattattaaagactttgattggatttgaatgtgagtgaaaaagggatagggattaagggaaatctaattatactctactaagttggtattcataaatcataattattaatagaacatatcctttgaagaagtgtgtataataatatttgtattcgtaatgatgtgatacttttttgttgtgtgtaatatttgactacatacaattttgagtgaacatataattattctaatttcaccaagtgataattttgaaataaacaaataagaattgatgaccttgaagactaggaatgagagaaatagaaaacaaaataatacataatattgatctctatgcatgggtgacaatctttgttatggggtaaattgaaagtcctatttactacaaattctgattgattaatctcaacagattattccttagatctaaacagatagtaaatcaaagaacacagaatttacaagcttc

SEQ ID NO: 260170 - DNA, 1089 bp, Cannabis indica
actgccttaaagaaacaagggacatggacttctgttccttatgaacctcatatgaatgttattacaaacaagtgggttcatcgggtcaaactcaacagggatggctccttagatcgatataaatctcgcttggtagccaagggatttcttcaaactcctggcattgactatgaggacactttcagccccgtggttaaacctgcaactgttagaattgtgctaagtattgctgttactcaccaatggtcggtcaagcaacttgatgtgagtaatgcttttcttaatggcactctccaagagactatttacatgcaacaacctccagggtttgttgacaaagacaaaccacaacatgtgtgtctcttacataaagccatttatgggcttaagcaagcaccaagggcatggaatgacaagctgaaacaaacactttacaaatggggttttcatgcatccaaatcagatacatccttattcatccatggttctcatgacaaccttgtttatcttctagtctatgtggattacattttaataactggtcctaattcttctcttattgactctatcatcactaatctcaacagtgcttctctcttaaagatttaggacctgtccactattttcttggtgtggagatttacagggatgctacctccatatatctcagtcaaagcaaatacatagctgatttattaaccaagctacatatggacggagctaaatcttgtcccaatccagctagctctaccacaaaactcagcttgcatgatggagatctgtttggtgatattactctctataggagtacccttggggctctacaatatcttagtctcactcggcctgatgtagccttcataatcaacaaattgagtcaatttatacatgctcctaccatcactcattgggaagcatgcaagcgcttacttcgttatctcaaagggactatttcatacgggttaaagcttcaagtttctaaccatttcactcttcatggatatagtgatgctgattgggctagttgtgtggatgatagaagatcaacggggggtatgccatgtttcttggcgaaaatttggtctcgtg

SEQ ID NO: 260171 - DNA, 551 bp, Cannabis indica
acgccacctttacacggctcgtgttgtatttgtcgtcgaaacttaacaatgcgatgtcgttttggggtgctgcttttcaagatgatgttggtttcttctccaggcaatggcaatggcaatggtggtggtagttgatggtgacgataggaccggatagcaatacgagtagtccggcgtctctttggaatagggagagagagaaagagagctttcctctttctttctttagattccaattctttgattaggtcaatatttctccgcttttctttaatgaaagaagccaaatgatgatgatcataatgatgatcagtaccataatactcgtcataagacagtacctcagagcacacccaagcaagcaattcaatctttttctcattcgtcattttcttcttcatttaagccatttgagtttctttgcaaaccagaaaactaaaaaccctcagaaagtaccctctgcgctataactactgaaagagactagtgaaccctactttgtatcagccctaatatataatctatacaaaattcccattttacccttcacg

SEQ ID NO: 260172 - DNA, 655 bp, Cannabis indica
ttttaaatccatatttcatgaatgttaatcattaccatggatctaataccacttgttgggaattattctaccaagatctagatttactaccatgtatgttgtttaacatcctaaatattaatttttaaaaccaaggaatttaaaaacatataaagttcaagaaaccttacattggttgcagtggaattaaatgactccttccacttagatctctaacacttgtaaactttctgtcgcagagtattatcaagatctgagcctgattctcctttaggtgttgggttctttacaatgttacatactatgattgaatactaacttgctatgcatgggcatgtactctatcactataagggacaaaatttgaagaagaagagaaaggagaaggattcgaaaattagagagggagagatagtgatagagaagactcaagtttgcctgaaaggctagtgaaaaccagctgtcagttttgagtctattactatatatttatagggatcttattaggtttaggtttaaattatttgacattaaaaattgataattaaattgtaaaaagaccttaagtggccgggcattaggatgtgggctaccatttacaattttaccatttttctcaactctttatccttttctttaacaaatgccatatttt

SEQ ID NO: 260173 - DNA, 512 bp, Cannabis indica
tgaattatatacttcattgatttattgcctagattagtctatctccataaatctcaatgctttatctaagttaaataaattgcatgcttcgtggatttactgctttaggtaaaagagttaattattgagcgctttgcgttgattaatataatagggagattgggataattgactgcttcagcgttatctgtgggattaatagtttgattggaaactgaaaataatattctttaataggaattaggaatgattgttgagggtggcgaataacctttaactagtttctcatatcgtattccttactctaaatttgttcttttctttaatttttattattgaactttttattctaatcttgaaaacccctctttttcctaattctttctattttgtgaataattaaataaacatagtcctcgtggaatcgacccttacttacgattatactaaaataattggaagtattggaattaaaaaaatagtaaatttgttgtggcttacgacacacatca

SEQ ID NO: 260174 - DNA, 573 bp, Cannabis indica
gtttgatggtgatgatgaaactaattccactaaaaaagtttctcacccctcagtacccgcaagacccatttagatcggttgcctcggcacttgcttgtgaatttgaagaagtcatcgtctgcctcggcaattgctatcagcgccgtagttatctcctcttgaatttcacacaatgatgagaatcgtccctgaagttcctccttcagccgaccgctcttctctaaccagactatgagttcggtctgaatctctctgaggtgtttgttcaatggacgagcatcagatttgagtaggttttgaagagtgttagtatcattagagtcttacttcattgaaatcattatctattccactggtgaccttatgaatcgcctcaagatcggcaaatatgggttcttggctctgcttggacttatggtttgcactatctcatttggggtctctgttctgctttcttaaactcattatctcttctttttatgttttatttttcttgtttttatctgaatggtatgttttttttgtttgggtcagcaataagaaaagaagggattttattttcatagaataaat

SEQ ID NO: 260175 - DNA, 1057 bp, Cannabis indica
atcccaaatttggcactctgacgtggcatcacgagaatggtgacacgtgggctccgcttggagcatctgctcagaacgataggccgagcaggacgcctcactgacagatccggaatgtaatattcagcgagccatgaagagtgatcaacacttagcgaattcagcttgacgcatcatgagtcatcaggtcaatccctacaacccagggatcaacttacgtggatgtggcatacacacgatcccactatcagtgtattcagcctcaatcccacgatccttgcattcagaattgatcacacgatctttctgtttatgagcattgtaacgagagaggaaactcttcctcctcaagtttcccagccctatcaatagtgaggaatgttcactgggcaaaggatcgaaaaattataagccgatacgcagttaaaataaggccatattattatctaagaattatatattcagagatactgttgtaagagctataagaaaaaggaaacttcttccttgttcttaagtcaatacaaataatgaggattatgatattaccgagctgctcggggctaaacctctataaaattaatgtgtcttattattgctttcttatctatattctcattaaaacatatcgtttatcgtttatcaaaaagactcatggtcgttggctaaaagcgaagtcaacattttggtgctttcattgagagcagaatcacagatcgctcatttcgacattcgacacgatggtgcaaactcgtagaggcttgtctgacctagcaaactcacaaatgctggatccgacattgcaggacccagggagttcaagagttccacccgttgtcaatccctgacagacgggaaacatggtgaatggtggcacaactcctgttactgaaactgtgcctggtttgcaagtgactgggaataacagttccgcacacagctagggcgttcataacatgcctattccaccaggcatcaaagcccaaacgacaatcggagacgcaaccgaattgcaaaatctccgtgctgcgctcggactcatgcagggtcatagcaa

SEQ ID NO: 260176 - DNA, 720 bp, Cannabis indica
atatgcaacagtcatcacacactcactccaaaaccgaatagggagtttggcctaaaagtaaagagctcttgccacatttaaaaggtgttggtgcttcctttcagcaattgcattctgttcaggggtttccatacaagtaaattcatgcattatcccaaattttgcaaatagatctttgaagattaattcaggagcattgtctgatctaaagcatttaaaagtgcaatgaaattgtgtttgaacataagataaaaaatcaggaattatgtgaatagcatcagatttttgcttcattaaaaaaatccatgtaaatctagttttatcatcaaccaaagtgagaaagtatttgtgattggaatgagaaggaatgtggtaaggaccccaagtatcacaatgaatcatgtcaaatttatttttagcaaaaccagaatgtttgggaaaaggaagtcttttctgttttgccaaaggacaaacaaagcagggattgtttttatgaaaatcatcaatgttacaatcgattttattgcaaagtaaagtaagacgtttgtgtgagggatgtcccattcgagagtgccaaacatctgctgtcacagtggtattgcaggcagcagtacgaaggtcatccaaaacatacaaaccattcttctctttacctctgccaatcaccatctggagccgtttttcctggataacaaagttgttagtatagaatttaacttc

SEQ ID NO: 260177 - DNA, 501 bp, Cannabis indica
tctctctcccaactcggttctaaatcagtgggaaccaaaatatgactcaggaagcgttcatatacagcttcgtcgcccgaggcactatgatcttggccgagtacaccgagttcaccggcaactttccagccattgcggctcagtgccttcacaagcttccttcttctaacaacaagttcacctacacctgcgaccaccacaccttcaattttctagtcgaggatggttatggtaattctctcaccattcctgatctcttcgtttcgtttaaccacttcttttttgttttctcgagaaacaaacagagtagaattttgaattgcatgtgatggctgttggatctagtaactaaaagtgttatatgatttgggttgtacttagtttggtggaagaacccccaaaaattgatatgttcttaacttggactggctgggttttcggtgttttcgatgaatttactgatttatctccctttactgctaattgaactgttaaaatagg

SEQ ID NO: 260178 - DNA, 557 bp, Cannabis indica
ttataaaatttttcctcaaacagactcttgaactcttcccaagtcatcacactgacatcacgagtttgtcccactatatcccaccagacgcgggcatgatcttgtaacataaacgcggcacagtttactctctctgttcccgtcacccccatattaacaaggatacgggtgattgtactcatccactgctcaactttaattttatcagtacctcccagaaaagttggaggttgcagcttcacgaaccactcaaacactgaatctctatgcggcaacatgaacccctggttacccaccactggcacaggagctggtggtaacacttgctcaacaggggcagccggtgccggttgcctcaaccgacgcaattcttcctcttgacgaagtatgatacctcgcatttcttaaaacatctgctgccagtcagcaggcggattaacattgccaacctccgcattatttctcgaattctacggaggcgcaggcggtgccggtggattggtctggtctgcaccaagctctacttggtcaccttatggtctagatgattacggagg

SEQ ID NO: 260179 - DNA, 599 bp, Cannabis indica
gttgttccagtgattttttattagcgagccattaagccaagctaatttataaactccggttccaactacagctaggaccttcctagtttgggttgaacactccagctgctggatctcgcgtgtttgcaaatacacatcttaacaccaaatctcctactttaaagagtctttttcaaactcttttattaaagtatctagtgatacggttttgataagaagcattggttacttgcaactcggtgcgtttttcttcaagcaaatctaaggacatattcagtagttcttggttttgttcttgattttagaattcacacatgtgggttgcaatgtttacttctacaggtaacattgcttccaagccaaatgtcaagcgtcattacaagcgtctcgatgtcacattgaaatattaaccatgtaagaccaacaatgcgaatatccttaaattaaagctcaatattttaaagaatttttttttcatttgatatttattttaatatttatatatttatttaaggctaattaaaaaaaatttccgaactttgacatgtgccaaatcatgcccctgaacttttttgtctgttaaaattcctcctgaacta

SEQ ID NO: 260180 - DNA, 2211 bp, Cannabis indica
aattagttatatattttataagtctacgtattaaaaaaaatatacatctatataagaataattatcttaataaaatatatacatgtagtttataatttttttttatcaagaagaaaagaacttcattaatcaatcaaccaatacaaacaccaatcccaaaaaaaaaaaaaaaaccaagagcaacacactactctagctacaacaaaaactgcctatatcctctggattttacataaaaaaatcttttgtttttgttttgatagttttcctttctttacattgaataatctatacaccactatacttttaatttcttgagcttttgtctctgttttggaccagcctccaaaactacatttgtttctattcagccaaacactataacaagtcgctgctaagacaacaatcaaaatcctgtgtataattcttggagtagggatcgacagccagcataaccatcctttgaattcaagaggccaagctggaaaaagagattatcatgtgtctcaaaatgctcctcacaaaccgagcaagctaatgaacttaagataatgtgaaacttgttcatattatctttagtgagcaagtgagaattcacaatttttcaaagaatgaattgatgctttggtaaattgagattgctccaaatttccctgtgataagcaaattgagtttggggaagagagttggtatgaaatttggcagctctgaacttacccgttttcccagctatttcaatctccgttcaagtaaatctctatttcaatttgcaaagttttctctagtaccaacttgtattaggaccagaagggcacatccttaagatagatgttggtgatccatttggacccaaagaatgtctctctttttagtaatggccaaaatgtacttggctagattagcttgattccatttagtaccatcactaaaactgagccctccaaactgttttggaagaaagactttctcccatgaagccacatgaactttgcttctgttccccttcaatccccaaaaaagccacgacacagtttttctatctccttagtgatactttgaggaagaataaaaatgctcatccagtagtttcgaaaccccactaaaataaagtggattagctgaacttttccagcaaacaataaatgtctactcccccaagtttgcagtctcattctaattttcttgatgatgatatcacaatcttcagctttctactttgttggtcttaaaggcatccctagatattttaaagggaaagtaccttcggtcaatcccatttcccttatgatttcctccttttcattgaggtcgatccctccaagatagatttggtatttattcgcattgatagataactttgttgtagcactaaaatctttaaggatattttttaagacctttatagagtgtttagtacctttgcttaaaagaattaggtcactgcaaagcataagttgatcaaacccaaatttttacaaagaggatgatgtttgaagttgggagaatgggctgcttggagaaggcttctagaaagatattccatgattagcccaaaaataagaggggataaaggatctcattggcggagaccttttactccttggaatcctccttgaactcttccattcatcattagagagtagtgagttcctctaatacacatcatcaccaatttgatgtatttgctgggaaattttagagcattcaaaagatctttaaaaaattaccaatccaccgtgtcataagctttgcttatgtcaatcttgatagtgcaacggggggagacatttttccgtctgtagttcttaagaatatcttggagtatcatgacattatgagcaatcgctcttccttgaacaaaggctctctggttatgatgaacaagaataggcaataccacagccagtctagcacataaaagtttagatatgcatttgtagattgtagaacaacatgcaactggcctataatttatagcacgggctggaacctcattcttggggattaaggatatcattgtattatgaaattcagttggtatagtacttgaattaaaaaagatgttggctgcttcacatatctcccctcctattacaggccacattttcttaaagaaccccaatccaaacccattaggcccccgtaattttttgtcaggtatgcttaataaagccttccttatctccttgttggtaactagtttcagtaacc

SEQ ID NO: 260181 - DNA, 559 bp, Cannabis indica
ctggaacatggatataggacctgtacccaacacacgaccattagaactgggattgagaactaggatccgacctcggacctggaccctcccctagaatttggaccaggacctgggagtcgaagtggaactagacttggacctaagaccgtgaactagatctggacccggagcttgaacctaactcttagttcgtgtttgatctaggacccatacccggactctccaaccaagaccttgacccgacacaagtcttggtcttagaccaggaccggtcacggacacggaccaagacccaagatctgaagtggaacgtgatcgggaccaaagattgggatctggatcttgacccatgacccgaggcttggacccgacccatattcggcatctaggtcttcgaatcataccaagacccaaatctagcacaatttctagacaaagcatccaaacccaaactcggtcccgagacccaaaatcggaagaagaatcggaataaggactatggaacaggaattgaccttgacaaaaaactggatctagacgtggaacagaacacggaccc

SEQ ID NO: 260182 - DNA, 721 bp, Cannabis indica
atattgttggatattacattttcttacaatatttgtgcttgactttgtatgaatttttatattattggacatcaattttagacttataagtttgatttgaaatttatatatctatgcttttagtttaattttatttgttaatatatctattgctacatttttattacaagtagatgtgagttatacatatcttagaaaaatagatgctttggagcaagcaatatggattctaggaaaaacgcaccaatggacttcaattaacaattcaaaattaattaagtgtttattggagttggtaaatgctagaaaattgaaagtagacaatgagactttcaaatctagctatttacaacaatttaaaagattgatgaatgaaaaaaatcatcattgtgtattgaaaggacaaccccacattaagtttcatatatgggactttcgagctgaagaatgtttggtgaaaaatgtgtgtggttgctgaaaagattgtctttgatgattggataaaggtaagtgttaacttgttgttcaatttaatttacaacttgatcatatcttaattcttttattatggtttttattcattacagagttatccaaatgcaaggggcttgaggaataaaacacttcctcattatgatgactttatttttatatttgaaaaggatcgttcaattgggcaaggtgctatgagatttttcgaaacaatggatgagattgataa

SEQ ID NO: 260183 - DNA, 534 bp, Cannabis indica
tttcaaatttaaataaaagtaaagatagggcaaaatagttatttgttgacaataatcaacattacaaagttttaaaaatgaaagcaaacaagcaaataatattaaaaatttacagctaggcacaattaaatcgaacacaattcttatgatctcctctcgcgtcccgattttattcgagtgtctagccctcaaatatcagaacactcatcccacgatggccttgtggaccgcgagaggttgagcctcagttgggtggtaggtgtgactgttttggaagtagttcctcctcacccaatccatccattcgaagccactaaaaaaataaactgaaattaaaatatatagtacattgggctaaatttttttaaaaaaaactaataatagagcgttcaactaaaaagataaaagagtttagttaataccttaaatgtttatgaaatgatttattggattgttaaaattcattttatcaaaccttgttgtaacatatattaaatatatgttttcccaaacatcaataaatatgcacataaa

SEQ ID NO: 260184 - DNA, 1469 bp, Cannabis indica
caagtctttgttggttttattggcggattgaaatttaaagggtgaaaatgcttgtgcggcccatgaaccctagtttgggcacacttgggtgtgtgagtcccggcaccaattggttggttgatgttttttattactctaaaagtgtcatggagccttcaaaaatgatgttttgatttatttgacatttataggtcttgattaaaatcgcaagcttgactttttttattttttaaaaatcgagtgcaacattactaattatttatgcataaagccaaaatattatttgaaagcaattttcttccttaaaaaaagttttcctatttgttaattttttttgagagagagaatactttttcttaagccaataaaaataataagagtacatcataacatgttatgttaggtcacttctgattggacaagacattcatattattaattatatctgcctaaaaaaacagatcatctaaaatttaataaaactaattacttatttagtaattaaaaagaaattaaacatttccaaattaggtaatgtgcatcactgcattgtgcaaaagcaacatctacttcaacttcagttttactccacaaaatttatatgatgataggtttggtttaaatttcactccggtcacttatttggcttaattatcatgaaataatggctcaaattcatccatatattgaatttaaatgattaaaaaactgacagggtaactaaaatttaacaaaatatttaataacaaatttaagttcaattaaatgattaatgactaggtttttagcttatattatatataataaagaatattaaaaaagagagagttgtgaacaaacaggggagagtggagttagcctttaaataagatggaagtgagagtaagtggcaatgtggtgtcctggctgtatgtaccgtcagatactaaagtatcagtgtttgaataacgtgtctaaatatccactattgttagtattgcttttaatatttcaaaaaaaaaaggaagaaaattataacaacttttaatatttcaatttgatttttaacagattgattaatttaatatgcatgtatatacatttggtgtgagtagattttaatatatgtttaattaagccaaagcgtggtagagtgtggggtccactttaaggaaaaaagaataccagctgctactgcagacagaagcactgaatcagcgagccataataataagcaggtttggatccgaagctatagatctcccgagcctaactcgacacgtgtctttcatttattggctggaaacagttgttctttcgttttttttaataatattaattaataatactttcatttacattttcgggacacaccaacttcccattctcggccaaaacgaagatccgacgggggaaaccaatagttggaaggggtctagctgaaattacggttgtacccttttctctgtccacgtcagtattttgttttt

SEQ ID NO: 260185 - DNA, 813 bp, Cannabis indica
agcacattaagttcttcatacgttttcttgaaagccatgaaataattcgtaagagacttatcttgtttctccacacgataaaaggctttgcaaacatcatatatgcgagatatgttgtctttgccagaatacaaaaactccaagtaatccattagttctttaacaattcacaatgattaatcaaactaattacctcattatcgatagaatttcaaatttgaagaaacaagcgagcatcctcacggagccataatttccttgaatcgtctttttctttgggaggatcatcagttaagtgatcatctttgtcaatactcctcagatacaatcaaatagtcttattccattctaaataattcgaaccaatcaatttatggtccgtaattttagacatcacgggaaccacataagaaacaacgactgatttcgaatctgattctatctctgccataatcttgaaaccaaaaaaaaaaacaattgacagagaaaaggaagagagaaaactcaaaagaacagatacccaaacacaaagaaggcaaaagtatcaaaccacaaaatgccaagaaccgccggaaaccgatgcaaggaggacgagaaaggggcaggagtgtgacgggcgtcgaccgtcaccggagaagacgccggacgcgccctcatgcgccagcgcgtgggatttcaggcagtggcaaatggcggcgcgtgtggcccacacacggtgaatctggacgctggaattttgggttttgctgtccggcagctgggcagtcctcctatgtgggcagtgagaaaaaattttcactccaaatagggttt

SEQ ID NO: 260186 - DNA, 605 bp, Cannabis indica
acgagcagaggtaccctactcacgacttagaactcgcggcagtagtatttgcgctaaagatttggcggcattacttatatgtcaagaaatgtgagatatacactgatcataaaagtctgaaatacttctttactaagagagatctgaacatgtgacaaagacgctggctagagttggtgttatgattgggagatcctttatcaccctggtaaggccaatatggttgccgatgccttgagtagaaaggggcagagtcagataaatattgtgaaacaaatctcccaacagttagcaaatgagatgacccaagctaaaattgagttggttgtagggcagttggctaatattaccctgtaatctatttagagcgaatcaaagaagcacaatttcaagatccagagttaatgaaatcctgagatagggtttagactgggaagactagtgactttacagtggatgaaacgggaatgttacgatttatgaatcgtgtttgtatgcctatagatgacggtattaaaagagagattatgactgagtctcatacgactccttactcagttcatccgaggtcaacaaagatgtatcaagacctcaaggtcatgttt

SEQ ID NO: 260187 - DNA, 718 bp, Cannabis indica
gaaaaactttcgaggtcaccatcctgaaattaccccgtcagggatgcttaaccgtggagttctttcgtgatgggcttccgaaaaacaagatgcatcttgttgatataagtagtaccaatcaatcccttaagccctctttaactatgtagtcccatacctacacagtctcagaatcatcatacatgaccttttgttaggttacatctagcctatgtttcgggtctgaaaagtaagcattttctcgtctattggtgtcttttggagcggttttacacttgattttccttgtttaggttctcggggtatcggaagtcaaattcagtcaattgatgaaaagacaaaactagtgaaaaatcggagaaatctgctcctcgggtgtcagtagtcgcgaccatggatcgtgctagtcgcgacgcttttctatggtcacgaccacgatcgcgacttggagttttggcagaacctatgattttcgaggtttgcctgtagtcgcgaccagcctttaagttggtcgcgaccaggtacggaaaatgcagtttttaacctaattcagattttttcccaattggaggcacacttttcattcctatataagaaacacgattcagaagatcaaacaaagcaagaatagacctgaaaagtggatgaaagtggagaggaagctatcttgaagacccggagcgatatcaccttctagtttctttcttttacccttatt

SEQ ID NO: 260188 - DNA, 673 bp, Cannabis indica
aaggggatttaccttttgtttcttggctggaggcactggcttgtcacgacttcgagatgatcgaagttccttctcgacagaagcttgctgggcacgagtgcgagtggaaggaccagttggagtagaagtagcaatgtcttttactgatgcagtaggaggagaaactgcagcaggtggaggagatccctttgaagatgaagatgatgaggtccaagttttgtatgggtgcacagattttcgagccacttgtttaggaattcgtttgggcttctcggactgagattcacgctgaggaagcgatgaatctcctgttttttgcaacagcaggaggcacggttgaagcagcagtaggaggattcgagggggttgcatcagcttcaaccacctttttgggattccctaggttctttgttctaaccatggtaatctgaatgagacaatgaacaacaaacaaggaagagagacaaagaaatagaatcgggtaggtggtgagaataaatgacgaaaaattggtttaaataaacatgggagagatgagcaaaaaggaaaccaatttcaaaattttgagtaaccaccatcccacgaccacaaaaggaaacgcccactcttgcaaaaataagattttctccttttttttaaaaaaaaataaaaataaaaggaaactagaaatacc

SEQ ID NO: 260189 - DNA, 750 bp, Cannabis indica
tctcggtggcaggccaggaatttctgggttcccccggggagcgaccggtgtcaatgctccggttgcaccccctggtgctccttggggaaaaggtcctgctgcctgaaccgggttgagatgaggcaaccggtccttgatccagttgtaaagatggcccaatcgaatcaaggttttgatctagtccttgaggtttttgcattcattggtgttgtgtccaatatcgttgtggtacgcgcaccttttgttgggatccctctgggagctatccctgtagaaaggaggcggtctccggtagtgcgtattttgcctagtagcgaaatacacacgctcctaggagtccgttagttccgtgtactgggtgtactggggagtgtaccccccttttctgccgcttgtcctccatccggttgctaccttttgaggacgtcttgctccgagagccttgagaagagcctactaagcttgcggtaggagcggagtgagacgggacttgtccactcatcccagaaggatcccataatgggaagttgcaggggctaaggcctgaccctgattatatcctggggtagcggaaaattgtatgccgctcatcggtggagtagctgctggtaaagttcccaggagttgagctctgggtacataccccgctatcccagtagggcagtatcccccgtgggccactatttgggcctcttctaggttgatgtattttttagactcttttctggaaatcttaaaggttggaggctc

SEQ ID NO: 260190 - DNA, 797 bp, Cannabis indica
gtctctacttcaactttttgccagttattgctcttaatccaactaagagcttctttgattcccagtgcttccacaacctcagcagaatagttaccagccttgtaacatgttctagcttcaattagtttacccaagtcatcccttgctacaattccaaaaccataggaatcttcatgatgaaaaagcgcagcatctatattaatcttgatataattattagcaggtttagtccaaagctcggctccatcatcactattattaggagatagagatgatagagcaaatttatcctgagcttttcgccagtgatcaagagtaatagaagcagatacaagaacatcatttacagaagaattctttttgttccaaactgtattattgcgagatttccataaagcccaacataacatagcaactttacaaacctgatcattgtctcctgtttgctgcaaactttcgaaccagccgccaaaagaagaggaagcagctgcgtttataggaagaccgaaggatctccagcagtcagcagcaaaagaacaatgcacaagtgcatgaatggctgtctcgggttgggttctacagaccggacattgagcagaaatgggcacatatttagttacaagattcacacatgttggaagggaatcggtgatagcacgccatagaagatttagcacctttggtgggatctttaagtgccagaatttacgccaaaaaccagaattattctgtgttgggactgctggtttttcagtttgcagcagttggtaggcgcttcgaacagtaaaaactcctct

SEQ ID NO: 260191 - DNA, 1628 bp, Cannabis indica
ctgatgtatgcctagagtggctcacctgttcattgcttaacttcgaccaagtctcccaaatgcaatgggagttggcgcaaagaggagaattgtgcatggaattccaaagagaaggttttccatgaactaaactttccaggagccaacttgaaataccattgctaagcagcttctgacagagtggcaggcaatattctgcagcatacatctcctcgtactgcttgcaaatccattttcatttcgaagtacttgagatgggaaaggggatcttctctccccgtgtacattttgcacgtcgacattttgaacttgtgggccagtggcaggagattgatctccggtgagaaaggagtttcgcgtgctcggtctagctcaagatcattatttctttgtccacccctgtcgtgaaacatatttttcacttcgtctagctgagcttgtacggctgggttgacctccacaacattctggtcaatttggattacgtcagcatctttctaagcgggcatttgagtaccggctctgggctgcacgattgtcgtaacattctgatcgtctgctcccctccttctatttagatcattccttaggtcacgggttgtccctaacctttcgaacacagaagtgcctagctgccttagcggttgattcgcttggttgacgggtggaatggcatcattgatccggttggaaccatcaggtatgactcctcctgatgaattaccagacaaggtctgctcgtctactgctgggcccatgagtggaactcatgttcggggattgggcggcttaccatttgtagtctgggaagtgttcatcgttggatcctcgtccgtatctcccaagggaatgacatttgacgattgccaacctacagtttggtaggctcttcgtatcagcaccgtgagcccttaatgccgactacgatctttgatctttgcatggtgagcccttaatgcctccatctctctatctctccattcggcaaaaatacgcctttgttcgtcgaacgcgagatttattgcagcgcgtagttcttcttgatcatgatgagggtattattatgaccctgcatgagtctgagcgcgtaacgaaaattttgtaatttagtggcatcttcgatagtcgtttgggcgttggttccaggcgaaacagttgtgttatgaatgtcctggttcggtgcggaactgttattcccagtctctttcacactaggtgcaatttcatctataggatctgtttcaccattccccacgttcgtcggctgtccaggattaacagcaggcagaaccctcgtgtttcctgggttctgtgatgtaggatccagtgtctgtgaatttgttggatcagtcaggcctctacgagtttgcaccattgtatttgtaattggatgttgaataaacagcgattcgtgatccttctctcaatgaaagcaccaaaatgttgtcctcgctttttgctaacgacaacgagtctattttataagcgataaatgatttataataacaaatatatgataaagcaataaaaagacacaagaattttatagaaggtcaaccccgagcagttcggtaatagcctcatcctcgttacttgtattgacttaagatcaaggagaaagattcctt

SEQ ID NO: 260192 - DNA, 726 bp, Cannabis indica
cagtggcactggtgaaagtactgtggaggaacagtaaggtggaagaggcaacctgggaacttgagacggatatgcagcagaaataactagagttgttcaggtaaatttcgggacgaaatttctataaggaaggggtaattataataccctggaattatgaatggattagcaaaggtctaattagataattatgaataattgaggaattatattattatatagttccatatatgtgaattaatatgatttattatatggtaagccccgttggtgagccagaggcattttagtaattatgacccgagaagggtaaaatgattaaattaatttaataacgtgtttattagaactatattattatatagtatgtatgtgttgtcttttcaggtgcgttttgacaggttggcgcggtatagtcacaactaggtattttgggccgaacggggttcgcgcccgaaatgcaatttgggattaaatattggcatgttacttgatatttgataatcagaattttatttgaaaaatttatcagtgtgatatgacaattatgcccttgtttgtgtggatacatggaaattggccctaagggcattttagtaatttagcctttatgagttatgagttgggaaattgaatttttgacaaaatgaattagaaattctgctctttctttctctcttggccaaactctctttccctctctaaccctcttgaaagtttcaagtt

SEQ ID NO: 260193 - DNA, 928 bp, Cannabis indica
ccgacacttgattaggagcaccttgggatttagaatttcctcgtacatgggacatcaggtaagataataattttcacgtagagttaagcgtggtggcgctcatgttttatactatggttgtgattaattaagaagcaagattagagttattaccctaaaatgagcggttatatggcctagggtttttaccctagtaatatattttgggtgttatgctatgctaaatatgatggaataaagaattatgtgctcaaggcataattaaattagactcgataaattagtaccctaagtttaatagaaatgtgacacgaaggtaagaaagcaacgatgtatagtaacattactaatcaagtgaaagcaagttagggttattaccctcaataggtgttattttgaacatgctataatatgttatatgagtaattatttagtatgcaagtcaaagttattatcctaagattttatatattatagcatatattgaaggtacgcatatatgtcaagagttatgtgtataagacataactgggttagacctgacatttaccatcacgataaacctctaaaagaacgtaatgtatacattatgtatatataaatagggttatgtgcgggcaagacataattaagttagactcggtaactataatcgagataaaccctactaaggccttattgtaaatagaagtgtgagcgtaacacgtgggtctatgctacataaacataaatagacgtgtgagcgtaacacgcgagtctatgccatatagacatatatgggcgtgtgagcgtaatacgcaggtttatattaaatagacaaatagtgcggtggcaccattaattatgtgttatttatttattgtgtatatggttatttatactgttttgttgggcttggctcacgggtgctctactgtgcaggaaaggg

SEQ ID NO: 260194 - DNA, 1798 bp, Cannabis indica
atttttgtcaaaaataaaactcaaatgggtccaatgaaatggatttaactaagtataattacataaatgattattttggtaaaaaatttacacttacatttattttttttgtaattttgctgcattttataaaaatacatgaaagtaacataaaaataacaataaaataacaacaagagtacaacataaaaatacatcaaaagactgtattttatataaataaaatctttaaaagtatgtataactgtatttatatatatatatatatatttgttgttttgtgtttatttgaaattatcttttttttttttctttgatttaattctcagtgcttaaagatctgaaaactacattaatcaagattaaaaataaattgctctattttgttgtcaaaccaggacttagtgcaaggcttatgagctaatgttaaaaagtaaatcttcaacaaaaatttgagaggcttttgggctgagggacctgcccagccgcccaaccctaacaattgcttggagcaatgtcactttatttttgagaaattagttaattatataactaattattttatttatcaacctaattaaaatattttttttaaaaaaaaatagtaaatagtgaaatatttttaatttgatttttcttaattgatgaaaaaggtatcacgtggtgcagatcctttctatattcctttggtaacttagacaatttcaaggaccatgtgccagttatgggaacattatacttaattaggtcattggtatgcaccttgagagttcccattccaataagaatgacaccgccacaaggcccacaacatgctagcttcccaaaaggccaaatataattcttctcacgaggagctgtgatgagattcgaactattgacccaagcaaggaagtatgctagtaaaagcattcctactactacagcacacaacacgtgattattcttaattcgaatttatttgcatgacttacattctcatttactctcttatcggttaataagtcgaaggaatacaccacaagaaaatacatttcgtttttttttttcaccaattattaaacacaagtttcattaaatatttttagtaattagtaacgggtgtacgtagattggtttcttccgtatagagtcacgaagacgatcttaaaaaaattcaatcttcttaacaaatttataaaagattgttaagatgtttttctctctaaatagatttctttaattaactattcacggtcaatctaagacatttactaataatgaatataacgattttaagaaatattaattcaattctcaattttaataattatgtatagaatttttttttttaacttaatgaactctcaacttacaaaaaatctcgaataatgatatgtgcactaaaatattacaaaatatgatgttaattttctctaaccgattacatttatttaaaataagacctactattattttttttgttaaaaaaaaaagacttggaactctcatcttacaatcatactcgactaatgatatgtgcactaaaatattatatgttgtcgcgtttgtttttttctaactaattataatttatatttatttgagataaaacctatacataattttacacgtatcattacttatcaaactcaaataattgaacttcttggcacggaaatctcaagttgtttacaagagtgatcagtcatggtcttgatgacattctcttcagcatttcgttcttcaatgacatagcatctatggtgaaatatgacacatcattttacaatgtgaagagcctatgagcaagaattct

SEQ ID NO: 260195 - DNA, 739 bp, Cannabis indica
aaactaaaaaatggttatgtttacttaaacaaatctaattttttgaggaaaaaatagactcaaacttgttcccgtaaaatttagtttttgcaaaaatttaatttttaatatattttttatatcaaaatatatttttaataaaataaataaataattttttaaatcgctttattaattttaaaattttaatttgttttctaattttcttaatcattcaaaatgatttttcttaagatttactaaaaaaatattgaatttttctcatttttattttgagggagtacgatttaatagttgtcaaagtttaggggacaaaactgctaatttacaaagacatgtgagcatttaaacggaataatgggatgtaacctaacacaaggactaaatttctataaatgtaaaagttcaaggagaattcttaataagtcgtatattttagggggcagaataagtattgtcgaacgttcaagggataaaaattctaattattcttaaaattaattacattcatatttattataattgatatttttgaaataatatattgtttattttgggaaatttgacattttatgcttaaacattagatagggtgtttaattataccacccttctaaaaattttataactatcctattcttttattagtgaccccaaaatacccctctcctctaacccaaaaaatcccaaaaattttgcctcctttttcctctcttcttcacgcactctctctctctct

SEQ ID NO: 260196 - DNA, 1320 bp, Cannabis indica
gggcgatgtatgtacatgttctggccacactagaccaaacgggttggggtctacaagtgatgtgcgcttgtaacttcgtggttggattgcctaggaccacgggacagtatgactctgtgtgggtcatagttgacaggtttacaaagtcagcgcactttttaccttttcgaacgaacttttccattaatcagtatgatgagttatatgttagagaaattgttcgtcttcatggtgtcccaaagtccattattttggatagagatccgaagtttacatcaagattttgggaaagtctacattgagctatggctactcagttgaagttcagcacagtatttcatcctcagacgggtggacagtctgagaggactattcagatcttagaagacatgcttcgggcatgtgtgcttgattttgaaggatcatgggtaaagtaccttcccctgatcgagttctcgtacaatttaagctatcaggcaacaatcgggatgccccttatgaacttttatatggtagaaagtgtagatcacttattcactgggatgaagtgggtgaaagaaagttcttaggtgccgaggctgttcagagaacaagtgaggcagttgataaaattagagtgtgaatgcttgcagctcagagcagacagaagagttatgcagatccgaagcgatgagatattgattttcaggttggggacatggtatttctctgaatatcactgatgaaaggccttaaatgctttggtaggaaagggaagcttagcccgaggttcattggaccttctaaaatccttgaaaggatagggaaagtagcgtacaggttggctatgcccctggcgctagcagctatacatgatgtgttccacgtttcgatgcttcgaaagtatgtctcagactcgtcccacatcctgagttatgaagcattggaactacaaccagatctatcatacgaggaacaaccagtgcaagtacttgatagaagggagaaagtcttgagaaacaagaaaattgcactggtaaaggtattatggaggaacagtaaagtggaagaggcaacttgagaactcgagagagatatgcagcaaacatatccggagttgttcaggtaaatttcgggatgaaatttctataaggagggggtaattgtaataccctaagattaagataatggattagcaaaccctaactagttaaatatgtattattatagaattatattactatataatttattatatgtgaatttttatgatatatgacttgttaagatcctgttggtgagcctggggcattttagtaattttgacccaagaagggtaaa

SEQ ID NO: 260197 - DNA, 909 bp, Cannabis indica
aacacaatgcatctcattcccttcagagaaaaacctgagccatctttctaaacctagtcgccccctctctttcttctgcttcttcgattgtttcgaaatccctttgagatagagtagtgcccacacacagcaagtagtacctcaatcatagtgtggaagatcgtgaagaatccaaattcaacaaagaaggacattcgggctcagatcttgataatactctgcgatagaaaggatacaaaggttagagatctgagtggaaggagacatattattccgctgcacccaatgtaaggtttctcatactttatatgtgtttacttataatcgttttagaagttcatatttaggatgttaatcaacagacccctcttggatgagccaacgaccgatcagccaattgcaaggttactgtagtaggctttgcctcacccaactgttctaaaaaccgacagaggcatcaaattgatgctcgctcccgaatcacacaatgcatttatcccctctattctcctgatattacaatgaatggtgaaactcccaggatctctgagtttgggagggagtttcttctgcaatatcgcactacgcccctcagtcaatgccactgtttcatagtcttccattttcctctttttggacaagatttctttcatgaatttgacataactaggcatttgttccaaggcttctgcaaaagggaatgttgatgggcaactttttaactacctctagaaatttcgaaaactgcttgtctaggttggtttttcggagtctctgcggatagatgatcatcacatggtggtctatgctgactggtggagaatcttcttatgttgcgagactgtcagtagtcactactacaaaaaacccttttaatgccccttttttaagtccaacaaaattattgtt

SEQ ID NO: 260198 - DNA, 1219 bp, Cannabis indica
tcctatctgttcttcggtcttcatatatcttgtggatatcagaccttgttaaattttctcatgaacaaaatgaaaatcaatctcagtgtacttagttcgctcgtggaacacagaatttgagacaatatgaagagcaacttgattatcacactacaattttactggaatagaagtcttaaacccgaattcagtcaaaaactgataagtccatattacctcacacacagattgtgccatagctctatattctgattcagcactggatctagacacaacattttgtttcttactctttcaagatatcaaattgcccccaaaaaatacacaacatcttgaagtggatcgtctgtctaccttggagcctgcccaatctgcatcagagaaacactcaatctaggtatgtccatgatccttgtaaactatacctcgtcttggtgctcctttcaagtaacataaattttctctagtgctgcccaatgatgaattgttggagaagacataaactgactaatgacactaactgggaatacaatatctggatgagtcacaattagtaatttaactttccaaccaatctacgatatttctcaagatcttcaaatggttccccatcacgtgtaagatgcacaactagattcattggagcattacaaggttttgctcccaattttcctgtctcagttaaaaaattaagtacatacttcctttgagacaaaaaaaccttgtttactccgagtaacttcaatacctaagaaatacttgagctctccaaaatccttcgtgtgaaactgggtatgaatgaaagacttaaccgatgagatgccttcagtatcatttctagtaataacaatatcatcaacatacactactaacacaatgatgccagtagttgatcttttataaaacatagaatgatcagacttacttttcaacaaaccaaatttttcaacagtctgactaaatttaccaaaccaaacatgatggctttatttcaatccatataaagattgacgaagacgacaaactttccctaactcccactgagcaacaacccaggaggttgctccatatatacttcttcctcaagatctccatgaagaaaagaatttttaatatcaagctaatgcaaaggccaatgatgagtagctaccatggaaaggaacactcgaatagatgcgagtttagcaacaggagaaaaagtatcacaatagtccactcc

SEQ ID NO: 260199 - DNA, 784 bp, Cannabis indica
aaaaacatcttaggaaaagaattgagctaaacatagtagtttaattactaagtactcagaacaaatatatcaaaatcaaggaaagaaccttggaaagagtgtcgacgatagtatcaagtatgtgcttagattgtctagtatagtactcctccacagtgagtttccaacccggatcattatgcgaatgaggcacaacaaaaatcttcaatttctccgaatcccactcatcccctttatatgcaacattccacccttgcttccaagccccaccatcttcatccaaaaattcaatcctatcatacaaatccttggtggtgatatcaacagtggctccatcacttcctgagtcaaccataacaggcttcctgaaactaggttttctaggtttcacaatccgggtcggcgtccgcgatttaaaacgcgaggtaatgggtctggggacgccataacgaagaacaacgatgaagaagaagaagagagagacagcaaggccgatggtgaagaaattagcgaaaagaaagtcccggagcacaaccctacggcgagattttctggagaacttagatttggaattggaggaaggagaagaggaagaagaggcagtggatgggaggagagagttgccccagcctccacggcgggtggagaaggccattgatggaaaaggattgtgatgattcagagagatgatcggaggagaagggtggcgccggaggttttcatagctgtggattttgagttaagttaagatcggagatgagatcaagtgattgggatctatgaa

SEQ ID NO: 260200 - DNA, 286 bp, Cannabis indica
cacaacgtggatcaacaggaacatgctttgtacgcaattgggtacgggttgggagacaccccgagatagctttccaagcgaagtgaagaaccttgggggggactttaactttccagagaaccttccacaagtcagactccaactgaataccccattcacctttcaattcttgaagatagcggtaagagctcttaaccgagtaaaacccattcgactctttaccccaaaaccaagaatcaacattaacattatcacttagaggaacctgcattatcaactcgatatc

SEQ ID NO: 260201 - DNA, 733 bp, Cannabis indica
ggtactctaatcgtactaatgtgataacgacaatccgtactctaccaaacatacacccttcggtattcagtgtaactctatatacattaatactgcccttactaatatgttatctattagatattcataaatatagacgctaaacatgtaagcacttatgcaattattatactagtcttaccttgattctgaaaattgatgtgctggtcaacttaagtgaaaaatgatgctcaacgatttacatgcccataagtcacatcatacgtaaagttggtaagtgatatgcttattaaaagtttttctatcgatagatagcctgtaataccctaaatattgataaaatgtgaaaaagtagggtttggaatatgaaaaatctagttaaccgaaactccaaaacggtttaaccttttcaggggtccaaaccaaaaaactggttcgccgtttttagaaaaatggtgaaccatttttcactacagaacataccaaacttcaaaatctaggtcaaaattacctcaaattacatcaaacattccagaatacctaattaaacatatataataagcataatctaaccaaaaagagtaattataatcccctgaaaataaattcaccattaaagaatcaagtttgagcttgaaagttcaagctttggtctttctcaataaaaacaactaaaaccagcaataaacaatataatcagccaagaaacaactacaaaaaactaacccaaaat

SEQ ID NO: 260202 - DNA, 508 bp, Cannabis indica
atatttaatctatatattatattatttataaataatataacaatcctccactagattaaacattatctcattagtaataaacttgtaaattttgtaatatttatttaatcaatcaaaaatattatatgaaaatataacaatcctccacattgattgactaaatacatactattatagaagtcttgcttaggtgcattaggtaaaatatctttcaacttgaattttaccttagtatagtcaccacaaagtttgatgaaataatggttgttgtagcattgaaccattattcctttaatacaaactagtgataacacacacccttgctaatgctcgctgagactgcatgtctcgctcttgcactgttaatgaccatgtgtaaaattccaattcatgaactctctagagaataactcccaattctcataagagggagcaccacctctcacccacataggtagagtttttgtcgcacaactctttagatacttcttaagcttaagtgagtttt

SEQ ID NO: 260203 - DNA, 2308 bp, Cannabis indica
agattggccctttgaagtgtacgtccaacaacaagttattttgcccaacaatattttttttttaatccataataattcaaccctaatcctattgaagatagtataaaaggatagctatggtctcttcatccaaactaatgccttcaaaagctacaaacctaaatgagacctcttccttcttctttcttcttcaattcgaaacctatagcctttcttcactaaattatttcagccattagtgattgagtaagtgtccacacacatcaagttggtcctcaatcatagtatgtaagactgtgaagaatccaatcaacaagaaggagagaaagagatccataatgctttgctacagaaaggaatcaagggctagagatctgaacagaagtggtaaaatatttccaacatccaacttctgtcttagagaccccatcgacttctttccttcgatttcattccttgttatctagacactttcccttctatcttctcagtccctatattcacttccatcttgctccttgtttcagtagcagagttacctacttttgagccctactttctcttcttaatctccccttttcgacagtctgccatgatatggccataccttagacaattttaaaatttaactgggagccattcataataatgctctgttccattagctggtcgtgttcattgataaaatgaattgatttaggaggagtatcagttatgtccatttccactaaaaccctggaaaattgcatccttatgcgatccttagtatgttggtccaccataattggtttcccaatcgtactaactaaagcactaaggcatttttccccaatactgaagatctagatcatgtagatgaatccataaaggcactgaatgaatcaatttaatggcattcagatctgtagaccaaggtctcagtattacaagtttcttgtcgaattggatcaccctttgcttttaagacctgatcccttgttgcttcatcgttgaacttgatcataatcaagcccattgtcatcctgacaatttgagcaatccctaggtgtccccaaatccttttgataaagccttaaaagacaaccatgggaggttggctccaagcaccatacatatcgctgtcgtgttccaatcaatagcttgttctttaactttgtatgggtctactcgagctatttttaaagctatttttaaactgatcttcactataggttttgtgtatgccaacaattgatctcgataaaatattttctcctccttgaacgatttccaatgattcatagctgaatcctgaaactgcttccgttttttatctgatccattctcttcttccatttccttagctcaattcaggttaccttgtttcatgttcaccgttttgatctttaaaccaaatttttcaataacctggtttgtgtcctcctcattcagcatttcgacaatcatgtctaggctagaggctaaagtagaatcttcttctctgctttcccttcttactaatcaacacttgaatcaggatcaatcccacgagtaacttgcttgcgaatcattcttcttttcttcgccatggaatagagaaaagagaagaaacgaagctttttgttaaaattttattgagataagttaattttaaaaatattggggtattttgaggtactcggagttgaccaaatatcctaaagttaaagattttttagtggctaaaactaataaaatagctattaataataaagtttttattaatactatattattattattattactgttattattatatgtataagcgattcttatcgatttatatatatatgttataagttttaaaacataaactgaaacatacgaaactctcttttctcctttgcgcgacaaaatcctctccccctttaatccattttctttgattttcaacccgaaacctagtattccaagctccagtagtagcaagatagtaaatcattgaagaaggaaagcttaagatatggtttaatttcgtttcaagttaaaagcgattagttttatatagtggctttgtgatttagagtggttatgaagattctgactttgtataattggtctttggtagctatgggactagttttaatgtttacttattgaatttgaggtgattctgagttagaaatcgagtttcgaactttttaaagcttagtccaaacgttaatgacattttccatttaaaggcttacttgttaaatatgtcaactaataatacgtttatgaagtattcaacacgtttataacttattcaacaccttctcaacatatcgcgttgcgattgactagc

SEQ ID NO: 260204 - DNA, 698 bp, Cannabis indica
aggtgcctttgatcactccccagctctagtgattttccaccagcttgctcataatgggaggaaaccctttcgttattttaaaatgtggatatctcaccctgaatacactagccgtgtgcagcatatatggcagcagcaggtcttgggcacggcaatgtatcaggtggtgactaaactcaaagctctgaagccgatctttaagaagatgaatcatgaggggtataatgatctgcaatcttcagttatcaaagctgtagctattttggataattgtcaaaaccagttatctttggaccctctaaaccaggaactgcaacaacaagaagcatcagcccgaagtagtttttctcaagctcacaagaactatcaacaattccttcagcagaaagcaaagactacatgggttagagaaggggatgataatacggccattttccatgctagcctcaaagctagaatcaatcaaaacagaattctttccattgtggacatgcaaggaaaccgagtagatgagccgtcaaagatcaatgaggtttttcttgattactacaaacaattgttaggcaccaggatggccaatcgaagggaagtattaggccatgtgatcaaaaatggacccacagtatcgatgcaacaaagggtaacactgtcggctccctaatgaagaaataaagaaggccatgtttgctattcctggt

SEQ ID NO: 260205 - DNA, 2285 bp, Cannabis indica
agagagtagatcgcatatatcgaatatatgcgatccatccccctcttgtcttggataaaccaggagaacgatattctgtaaatgcgagttggcttaagaaccctgcagcctttataatgcaatatagactcgcatgtctaggttctatcagctcgacgtgcgatgtctacaagaagcgactacctaaggatgcagacatcccaaacgtaatgataaccctgggagcttaaacatcggaacatgaacagtcaactcgcagatgcgaaagacgcatacattgatgaacttagtaactgtcattcatttattaatgttaacgttgcttagtttaattattgtaattcaatgtgtaataacggattaacaatgaatgcaatccttgtataactgatcggacacctgctttgtatataaaggggtgatccaccgtgaaatgggacctacgaatctctggctacagtggactaagcagaccataatctgactgaaccactataattctctgtcttattgttattttccagcttttgttaattatttctcattcccagttgagtactcgccattctaggttgaatactcgcacttgtctttccacgtaaattgcttcttgtcactaataatatcatataatttggtgttgcgaaattcactcgacaacataagcattaatttacaatcgggaattatacttatgtatttacgttgcaaattaataaaaaaattcaataaataaaatagtgtcatttttataagagaaatgctaaagggcaaccatgatgcgtaacacccttatgaagtgtaatattattattggtgcaattcaatatcgggtcttacttattttaatttaataacattacaaaaagaatattgtcagtggacaccagtagtgcccatcactttctataagtaaggccctaccattaattagcaatatttcctaaaaattattttcttaaattatataggacttgatacttaattacactaataatagtatgacacgaagagggtactaggcaccaatagtgtcttttaacatttctcttataaaaagtcactaatcaattataggaaattatctcataatagtaccagacaccttaatacacatagcaataaatcacaataattcaccaaaggagtacatttgtagaaatcacatcttttttttccttgcaaaaaaaatagtgaaaagaagtgatttctacatatttcacttaagaaatgaggatacaatgagagctaaattacaattttaacctcaatgccatctatgctagctaagggatctctaccatgaccaaccaaccttaaatagctaataaaagacactagttccaaaaattaaaaaagggttcaataaatgaaggcaaaaacataatgttggtgtttggaaatcactcaaagtatacatagtttataaattatagattaatttgcggcataaatatctaaatttaacttctaattgtaaataaatacttaagtttaatttttagcgataataatacttaaattatatttctgaaattttgtaagtacttaactgttaaatgttaagttattattcacatgtcattttcttattggtatatttatactaattttttaaaaaatataaaaatttaaagacttgaaccaattacggattgtcacgtgaaaatttacttaatacttaacagtcaggtacttacaaaagtttcagaattataacttaagtattattaccctcaaatattaaacttaagtattttttacaactgggaattaaacttaaatttataccgcaaattactttaaattataatgtatattttaaaataccaagtggtaattacatatgatttaataatttttttgttaaatataattactattttagacattgtgttttacaaaaattactaattaaacttgatgtttttgttaaatgacaaatcaaatcatgtatttcaaaattataaaaaaaaaatagtacacttagctcaattttcatcaaaataaaatttaataataacttgaaggtgttgttgggaaaaacgataaacttcaagtgcagcgaaataacaaagaaacgaagcaaagcaatttacttagtttggtaaaactaccaaacccacaaagagagatatatttcacttatcacttcaaaattacatacactctctactcaaattccaatacaccctttgcttcttactcactctcaccacataacaaactcacacacttctctttttcacaactcaccaattttttttctcacacacacctctcac

SEQ ID NO: 260206 - DNA, 728 bp, Cannabis indica
gatgccctaatcacataatgaatctgggtaaatcatatgatcgaaaccctaatccgagaaatccaaacccaccactctaggttctgttatactctctagggattactctaacccaggaaatagggaaacacccaactaaggcactgaaaaggacgaggattgaggaaatggaacattcgggaaaccctgcaaaaactggctcaccgattttacaggtactggtaaaacaggctagccggtttataccagttcaaccaaaaaattccatttcttgttcaaaaatccaccaaatgcaaccaaaccttccagagtacctaattatggtataaacaacatattctaaccaataattcctagataaacacactgaatcacaatatgcaattaaagacctaagctttgagtttctaagctcaaacttgcctaaattcaacacaaagtggtaaaaccagctactagaacctttaatcaacctaaattgatcataaaaaccgaaccctaagtatttctaagcgtaacagctagccaccaaaacccaaaatcacatactcaaccaaccataaaatttaagaacttaagaagggtgttactagggcttaccttggcttcaagaaacgttgagtccctactgaatttccagaaaaacagcaagaaatcagctggttcctccttggtgtggtgctgctcgaaaagaaaggatgaaagagaaagagtttctcttgactttt

SEQ ID NO: 260207 - DNA, 970 bp, Cannabis indica
attcccaatctcccatctaaagtcagcattagtgagggagttgattaccatcttcaaatcactttctacaataataaatttgtacacttttgtttttgtcgtatcaagcgtcaagcaacaagtagtcgcctctcttgataaatttctacaaagagcatcacaaaagtctaatttagctattgtcacctaaatcacttcaccttgatggcctatcgtgataactgtactggacatgtgctccaccctcactttaacattacaattcaacttaatccaattctgtgaagaggggcgccaaacatcaaccagactcaaaaaaggcataggagaaaaagtagctttgtaatttgcataacaaaaagtaatagaatcaatgtaatgttttagtccagtcatgtgtattttgactttactaggaaacttgttaccgttgcactttaatataataattgaatattatgaatttaattcttctcaaaattctaaataaacaatattataaacatcaaactatagtcttaaacaatctgcaggtttttatgaaaaatataaaaatcttaatctcaaaaaataaaaaccttatcttagttttttattaatggtacgatgaaagcatcatgggagcaattatttaataaaaatcacaagaagccaagagaaagaaagtttttgaaagctgtgaaaatgttgtcaatatttaattgttacatttaattagtaatattatgaattgagtatagagtacttgggagctacaattaaatccgttgtgtaataagtttaccacatattattttatttattatacattttgtcttattttttcaataccattataaatttgtgtaacactcactcatcaaagtgttatgatatatttcaattgtgatcacccttttcttcttcttcattctcattattaaatggcagaagttcttgtttccttagtgttagagcaattggcttcctt

SEQ ID NO: 260208 - DNA, 454 bp, Cannabis indica
tagatccttaacggtaaccggaccaggacctagactacaaatcagacctacacccgaattgggagccggacccggatcccaaaccaaacctagactccggacccgaacccgaacatgaactcaaacttaaagatcgaaccaggcaagggacacataaccagggtcgggacctagaaccgtaccccagtctcgatcccaaacccaaactcagaaatgggacctgggacctgaaccagaaatagaccgagacccgtgacagtgatccaggtcttgactcaggatttaggtaacggggcctggaacacaccaccaatcggtgtctagatctgggactcagcctaggaacagaacccagacgaagaacaaaaactgaacccagaccaagtcctgggaacctaaattagaacctgaataagaatcgccgaaccaagaccctagaacaagactaggaccg

SEQ ID NO: 260209 - DNA, 597 bp, Cannabis indica
atactgcttgcagactcaattaattagttttaattaatcaattatatttctaaaattagactatgtcttatttaagaattttcactaagcaagggcttaattgcgaagaaaagaggttttggggtcaatttattaattaagagactttgtattgtctgattattaaataatataaatggcaattttatttgataattaattctaattattaaataaatagttttggcattcatatgattgaattagaaaatatgatattattaaaacaagagtaagtgattgaaaaaaagtggaaaaaatgtaactagagaatgctccacttgttaggttttatgccctaaataaaactcgtttaaatataatcagatttactatttaataaagatcagaaattttattttatgtgggttcacatgattgtttaatgtataaattctattaagtccaggacatatgtatttgttcatgattatagtgtcgtcagcacaatggaatataatcatgattatatgttcaaaagtttaattccttgatttatcagttcactggatttagactggcatgataatcagcgatatgtatacttacaccttggat

SEQ ID NO: 260210 - DNA, 1107 bp, Cannabis indica
ttgagagctgaagaaagcttctgtaaacacaccatacattacaacaatggtggagactcgaagcactcgtcaacctcgccctcttgaagatgctcaagacccgaatgaggaagacgtagcctcaagagcagctgaggtttccgaggaagaagaaggaattcctgatgattattatgagggaaacctcgatgagtacgcctacgatgacggtagctactcggaattggtgctcttaagacaaaaggctttcgatcatgaagttgagatcgcagcccaaaaagcacaaaaccaaaagatgcaagaggtaatgctggccatgcaaaaagccatggaggcagctggtatccacgtgcatcccaaacccatgtcttctagacttggaaaggaaccagaggaatcctcgccaaatacccaacgacaaaaatctagggaaccaacccctataaggtatcccgctgaagggaaccaaaagaaaaaccctaattctacccccgggaaaaagaaaaaggtgcaggatccgcgcaaggtccgctcagatttcccgaaagggaaaggtccgcagaggggcaaactccaaaaagggagtcttggccctcaggatcgagaggaccaaaaaagcgtttccgtgcaccaggagcccggaggtagaggaagaagaggacagaaatgtcctcccgttgatttgagaaatcaaatcaatgggaatcaaggtgacctccgggatcaccttgaccaaaagaaatacgggcccgcagtctccacgggaacgttaaacgaaggaatcatggcggaactcgccatactccgaaaagatatcgcccgagtctcccggagacagaaaggcgacgactccgactcagactgtgaggaccgggagccgattgcgaagcacatcctggaagcagagctccccaagaattttaagatgcccgaaatggcagcttataccgggaactccgatccaagcgaccatctgtcacggttcaaccgggtcatgacggtcatgagagtcagcaatgacgctaaatgtctgtgcttcccgcttactctaagcgggtccgcagaggaatggttcaagaaactggagccaggatccgtgggctgttg

SEQ ID NO: 260211 - DNA, 897 bp, Cannabis indica
ttttaaatataaattaatatatgcatttgaatagttaaataaagaatcaagttatagataagttttaaatcattacaaataagacacattttttttggacaaattagttatcatttcgataagataccaattggttacttttaataaaataataaatttttttaatgaatagatgatgattagaccaaatattctataatctgatatgcctgtactcatatattccaaataaacttattagtttattttgggatattgttgcatattgaaataaattttcattctttgtttacattttttgtatagcctagcatcatatatggtaataaatctattagtttattttggcttaaatttttttttatttttatatatttgaacaataattcatttcatttcatagcctaccattatatatgtcaataaacctatcattttctgtttgttggaataagattttatttttttttcaatacaaattaaattataacaaaacataatgatatacgccaataaacctattagtctatttttcgtatattggaacaacaatttaattttagtttcaaacatatgtgtgcctataaaataacagcctaattaattagtttattgttcttccaggttgagacatcaaatctggttgtatacaaagtacatgactgtaacatgtcttacaaacttacatagtaaacctcgataataatatatgcacttgtcaaagatttaaatataatgagatgtcttgctcacataaaatatcttgttcgtaagattatttggcatatatggctatactatgcctattctagtttattttggcatatttaactaaattttcattcattgtttatgaaattccgtattttaatattcccagtttgattatttaattaa

SEQ ID NO: 260212 - DNA, 1040 bp, Cannabis indica
tgatgttgcaatttttttcattttgattttacttttagtttatttatcaaatatgcaatctgaaaattagctaggtgattgattatttcgctcatttttttttaattttatttatgatcgtgtctttaacaataatcccaattggattacgtacactcaataattttatatataatgacatatatatttgcatattcttaactatattaatatgaagatggggccacaaacataaaggaacctactatatatgtatttatatatatcattacgcaagatatacagaaaattctatggtgatttatcgatcactacagtactacgtcttagtcaaaaggttcaattctttagtaaacggtatgagatcatatatactacaacaacgttatatttttggataaggaagattaatattgaaaaggatatatacatatagatgattcgtcatatacatataaatatatattgattattaggtatacacgtactatatatcttcggaattattaggtatgctacacgtatactgtaaatattgtttatggagagtttttttttgttgaatatatttaacattgtttttttctgttcttataattcctatccttttggaattaatagatatagttatcttagcaaaaaagtaggataattgctatgtatacgtacacagagaggacactttacagacatggcaaaaagtagagtcaaaagtctccctttgattccatcatcattacacacttgaattattattattattattattattattattattattattattattattactccattagtagtagtaatatatagtactacaattattgtccaagttattattaacttgggttataacatcacatacattgataactaataattgaagattcatttgtgtccccatggtctaaagtcaccaatattataacaaataataatgttaattgtaattcattatgtttcgtctttttggtcacactaataattctgacattaggagtaggaggaggaccatatgacaacatatatat

SEQ ID NO: 260213 - DNA, 651 bp, Cannabis indica
tcatctaacatgttataaatgtaatattatttttttagtcggaggattgatgcgatgacatacgctctataactgctcaaaatctatgcatatattttctatttttttgttatacccaaaattcggctagcacttcagaggataacacgtgtcaaccttggataatacgaattaacgaatataatggcaattatattaaggatattaaaatggaataactcattaaatgtagaattaaaagagcatacctataactcgttgaccgtatagtcttaagcgagacaaggatgtatgaactattgattcacgcattgacgagaagccatttcgcgttagaagacacaatcataaggatgacatcaataatgcatagtgaggcaccaacctcgctacatataaaaaggtgatgacgagacatgttgactgatagaacacttagcgtaaaatatacattgtactaactaagtatcacaactggaagaacctaagtgatggatagcgaggcatccatctcgctataggaaggcatactcatggtaccttcactaatcagctccagactcctttcaatgagatccactgctccgtctagtcagctctctcagatagaagctgacattcaaatgattttgactactgaagttcaccttg

SEQ ID NO: 260214 - DNA, 607 bp, Cannabis indica
tgcctttttccactcatattcttttttaataattttaaaactaagcaaacagtacaagagaggactcaagaatcaattccaaccaacaaaccaaaagaacaccgatgaagactaaaaaaaagttgatgatttttggaacacttgtgtgggattttaggaaacaagcctttagaatatggagactaagaaaatacaaaaaaagttgaagagtaggtttttttttttgctcttggtttccttttcttttcttttctttttttttttattttttttcaagaatttcgaaagtctagcttactaatgacacaaagaaaatggaaaacaaagagacaagctttgtgaaacaatttgggaaaccaatgacaaacaaaaataagaaaacaactttgtgacacaaatagggaaactagaattcaacaataaaaaattggatttttttttttaatttttgaatttcaataacaaaaagggaaactgatgacaaagaaaaatttggaaacaagaaatcagccaaaccatcaagaatcttgaattttcaatttttttttttaaattatggatttgaagaagaaaaaaaaataagagaaactgatgacagcaaagacac

SEQ ID NO: 260215 - DNA, 739 bp, Cannabis indica
gagtccaaggctccttgtacaggccttctaggccagtaggagctgcagaatttgttgtctgggcgaggggcatgtcaacattctgaccggaagtagaagtggtctcctcagactcttcataggctgcttgggaagcacaatactaaagatacatgtctttggcatcacccaggtaatcaaaatttgcctgcggattagccttccaaaagtcataaaaaatctcgagaccatttgtctctaaggcattcaccttccctttgagctctctacttcagcgttaagctcctcctccttggacttcttctctgctccaacctgcgcaaaacagttcggagaacctccctttcttcctggaggtttgtcacttctttggacagggaggtcatggcagcctaaagttggtcagaagcctctaaatccttggtcagctcggccaccttcttctcggtagcaagaacctttttgttgacttcacccagttccattcggatggctctgagttgaaccctggcttcatcagcgtccttcctagctaagtccacttccgccctcatggtgttggacatggcagcgttcttggaagctgtagagttagctcgagtataagtgtaagcctccgaccagtctgcacaaagaaaaaatgttagaatctgagccaagtaaagaaggattaaacgaaactatcaagaaaggcttaccctcgtaaactctttcaagaatcctcccatcaacaattcta

SEQ ID NO: 260216 - DNA, 1325 bp, Cannabis indica
ggttgcataagtgcaagaagagtaaatactcaccaagaacattctctgtatttaatacactcataaatacacagactcgtggactaaggctcattaacgccccaaccacgtaaaaatccttctcttaatttcttacagttctctaatcttatattattttattggttgccgaaaaccttggtcaacaggttctaaatcccagctcgcatctatgtgacctgccatatcttccatagtaccgttttactagggcataccacacggacagacaaaaaacaggccaaaagtaaaacatcctgacccaaagggcaggttaaaaaaaaaagagcatatgtataaacatcctgacccaaagagtaggtccaaaaagaaaaaaagagtatatgtatagacatcctgacccaaagggcaggtccaaaaaaaaggaaagatatgtgcatcaaaaaagatcatatatataaaaatcctagccctaagggtaggtcaaaaaaataattgtaaatatatacaaagggcccggggacaggccttaaccattgtttcaccttagaaaataaaacaactgtaaataaagattgtcttaaataaaagagaattggctgtaaataaaaaaaaaaaaagagataagaaaactatgggttgtattcataacggcctagtcaattcgaggaggaaggcgaggaccaatgcgagcctccagcatggcgtcaaacttcttcttcttctcccggaatttagcaatcatctccgtgggtttgggagaagtcgagcttgacgttctggccatttattgaccaggccatataaacgccatcgtcgaagcgcttaatgcaccagctgcaagagatgggagaatggagctcatctctgttagccttcttcaaggcttgatctttaaagtccttgagctccttcagctccacaaccaagtttgccctagactccaagttcgcctggcgcaattcctctaaggatttcaccttggcaacaacctagcccctagcctcccggagctcacgcctagccttggcaacagcctcgccctccgccctcagtgcttcccggtgcttggcttccagcctgtcccattgaaggacctcctctcgcatcatcgtctccgcttgagcctcccattccttagcctcttcctcgaacttggctttagcaagggcctcctgccgcgcggcttcctcctggaacgtccacttttcagcagacaggtcccgtagggtcttcacgacttcgtctatgtccccaaattcagacaagacgaagccgtgattgattaggttcttggaaaggcggccggcctctgcagcaagctg

SEQ ID NO: 260217 - DNA, 853 bp, Cannabis indica
gaagccgtgattaattatgtttttggaaaggcagccgacctctgcagcaaactggaaaaggaagcaagaatgagtaaaggcctctaagtaaaataatgagaaaagaagtaaatcacaaaatacttaccgcggccaaggagtggctgagatcctcagcttgaaagacggagttcaaggatgcacaagtagtgtactgcttaggcgcacaccgggttagctgagagacgtactcaccgatcatctccgcggcaaaaggagccaaggtaggaccgaggaaacgaatgaaccagtccgtcagggggtctaggtttagatcccatgggttctggtagttctccttgttaagggaattttgcatatcctctcgcaaaaccctcctcaaggcctccacctcagcatgcccccaggagtactcgtcaagggaattattgtacttggctatccgaagctcctgcctcgcctcatctccgagaaccggagtcagcacaatgctaggaggcactgtaaattcctccgcctcgggagggatcccggaatcgtggctcggggccggagtgtccaccctccgcggccgtttaggtgtctcctcagctaccatcttgcctttgcgcttgcgcaccagagcaacctcttgctcttcttcactttcttcaacttccccaggaagagcccattgctcttcttgaccttctttagcttcctcaggaagtacctcctcctcatccactaagtcaatagtgtttggaggggcactggaagaagctttcacgggggtgaccatctgggaagaagttggaggaagggaagcatcaggactgtaggctccgccaagggtggccaagatcgcctccat

SEQ ID NO: 260218 - DNA, 520 bp, Cannabis indica
ccaataattttaatttaatttttgaagttacttgtttacaaataaaataatgttttaaaatatttttgtttaagaataatttagatttttaaagtaatttaatatttttatcagattttttagtaatttttatatacttttttaagagttaatataacaatataatttttaaaattaattttttcaataataagtgccaaaaatttgtattggtcaaagtttaaagggtaaaaatattaatttttaacggtaaaagaatagaatttaatagaagaggcataattatgtaactgtgatattttaagaagaatttttcacaagctgtattttttaaggagcagaatcaggtagtgtcgaaaatttaagggcgaaaatactaattattctatttatatttttatatatgcaataattcagagtatttaatgtaatttagatatagcattaagtaacacttctgttttttaaatttgtaaaccatacgagtgatatataaattttttgttttatttttattttt

SEQ ID NO: 260219 - DNA, 590 bp, Cannabis indica
ggatttgaggtaagattagtataacaatatgcatatatatatgttggcttcgtaccatccgaccatatcatatcggttaggctagagtatgactagcaactgaagtatgaccaatataccgtggttggtggtacagtgctatgtgaccgtatcacatcagttaggctagagtatgactagcagctggagtatgaccagtgaaccgagtataggctgatactgtaacacatcggtacgggctagagtatgactagcagctggagtatgaccagtgtaccgagtataggctgttacttgtcaatagtaccgtcttatgaacgttcgggactcagtatcgtgtgggacacggcagttagggttatggtcaggggtatgggcgtctgatcataacccgggatttatgtatgattatgatttatgcatttcttactgagtctgtcgaaagagaatgctcaggtttttctctgattgaaaagtgtaattttcctgaagccttcactatctatttatagcattccactagggttaggtatgaattatttggcattaaaattatgaaaatatcagatgataaagccttttaaattggc

SEQ ID NO: 260220 - DNA, 847 bp, Cannabis indica
tttaaattagtaaaaataaaaaaaaaaaccttaaattttttttcctaacaaaattttatataaaattttattttttatttctttgtcataattattaaaatatattttataggtatattttttaaaaatataacaagaaaaaaaaataaaaaaacttatacaaattaagaatatatataataaaaattattaaaataagctctattataattgtatatagtggaaataaaactccagacaacaaacaacggttattttatccaattactaaaactagattatgagattaagatttaataattactaagtctaatataaattctacaaattacttgcatatgaataatctgggacaaaacatacacaaatttcaaagagtggtatagttgattttaattatactaaatggtatatattactaaggtaggtgggtagtgtgaatcttcccttatgttcaaccatgaaagaaaaatatattaacatgatagtgatagaacttagaaggtacataaatgatcaacaaaaccaacctagaatgctacatattactttcttcttggaagattttggtaacaacacaaatactaagtaaagtttttttttattttattttttaatagagttcaatcctcaagagtattcaaatataaaaaatagtgttcacctatgcaacaataatgaaagactttaagaaaataagtgaggaggaaatatgcaacaaattattagagtatataagttggttattaattttaacttgaaatataattcactttattttatttatacagtataaaattataggtggttattttaaagagaatgagaactaattagatgatattga

SEQ ID NO: 260221 - DNA, 496 bp, Cannabis indica
gcacatatgggcacaaaatcggctgcctataaatttattacacttgctagtcattgggcggacagtgaggagggcagttgttttcccttaaaaaaaaaatgtatatatattttagttagttttaaatttataatatatatatagtttttataaaatatgaaatttatagatataatattagttttggtgtaattgttaagatagattgcatatatataatagaggtttaaatttaagccaagaccaatacaagcttcttctataggatcatagagtcgtcaataagaactgcaaatacgatcacttcccattaatagctagagaagtaaagtgatcacttccccatcactaccctattaagatgaaagaaatgaatgaatttaagaagcctttgcctagtttgttcttccaagagtattttttttttttaaagttttcttcttctcacttttaaatcttgaattcatccttggtcattagctttctctctctctct

SEQ ID NO: 260222 - DNA, 749 bp, Cannabis indica
tcattattaagcacaaatggttcatctgttcttagaacataaaacccctttccatagatgcaacgcaaatttgaatgtcatttcgagaaatgataaaaccggaactcaaaaaattcaatttgtattgttgcaactgtaaacatgaaacagaaatcaagtttcttgtgaaatttgaaataaataagacattgtctaaatcaaaaattctgttctgaaacttgagtttgactttttctctagctctaatcgataccatttcgccattacaaactttaagttttgactctccgattttaaataattccagttttcaagcaattgcaatgagcaatagacatggttagtagatccagaatcaagaatccatatggatttatcattctctaaaacacatgattcaaaaactaaagcattggatttaatatgactgcttaactgtttttggtttgttcttattgctggttcaatctgttgtgaaagattgcaatatcccaataagtctaatagtaaataattaaggtttatatttatattatgagttaatcaggtaataagtgggattatgatcctacaaatttatttcagcataaaatttaaattttgctataagtgagtaaataagcgtaatttgtaaattacagagatttatatagcattcgtgaatgtaatatgagctatatgtggaacaaaaatattttcaagtttggggaccccgaagactcgactagtggatacataagcgtaatttg

SEQ ID NO: 260223 - DNA, 548 bp, Cannabis indica
ttatttacatttacagtccttttacccctccctaagagaatttatattttttcttaagaggagacaatttaaggcccgtccccaggcccttaatattttttagagctttttgctgggtttgaccactttatatttagccttaaatacatactttactttttaacttcgttaaaattttggcatgttttacatttgtccgcgtggtatgccttactaccacttgagtgtcatgaaaattatttttagggcactcagctttacaaatattaatttacaggttacacatacttgtccggtactgttttactttacagagcataagtttatattttttgactattggtaatactttcggaggtgaccagcattccaggccctaggcaccatggttccgtccattcttttgagcttgtaagtcccagagctgattttttcctccatttcatatagtcctttccaattaggtccaagtgcccccactccgggttcctgagtggctaggaagacccgtcttaggaccagatcaccaatagtaaattttctatttt

SEQ ID NO: 260224 - DNA, 497 bp, Cannabis indica
tgtaggctacttgccctatcctctcaaggatttcaaaaggtccaatgaaccgcgggctaagctttccttaccaaaccgtttaatgcctttcatcggagatattcggagaaataccatgtcccagacctggaaatcaatatcccgacgctttggatcagcataactcttctatctactctgagccacaagcattcacgctcttattttgtcaaatgcgtcactcgttctctgaacagccttgggacccaagaactttctttcacccacttcatcctagtgaataggtgatctacatttccttccatataaaagctcgtaaggtgccatcctgattgttgcctgatagctgttgttataagagaactcgatcaggggaaggtactttatccatgatccttcaaagtcaagcacacatgcagtagcatgtcccgtggttctaggcaaacctaccacgaagtccatagcaatatctgttggaatttattttaccaggatct

SEQ ID NO: 260225 - DNA, 551 bp, Cannabis indica
gaagatgctgtcaaaatcaggtttctgcacaacgacctgttttccatagatgtccagatagcaaactaagatcgtggccagaacaaccagaaccatgatagataactggagcctcttccatcatcgttatttaagaccgcctactgaaaagatggggctccatctcaaagatctaaaccccctgtctcctgcctgtatatggtttctctagccaaggagtcgcacctctagggcaaatttgcctacccctcactgttggacaagctcctatgagcataactataatggcacaatttctggtattggacgttccatcagcctttaacgtaatgctaggctgaccagccttgtatgacttaaaggctattacatcgatattccattcatgcctgaagtttccaacaaagaatggggtagggtgtctgagaggaaaccaacagattgctcgggaatgttataaccttgcagtggccaaggctaagaaagaagtatcctccagccagagcacagacaagggaaaaaacatttcaaagtagggaacttcccaaggc

SEQ ID NO: 260226 - DNA, 713 bp, Cannabis indica
aaattaaaaaaaaaaaaagaaatcactctaagtaagcttaaatttcaggtgaattgttgaatatataccactctacttgttcacgagtagcacgatcaagaggccggagattggcttttgtaatgggtcgacattgagattgaaacacaaaaagctttcgtgggacaacctcatcttcattgcgatcaagacggttaaaccttgtttcaacccccttaaaatacattgaacaaaatgtcaaagcctcatctacaacgtacctttccgctatcgacccttcaggacgtgctttatttcctacgtagttcttcaattttttcatgtacctttcaaatggatgcatccacctcataaaaagaagtccacccaaaattgcttcttcaggcaaatgaaggaccaaatgaatcattatgtcaaaaaatactggaggaaatatcgactccattttacacaagattaaaataaggtcttgttgagaaacctccatgtctttaacatttatagtccttgaacaaatttgcctgaaaaagttgcacagttcagaaatggtggtcgatatagcgttcgggagaaacttgcgaacactaacagaaagtaattgcattattacatggcagtcgtgtgacttcaatccgatgacatttgttaaattttcatttactttctttttcaaattcgaacaaagccatagggaaatttcacatctttaataa

SEQ ID NO: 260227 - DNA, 691 bp, Cannabis indica
gcatgatatataatctgatagtgatccgatgatgggtctgataatagtccgatagtgtacttaaaatttatgtcatagaaagaaagagagaaagagtgaatggggttgtctgatataagagaaataaattggggagatatgagaaatagacttacattaccaatagtgatttaactttagtttagatttgttttattttttacctaatataagaatgttttatcgaatttcccttataaatattattttattaaattaagtttcaaattttaggatggattttttaaagcaattaccaaattcattgataaaataaaaatgttacttaatttattcatgagaaaaacatttacaactaatctattgtagtcacttaattggtcatctaatgtaagaacactccttaaaatcaaataatcatttgatcacatctttcaatagtgaattaatattcatgatagtttaaaatgtattgcattggtcttaatgaagaaaacctataaattgagaatgtcattctctaggaaaatcaaatgactttattcgataactcaaattaataaccgtactcctctaactatatagcctattagatttgtatggttgcttgtaatccttggactactgttggacaacctggccggttgctaagctgtaagatgaaatgggtcaataaaaaaaaaaaaaaaaa

SEQ ID NO: 260228 - DNA, 1645 bp, Cannabis indica
aattgttcatccatggctgctgcctttttttttttacaactatcaagtttctagtatttaaagacaagaaagaaaagaaaaagaatatagaagaaaaaggcaaagaaatgcaaacacaaaagcttgtatccttctttttttcttgcacttgggtccccctctctttcctttctctctgtactttctgcaattaaattccctttaaaaatggcagatgccatcatcctcatgaagaaggtgtgtttagatgtgtttttgttgttgggtaaatagggttcaaaaatggcaccctaaaaatagaaacctaatcctttctaattttagcccactaggtttagtcttcttccttccacagcagccagctggcatactttgagtggttggtacataattgctgatgtaaataagtggaatttgtttttaagactttttccacgtcactgcccagaatgctatagcattgctttagcatttccttccagttttcagcttttgttccaacttttcttttgcatcatttctttcttcctaacaagttaattcttctttcccacaacaaacaagcaacatttaattaaaaaaatacaattaaaataataatttttacaagactcaaaagttagcttattaaatagaaattaaactaaaactacttaaaattaagtaaccaaacacattttcactactctcctcacaataatttcagtttaaaagcataagaaataactctataccataaagttatcactccaacactagacgactctgctcagccttaactgctctaaacttgtccttactttatttttgttttatttggagaacaagggttcccctttttgaatgtacagagacaatttatacccttgtcgcggggctttcttagtacttggtaccacttgctaactcattagatattgcattttatatcgtagaaattactaagtcttctgtgcttccagcctcatgaggttctggttccaaaggcctgaacctttaattttttcgactagatacttagacttaaatatatatgttttgtgaaaaaatgcttttgtagaagggtttatttgaaattctgaataattaattaatctgaactaattaattttatgagaatttatcctttcttgacattcataacttatctccagggtttcttcaaattcagctctttaattgacctaaatcaatctatttaagtaacctgaatgttgtggtatcgttaacgtgaattaaccattaggcctgaacttttattttaagttaacctaggttagccattttaattccaaataagctaaagcgataacttacttttggttccctgaggctctaatttttaagtcatattcccttttctcacatttgattaagttttaaataatcttcaaatataataaggcagtggcttactttcagtttcttgaggctctgatttcaagtagagcttcatactcttatatttgagcatttaacttagctattttctagtagaaagagaatataaatattttgcatggagtgattaatagtcgagaattttgatcacttgttatatgatagagcttttaaagaccaaatataaaacgaaaatcttctttttatttaaatggttattgtcctaaggtgtacatagaaatta

SEQ ID NO: 260229 - DNA, 984 bp, Cannabis indica
aacgctcgtcgttgtcgttttgttacttgttctttgtttgtttgtgtcgtttttgggttgttgaagagttgaaggtggaggagaaaatacatatataatgttactcaatttaaatatttatggcacaaatttataaattacattacaaaatatttatttatttatttgaaaaatacatttgtaaataaaataaaattgaagttaaattttatggtcattacaaaagatattaacaggtatagtagatatctctaccatgctcgtaacattgttggcagatgcccatttggccacattatgggccgtgtagttacagtttatagttatacaagaaaaattataattagtcataaaagtagagaggagcttgcaatgacacacatagttctcaatccctcaaatagagtcatccccttttaggttcttgataataatctctgaatcactctccactaaaacaaaatgatgatgtaatgagaccgccgtctccatggctaaaagacaggctgcagcttttctagtgagtgggtcagtaaagtgtaatctttttgccaccacccacaaaactgattcattatggtctctcgcaatcgccacaacacataatctcacatccgactttgacatcgcaattgattttaatccaattttccggaggcaaagactaagcctgagtcccaacagactgtggaggggaaagaaggcaggagctatagtctgtgtaacaagataaaatagagtcaatatagtgtttatgttacccattgatttattatgtaccttgttgttgcgggccctctaaatcgtatctaccttaatcgatgcatataggaacaactcatcagtattaactcctctggatttaagattccatagaaaggtaacccaatcccacattcgggctcttgaatctagcacaagcataaccccccaaggagaagatcgccaaaggtggaaggcaaagttgcaatacaggaacaagtg

SEQ ID NO: 260230 - DNA, 1672 bp, Cannabis indica
acaaggtctgatctccacaggatatgtgaagaccggagaacaactaggagatatttttacaaaggctttgaatggggtgagggttgattatctttgtaacaagctgggcatgattaacatctatgctctagcttgagggggagtgttagatattagttgtatattagctgtaaaagaattagatatttagtagatatttagtctcctagctttgtatataaatatgtactattctatgaaatatacacataattcgaatcactattttctacagtttgaaattgctgaatctttgctccacttgaagataactagatcactcccctcaggttttgtcttgtttggttctatgaattaaggtggaatttgttgtttggtaattcatagaacaaacacaataaaaatataacagttttttttaactaacatatgttaagttagttaaatgctattgattcagtaatgttggttgaaatgttgtagaattctatttagttagttaagtgcatttggttgatagtttgagtctttcattgcctatttaaaggctttagtcattcttgtaatgcatcatacgattcatattgaattgagagatagtgagatcgagtaggagagagataaagaaagaaaaacagagtgaagagaagttgggaaaactggaccaagactagtgttcttgaagtcaaaactcgagctgagttttaggaatttcacctgtaattattttttagggtgcacttaacaactcaagcttgtaagtgggagagagataaagaaagagagaaaaacagagtaaagagaagttgggaaaactaaaccaagagcagtgtttttggagtcgaaactcgagctgagttttagaaatttcatctgtaattgttttctagggtgcacttaacaactcaagtttgtaattcatcacattaatagagaaaaatctcaagggagtaataagaagtaggtcctttaatttggtcgaacttctataaaaattctgtgttcttttactatattttttctttcatttttttatctaattaatttttctggtttgattacttatttatttgctgatgttgttgcgattggttttgatctatttgaatgttatgtggttcgaaatatgtgttgtaaaattacaataataataattagctaagagataaagtatgttagaaagaataaaatttttagtaatgatttcttcgtttttagttaatccaaaaaaaaaaaaaatgatttctccattttgtctacattggtttaggatttgaaaaactgttttgtgttttgaaatattaaaatggtgggggttcacctaagagttcttaattggttaagtgttttctaaaaacaaaatttagaatagtattttgagttttaggctaaaaataaaaacaccatttttatgttttttatgttttcagatcatggaatccgaaaagagcattgatattaagcaccagtggtgcctaacactttctcgacatttcgcgttgcgattgactagcgatactctctaaaagctattatattaaactctatgggactcgatacttagttggaccaatagcgatattgacacataagatggtgttaggcaccattggtgccctttagcatttctcatccaaaaactctcaaattattctcttatttttttagtttg

SEQ ID NO: 260231 - DNA, 792 bp, Cannabis indica
ggggcaaaatggtcatttttccccattgttagtttgtcctttagtggactttatttggttaaattaaatgttatttgatgttaatattggctgaagtaaaaagcgagttatgttgaatttattttcatttttccaaacttagaaaaaaattagaaaattttcaaaaagctctctctcttttcctctctcttttggcctccttgtgcggcaaggattcttgccattcttctttgatttcggcctccttgttgttggtatgtttcctctagcttccttttaagttttcttgaagaattttgatgtaaaatggtgtaatgcatgtttagtttaggttgttgttgttgttgtgattttgttgttgtttgcagagatttacacatgtttatttgagttgaattaagctgcttgtgatgcatgatagttaggttgatttgagttaaggaatttttagttcaaaagcttaagttttcaaagaaaaattggaaatttgttgctgtgattattgcatgagcttgtatttgttttttgcagctttagtaagcatgtttaagtagttttggtatgatttgaatgcatgataggttgcttagtcaagttttgagttttagaactcaatcttgaacctttaatggtgaaatgagtttctgtggttgaagctcggttttgttgctttagaaatgttctatgggatgtttagaacaggtctggaaggttttgtgtgatttggatttgatttgaaagagttatgaatttttgagttctgcctgcgaggaaccggaattccagttgtgc

SEQ ID NO: 260232 - DNA, 686 bp, Cannabis indica
acttaacatagtcttatctaattctctcaattaaaattaataataaaataattatatatagtaattttctttaaaaaactttataaatatctaaactaagtttcaaaaatattaaaaattaaaaaatctatctatttatatatctatatacaattaaaaatcactcaacatagtatggactaattctctaaattaaaattaataaaaaaaatatttatatacaattttaaatcaaaactattaaaactaacactaaatttaattgtatcttaaatcaaagcttattaatcgtgtaatttaagaatttaaaaaataataaaaaacctaaaatatctatataaaaatcaattaagaaaatatcaatatatatagtctaaatttgttgcctacaattttaaaaattttggtactatattctcatagttttttccatttacaattatatgatgagttttatttatttttatcagttattttggtagatctctattttgaggtattatattctcacatttcttttcgtttataattatgtagtgagttttattcaattttatcaattatttttgttagatctctgttaggtctatttttagtcctatgttttggatctaatttatgtgcgtttttcgctgtgttgggacggaatttacgcttgttttcttatgttttctacgttctttggt

SEQ ID NO: 260233 - DNA, 789 bp, Cannabis indica
taagttccacaaataaaatttcactaaatcaatccccagcaatgacgccaaaagcttgttgtgaaaattatatacgcaagtgcacgcaatcgtcaacaagtaataaagtgataaatcgagtatcgttccacagggattgaaaattaaaattaatttacaaaactaattactgacaaattggtttcaataaaataaaataaagtgatgaaatatgtaaaaagttaacaaacacaaactataagaaaacaagctagaattattaaattggtctaaaaatgcaaagtgatgagaatatttcgcctctttttttgtcaattcacgcctgcttgctcttttatcatatatatcaaatgccaataagcacatcaattatgccaaacccttttgccaaagaaaaataatgatcagcccattcttttcatttgtctttttttttttttttttttagtactttagggttgaagtggtgatggtggtggttggtattgtgtactatttttttttaggtgatttgcagaagagaatgggagtactgagaaagaagttttagactttagtgagaagtgaaagaagaaaggaaaaagtgaaaagaaaaaaaggaaataatattttaaaatttattataatttatttgtttatatttttaattatttttttatttcgttaaattttttatacttaaataattaatcttatgtgcactgttaaaagtttcacatgtgtaagtttttgtacatattatcgtccacatagcccttaacagctgatatgaatacatatttgggttgc

SEQ ID NO: 260234 - DNA, 1386 bp, Cannabis indica
ttcgttgaaattggcaaattgcaccctatagcgctgctatgagaagaaagtttatgcagaaataatgatcccaaattcaagaggaaaatcaggtttcccagcagccaagcaagaagctgcaggggacggtggtgaggatgaaagcggcgtcggcgggggcggtcacaggagcggcagtgagaggctatttaagataccgacaagcagtagtacaacaggtaatagctcgagacaatggtcatcggcagggttccgcaacccaagaattgtgcgagtttcacgcacctttggcgggaaagacaggcacagcaaggtatgcacggtaaggggtttgagggacaggaggattcggctttcggtcccaacagccgttcagttatacgatctacaagacagattggggttaagccagcctagtaaggtaatagattggctaattgaagccactaaaaacgacattgacaaactccctccactccaaatccctcaaggttcactacttctaagccaatttcatcaccatcataatcatcatgaaacgacaacaacagcaaatcatccagctatgatgtttgaaaacaaagatcggcatcatcatgaccaagatggggggatcacccaactctttgctcagaagttctttcccttatcatcaagtagtaacaatcttagtcttaattctactactcatcctttacagaacggaactatgtcctttgaaccttccaatagtaacaacaacaatctattatcactttctcatccttttggaagtatcaacagtagccaagggttttcgttaccccaaatggatagtagtagtaatactactgggtctcacttatttttctgctctcctccaaatatttcaaacccttatatctttaatccatatcctccaccaatatataatagtgcttctagtggaatcccagttcaagattttcatcaccaatatcatactactacttcttattataactctctcatgccttcactacttcacaacagtactagtactagtagtagtactgctactaataataatattaataatttatctttcagaccatcatttcatccggccatgtttaaccctaaacttccttcccaaagtgctctattccaaaatcgaccagatgaaaaggaggatcgtatgtagcttgatttagcaaattacataaataatcgtaaatatagagatgtacagtgggaatgcataaactatatatgtatgtatgtgtatcttcgcatctcatttatgatcatgatcaatattgtatatgtgcaaatcaaggggggtgtttcctacttcagttatacgtccgtacgtatcttcgaactgttcttcagtctgtacaagtaaggcatatatatatatatata

SEQ ID NO: 260235 - DNA, 1498 bp, Cannabis indica
aaatctaatttcattggctgttttatcactcgaggtggataacccttggcattcaattcattgtctgaatgccaaccatttccatgtgcactagattcggcttcctcaaggctatgactatggccattgtccccttcttcattgtctgaaaagctatttgtggtttcagctgtatcttgcctagaactatgtttgctcgcctcctctgaactccatgacaaattacgagtggggattgaagacagtgcttcaaaagggggtgaagtgggaccaacaactttacgcattaggccatctgaaacccctttaaactggcgtacaatatcatcaacagcatcatccacatttactgttcaattaaaaggagaatattaaacaatttgaacatagcataaaaagaaaatctctacattccaaaaagcagtaagaagttgaaaatgcaagacaagataatattcaaagaattaggcatatataaaagtattgattaaacataatcgaaggaaataaaaaaggaagattaagacatttctcaaaatcagagtaacaattttctaacttgcgcagtccatgttcatgaatatgtcagtgtcatatggttgccagaaacatagtaacttcccagcaacataagcatgaataaaagtgaatacgtctgcaaaaaattggatgctacatcaaaaagaagtaagagacaaagaagacatatgtacctgctaaggttctcatcactgaggaagattttccaaacgagtaattcttcagaaaacataagagaaaatagtaagaataagataatttcaacttttacaataaaaacaattagatgaggagtcttcacaaaacactacatagatttcaataatatctgacaaccatcttccgtacatttgaatcctaagaaaataatttactatataaagcgtgttgtgcatgaaattgaaggcgtattggtactattaatatttgttttaccacattacttgttttttttttcagcatcagggtttgttactatggagttgaccatctttttctaacataaataaacattttaataataatcttgcacaagtcattaaatacacaattgtggtggtgccaactctaccatgcgtgtatatggtatgtttgagaaatactataaaaaggaagaggaatcaattaacatagacccaataaaatcttcaggaatgagtaactcttgcaattctcaaaatttcattcagagaacccttttcctctatggaaggcccaaaatttagaattaaatctaatgttgagcttctatttctttggtgcacatactagtactacttcaccatctgcaggatttttcattttatggtttgctctatcctttgaaagaaaaaggaaaattggactctccactctctactcactcaactacaattctatcttctcgatgtcttaacaaagaaatgatcctcagaaaaagcaattcaacttgtagtaaagaacatagtaggctctgaca

SEQ ID NO: 260236 - DNA, 704 bp, Cannabis indica
ccacgtcaccagagaaagtttttgagttaacatttataataaaaaaatgtgtaaaaaatttctataaataaaaaaattgtgtagaaaagactctttataaataaaaatctatttataaaataaatacaaaattttcaaatatacaaatcgacacaaataagctttttatagctaatataccaatcaaatatttaataataataaacaatttttttatatatataaaatttggattgagaatgtatggatgatttcaatgcttgagaatttcctctaatactattttgttttatggtttgaagtttttaatcctgtattaatgttcagtgagcaataaatttttcgctaaattagcaaaacaaattttgtaaaaattaaaaattcattataaataaataaaactttttataaataaaaaaaattgtttaaaaaaattctatcgataaacaaaagtgtttataaataaaaaaaaaattgtgtaaaaagaatgtttgggagaaaaatcagcaagcccaaattattattaaaaaggcccaaaagttacaaaatgcccattctaaaaaaaaaaactatataagatgtattctagataaaataagcatataggtaggagagttaaatactagatagataacatatctcagtcgacgggcgtatatcgggcgacatgcctgtctcggtcggtgttacgaaaattctgttta

SEQ ID NO: 260237 - DNA, 648 bp, Cannabis indica
gaggacggagtggtggtcggactttttttttggggaaaaaatagatgaaaaaagagagattgagtgggaaagagagattttgagaaaaattaagagagattgagagagtttgatagagattgagagggaaaggagagagagaacgagagagaactagagagaacgagagagagggggcggctggaggctctgaaaatgaaagtggggaagaaagggggcttcgtgccccctgatacatattattacttttaccggcgcatccaattgcgccggtaaaagtgttttaaaaaatttactctgacctaggagtgaaacgcgcgtttcactaacacttttgccggcgcataattgcgccggtaaaagtgtccccacctaccaaataaaacccacgcgggaattttccctccaacttttttcagccttttgccggcgcatatatgcgccggtaaaagtagaaaagcgccccaaaaatgaaatcaaaggcggcaaattctcgcgcctaatggtgttacgttttaccggcgcatttaacttgactacgccggcattgctatgttttaccggcgcacaaatgcgccggcaaaagtaaacccaaaataaatttggaattccacaattttggtagtctcgacaacttttaccggcgca

SEQ ID NO: 260238 - DNA, 2874 bp, Cannabis indica
aaaaatttgtacaaacaccattaaaatttaaaaatgacaaaaaaactgttttttattctcacttttaaaaacacaattttaaaaactgaaaactgaaaatacagccaaacaagctctaaatatttaagagatgtttaatatgtgaaatttcttttattattattattatagtacataatttataaatcaattaaagaaatattcccttcaggctttaattgatttataaaagaaatatttatgtactaaaatgaataataataataataataataataataattttttcgttgtatttgttttctctactattgttgttggtctttgctagatttaatattttgtaggtggtttggaattatccctcaaatgttgccataatactattcccttagaaaaaattagtcagtgtgtagacagtttcatcaacaactgtagatcagtccgtaccaaacagggaaaaacaaaaacaggttgagaccattaaaaggcaattaattaagatttaccttgataaagtagaaaagaaataaagtaacctcatccaatagtggtagctgacccatatgacaaagggggaatgatatcatagcaatttgcgtaaaataaaccagaggacaaatttgtaatctccaactcctgctgcaaatctgaggaactaaaatatggtgtgacagaagtggacacaataccattgcatctattacagcacaagtctccatcactcaaaagtgagctgagttcacaatatacctccgaaacctatgatccaacagaacaaccagccagagaatcttgagtcaatctctcgtaagtgtacaaaaatatataaataaatgaacaaatgaaattctcttacatccttataagtctagaaattcttcataactcataagcaaacatattgagaaagtcaagggacctcacttcttaccaggaacaaacaagtgtcacagaatttccagcgacaattatattttatgtaattatattattacgcacatcatctaatagaaaaaaattctaaacacagaagaatagacataaccaaggatcaggaaatcaactcatttattaacccaattaaaaaagatgtacttcagaggactgtcttgctcagatattatataactagaaagagtaagatttttccatgacttgtgctagaaagaaacatttcaagggatgaagaagctcaccaccacacaatcaccagaaatatcaacacaatcatcagtttcatcaaaaaagaacataatcatcagcataaatgaatcctaactaaattaaaatttaccagagtaccaagttatctaaattgatacagagaaagtaatcattattctctagaatgccaaattgaacattgcaaaatgatctaaggctttcactatgtacaaacgcccttcaagtataggaaacaggttaaatttaacatgaagtagcagcagtaattattaagtttagaaacaaacaagatctaacatgtctcatcatcatcatggcccatttcccgatactttcagggtcagccacataaattttacgtctccaagcaatgtgattttctcataagctctcatgtaaacccctaggaactcttccttcacaaccaccaccaccacctcaccggaaaaataaaatatttttcatcataataataagttcaaattctaatgcacgaagacttaatacactcataacttaattctgccaagaaaatccttcgtcacaatattttgtcttacatgatcaggcaccaagcctttctcaatcatttctttactaaacttgagagcaatgtctgtttggtcaatcatcatataggcttcaaccatggtgcaataggagttaaaatctggcagaacacctttcaataacatttgtcgaaacatctcttcagccttgtctaccttttgtagcaaacaatacccttcgagcattttattataagttatggtattaggtttctcaccatggtaaatcatttcatcaaatatcttctgagccttgtccatcatacctcttttggagtaagcatctatgagaacggtgatagttataatgttagggtggatattctcactcagcatgttctcaaacaccctgccgatttcttccaagctacctgaatgactcaatccgctaagtaaagaagtgtaagtgataatatttggttttaaattccaccgagtcattaaatcaaacacatcaaaagcttctttcatatttccatctttgcaaagagcatctatgagaacattgaatgtcacaagatttggcctaacatcttgttccttcattttagctaacaacatgaaggcttccccccattcacccgaatcacacaatccatgaagtaaagaggtataagcaatgacatcaggcttaagacctctattagtcattacttccattagatcaaaggatttctttgttttcccttccttagatagagcagtaatgagtgaagtatatatgacaacattaggctccacacctttatcagtcatcgattcaaacaataaaattgctttttgaggtttctcttgtttgcaaagggaatcaattacaatactataagtatatacatcaagtgaaattccagactcagtcatgttaattaagagtctattggcttcttcccaattaccaaatttgcataatccatgaatcaaagaagtataagttacaacattcggaggaaacccacaactgatcatttcttggataggctcatcgccttatctatatcaccatctctacaaagactattaatgatgggattgaaacattcacagtgggactaagcttctgatgtagtaaatttgcctaagcaccttaattgccttgttagtttctccggctttacag

SEQ ID NO: 260239 - DNA, 529 bp, Cannabis indica
ataacaccttctgatgttccatcctattctactttagtagaggataatcccactccctcagtcaaaacaactgagagaactaccactaatgttcctgttcagaagatcaccgctccttgtcgtagtcggagggtttctactaaaccatctctttatggcttggatggtgaaatcaatatggtcattggtgacggtattgaaaacgacccattaacctataaacaggcaatggaaagtccagaacggaatcgatggtcagccgacatggattcaaaaatggattccatgaaaaagaacaaaatctgggaatatatagacgcagttggaatcatgagcaggtatcagacgaatccaggacaggaacattggaatgttgttaagcatatcttgaagtacttgaagagtacaaggcaatttgtgttcgtctacaagggtggtgctttaaatcccgtaggctataccgatttagatttccaggcatgtcttgatgacaagaaatctacatctgggaaggtgtttactcttgggg

SEQ ID NO: 260240 - DNA, 935 bp, Cannabis indica
tgtaactgcgtgtggtcttggccatcttccgccgaaagtttttttaatttattaaacttatcgaggatgttgtcgtttaaattttctattacttttccctaagtggtaatactttattttcaactgggtacccatgttttgaaaattgttatttttttataaaggcaacattagtatcttaacgccagtttatttatggcatcttattttacgtaagtaagggcgttacaagcagctagttgttggggatcttcggcagagggcacgaaggtaaaatggaggaagtggttgtggtgagttgggctatttggcacgcgcggaatgaatttgtttggcgaaagaagagttggtctgcatcaaatattgttgcatcagctaggaacatgcttgatcagtataaattttctcaaggaaggaagggtctttcgttatctccgctgcatgatggggatgaaatcttgagcattggattgcacctgagttaaataagatcaaaattaatgttgatggggctttatttgaacaagaggggcgctttggcatggattgtgtagctcggaatcatcatggtgttatagtagaagcattcaagaaggggaagattggttgtgttcaacccgaaattgctgagataataggcattaaataagctttgagttggattgcaactcattcgtgggatatagtcatattagaaacagatagcttggtgtgtgtccaagcgattcatagcggtatttttatgccttcacagtttggtcttattgttcaagatgttcgaaatttgctcttggctttatcttttgttgagttgtgttttgtaaaacgatctgtaaataagttggctcattgcttggcaagagactcttatttctctacaggtcgtgtgcttcaactggaggactgttcctgtaaagtgcgttctattgttttga

SEQ ID NO: 260241 - DNA, 633 bp, Cannabis indica
gtgtggattgcgggctgggaattcttcttgatttttcaagcattattcatccaatctaagtgttgttcaagtgcttggtaagatccttgtggcttctcttttagatttcttggttttttagaaagttgagtgttgcatgcttgagagtttgtggctgtggttattgtttgtgatttcttttgatttctgaagcttaattatgatttaaaatgttgattcaagcatgattgtgttggtgattagttggttttatcaaaatatggaattcttactcaaaactatagttttcaaagaaaaatgatggaatctgttgctccagttgttgttgatgcttgctgtagttttcagaggttattatatgcctatttaggaagatttgagctggtttgaatgcatgttattgatgtttaaccaagtttgagttttgaactcaaagcttggagctttaatggtgatttttgattctgtgttttctgggttgtgttattgctttagagatgttctttggggtatttagaacaggtctggaaggtttggtttaaattgggtttgatttgagggagttatgaatttttgtttgaatcctgcgaggaaccggaattccggaagaggttcaggaatttccagaaccag

SEQ ID NO: 260242 - DNA, 636 bp, Cannabis indica
attatattagtttatttaaatatcatttataggaagttaaggtggcgtttggttggaggtaataaaatagaaaagaaacaattttcaatccattcctttgtttggttgtattttaaagtattggaatattattccaatggaatggcctttccaccattttggtgtaatgactattctattttaaaatggaaggaaagactattacaatacaagatttgaaaaaattaaataatttttttatcaatttttgtatgcattttaaattttattccattccattcctattccaattctcattctcattcccattcctatattttcattcctcccaaccaaacaccacctaagtgttttaaggataaaatacattgagggtgaaacggtaaatttgtccctactcagtgtaaatcgtctatagaggatctttcattattaggattagaacgatggttaaatttttttagcgtatctatatcgtggaacatatagagcattctatataattgagagtgcaattctaaatctatagtgatgcaaggaggaattaataagttagagaattcatttggtaaattttagatctgcttattggaagctcagttatataggcccatgttcctcatactagttgagaca

SEQ ID NO: 260243 - DNA, 966 bp, Cannabis indica
gagtcaatcttattcagactttcctgatacagaactagggtgctttcacaaacagtgtattcttctttttctcttaaagtttttcttccttttctgtatattctacccctatttttaataacataggtttgtagttaattacatttgatttcaaatcatctaacgatatgtcctgaaattgtgggctcaatttatgcctcacgtaaataaataaagttattaattgaaaatcacacagctgtgatttatatcgtgttgaaggaagtcaacgttgatgtggattaggacacgctacagagtgtacctcgctgagatgtctcgccttgtgtatagacgaaggacttagcgtacacactttctagtactggcatgagcactatgtactaagcaaacttaagaaccgctctttgaccataagccttacagactggacaatcatgtcctgggagttctcaatagcaacaataaccctggcagcgagctggagtttaccaagagtatgtcttcctatagcgagatggatatctcgttattcgttatctatgcccttctagctattacacttagttagtataatgtatataatacgctaagcgttttaacagccaactcgcctcgtcagtgtctctttacatatcgcaaagtagatgcctcgctatgtattttcaacatcttccttggtattaaccttcagacacgaaatggtttctcgttaatacttaagtcaatagtttgtacatccttgtcttgctagggactgtgcagtctgtgagttataagtataccctattgacttatgcatttaatgagttatttcatttaattatttaataacataattttctttatatttgacggttcatattccctgatattgacatgtgtcaccttttgaagtaccagccgaatttcgagtataataacttagctacctataaatgatattttagttgtaacgtccccgct

SEQ ID NO: 260244 - DNA, 1730 bp, Cannabis indica
ttacttatcgtttgctttatcgggcaacgatagtgacatacgcagctcatggataacgagtggtgaggattggaaacagtcattagcattatgagtattactcctgaaactgctgataagtttcttacttatcgttttctttatcgagcaacaatagtgacatacgtagctcgtggttaacgagtggtaagggtactttatgaagtactgggattgtgtggttacgctgttgtgaaatgaattaagcgtgttattatgtgatgagctgtaattgaatatatattgttatagtgtgactgaatgaatgttatattgcttatgaaattagtcactttccttacagagcctcaatgactcacgggaagtaagagtaagtgttcataggaatgtaagattggagtggtttatgaagcactgagaatgtatggttatgtattgattaaatattcaattagtataatgatgaagatgttgactaagatgttgtggttttcttattgcgtaacatataggtaattgtataaatgttaaaatcatatagatgtgtatgatggacttgcgtgaatcgccaatatatatgttttgttgagatgtgaatatctgcgtttacaatgcttttgatttaataacttttcttactaagtcctttttactcacgggtgcttcgtggtgcaggtatgaaagttagctatgttcagccattcatcagaggtctcccgacaatatacatatcagctgtggtgtcttggcttccaggaagcaggatcgacttcttttctttatgtgttaaagtgtaaatttacttttgtaatatcaattttgcaattcgttataacaaaattttataaatagggggtccccatactttagtggtattttaaaaagaaatttcacatgtatgttttaaattaccaaattttaattaaactatgctttttctaaactaatatattagtaagaaataagttaaaacacacacgtggtgttcctgaggttcagggcattacaacatggtattagagcgacaaaggtttaaagatcctgaagactggcttgatatgtacattggctatgaagactcgttcgactcatggcttagtaaatgttaattgttagttgattaatagattaattgttgattgcatgaattgcctgcttatttgaaatgttcaagctgttagagaagcatgataagttatgataaaattgttaaatatgtttatgtaaatgtggtaatgcttattagcattaattctggttcaaaatattttaatgatggaaagaaatggtcgcgagtgtactggaagatgtaactagggcgatctagtaaggataatggtgagtttaccaggctcagagttggtagcgtgggtatgaactttccactaccacaagactgggagcaaatgtatgccatgaagtaagagattaattgagcggtaaggtagtagaacatacatagtttatcccgggcagcgtggtgatggagaatgacactaaactggaccgattggaaaaattatgttttgaggaagcggctgttaaggccgctagggagcctaatctagttgaaggtgggaagagtatatcgctcagaatgtggatatagttgtatagcaactaggggttgtcgagttctaacctcaggtggtttatctaacctcttttgccaagagtgtgaggactgagatgcaagagatttcattagggtgaatgctaaacttgagcct

SEQ ID NO: 260245 - DNA, 3588 bp, Cannabis indica
ttttatagtttatttattgttatcatgatgttgattttctcgttgttttatgttgttttatagttgttgtgaggttgattttttattgtcttgtagttgttttcttaccttttctattttttgccgagaaaaacacacttttgtaattttgaaagtttaaaatcgtatttttgaaaaattaaatttatataattgcaaaaaaaaaaacgtatttatgaaaatattcctattttatatctcatgtttcatcaagaaaaatcattgatgaactagaaaactacaataatgattaagttacagatttgttagagatgtttgtcgacaaagaaaaaaaaaatgaagattaataataatataataataataataataaaataataagaatatgataaatgcaccttattccatccccaaccataaagttttccatcagatgttagcgccattgtatgtctccaaccacctgatatctacgaacctcaagagaatatacacgcataattagaatgataaacaaacttcagcctgtctaaggcaaaagaaacttcactctaatcattttagatatttaattaattacaatttaccaatatatctgacatgggagataaaagataaaaaataagatcagagaattgaaataatatttcagcaaaccttttgtttccttatactcttgggtgttggtaagaaggtaataagaaacaaagatgtattggaaaagatgaataaaatcatcttagttacatcctaaaagccagtatataaaactgcaacctaagaaacatatagtaacattgtacaagactcgtatatacactacttgccttaggctttaaagacacatcagcaagtcacaaaatagcatggaggatgataacttccaattagctatccagtatttaatcttgtcctgaattacttccatgtctacttatattgaagattctacatttctttccaaccagataaccaaagaacaagagcgatgacattccacaacatcttcttcctttgatcctttgctccccgatagccctctaggcataggcctaccacatgttgcaagacattgcagcattagtaaggccaaacccgataagttcccgtatgctgaataattttgacctaaatggccttataaaggagcaatgaagaacattggatcaccattctcatatttttgtttgcacatatgcaccaatatgaagagacctaataaaatgggcttctctatagattctcccatgtatctaatttgttcggagctcccaacaatccaaaaacattaatatttgaaagagcaaaatattttattcctcaccacaaaactcaggccttcttctatccatctatgctcttggtaaacttgattactttgggtcctaaaattctgattgaataacccccagaagtcccaaatatttaatacgccagactcttacctcacaactcagagttctctaaaaaggccatgagctgttcctctgttcattcccaacattacactttccctatactaactttaagcctcaacaccaaggaaaaggtatagagaagaaaaactaagtttttcaaagaaacctacgtaggatccagaaaatcatccgtaaactggagatgcaaagcatcgatattcttttctcatatcacaaatccccttatcaatccatactgaataattttatacccatcccatcagccatcaaagtaaagaggaaaagagatgaagggatgttcatgtctcaaacttcttgattctttcaattataccaagtctcacaaggatcattatggaaatgaacaccaaggataagaatacaccaatccaagatcaccaaatccatttttctcaatatcattaacttttttaaaatcaattttgaggactgcaacctttctacctgatgcgcgatagtctctagctagctaaaacgctaccaaaaccacgcaaaggatctgtttaggctaaatgaaaatctatagtgcttttgagatcattaacagtatgccattaagtcttgatgccaacatttgcctataatcttgcagagcatcgtaatcaaacttatgggcttgtagtctccatcttgaaagagtacaccctttcggggatgaagtagaagtttcaacttgtaatcttaataatccatccgaccaactctgattcttaaagtgaaaaatgaaagacatttcaatttatagacaatttgtatttctaaaatacttaaaaaagacacaagcaacaaaaatgaaaatttgtcaatagatatgaagatcttgcttgaaagttataattctacaagaaacttataaactcattattacaaatcagagacgcaactaaaggataaggtgcctaaactaatggcttgaattcaaatactaatgaaagagctatcctaattctatgtattgaaaggttttttggagtgaaaatgtgaactaaaggaaagaaaagagattacgctgctaagtttatccatccaagaacaaaaaccacctcataggcatacaaatccaaactttggcaaaatagaaacgcataaagacttgacatactaaactggtactcaacagaggtccacagaaaagataaggatctcacctgagaaacaacactgccactcaatgcttctagcttgtgaggagcaaggtgatcctcaaaatcaccatgacctagttgaccatatttgctccatccataagtatataaagtacctaaagaggaaacagatattgtatgccgccaaccacaagcaaccataatcatcttctcatcctgtgttattaatatcataagtatctattttaagcaaacaagactataagttggtgcaacgagcaaattgaaattataatcaccgaatatatgcaattgttgacgtgtgacatcagtttctaacaagataaacagcaataaaggttacactttgagtcttataaataagctaggagtattaaaaacaaaaaagtaaaacaataatgaaaagaaatattcagaagagaatggtttaaacgataaaagtgaatccaatcctatgaaattgtagcaatatgatattgtcagaaaaatatgcgctataatgagtttagaatagtggacatatttagatagagagtatcattcttcattttagatctttatggtacattaccaagggcagagaaagggggatgttaccgttatgttctttaatgataataataattaaataattgagaacattcattgtactaaataaatatcttggttagtaacgtcaccaatctctaatgttaaggagagaaactaaaacccaaccccatccaagtactcaagggaattttccaatgtcagaaaaaaacatgaagattaattggtgtttttgttgagttgttgttagagtattagctgtatattaggtgtaaaagaattagggtaacttgtatttagtagtttcctattttgttggtagtttcctatttcctagtctcctaactttgtatataaatatgtactattctatgaaatacacatataattcgattcactattttctacatggtatcagagcattgtgattcaaaattcgaaattcgaaatta

SEQ ID NO: 260246 - DNA, 589 bp, Cannabis indica
tattctctcatcttgattaatattcattttttattttaagtttctgaattattttactgaattcgcaaaaaagtattgattcgccagatagaatcataagtataatttagtagtaattaatccaattccctgtggttcgacctcacttacgtgagctactacttgactgtgtatacttgcgtagtgttcataaaattcgtaacatatactagcaaattgcccaacttagccattactaattccctttgagagtctcgagcaactatgctataaccaaacgtaacttgatcacgaaaaatagcagcatcaacagttatcttgattgtattctcctacgccttaacccaaaatttaactccatcaccagcttaaaaaattgaaaatgaagcatttgtacctctatgttggactgatttccattgcacaagataactcataaatgagataagaacaccatccaccgtagcatacttttggttctaaaccaactcgtttcgagccttctataacccccagcacaacataatagcctcctcacacttgtctttacagcacctttgcaacatcttaatcgttttcaattctaaaa

SEQ ID NO: 260247 - DNA, 592 bp, Cannabis indica
accacgaaagtagactatatatagtacccgaccaagctgccttcatcttcatcttctcaaataatatatctaatatctaattatataataataactacttaataaaagactgtgtttataacattaaataataataataataaagtcttttgtagctcagctcatatctcttataattttttattttttattttttttgattgaaacgtagaattcattgaacgaaactaagaagaccatggcgggtaataattacacaactcattatgaggaatatcacccaacgggatttccgaccaaattcaataaccaattacaattggataattttttttttctcttttaatgggacgaattacacgtaaatttttttaatttatttttttatattaagttaaataaaaaatattataaataaacaaacaacgtagacccccaccaaggcttccaaggagctagatttgttataaagcacaaaaattttaagaaattgtagtacacacttttaaaaggttgttatggtagattcttctatttattttaactataaaaaaattcaatcagtttaattttttctataattcggctatac

SEQ ID NO: 260248 - DNA, 520 bp, Cannabis indica
aaaaatggcattgtatgcatgtacttccaaataaacttggtgtaaatgtaatgaagaatggacaaataaggaaacttttggattttataaatggttagtataatatgtgaatggcttaaaaagatattgggtataacaaaatggtaaattataatctgttctaatttaattataattagtttgagttattttgtttttattctttgtgttacagaactagttatatttcaattataattggctctatttttatttatatttaagacatctacttctggtgactttttcaataacttttttttgcgacggttacatttccggtgacgatgactttttcggtaacttttccgatgactttttcggcatatataacttttctggtaactttttcgacaaaacttattattgtttacgcatatggaatttccatcttttttttacaaaaatatgtcataaaaaaatccatataaatgtaaaaaaaacaaaaaaaacccataacccttagctttatttatttatg

SEQ ID NO: 260249 - DNA, 604 bp, Cannabis indica
acatcggaatgatgaacgttccgttatctggagttagaatgccacctgtggatgtcattaatggcggagtagggagaggtaatgtcagacctctcaatctattccctgaaactgctggcccccaagtccgagaaacatccacgccaacagcaacaatggggcactttccacccatcactccggcagtagtatctgagggaatcgtccagttcaccactgaccagtataccgcgatccaggaccaattacgcgcactgcaggccgaggtggacggacagaacaggtcccgacgcccccctcgagcccccactactcgcatagaaaaccctcaggtaacgaattctaggcgtcgtaataaccgtgtttgcagggaacgaaggaccaacctcgaaggtctggacctgaatcagccaacctcaagagaccaatctacgaggtatcccaaccaagagacgcagatacatgaagaccccaaacgatgcaaccctcgcagcaggccttcacgagacaacgacatagaatctgcctcctcgtcctcgcatggtcgcacacctagcaggtatacgaggtccggttctgtggagacgcagtagggggacaatat

SEQ ID NO: 260250 - DNA, 837 bp, Cannabis indica
agcttttcctttatttatctaagatgtttttaccaaggagcttatgaaatgggaaagtagtctccactccctttatttcctaatggcataattacatagagctatactacgtcctctatatcccaagctaaacatgttgtctttaaatatagctgcattgtacgtttcaagctaacaaatacaatatgtttcaaagggcttctataagatacttttagtaacacttttgcaaccagtttttgtttttctaattagaaatgaaaatattttttaaaaaaattatataaaacagttttcactttaattaaaaattaaaattttaaaaacagaaaaaaattgtttcaaatattttttaatcagtttttttcttaattaatattttgatctcgacttacatttcatcccagaatgtatttgtttttcaaaataacttttatttttgtagtagtatcaaccaaaactttgtaaccaaacccataagcggtcttcttcgcttatctattttctaccttcactaagctcataaactaaaagattaactgtcgcagcttttaggttattatgtttgaaagagggataggataatgggagaaaattacagtgaaaacttccttttgactgaaagaaaattttcattaaggaaattaaggcagaaagcctaccgagaagagaactcccaggttctgaaaaatccaagagagtcaagtctcagaaaaaccaaaccagaaaaaaccaaaaatcaaaagaaactagcctcttttgactctttgacgatcaggaaataagaaaggaaaacaaggaaaaaggtaaaacaaactaaaaccccactagtctctg

SEQ ID NO: 260251 - DNA, 698 bp, Cannabis indica
aaaaacaattaagtaaaaattaacctttcacatcaccctaaaatactgtcattataaaaaatcttactttttgtcacaactaaatttgtgaataaaagtaaaaaaattgttactaattataaatcattattcctatgttgtgactaaaagatctgcggctaaaagtattagtcacaaaaattacaatttattattgtgactaaatgttttttagtcacaatatttattgtgattaaaactaaattagtgacaacttgtaactaaatattgtgttttaattacaatattattttgttgggactaaaaatcacatttagtcactaaaagtaacaattttttgtagtgcgtgtattcaatatcagcaaaaaaaaatataccgtatgttcaattacaaaatcaaaactttaaaaacaaaagtaggagcactctcccacatctttttttttttttccttttttactttaaaaacaaatattaattttttttttcttaataaactttcaaaaaataattttaattacattgctagttattttggctcaaaaaatatactatactaacttatttttctaagatgaacattttaatatgtgggaagtatatatttttttgtcattaaaaaatatcattttaatttcttatatgtatatatatataattatatataatggagtttcttatattttgtttatttgcag

SEQ ID NO: 260252 - DNA, 1052 bp, Cannabis indica
gaaattaagggcatatatatatataaacataggcccctataaacatatatataacacaacatggggaacatgacataatgaaaggttgaaggttcctacgattttcctggatttaaaatcatgtataatataataatataagaaagaaaaaggaaaccaggctgaaaaagattactgtttcaaaaaagaatatgaaaggacaggtcgtatttattacacataattatgagaaaacgttaaaaaaaaaaaaatatatatgaaagaaaatgattgaatagacgtagaggcaaggtactcgcctcttaccgaccacacactttgacaaccaattaattaatgtgtaaactcttattcattttattttcagatatatattctttggtttaatcatatcattaattaatttgtcatattaaactttcatggacatcaacaaaaacataattaataatcatacgtagaatatgtacaaatttcgactaaacctagctagattcaaatgtctcaaaagtaaaatcagtcttgtttggattggaattcttttgtttaataatagtagtgtgtgaatgaataagaaagagacaaagaagtatttgtagaaacagaatcttctttatcgtgaaataaataataaaataaagtatatatataaagaaaaacaacattaattagagtgttttgccatacaattgtggtaaagtttctcaaatgaaaatttctccaaaagttatttctgtaaagttatttgtcttatggaaggttgttctcggacatctttcttgctatcaaggaagaagtctcgtggaataataattgtcctcttggaaggttgttctcgaataactatcatgtccactccgagcgtaatcttcaagaaagctaatcttctttcggaaaggatttccgattattaacaagctgtttctcctagaaggtagtctcaaatagttgactccaactatagcttgttcctatcggggatggtccttcaaccactgccttgatccgtgactccaggagccttcatactacttatgctgatgtggagatct

SEQ ID NO: 260253 - DNA, 583 bp, Cannabis indica
ttgcttgaaaaatttctgtctctgcttcagttgcatctcccaaagaacattttgagtcatatttgatttgattgaggccaaggatttttaccaacagaggtgtatagaaaaatcttaaaagggaaacaaaatcaaattatagtaacctatgcctaaagcaattagtaaaaacttttgtcatggctcaattttatttttcttttttcaatgtctcgccaaagatttggttggctaaattcataataagttaagagacaccttttgatttttgttgtgcaggcaatccattatctatctaggatggaatttttatgccagttaaggatgatatagactgttatcctcatccatcaaatggtattactctctcccatttggctttctgatgattttacttctttcactctttaataacagacaggtggatcaacatggatgcacgagggtcgccctgtcaagaaggatgcagttagtgtttcaaaactatgtagatgcggtgtaagattaatcttctgctccaattcaaataaatcttcttatgacgccttacaaaatgggaaagttcaatctttctcataggtga

SEQ ID NO: 260254 - DNA, 744 bp, Cannabis indica
tctatatttggtggtcttaaataatgttttaagtcattttgcaatcgttttgagtattgttatatgattgttttgagtcctttttttgccacttataattgaaatgagtcaatattcttcttaaaaaaagaactaaaaaacagttaacacaacaactaaagttcgaagaagtatgaaagggcacatttcactattttattcaaaagtagcaagctgcaagtttcttatgtcactcactcaaatctcccatgaggctcgggtgaaaacaatatgtgtgaaaaataaattgtacaaaaaccatttaagttagtatgctctatttgtagttgctatcccttcatcagttgggatggaaaaaatctatttgaggattgaatcaaaataaatattctgtaactagctgactcgatggcgtatggttcgtccttaatcagtgtctgcaaaattggagcaaggatcccacttaatcatgcctatccaagaacttctctataacgactgagaatgcagcaaagccagcacagcctacacatgccgccttcggaccacctgtataacaacacagcaggaaggagcgaaatgagaggatatgacataaaaagggacagctctttcagtacatcaaaaaataaaactcactgaatgataacacttaaccggaggtaatttaagcagagaacctcctttggcctaaacaatagagctataaatagtaaagtatcttacatagattccaagcatgtt

SEQ ID NO: 260255 - DNA, 1504 bp, Cannabis indica
atgaataagttttggtggcaaggatctaataaggcaaaaaatggcatccattggttctcttgggatcggctttgcatgcataaatctaaaggtggtatggattgagagattttaacctgtccatgcttggaaaacaaggatggagactcatgactcgccctaactccttggttgcaaaggtcttcaaagctcggtacttccctaatggcactttcttttcggcggaattgggaaacaacccaagtttcgtttggcgtagtcttcttgaagcacaagacttggtaagaaaaggaactcgatggtgtgttggtacgggggaagacattaatgtactacacgaaccgtggctgcccagtgaggaacaaccttttgtttcgtcaacccaccctggtttgttgggcagtaaggtgtgtaaccttatggaaatgggaggtgggagttgggacaaggaaattttggatgatttgtttgaggagcgggacaagaagcttattttagacatacctttgcatagtactcaaggcagagataaactaaactggatttatgaaacctcgggtttttattttgtcaagagtgcctacaagcttcttcaaaagctacaaggcagatggcatcaacaagaggatgagcaaacaaaattttggacaaagttttggaagttaaaaatcccatccaaggttaaaaacctagtttggcgcgttggtagggaatgtttgcctactttgaaacaattgcgattaaggagggtagatgtgcaagcgctttgtccaatttgccgtgctgctgaggagtcaattgagcatgctttactgctgtgtacacaaccgaaactggtctgggactgtgtgggcattgggactgcaactacagctactggtgcgagtagtttcctgaactggtgcatccagtcttttgttactgctgatgccgctcaaaggaagctgctgccagttctttgttgggcgatatggagcgcacgaaatgacttcgtgtggcagcaaaaaacaactactgctgctactattttgaacacagcaatgggattccttgatcaatggagtaaagctcagaatactcttattgagacgtcttggtcgggttgcacgattaatgacggagttgagcaatgggtcgttccaagtgaaaataaaatcaaggtaaacgttgattctgcgttgtttaatagtagtaacaagtatgggtgcggtgttgttgctagagatcattacggcatgctagtccaagggaaaacacttttgttcaacggttcgccttcgcccgaacttgctgaatcaattggcatacgggaagcattgagttggataaaaggtcatgggtgacaacatgttacagtggaaaccgattgtcttacggtagttcaagcacttagaagcacaatagacataattttcccctttggtcaagttattttggaatgtaaaaagatgttatctgatttgaaaactgtttccgttttatttgttaagcgatcagctaatat

SEQ ID NO: 260256 - DNA, 832 bp, Cannabis indica
ccagcatcagggttaccaccagctcctgtgccagtggtgggtaaccaagggtttgttatgccgcatcgggactctgtgttcgagcggtttgtgaagctgcaacctccggtttttctgggaggtatcgacattattaaggccgatcagtggatgagcactgttacccggatcctcgataatatgggggtgacgggaactgagagggtaaattgtgcggcctttatgtttcaagatcatgcccgcgtctggtgggacatagtgaatcaaacccgagatgtcagtgtgatgacatgggatgagtttaagaaactttttgaagaaaagttttataatgtggctgtacggacttcacaccaggaagactttgtgaagttgactcaagggaagatgtcggtggctgaatatactctggaatttgaccgattatctaaatttgctggtgatttggtgcctaccgattttaccagaaaacaaaagtatgttcgaggactgaatgctacaatcagtcgagacttgaaaattaccacatcccatgacactctgtataagagggtggtagacttggccttaattgctgaagaggccgagcagcaagtgatgaaagagcaggctgtaaaggatgccgccatggcatcaaaccctcctgctggtggtaatttcagtaaggggatcgacagtagcaaccctgagcacaagcggaaggctgaggcttccggagcttcaggaggaaatagaaagtttcggggaaacagaggtggccgtcaaggccgcgggtcctcattccggtcataccctgagtgccctaaatgtaagaagcatcatcctggtgagt

SEQ ID NO: 260257 - DNA, 507 bp, Cannabis indica
  modified_base (489)..(489): a, c, t, g, unknown or other
acattccactgtattgacgatactgtaattgtgaataaacatataatctggatttaactgattttgtgtataaaagcaataaacatattaaaccattagcatgtagaattcgtgcaaacatcaatcacttcaaatttcttatattgataactaatcagattgtaaagagttttatttagggcataaaacccaacatgatgtctctttattttaaaagctatattgagattgactaatgacaatattttgggagaaaaaaacaaacactttagagattatgttaaaacgtatttataaattttctctaattgttgatgtatttgcattcaacctcttctataaacacaatatgagaccaacaaataagaaatagaatttcctgtaagtgtaaaacctaagattgtctacaacttaaaatttgcaataccatttctctttgcaatcaattataaaataattaaaacagaggttataagggtcaaataagcnggaggcgattaagcctct

SEQ ID NO: 260258 - DNA, 841 bp, Cannabis indica
agaatatccctcaagatacagctcgcaagctaatcgcatactcgcatacgattgctccatactacttgtcactttgatgaagatgttgaactaatgcctcggtcatcctgactcttcgcccctcgacatttcaatgttgccttagtaccttagtcttgctgactttcaccttaggccaacattgccatggtgttatcttagtacctgagtcccgcagactttcaccctagataactggcactgcctgtgtcccgagtcttcttaactttacattcttaacaacaatcaatctccatgatactcatctcgatgcttgtacagaatctctagtccgttgagtgaaccgtgaaggtctctcccccacttcatctgttggcgtcctcgacaacatgcccacacgcgaatgcctgaccgccccaactcttcatgcacaccatctaaaagtgcatcccgcaggatgtgactcacaagtcaactatctcatatagcacccctgtcgatttccatatgcatgcaatgttcgcttaaccatccaactgattcacacttgcatcgcgcccttctggctcccacaatgtactaagttccaatgatgcagccctctggccttcatgcaaactctagcacccttcttgaccttcgcaggcaaacatgactaactaagtctcgctagcacagccctctggcttccacacaaactctagcgccatctcaacgcttgcgctcggtcatcttagccctactggcttctttgatgcattcattccacaactccacatctctatcgatgcctttgtgtgacttactccctctggcggtttgacaagccaacacattccac

SEQ ID NO: 260259 - DNA, 1153 bp, Cannabis indica
aattaaattaatttcatcattttacccttctcgtgtcataattactaaaatacccttgttaccaacggggtcttatcatataataaatcatatcaattcacatatatcgaactatataaaaatataattcctcaattattcataattatctaattagggttttgctaatccatttcttaatttctagggtattacattattggtttctaaaaatctcaataaacaggtaggaataaagaattccttacggagtcgagacgtccactttcttggctcggcaaagaacgaaccatctcgcaagtagcttataaacttgtggaataaattggaaaggggtaacacccacctccacgctgaagtttgcaaagtagctatagagtggaggatgtggtgtcacctccatatgggcccaactctagatgtcaaagccatatatcatttacaaggagactccccaaggacagattgtctattctagaagagactcggagtactctgaaggccaagatatacctcgtacttcaggatggctccgtaatttctgaacttgttagtgtactaatccatctcctattgagatgaattgtacactactcgtggaactttagcatccactcgctccacgatgttaacttcatctgcgtgaatagcttcagccatgatagaaactggacaagaacaagaaagaaaaaacaccaagtagttagacactcatactgaagaagatagcatggacacgggagagtcctcccctaaaactacttggaaaggtccccaccaaaccctacgcctggaagaaaagttctcaaaaaatattatttccagatgatcagatcaggaacacaaaaatccaattgaaagtataaatgacatatcaccaaaaccataaaggtctcggatagaggaagtagttttaaccatccctattgctaaaatgtgggtattttaatttaatatccaatagaaaaggaaaaaatctaatagaacctagtcaagactataaacagtatgtggaaaatatcttatttctactaaatactcacaatcactctgaggcttagatcctgaaaaaccgtgtttttgcaaatgtcagttgtatatatgaaaatataaaaactgtaagcgtttgcagcagcagaaagtaattctgcta

SEQ ID NO: 260260 - DNA, 3767 bp, Cannabis indica
aaaactcaacccaatctaatttttgtgagtttttattgagcggttgggcggttcccacagtttagcgatttttatgtgacggcctaccacttatatgaatatatctcataatttgggccactgtataatttcacctgaaataaagccctttttattaatatagaaaaccgaaataaaacccttgcccacccctacgaaataaaaacccttattagtcgccgaaggaataaaaagaagaaaaaggaccagaagggaagtgttataagtttactataagaaaggttcagagtgttccttacaaattttagcgatttctgctgattaacacttctactacctcttccttgggtcctcgacctcttactaaggtaatccaatccttcatcatgtttatctatatctccctttaatggcttcttcttacacttttccttgaatctatgaatccttcaattggttcttgtctctccgttcaatgtctttttttttttttcttattttgctggttgcaaatttgattcctaggttcgtttattatttgttgtttacacgaaataatgagaacattttgttggttttgcgcctttgcgttataattttcatttctagggttttgaaggaattttgaatctcattcacattatttgccgaggcttatctgttttttcttttgaattattatattcttaccaacgtttagggttcaaaaaataaaaccatgtattaatatgtactcgtatcgctggttattttgggtatatatttttttttgggtgatagattgatttggttctgttattttacagcaataatggcagacaatgatgagaagaaggaggagattggagaagtgagtttgtttgtttatctacattttgtgtatgtcaatacttgttgatgcttttattttgttgatttattttagagaagagggtgaatagggctatcgatttcttaactatttttggttatttattttgtaattgtaccattgggtctttaaataacttgttttaactctgcatccaattaattaggaggtacttatttgtggtgagatgaagattattgtaaaactagcgatgtgttatgctatgggtctagaatttttgtataaggatatattggtcaagctagactttcagtagttttgtatttaagaaactctgatgttctgcttgaagtaaattggccagtaattgaaatgggtataccacttgaaaggtgtatgacccgactttcacttgtcttattatctaatagttctgcacatctgtagttctccacttttgatcctagcaaaaagaagaagaagaagaaggttgtcatccaggatctgttggatgactctgaggagaaattgactgagaaagttgaaagtcttacgggtatggaaattatactacttcgaaaaatctatgatgtctctaattttgtcgtctcatgcttgatattttctggctctacctttctttgcagtttctgatggccttgaaagtacattttcgggtttgaaaaagaagaagaagaagccagtgagttatttggatattataaattgggaaatttgagatttatctttttttttttgtagcgattaatgttttaaaatttatgcggttttaggttgaaaccagtactttgattgaagaggttggtggcgatgcagtggaagagttggaaagtgaaggtaagattcttgatacttggtgttaattcataacgtcagatgagtatttatgaatcatctatggtagattttttgagtttctgtatattggctttttagatcatgttcatgttgatgaagaagaagaagaagatcaaccaccacgttatccttgggaagggagtgatcgcaattatgaatacgaggaggtatatttattgtttaattgtttccagagctctctactttgtaatgttaggctgtgaaatgtgtgagatggtgttcttatgatatattttaatctctgacattataataaatctatatttacattttctctgcgttcttctgttggagattggtttctgctttcttttctaccatctgccttgctgtatcaatattagtagaaacaaaagctataaaaacattacagctggatgctgcttgctgtgaactcttttgtacttgactaccctttaaactgacattctaaagtatggttcatatgtatgtttgttgttcggtattttgatgaccacaaacttttcctgtcttattatcttctgaatttacatttttattaagttttaaatgctattatgaagtagttattttctcttatggaaactgcagcttctgggtagggtgtttaacatccttcgagagaataatcctgagctggcaggggacaggcgtaggacagttatgaggcctccacaagtacttcgtgaaggaacaaagaaaactgtcttcgtgaatttcatggatctctgcaaatcgtataatccatttcctttgtcatatcaatttaactaagtcttacacttatgcaccatgcattttttttattgatgcatacttgggatattatagttttaacttttgcattttcttcataagcattctttctgtgtaattgcttatgtacaatcttttacatctttgagatgatcatgctgtcatctttgcaaatgatcctctcatggtttaatgttgctttaccatgctgtctagtatataatatggggcttgttttcaatattaaaatgatttagggacttttatttgtggttaactttagaaatgtgtgattggcttgctcagactaaatatatcgtttgaaaaacctgtctttggaagctgatagtggatatgtgtttcatgctgcgttttgttaccatcattatttttctttcttttttcttctccttcttcgtgtatctatttttctccccttcctgtaattagtaaagtgtttcatcttcagctattgcttcttggactattattattaagttgttggatattgtttttgtaaaaacattacatgcacttattgtgccataattagtagtgttccttcacgcaggcttttttctactatccatttctaagacatggaaactatgtgctcgccaaaatttttggttgttgatctatgatatttagtgttacattattgctttaatgtatatttgacctaagtggtggcatgttatgatggttatatatttccttctttggtaatttgtgatgtgaaaatacgctatatgttgttaaattatgatctgacatagtcccttctaccttgttgaaaatgtagaatgcatcgacaaccggatcatgtcatgaatttcttgcttgctgaattgggaacaaatggatcacttgatggacagcaaagattggttgtgaagggaagatttgcacctaagaattttgaaggaattttaaggcgatatatcagtaagtaccttgttcgtaatctggtcaattttgtcttttacagtttttatcgtagtgctgggcaaactcaatgtttactgtgctttcaagtaagatttgaaaattgatactctatcatttgttgaagaaagggaattgttatatatttgatatcaattcagcattttgtaattttgtttatgccttctttcagatgagtatgtcatctgtgttggatgcaaaagtcctgacacaattctttcaaaggagaatcgtctcttcttccttagatgtgagaaggtaatatcatctttctttttccctgatcacctttgcacaactagcccttacagcatagtaggccaaattt

SEQ ID NO: 260261 - DNA, 2357 bp, Cannabis indica
taaacaactgctaatttccaaattaactaagcgggctttacagtttgtctggttattcacaaaaactaagatccatgaagttagagaagtaaaattcacaactttgcatttctaatttccaacatgggaaaccactcgaaaatgaagagtttcgagctctcttttccacaaaacaacgacatctctgagaacttgtgactagcttcgccagaacacaggaatagactaagtgatgtcaaaatatcacttaggcataaaaaaatacttcccaggacattttcctactcacccaccatctaggttgatgtcatatgtcaacttcggtgctgggatgttaacctaggcattgggcccagaataaccttttgtaaaatggctataactcacaacatattaatccgattaacgtgattcaacttgcattttgaagctaattcaatgatatattatgtcatctctcacgttttaattgaaattataaatttatcaactacaaattttacccttaaggtagttacaaaaataagattcggtttacctagagcggtcccgccgtcgcgagccaagctcagaaaattgactatcaaccttaaaagttaattttgatgactgaatcatcatctatggtcaaaattagtcaatttagttttttttttcatattttgaattatttttccaatttcaaggatatccttcacctttaaaaggagagctcctttagcttatttctcatattcagaaaagtaaccataaggccagagcacctctctctagtttctctccatagaaatttgagctgaaaaaattagccatttttttaactaccatctcgtgagaaataaaaacttgaagtagacgtaactccattactgtcgtgatacatggagtgaactactataaattattgtgtctctctttatttatacttaacaaatatttcattctcgccaatctagaaagcgggtgtggctcaagaatctctgtccaaatttttgagtcaacattttggtactttcattgagagccacaactcaagaaagttacttttcgagatggttgcaacacgttcatcaagcatcgatagaggcaccctatcatctgcccaaacaactgggggcactctagttactgaagctagaaccaggactactcctacacctcacatgcaaggaggaagccccagaactagatccacaactcttcccctaaggtcaccgaatgatctcggtactggaactggagagccacacatggagctagaagaccctaaggaggctaatcttcggtgtgaataactcacccaaatcgtggctgatttacaacaatagttgcgagactctctcgacagtcaacacaaatggtttcaacattggttcgtggaaaactagtgaaacatctagagtcattgagttgagcaggagcaacaaagagctaacttgtcttaacaaataagagaagcctatcattctagtcgtggaattaccccccgtaagggcctttcttagttggtgagagagactcccggtcaaccaactggtcacgtgggaactagtgctcaaggggaaaccctcaatgcatgcaataccaactacctcacctggtaaccatccaagcactaagaaaacaccaggtgcttggacctctcggagggaaactaccttcgagcaagatcccgaaaggacttaaactaatgggaaccaaccaatgggccctccacctgatgtagaatggcctcaggacactgagagaaccaataggacttctccaccaagtcctcccaatgctctcatgactcgaggcctcaagaccctgcaaggggaaaaggatttactttgaagtcggaggctataagatccgacgagtaaggaccaatgagccgcttaattcttgaaaatactttcgagatgaaaggtgtaagttgtgccattactttgcctgtggccttgatggccttcagtatgagtacatccctcaagtgtatggggaggaattaagcctgagaaaccaattcaactctctccgtaattgtgatttagctaaagactactttgagggaagtgtcactaaaacgctcttgatcactgcttctggagtgcatcattccgagacgatccgtagttcatttcaaaaatatcaccagagttgccttcacgaccccgtggtcaggacacaactacaagacccaagtcgaccaaagtccatgatccacttggaagattgagagatatgcgtgatgttctaaccaaaaaactattggttgaagtgggagcttctaaaggagactctaactgggtaatagaagctctgactgggatgcagaccaccatcctgttggaacttattttaccaggatctta

SEQ ID NO: 260262 - DNA, 869 bp, Cannabis indica
taaaaatatgggctactccactcattaccaattggttttgagatggaaaccccataatctcaacacttattattaattcaggttttaacttatataaagcactacttattaatggtaatttacaaaaaaatataattaatgatattatagaaaataaagataaaaagaacacaaaataattgataataataatatttataatcttaacatttttcagtagtaaataaaaaaaaaaaaatataattgtaaaaaattgtacacacccatctgcatctttatcatcagttaaagaaaagaaattgtacatattttctttttctagattttaattccatgaataatgacaattacaacaaaaagtttcaactgttccctacatggtcctccataagcatttagcacttcaaaggaaaaagcaaagccaaagcagctttatactagaattgaagcatctttattgttgtttgataacatgattaactatgcactttttagataaatggaggagagatacaaacaaaatacccgtagatttcaactcttcatcaacttcctgaaggctaaatctctaagaaagagtggcatatggtacattatcgacatcatggtggaaaatcggccataacagaaccaagggggcggattcttcttcaggatagcttctacagtcttctttgcaaacacttgtgtgggggttgagtctggtctctgggaaagattggctctataacgtattgctgcttcaaatggcttatatagtttccattcaggcatcttatcatagccagccaacgcagaatttcctatgtttgatacaatcgctcctggcaccaccagtaatgacatcaattccaaaaggacttgagttc

SEQ ID NO: 260263 - DNA, 1269 bp, Cannabis indica
cttcctacaaaccttaataaaccattttgcttaatccctaaaaagaagcagcctatgaatatgggggatttaagacccgttgcattatgcaatgtgctgtacaagattatgtccaaagtggttgctaatagacttaagagtgttatgtcgtctatcatatctgatactcaaagtgcgtttttgcaaggccggttgatctcagacaacattatgattgcttatgagattatgcatcatttaaagaggaaatgaagagggagggaaggttatatggcactcaaactagatgttagcaaagcctatgacaagcttgagtggggttatctcctagctatgatggtaaagatgggctttgatggtcgttggattaatttagttatgcaatgtgtatgttctgtttttataccatttcacatggtgggaaggagttggggcccattgttggtcaaagagggttgcgccaaggggatcatttatcaccatatctgtttattctttgtgctgaaggtttctccagtttgttgcggagttatgaacaaagtggcttactcacgaggtgtaaagttgctcgaggtgtgccggtaatctctcatatgctctttgctgatgacagctacatttactgtaaggtaactgaggaagaagcgtacaatgtgaaggagttgttgcatacttacgaggtggcttcggggcaaagaatcaatttctctaagtcttctgtgttttttagcaataatactggtattgaggtgcgggattccatttgtgctatgttggaaatttacgaggccgatgaaaatggctattacctggtctgccgtgtttggttgggagaaataagaatgctatccttggttttcttaaggataagcttcggaagagaattcaagggtgggaagggcgtatcttatctcatgcgggaaaggaggtattgttgaaatctattgctcaagtcttgtcgagttatgctatgaatgttttcctcttgccgtcagacacttgcaaggagttagagcggcttatggccaagttctggtggcgctcagattcaagtagcggtaagggtattaattggatgagctgggagcggttgtgtcgtcataaacatgcaaggggattgggatttcgaagcttgagagattttaatctggctcttttggggaagcaatattggcgtttgttggttaatgctgattctttggttagtaggctttataaggctaaatattatgctactggtaatctattttctgctggattgggagacaa

SEQ ID NO: 260264 - DNA, 702 bp, Cannabis indica
gacgtgtgtcttggcaagctccccaatccgcatctgcaaagaaagacaattgaacatttgaaggagataggcttgtttcagcaaaggattaaaggtgtggacttgtatttgaaggaaaaaaaagtccttgaccgggggtacgtttgagatattgaagcacacgatgagtggcttgaagatgtggtacccttggagatgtgagaaattgacttaggtggttgacggcataagatatgtctggccgtgttattgttacgtagattagtttgccaatgaggctcctataagtggtgggatcgggtaagagagttcccttgtccttgctaagtttgagattaggttccatgggagtggaagcaggctttgctcctaggtaaccgtgtcattgagaagttgcaagatgaaaggcctttgagaaattgagatacctttgtttgatcttgctatttctaaaccaagaaaaaaacgaagtggtccaatgtccttgagagagaactttttatccaagaaggatttaaattgagtgatggaaaaattgttgttgctagcaatgattatgtcatccacatatatgaggatggaaaattggaaggtgggagttcttttaatgaataatgagttgtcagataaggattgttggaaaccttcgaattttaaggtggtactcaatttttcgtaccattgtctagaggcttgtttgag

SEQ ID NO: 260265 - DNA, 624 bp, Cannabis indica
cctagtacccgacccagacccgaacatgaacataggacccaactcgtgacccgacaccagaaatggaaccagactcccgaaagtgggatccggatctggacccaaggcttggacaaaacccgtagtcagtttctggatttgggacccagcccaggacccgaatcctgacaagaacctgaacccacactcggacctggacccagtaccaaacccgaaagtggactcgaacccggacttgaactaggactttgacttggaatcataacggaaattgggcctagatccagaaccgtaaccggaccaggactcggactccaaatcatacctagaaccgaattgggagccggacctggatcccaaccgaaacctggactcgggacccgaacccaaacctgaactcaaatccaaacatggaaccagactagggacacagaactagggtcgggacctagaactgcaccccagtctcgatccaaaactaaactcagaaacgagacctgagacctgaacgagaaccagaccgagacccatgaaagtgatccagatcttgactcgagattcgcataacggggcctagaacagaccagtagttgatctctaaatgtgggaatcagacaaggacca

SEQ ID NO: 260266 - DNA, 630 bp, Cannabis indica
gatatttttctttcttactgaagtcggttggcacaattcctgaggccaacctcgcccaccgatcaaacagggtggtatactctgtcaccctcatattctccttctgggtcaggtgggtgaactctttcctcttggcacttttaacggcctcattatagtatttcgcgttgaagagttcctggaacctttcccaggtcatagtagtacatcatgaatctgagacaccacgtcccaccagactaaggcatcttctagaaactggaaggtggcacacaccaccctgtcattcccggtgacacccataaagttcagtatccttgtaatcaccgttagccacttctcggctttcatgatgtctggaactcccagaataactggaggtgcctgcttccggaacctttcatgcaggggttccattctgtttgtcgctaccactatctcggcctgagcaacaggggcaggtgccacaggagcttctagcaccggcactgcaggagcaccctgctgcctcaatctttgaatctcatgatcttgctcctctattctggcttgcatttcagcaaacctagtttcccaattatgggcttcctgattcgcttgagtagcctgggcagcctgtggcggattatc

SEQ ID NO: 260267 - DNA, 1369 bp, Cannabis indica
aaaaattattttgtcacctaacttgccaaaaaaggactttacagttcacttgagacttcattatatctcgcttgtgcaccgttaatggccatgtgcaacatccatttcatggactctctagagaataactcccaattctcataagaggcggcaccacctctagtccatataggtagaaattagtgtctcacaaattctctttagacacatcattccattaaaaaacctttcggttttaaccctctaaattttaccattagtactctttcatagatgggacaagttgagtactactttttcactctattgacttgttattacctattgaacttaagactagatttttactagtgttaagataggttaccatcaatgagtaaaactctaagggagtttaggtcccatccctcgaaatttcatgctttaatcttgtacggagattaagcgattgttataaccacacacttttcgattccaaacgaatcttgctagccaaaattagtgaccatttttacatgaccacttttctccttaagtatacttaagctttgaaaatttaatcatagaagattaattttcacacttaatttctcacacattttgataccaagcatatcaaaatatatacactaactttagacaccaaacatgtctaagttatactcaagtcttaggcaccaagcatgcctaaatttcacatatcatccattcttttaccaaattgcttgataaatattggatatcacccccacactttctcacatttcactatcaagataatatcttgattttataatatagatgaccactttgtctttataatttctctttaatttccttcttgaaattattttaactaaaatttgacaccaaaatttctcatatgcacatagcaaaaattgatttagaatttgaattccaaatcaaataaactaatcaacaatgtcttatcacattttgtttaagtttgtggctcacccccacatttctattataaagtgtatataaaatatcactttttgtgtattttcctcttgaaatgactctttaaggtcactttaaaaaataccatttgacatttttaattttctcaacaaaacttaaaatatcaaactcgcacatcacctcttaaaaaataatgtgattatttttacctataattttaaggttatctcctcattgagattaacccaaatattacaccaaagttaacaaaattctcatcagttttgttcaccattttggttatttaagatttcaagcttctcccattttgttatattttcacaatttttgaattccactatgattcactttgatttgagtctaaaattgctcttccaattatgactcattttacaagtttaga

SEQ ID NO: 260268 - DNA, 774 bp, Cannabis indica
ttataacttcttagtcaatctctgtacttgaaagtatatgtcgaaatatttttgtttttaatttttttcattgtaatattcggtatagttacaacatcatccttataattttttttttaaaaaaaaaatcaaatagtttacagtgccaaaaataggtttgaagttttttaaatacatgtggtaaactagaatattaagaactgtgttttcggtactgtaaactattcgaaatttttcaaaaattaacaggataatattataactatagtgaataccgttatgaaaaaaattatactaacaaatgatttcgggcatagaggttataattagcactccttaaataaatataatcaaaatcatgcacccctaaactttcatctatgtcagacttccgttagtaaaattggacaaaacaaattattaactccaacaatcttaataattttggggaaatttttaacagtctaaaaaattcaagaactataatttaataaatatcaatattcaagaagcaaaaattctaattaactctctctttttttaaccacgtcatatttacacatcaggtaacttctcgttcatttgatcgctaagtgagcaaattgtcaaaaaatttcaataagcttcaattagggctcagcatgaaatttaaaaaatcaaaaaaaaccgttaaaaccgacctaccgaacatcgctagaactaaaactggcaaaaccaaaaattacaaaaaaaattgctagtttaaaccaccgttgaacggtcggtttttttttt

SEQ ID NO: 260269 - DNA, 415 bp, Cannabis indica
gatgcttgtgaaattttatgaaaaataattcaattttcgtttctggagttatttttattgtatagtttggaaaaaattaagcattttcctttttcaaagaattcaatttcgattttatttgaattagttatgattttttgaagttttgaaaaattcgggggtggtgacacacccttgtgcgcgtggctggctgctggcaacaccctttgtgggcccaagcaaacacatgcgcccaagaatgtgcacctggatatttcaaattttccaacacgaagtgaaatgagtactcaatacgtatcaccctgacccaaaagtatgcttaactaacaaatcaaagaacacgaatatttatcatatctaatcaaagtttaatatcggtcccttccaatgtatactccatacatccgatgctggt

SEQ ID NO: 260270 - DNA, 932 bp, Cannabis indica
acgaggatggggagccagtcgatgttgatggggacgacctggttgagggcggggactacgtcagtgaggagcttgacgcgacggttcctcataaaaggtagggtaccttgggtgccaggtgggtaagtcctccatccaaggttaggaaggcgcgccttcaaactcttgaccaaggcggatacctgggcaagctagactgctacattcccgcccacaataatcgtgccacaaaccctgacaaggggatgtgtgcctggtcgggagcccatggttagttaggagcgttgatgcccttgcataagtacttcaaggatgtgtcagacttcttcggtctctgcccgacctagttcactcctaagagcattaagtatttatctgccctcttcgtcctctacgcttcccaggggtggggtactccttctcctcacgaagtttcctcattctttgatttgaagtccacccctaaatagggcacgtcagggtacttctatttctctcaaccaggcttcaagtggctgaccgacatggatgacaagaccatcagcaagataggacgttttgctgatgagtacttcatggtgaaggacgccagcattactcggactcagttctagctgacctctgaagatatccttgtgaggtacgggctttatcacgaagactttactcctaagtctgtggcggggaagaagaggaaatctgatgctggcaggaccgaacgagctcataacgaggatgaactcattcaacttaagcgcgaggcttagttgaagggaggtgcaagggccaagcaatatgctcaagagcccttgaatcttgaagatgaagcggaggaagagtaggtgactccattgaagaggaagaataaaatcacggccttgaccaggcctgttgaacatgcaattcgcataagggagcccatttcacctgct

SEQ ID NO: 260271 - DNA, 488 bp, Cannabis indica
taaaattttagaatgagttttttttttggacggttattgcatgtttgtattgtaagattgcatttttttgttgagttcattaatggaggaaaacccatttcgggttcatagtaccttggccattattttgaattttttggattaaatgggtattggattgtgatagagggttgaaaatggaacaaaacccctcaagcggcgtcaaatttggtggccggaggtggtttatccggccgggtcacgaaccgggtcgcgccgatccgagttgcagacccgcggacccgttacagaaatttttgggtgacaggggtggtaaaaacgacatgtcgttttgccactgtcgggcaaacgacgtgtcgtttcgcacatcagaaagccccccttttttgcagcaaacgacaagtcgtttggatatctgctgcatgtcgttttcaacaaacgacatgtcgttttcattttcctggtaataattttatttacaaaatata

SEQ ID NO: 260272 - DNA, 585 bp, Cannabis indica
cttcttctaattcaaatgttttctggattaaaatatatatgatgtgtcaattttttttattaattgacaaaatatatacatatttcttttttggtggaatgacaaaatatatgatatgtcatctatcatctatatgaaaggatagtactaatttaccttgacaaaatttatttgtaatattgcatttgagagttgatacttgttaacagattatgtatttatttgtaggttttgggttctttgtgttgactaaaggttgcgcaattgtaactctatctattggagaaaggtataatctctaaaaactttataattctttgtttagtggagtttgaatatgttagatattcatccgtagtgaagtaggttctgcgattaattgtactgcggtcggatgggtggaatatatatgcatgttagaagagtttgaatatcttaaatattcatccgtagtgaagtaggttctgcgaatacatgtactgcggtcggatgggtggagaattttatattgttaatgttattttcttattattatattgttttatgtgtttattagttatttttttttcatgtttttaatttttg

SEQ ID NO: 260273 - DNA, 2582 bp, Cannabis indica
tgtattttttgtttttgttgttttgaggcggcgagtttgaattgacaatgccctgcatattgtgcgacgaagtgcttcatcgagagacttgtgtaattgcttatgtaacatgtagagtctgtaaacgtggttttttaaaagtttcctgcctaatgtttcatgaaatgcgtttatatgaattggtttttgacgtgatagtcattacttccctaatttgagattcgagatgtagaagaaagtgtggttaaggtcttcggagaacactttcgaataatatttgactcgcttcctatctagtaacttaaagtaaatattaaaatatcaattgccttaaacttgtttaggagccaagcttacctattattcgatttctaaggaggctgaactatttttgtcttcaatgttatcatcaccctactcattgacccttgttgatttgtttatttaatataaaataaagaaatcatatagcaagggaaggcaaactttgtttatgacctgtaaaaactaggtggtacatggccctctttactcaagaagacatttatgtgtcaattgtaatttcgtcatcttgattgattttgggttatggcataaaggggtacatgaactgattgcaatgaaatacaagcatatttaagggtgaaactatagagaattctacgtcatagactgaccatttaaggatttttttaaagtaaaagaaagaacatgttatattgattgttttctatgatgacagtacacacaaaagccttaaaaacatttcccaccaacctctttgcagttccattgacatttgtccacggttactcttttgtcttttgaatcagaattgaaacctgttgatgaactttctactgctagaattcaaagaaaaaaaaatgagtatatattatggcagcatgatagagaagaagaagacgaaagctatataaaaattaaactaaagcttgattctaaatgtacttaggctaacatttttcttcttcatgttttagaactttaagttgtatatattgatcaagcttgtcctcaatcctcattatttaataatttcaattacttttttctggtgcatgcttagggtatgagaaaaattctaacagacgagtcaaatcttatccattttatccttttggtttagaatagacttgctgtctgttgccttatagaccccaaattaatttccaactcctatgaaaactggtcctatgtaaatgtgggatttaattgtaaatcaacttgctctttggctacctacatttagaaatcactgcatgctttatcttttttagtgcgttctttcccatttctctttctttaatgaaatttcagctcactatgtcgagcgagccggcagcaagtgctggggattcctatattgggagtttcatcagcttaatttccaagtacgaaatacgttatgagggcatcctctatcacctcaatgttcaagactcgaccattggcctgaaaaatggtatgattaatttgtttttccatcatgtagaaaaattttctatagtcatagagggaatgtaattcttatagtgaaaatggtatgctgttttatatttcttcttattttgtcaccacagaagctgaatctgtataaatttgtagagtagaagtaaaaatttcatacaccctttgtataatatagatatttcggttagttgttataaaaataagattttgtgcaattgtgattttctgaaatcaaatgtagattaatgagacttttagtgagagtgtgttcatcttagtgatacaaaaagtcacaatttattgaaatactgtaattgcatgcacttcatattgactaattgaccatatactcgccaaagaattgaaacatagtagtgctccagtggaaatgtactggccacatggtgaacacaggatgtaatttgttgagcccttgaattttatgggtaatcttctttatgaatcatgattttggtctttccatgtgttggaacaagtttattaacaaatattggaaacatattttcatttatgtgaatgtgtgattggggactggccagtgggaaagaataagggaacctaaaaaatttgggaagggtttcatcgtatcctacttggacctatatggcttttgagctttacattaataattttatttctctttatactataaaatagttggagggagagttgtctctttttgatactctacatttttttctttccaaattataaaaggtctttcattttcttttttcctgttatgttatctatgtcagaaggcaatcactgcttgccgaaaaggttttcttttctctcccataaaaatcccagaagactattttttaaatgaatatgaaattgacttgttacaagattccccacaactgtatttgaaaacaagtagactaagtcaacatttcatctcttctaacgaagaaaaaatgtacatacaaatttcaactttttttttttgataaacaaatttcaacattataatcatgctatatttatactaattcatgaagttattgtaggattgaaattacctctcttataaaatattgttgtttttgctggtttatataaat

SEQ ID NO: 260274 - DNA, 605 bp, Cannabis indica
agatcctggtaaaataatatccaacaggaccaagaaggacgtattcaagtctcgcatatattgagatatatgcgataattatgaagacttttcctgcggtatagtaaagatcgtttctttacatagcgagtcagttcgaaggacctaacatgttcgatgacctgacaaggacttgcctgccctaggttgtcgacgctaacaaggtatccgtatacgcgattcgattaggacgtagatacctaagcgcgagacccattgccccgttttaacataatgcaccctaagcctgcgagcttatgcgagtatatgaacagacaacttgcactatgaaaatcgttttacgttgctatatttagtaaaacagatttaaactgttcttcagttattccatttatgtttttcttaatttaatgctaatattcaatgtaaaacggttcaataattaagttccgtatattcaaaggaacatttgctttgtatataaaggagtgatccattacgaatagaggaggctataaatccttgcaacagtgaactaagcagaccaagatccgactgaaccactatactgttagcccaagatatgtttccaagagggggggtga

SEQ ID NO: 260275 - DNA, 1140 bp, Cannabis indica
tccaatcccaattgcggataaacgagctggaggacaagttcaggagatatcaagtggcggaaatagaaaaatcatctggataggactctgacgaggagcttgagccgtatcacccagatattatgaataccccttttcctttgggattcaagaacctgcatgtctcgtcctatgacggaaccacagatcttgtcttgcatttgaataactttaacacgataatgcgagcgagtaacgtgacaaacaatttacactgtattttttttccccacctcgcttgttggagcaacgagtagctggtttaacaagttcactcgtcattcaataatatcctgggagcagctgtccagggattttaagaagcaatttcaagctgctagggataggcgatcgggagcggcctcgctaaccaatataaagcagcagcctgacgaaacacttaaggcatacttaagtcgttttagcacggctgccgctagggtttaaaacttggatgacagcacgcaacttacagcccttcaggcgggaatctcccccatccattaacccctgggggcgagttgtgggatgatctacaaggacatccggtaaaaaacatcactgagttcaatgagagagcttaggtgttcgttcagaaggaaaaagcctgaaaggaaatgaacttattgaaaacaagctcgggacgtacacccaacaatgtttcaacagggactatttctatgagaattgataactcggggtaatttggtccaaaaagaaaggacggagttagggaaccatcgaaagatagaaagaaacaaaagaagcatgaaaaatatgtgccaccgtacactatttataccgatcttaatgaaacacgagaaaatatttacctcgcacatgagcaaaaggtggcctttggtaaacccgagcctatgaggaattcgaggagcaaaagagatcctaacaaatattgtgaatttcataaatagggcatacaaccgacgaatgtggccaattgaaagatgagatagagagtctcatcgcttgaggccattttaggtagtatgtgaaaagacacggggttacaaccagcctcatcagcctgataacccaaacaactaggggttacaacctcttcttgtggaaggagaggacatc

SEQ ID NO: 260276 - DNA, 726 bp, Cannabis indica
attagaattatattattatgttgcgatttgcgaatgcaatggtgtatcttcaataaagtgttataatagtagtgtatatacatttaacataaaattgaattctaattataatgtataatatatgctaaatttaacaaataaaaaaagttttgttgaatttaaaataaaatatagcataaattaaatttatactacaataaatatcaaattttttatttgtcatattcactcataaatattaggtttgagccggagtaggtccgtcccaagttaataggaggaaattacactataatacttcttttaagttttaatttgatgtctttaattttcaccctcttttttaaaaaaatttatatttatttcttttttcaatcattctaccaattttacacctatcacttcacaatattttttattcttctctaatcaaaattttgttcccaacttttccacaaacttacacatccatctacaaataacacaaatctattatgtttgaaattatatcttagttatgtgagtgtgtgaggttaatttaggtacaatactcataaaaaaaggtatatttgaattaaattttatttggaagtaaatttagttaatgtaataaaaaaataaagtattcttcaacttctcccagttaattgggggtttttggccaaaaactctaattggtttttgctatacaaaaaaaattatgtttatatgtatagtgataaaaat

SEQ ID NO: 260277 - DNA, 803 bp, Cannabis indica
ttagttactagtttttgcctaagtccttctagggaataccctagtgataggatagtttcagaatgatggaatggatgtgtacttagtgtaaccattactagaatcatggatgtcctgatcatgaccttaagaaaagcaaaaactgttagccaaggtttgcatgtttgatagctattctaagtgattaggggtggaccatcctattgtcattaagataagaaagtgtttgtttcaacaaacactacttttctaagaaaatgactaagtctgaaagacaaagtagcaaagtagaggagatatttttttcttgattccaaaagtgttctatcatcttattcaaaataagatggtcccattgactgttgtttttgacacaaccgaagaggtcaataccatttagtgttcttagacaaaaagtcacagtaccttgtcgtagtgggagggttttaaggaactcaccctgttatgacttggaagacactggtgattaaaatccattgttattttaaacaagtaatggatagtcagaataaggaactaagaagtaaagccaagagaactatggttaaaaccattcttatggaataaccaaaagttttctattacatggacaagaaaggaaattttgaaaataagactattcaatggacttaacaaaacttcctgttcctagtgttaaaggtttgagtttatctaaacctatggattatggtatgcctggtgatttatttacttaagtggaagcaactatcttttgtaagttgccagagcattttttttctaatggcaatctatataagctt

SEQ ID NO: 260278 - DNA, 514 bp, Cannabis indica
atgggaaaaaatttgactaaaaaattatttcggatggtaaaacagataaaggtgcatcaatgtatccattaagaagatgcattgtagaatttcccaatactattatacggaattttaaatatttttgctgtttttaagattttatttacataaaatatgatttttttgatgtatttttatgttatactcttgttattttattgttgatttttgttattttttttacatttttagttgatgttgttttcctgttgtttttatatgggtttcttcttgtttttgtgttatttttataaatactataaaaatgtaaaaaaaaaaatctttaattgtaaaagtgtaaaaatttgatcaaaaatagtaatttatgtaaatttttcaaaatattatcgagggttaatactattttcgaccttgtattttgcaaaaattactcattggaccatctattttgttaaatgataaaataaacctgtattttataaatagtacaaataggaccttgagctcaatt

SEQ ID NO: 260279 - DNA, 534 bp, Cannabis indica
aaccatttaaatgccaaaactaattatttaataactaaaataaattattgaataatattgtcatttaatataattattaattagacataataaattcttccaattaataaataaaacctagaatctcttttcttcacaatttttcccttgcttagtgaaaattcataaactagacataatctaattctagaattataattgattaattaaaatcaattatctgagtcttacaagcaatacggtctcaaatagaatggggaccgtgggcctatattactgagcttccaataagctgaacaagaatttaccaagtaaattccctaacttattaattccttattgcattcactcttagaacttggaattgcactctcactcatataaaacgctctatacgttccaccatatagatacactatcacatttaaccatcgttataatctaaataatcaaagatgctatatatagataatttacactgagtagggataaatttatcgtttcacccctcaatgtattttgatccttaaaaca

SEQ ID NO: 260280 - DNA, 504 bp, Cannabis indica
atccaagagaaaaaaaaaagtaaaactttaatgttaattttcatatatacatataaatttgacgtataacaatataaaatctaattactcatccaaactaaatgaaaatactaattagttcgattggatgttggatgtattggatttttagacaccccatccaccatccgatccgatccaattggatatttaaaaataacatctaatctgatccgatcacaattggatatccaatgtttggtggtcggttgtaattggatcggtcggttctcattggattggatcgatttatgcacacccctactagtattccaaggcctaacaataccaggcgttcaaaattcaccttctcctcaaggtgaagaacaacaagcttccacaacaatctttgcccaaactaccctttcacgagaaagcattagaacaaaaactctggccctcgtcctctgtcaaaaatctagcgagtagctgcggtacttcccgtctggtcttataccgaatttg

SEQ ID NO: 260281 - DNA, 659 bp, Cannabis indica
tttctcgatcgagcacataatccaaatatcgtgccttcttcagcaactactgaacttgtgcagataacatctttacttacagaaataggaatacaattgcataaacagcctcctaccctttggtgcgataatcaaagtgctcgagcactgctttaaatccagtgtttcacactagaaccaaacatattgagttggatgttcactacatcagatctcaaattgcaaaaaagaaacttcaagtctgctacattccaaaagaagatcaaacaactgatctctttaccaaacctctgtcatatcctaggttttaattcttatgtaacaaactttatcttgaacactccaaatacagtttgaagggggtattagtgaacgcagttagttatagttagttattccaactgtgcgtgtaagataagagtttgttactcttcacagctggacagttagttttcctaactaaatttctgttcctaactgtatttttgttatgcattgtcttgtactcacttcatatataaatacaatcattttttagagctgagtaacagtttttactcaagctcattttctctcaaattagtttctcaactgtcatatttttttgagataaaatgttattacagtagaacctctatccaagaatacacttgggacca

SEQ ID NO: 260282 - DNA, 1127 bp, Cannabis indica
atgctaacatacttgcactttatgaagcaagtagagaatgtgtgagagtgagatcattaacataatatattcatgaaacatatggattgcactcaataaagtaatatcaacattaacaattctctgtgaagataatgtgaaatgcgttgctcaactaaaactataataaaggagatagaaccaaagacactttcaccaagttcttctaactgcatgatcttcaagaagatggctataatggtgtccgacatatttagtcaagtgtcagtcatgcgtgcttattcacaaaattattaccaacatcaacatttgaaaagacaacatatgagatcagaattcgtcgattagaagatctccacgaatgcttaagtgagggggagttatttcacactgcactttttttttcattgatcgagtttttgacccactagattttctagtaagattttcgagcagttattatagacatctaaagcaaagtgttgtaaaattatataatacatatatatggatgaccataataatcgagaatcaattaattacctaaaaaatgaaaatcactattaatgcttgattatattttcttttattacattaatttagttttttacttttagatttattcttgtataaataaaaattcacttcattaaattaaattagtatagaaattctcattcaccctattattttcttcttttcattattttttccttctcttattttttttctcaattctatattattttataacattttattattattattatttttgaattaattattattattattattattatttgttagactacataacatgactattttgacaagttgtgcttgtgttcacacgcttttactatgacgtcatgcgtgacatctaaatttgctttatttttttttaattacctgaatttgtttccttttttattcgaaaatgaccctaaaagtgttaaaatcgtaaacccgggagattggacccagcaatatcatattcatccacctggacggctaagttaaactttgtgaaaaaatcgaactcccatccctatatttactattgggaaataattttttagtattcgaaataattttttaattaaattttttcttatagtcat

SEQ ID NO: 260283 - DNA, 565 bp, Cannabis indica
tttaaggtctaaaattgatttctcaattttacaacaacaaattaaaatttattatttatttttctaataaataataattaattaattctcattaatatcttatttcaataggattaaaataaatattattttcactaaaacaatatatttctaagtttaatattattcaagaatcatattatatttaactaattaattagttttagcagataaaactaaataattaaatactaattacataattcataattgatgtaattaatcaaaataataattttcataaaattactattttactcttaaaaattatttcttatataaattaattcttactcatatttctccatcaaattaaatcttcccctgtacagtgttgtatagaggtgacttggggccatggatctatattttgaagctccaataaatacttaattattattaaactcatcaaaatagaataatccagttgaataattttattattactccactataaatatagaagggaaatttgactaaatatgcttacataacattaaatttttttcccctaaacttataatta

SEQ ID NO: 260284 - DNA, 770 bp, Cannabis indica
gtcttctctgtacccttgaaggtcatcacgtaaagaacagatgggcctttggaaaaatataacgtgcaaaacaagagtgactcaaacaccagaaaagagaaatctaaacgtgttacacagaaactcaaggcaaaaaattcccaaaaacttcgaacattaaacccaaaaaaaacagatgaacagtaaagcatgccatgaacacaaacgataaagtgagggatgagaaaaacttacattaagtgttagaactgggagttgttgttcattgacgatgaagtgttgactgacaataacgaaagaaggttagtaagaaacctatggtgttttctggttttctggtttgagggattttttctctctgaaaaattcgaagcaatttggtgaaaggctgaaagtaaccaaatgaaggaagaatggtggcttttataggcaaaagttcatgtggaacaagcacgatcacctaccaatcgtacggttgggaagacacatgattcgaattcccaagatccaacggctagattgatttgtaatcaaggcggtggaaacgcttgagtgtccgtctgacacccattaatgtgccgtatcaattaatggatgtgaaacgaatcgacgcctgcaaaaagttaatcactgcagtaatttcgatcattaattacaccttcacgcgcctgaggcacgtgccaggaaaccgaggagccaactggaggcatctgagcaagccttgttcatttttaattaaacaaggcttggggggtaaatgttgcccctga

SEQ ID NO: 260285 - DNA, 636 bp, Cannabis indica
tacacacccctaaagaggatatactggtgtgaccacttaatattgcagtgtaatttgtcgaagtgttaggatacacagtatttttgtggggtgtagaacattaaaataaaattactattttcagatttattgttttattttttttaaaaaaaatgaaaatgctgaaatctaaaagttgtggaaattgtttcattttgcttaattaactaatcaacctgaattttaaaaaataaaataaaagtgtaactttcttcttcttcccgagaactttgaagtaagaacaccattgttcctacgtccactcattgactctaagctatctcgttcttctattttgacatctttcatatgtgggttttttcttagtgttctttgagcaatattatgaattttgagcccaacaaattttttgtttggggtttgaagaatatgtcttgattcccttgttaatttttttactgctacatcaaataatatacatacatgtttatactgtgtttacgcatagtaatttttcgatagcatgtttcaatcaaattaaattttctgctgttaaaaagaaattggagtgtttaaattgatggatgccttaaatgggtttttaagatggagggtcaatcaattggagagttctcg

SEQ ID NO: 260286 - DNA, 381 bp, Cannabis indica
aagctgtatgcaaaattcaagaaatgtgagttttggctatctaagttgtcttttcttagacacattgtcagtaaagatgggatcaaggttgatccgggaagattgaatatgtaagcgattgaccgagatcgaaggcagttacagaagttagaagtttcctgggtttggcaagttattaccgtcagtttggagtagggattttctaagatctcagcacccttaactgaactcaccaaaaagaatcaacaattgttatggtcagaaaagtgtgaagcaagctttcaggagttgaaatagagattgattacaactctcgtattagccctaccatctcataaagaaaaaaattgtagtttactgcgatgcatccagatagagtct

SEQ ID NO: 260287 - DNA, 1448 bp, Cannabis indica
atttttacggttttctaaaaaataacacgaaaacaacataaaatcaacaagaaaacaacataaaagtaacatgaaaataacatcaaaataacaacaaaaaaataacaaaaaataacatacatataataaaaaattaacaacaaatgaacaaaattttaacataaaaagaccgtattttatgtaaataaaatcaaaaaaatcgtaaaaatgtttaaaattctgtgaaaccgtatttttgttatttttgtgcatttgtgaaattaacctaaaaaaaatagactaaaaaaattttctagatacggaaataaataggagtcttttaagggtgaatagccctaaattttttttgaagagaaaactgaatacattgatatttctttaaaaaaaaatgtacaattttaatttttcatacaaaacttgaaaccggccgtaacgcaaatgattacaaataaaactaataggttgaaacgaaagataataatagtaagtggttttggtagtatttaggatgatgacgacaattacaatcaattttaacgtttttcaaacatttatacttatcttattggctttttctaatttttttgccttttcgaaaaacaccgttatgtctgatattattctgttcaaacaaatttagtatcgtattattttatactaagctagctggcaaaattgtctcacagcctggttttagccattagaaaacgtcaacaacaacaataacaaagcccgcattttcttctccaaccaaaaatcaatcacaattctctctttctctctccctatctctctctctctcaaacccacgatccatacaccatgacagaggaatcaaagaactcagcagctgaggcaggagcaccaccatccgccgaggtggtaactgtcgttgccgatgttcctcaagcagaaaaacccctcactcagactgaagctccacctgcacccgtgcctgaaccggaggaagcccagaagcctgccaccaccgatgatgttgttgaggctgagaaacaaacaaaaactgctgaggacgagacagcaattcctcaatcggtttcttgtaacgaagaaagctatgttttagctgagcttccggagttgcagaagaaggctcttgaggaattcaaaaatctcgttcgtgatgctcttaacaagcaccagtttactgctcctccacctcccccaccggctccgaaggaggaagagccgaaggcagaggagaaaactgacgaacaagagcctcccaagggggaagagaagaagaaagatgaggaagaggcgaaaacagaggtgaaaactgttgatcaagaggcttcgaaggttgaaccagagaaagagaaagagaaggctgtagttgtggtgaccgaggttgcgactgtggatgacgatggcgctaagactgtggaagcaatcgaagaatccgtcgtatccgtaacccctgctcc

SEQ ID NO: 260288 - DNA, 687 bp, Cannabis indica
gtcaacacagtggaatataatcatgattatatgttcaaaagtttatcccatgatttgtcatttcattggatttagactgacatgataatcagtgataaggtatacttacatcttggataagtgttatgtcctttccagggattggcaaagttaaccagtatcggatgtatggagtatacatttgaagggatcgatattgatctaagttaagatatcataaacttacagttatatctttctaagtcaatatcaatggttgatcttaggtctatggatcttaatcttaatatggttacttagttgtattatttatgtttttaaagttgttcatggaagctaatctatgattctggcagatatttacatcttgggaacatggtagttcaattgagtgagagcgttgatcattgatatggaatctatagcttttagaagtgaaacagtgatttcctttgagcttgtcttgatagagataaatgattgagatctcatttcaataattatattagtttacggaaatatcatttataggtagctaagtgttttaaggataaaatacattgaagggtagaacggtaaatttatccatattcagtgtagatcatctatagaggaacttttactattaggattgtaacaatggataatcataatgtatctaaatcatggtacatatagagcgttcta

SEQ ID NO: 260289 - DNA, 816 bp, Cannabis indica
aagttggtccttaatcatagtatgtaagactatgaagaatccaaacacaaggaaggagttttgggctcagatcttggtgatactctgctacagaaaggatacaagggttagagatccgagcggaaggagtcatttaattctactgcacccactataaggtttctcaactttttatttgtttatttacattgttttagaaattcatattaggatgttaaaaacatacatggtagtaaatctagatcctggttaaataattccaacatttaatacacgtttacattgactcggtaaaagcggaccaatcacagttgtgtgatgttcaaatattaaccgcatttattttacgtgggatgtaatcaaatcccatggttttagggaattattattgtaaaatatcagtcaaatctgtaattaactgccctcctatgtagttataaataggagcaggttgcactgaaaaagggatgaaaaattcattagagaaaaaggccctagaactgtatcaaaaatttaataagattgacttgtggactatgcagaattttaactacaaaatcacgttaaagcctgtgctattacttttttctttactgcttctattttttgtgcaaactcaccatgttataggcttagatatagttaacgaaaatctgcgttaacagctttaactaacaactctaagaacctaaataacactcttgtgatagaatctaaccatatcaggattaagattttttgatctaagatcaaccagtgatattgacttagaaagatacaacggtaagatcataatatctttaccaagatcaatat

SEQ ID NO: 260290 - DNA, 614 bp, Cannabis indica
aattcttccaccaattcattgtgctaaagtccttagcttcctccatggccaaaagcttagtatcaaacctgtctggaagaactctaacaatttttctaacaagaatagaatcagcaagcttttcaccaagagcaaaatattcattagctatatcaaatagcctttcataaaactcagtcaaggttttattttcagaaatcctaagctcatcaaatttggtctgaagcataataaactaagaacacttaattagatgttccttcaaactgagtttgaaggatcctccaagcatctttagcagattcacaagaagatataagcttaatataacatttacctactccattaaatatagcatgtaaagttgtgctattgtaagcatgaagtttatcatcttcaatagaccattcaagttcagactttttttttagaattaccttcaaaatcaaccgcaataggaggagaccatcctgatagaaccatcctccaagatttctcatcttgagacttgatgaaagccctcattctaactttccaataaggataattagaatcattgagcaatggtagtcaagaaatggaacttccttctgcaaaaaatgacatattgcaca

SEQ ID NO: 260291 - DNA, 956 bp, Cannabis indica
tcccaaatttgtcgatggctaatatcttcaacaaccttccaattgcgacctctgattccaattgcgacctctgagtggatcttcaagatagaaaacttgcttggcttggttagcaaggatgtacggctcatcttgataccaaaatccacgtatatttatactgttatattattttttagtgattgtcttctttcttataggattagtgttataccatttacattcaaacaatgtcactgtatatgcaccagtataagatatagtgattacatcttcaagtgtcccgtagtaattaaacccttcaattccagcaacagtaacaccactattttgtgtctttcgggttttatctcttttagacgcaataaaccgaacaccattcactacacaatcttcgtaaaaggttgctaagtaatcggagcctgaagctagagcgagtaactcatcaccattttgtaaagttccaagcttgtgcaactcatatatctaaacacataaaatgtattaatatgagaggaatatagatttttgaattaaaactttaaaatattgtcatcatacgttcttatgaaaccacggacggaaagtttgcctatgcaaaacatcgtggttaccattaggatatttatgcctgatcttctccaaatgttcactgtgaagtatgataatgtcaaggtacgatagacgaaaagagagacaaaaactaaaaattaataaaataatttataggaatgtaacaaacttactctaaataagcttgaatttcagaagaattttgaagaatgtaccactcaattttttacgactaatatgatcaagaggcttgatagttccgctagtcaaaggatgagattgagaattaaaaatgagagatagcgagagacagaaggtgcatcttcatttcgatcaagacaattaaatcttgtttctacaccctttaaagtacattgaacaaa

SEQ ID NO: 260292 - DNA, 637 bp, Cannabis indica
tatttcagttgcaaaacagtgttttcttggttgcattccaggacatctttcagcttctgttgtaattcttcatagttacaattggctgaaatgtaatgtccactagcttcataattttcataattcattcgatcatcaaattgtccattgcagaagactaggaatggaatgtctttcttttcctgtgattttgaaatggttattagtgcaaggcaacgattttaaaactggtttgattctgttatgaaatagagtacaaacttacttctatttctgtccctttgttcaagcattgtatttcctgtcctgattcctgcttttgccatttttattttatttttttgctgttaataaactattaggaaactaaaataaaactattaagaaacgttaaaaaatatttcagaaactaaccatttctcaaagtgttttctccttttctcttttccaaaataaattcctgcaaaaaatgtaattaaactattataaaatgattatgcaactgtaaatcaacttaaaaaccacaactctttactcaaattaacatagttgttgtcattgtgacttttcatcatgtttatttgaatcagatcaatttccaactattataaaactaatttgccaccatttacataaa

SEQ ID NO: 260293 - DNA, 472 bp, Cannabis indica
cgacaacgttgggtaactcacactcacactgcgttgagttgttagttttttttttctttcttttcttttaatttcggaaagtgatgagattcgctaccttcaatatgtggctgttttcctcatgaaagcattattagttacctgttatcatcttagttttagtggccctcattggacaatcttggaccaatctcatatgggaattattatgaaactgaaaagagtattaagacatattcttatgttgtgattattattatactttcgaaaaaaaacggatctgttggaatttcagaaaatgtttgaacattattaataaattacgtacagtacgattttctttttctctcattaaaaacttttgaaaaaatgtatttcattattactttactgtgtatgtcatttttgacatcgattcaaattttacttggtgagaaagtgggtcctacattaataagtttaggttggtggc

SEQ ID NO: 260294 - DNA, 307 bp, Cannabis indica
aatttggttgagatttcaatattatgtgtttgtccgtgtatttgtatatggatggttttttaaaaaaaaattaatgtcatttatgttactcaatccacatatctaaaaatagtacttaaattaaatattttttaataaaaaaatgatactgttcattaaataacattagaaaaatataattatataactaaaaatatatataattaaaataaaaataaaaattataattaaatatatgtgtattacatataatattaactgatgaataagtatttatgcagatataagggaaatttgaaatttcatg

SEQ ID NO: 260295 - DNA, 655 bp, Cannabis indica
atttaagctctcttcaactgtgtagtcccatacctacacagtctcagaatcattacacttgaccttccccaggcgatgtgggattgcacagcttacccagtttttccccctacagatcacgggactactgactatcacagtttagttaattaatattaatttccttactaatctcatattctaagtgttatctcaatttttgtccacctgacatgacatctccatttggcaaaaagctgaaaaatacattgaagataggctagtactaacctgccaagttagtgttgtacaaccttccaacctggaagatcccataattgcacggtacacacaagcaagtttatcctaatagagctgtacaagcctgcaaggtccttgccagacctatagttggccggccaagggtgatagcctccaagcaccgagcaacccttcaacaaagcttgttggccaagcatacagatacgctccaacacttgtgtttttccacaaagccttccaactcgaccttagcattcctacaacttcagaacagttcaagctgcccacgaagatagggattctccatcaacaaataacatccctattatttgggaattactaatcatctattttatattccaaatatacagtgcaactttcctattttttaagg

SEQ ID NO: 260296 - DNA, 658 bp, Cannabis indica
gtgatgcacccattttttcaatttttaaaaattcataactgattgaaataaaatcgaaattaagttctgcaaaaaaagtgaattgcttaaggtgtgattggtttcggatttgaaaactattttatgtttttgaaaattaaaatggtggggtccacataagaattattaattggttgagtgttttcaaaaacaaaatttgaatactattttgagttttcgactaaaaaatgaaaacacaatttttgttttttatgttttcaaatcatagaatccaaaaactctccaattattctcttacgtttttatttagagattctcaaccaatcacatattcaattttttaaaactcaaaaacattaaatcacactaaaaccaatcacatattaagaaacaatttttcacttaaaaaatttaaatttttgtttcgaaaacacatttttgaataacacaatttttgaatcacaaaccaatcaaaccttaatttttgccaaactatctaataaaaataattccagaaacaaaaattcaattatttttcataaaatttcacaagcatcaatcaatcatcatataacacagagatcaacatgaaaccatctaaatcaacacatatctgttggaaattattttaccaagatcttagatctactcacaagta

SEQ ID NO: 260297 - DNA, 580 bp, Cannabis indica
aacgccgagttccaaaataccggacaccggaaatgcaaaatatgcaagctactgaataacataaataacagtataatacattatttaaatagccataaataatttcataattaatcacaaataactgataatttctaaattaactaagcgggctttacacctcacttaatccgaaagtctaaaagataaaagatcaaatatacataaaacatacctacacataatttattatccaaaataaaatggcttgaaacatctttatattacttaaggaatcaatagatcgatggaaaaaaaaaataatgtataatcattcgttggatccaaaatcatccacccaataccaacaaataaagaagaaaacaaaaaaaattgattccatcacttacacacgaactccacaatggcaaaataatatatttcatgacagtatatataaatatttataacgaatgtattgtgttctgaataccaaaaaaaaaaacttaaatgtatagtatccatattgaaatctgaatacggtttatcaaataatcataaaattacaacccaaattaacaaatagaagatcaaagcccta

SEQ ID NO: 260298 - DNA, 985 bp, Cannabis indica
tattgactgaaaaagcaatgtcaagccgtgttatagtgaggtagattaacttgccaattaagctcctatattgagtaggattatccaagagttttcctgtttcattattgagttttgtgtttggttccattggagtagtgactggttttgtgccaacacaaccagtttcttgtagtaattgaagagtgaaaggcctttgagtgacagagatgcctttattgtttctggcaatttcaaggtcgaggaagaagtgtaaacttccaaggtctttgagtatgaagtgggagtcaagagttgatgtgaagtgttgtaattcttcaaggctatttgttgcaacaacgatatcatcaccatatattagtaatgcaagaaagatgccagttttatatctaatgaacaaagagtgatcatttttagattgggtgaacttttgttgtagtaaagtggtgctaagtttagcataccattgcctggaggcttgcttaaggccataaagacttttctgtagtttacacactgcatttggaggaattggagatttgggtgtgtaaccttgagaaagtttcatatagacatcttcatggaggtctccatggagaaaggcgttattgatgtccatgtggtggagatgccaattgttaatagcagcaagtgcaaatagaagtttaagagtattgaatttggccaccagggcatatgtttcaaaatagtcaaccccttgttgttgagtgtagcctttggctaccaatcttgctttgcaacgttcaacagagccatctgggttgtatttgattttgtacacccatttgttgcttataacatgttgccctggaggaagtgggacaacgatccaagtgttattggcttcaagggcatctatttcagtgtccatggctttgttccagaccttgtctttgcaagcttgtgcataagaacgaggttcaattacgtgagcagcatggatggctgctcgaaaagttggaga

SEQ ID NO: 260299 - DNA, 1088 bp, Cannabis indica
aatcggttcttgtttcagtttttccacgaggtggatattggcagagttttggaaggaacgccatggacattcaataaaagtctgctgctggttgaaaggatacagggaggggagaatcctcggactaaatcgttaaatagcatggaaatatgggtgcaagtttataacctcgaaatcggttttcgatcggaccgtgtgttacaaggggtggggcgtacattggcaaatatgtgtcctcttgtccgaaaaactttgctggtatttggagagactatttcagagttcgagtgcagatcaatgtagagaaaccattaaaacggagaatgcgtatctataaaaacaagacggagtggttctgggctgactttaagtacgagcgggtgccaacgttttgcttcatttgtggtacaattggacattcggaaaaattctgtcatcggttgtttgatgaaccgatcgaaacaattgccaaaccttatgggatgtttatgaaagctccagacagaaggcaaggaaaacaaatcggagctaggtggcttagagataacatgggccagccgatgggttcttttgccggccagagttcatcggagaatcatggggaaggtggaatcaatcagaatcggccattaagggatattattatgattgatggagtagatagtggagagaaatcaggggatacgaatgtggaaagaatgcagtttagagttgaaggaaaacaaggagaaaatcaagggattttttctaaagagataaatgaggaaagtaatgagataatagcacaagtggatctctttgctactgatttaaagaggcgccgtataaatggggaaggtcaaagtgaacaactaattgggaaggaggtgggaccagatttggtacttgaagagattgagaggcccatcaatgtggaaagtaggccttttgaaaatgtcattattgaaaatggcaaagaaaaagtggtgaaccgtgggcttgcttctagaaatgaggaggggcttttgcaagtggactcagaagaatgcatggagataaataatggtatttttccaaaaaacgatttattggcgggtactcattttggg

SEQ ID NO: 260300 - DNA, 1207 bp, Cannabis indica
tgattgtcatcattgatttttattttctttttgcaggctatgatttgcttcttgtctattgatagaccttcgcattaatgtcgttgtcagagaggtaatgaaatgtttcaatcgtcctttcttctctttacacccgttcaccgcatccattggatcgcagaattttaatcaatacgaattctcaccgtacgatggtgtctgatcacagctgccttgcaccccttttggcctataaaagctagcacctttcctttgctgggttattttcaccacttcacgattttcaacccaaccaaaatattcaaaaaattctagaaatctttgacttcctgctactgttcctccgcagttgcaagaccatattctatcaccgaacaacatcaacttttttcctaccacctttctgtaagtctctgtgcacatatttctattttttctgcatgttagggcaaatttagaacggtgaccttctcattttagtcgcgtttgatttttgtggtacgatggttatggcggaggccattgtacgctgttatatttgcatgcttattatcatttttctttggggctagaatatgatttccttgtttgggtgttgtcgagtgtctgaagcgactttcatactcctattcttcttcttttcgtctttattttttgtttttcggacgtttgcacccaatgtttgcctaggagaatctctggattccctatctttggcaggcatctggagggggcctctttctagcggttatggggcccccattccccttttttatcttagattttggtttgggggctaactactggatttctttttcagatgagtgacattcttcaccatcttcacatccatggtttttgtagctttgaccaagaaatcttggaactttaccgattctaggccatgtctgtccccacttaaatggctgggaggtagataaaactgcactcgaccctgacgtgtgcccatcaattggagaagatcgtcactgttactgggatcaagccttccgctgctggggttttccatcgccttcgagggacgaaaaaacacccaatcataactacaacggcttcggagcatggagtcagacccacctaaatgttcggagccatgctcccactccaagactatttaaattaacttaactagttttgttggccttgcaccttatcaactcattcctcaagcctatcgcctactttc

SEQ ID NO: 260301 - DNA, 479 bp, Cannabis indica
aaaatattaattttgttccctaaaatatacggcttgttaagaatccaccctagactcttacatttacagaaatttagtcttgctattaggtttcgtcattaattattctatttaaatgatgacgtgtctttgtcaattagtaattttaccccctaaactttgacaactatcaaatcgtacccctaaaaataagaatgagaaagattcaacataaatcttataaaattaatatagatcttaagaaaaattattttcaatgattaagaaaatttaaattttaaaactaattaatcgatataaaaaaaatatatttattttttattaaaaatttcatttagatattaaaaaattatacattaaaaattcaagtttcgtaatattaaattttacggagacaaacttgagtatattttatttttatcaaaaaatattttttttttaataaatcaaaaaatatagatttctttaagtaaacataa

SEQ ID NO: 260302 - DNA, 633 bp, Cannabis indica
agaaaagaggttttagggtttatttgttaattaagagactttattaagtctaattaataaatacattcaatgacaattttattaaataaatagttttgacatttaagaagttgaattggaaaatatggtatttgtcaaagagaaggataaatagttgagaaaaatgacaaaattgtaaatggtgggcccacatcctaatggtcggccacttaaggtctttctaccatttatttattattattttaatgttaaataattcaaacctaaacctagaaagattcctataaatagatagtgatggactcaaaactgacagttgatgcaacttaagccttcagtgaaatttgagccttctctcttttctctctattttgaatccttttcactctctttctcttcaatttttcatcctttatagtgatagagtacatgcccacacataggaagtaagtactcaatcatagtgtgtaagactgataagaatccaacacctgaaggagaatcgggctcagatcttgataattctctgagatagaaaagaacaagagttagagatttgagtgaaaggagtcatttaattctgatgcaatcaatgtatggtttcttgaactttgtatgtgtttaaattctatt

SEQ ID NO: 260303 - DNA, 1178 bp, Cannabis indica
atgaatctgaaattccaaaaagcaaacttgcttggaacggaattatctagagaacaatgagttcagtatagtcttcctcctaagtataattaatttgttgtatcttatatgatcaataattttaactcatccaacatggataaggtagaagaagaattgcgcacttatgaaagacacttgattgcaacaccgcccccccggatttgcaaacttgtgtaagaggaaaagaattaaggatgaagcttctaacagtgctgcttcttcaagtacaattgatggtaatacacttcaatgttcaaattgtaatgagaagggaaatcaggaagaacgatgtcccagacttcaaaacaattcaaatgaaggtaatgcttttgtttttgaatcatgtgctttagagaatgaaaaatccttctcgattgttgattctggatttactaaccatgtttgttcttcattgcagctgcttaaaacttgggattatctaaatccagaggagttgaagctcaaagttgaaaatgctgagttagtatctgtccaagctaaaggaagagcccgcctcatgtttcagaagaaatttttagttttagacaatgttttgtttattcctaatttttgtagaaacttgattagtatttcatgcttacaaacacaattttataaattgaattttttgagttttgtttgcacaatttctcgcaatggatttcaattatgtgttgctcacatggaacaagggctttatgttttaagaccgaaaatacaaatcgcacttaacaatgaacttttcaatattgctaaacctagaaaccataaaagaaaagagattgataatgatgatgaaacttatctatggcatctacgattaggtcatatatgctatgacaaacttcataggttaaccaaagactgtccattgagaaatgtcgtcttaggtgaattaccagtttgtgaatcttgcctagaaggaaaaatgaccaaacgttttttctctgcaaaggcagagcgtgccaaacaaaccctttggttagtacattcagatgtcagtggacccctgaatgtcaaagctagaggtggttatgagtattttgtcactttcattgacgatttctgtagatatagtttcatttacctaatgcaaaagaaatataaaacgtttgaaaagtttcaggagtttcatg

SEQ ID NO: 260304 - DNA, 3229 bp, Cannabis indica
tataaagccaacttagctaatcattgaatgcctaaaaacgttgaagcatatatttgtgtgttctatctataatattaatatttaataaaaaaaatttgaaaaatcctaaatatatatatatataaaaaatagtttgatttattggtttgaaccacaagtaaagaatttaaaatagtgaccgaaccacaaagttataaacggttcggatcgactaaactattgacagtaccggattcacttgttctgatctcgaatcatttagtctgaattgattgaggtttggaactacaatttataaattatatgaacaacggtaggagaaagagacttttattataagatcaataacataatgatgaaataagctataatatatttaattatataatatcgtatgtattgtcatgtgccatacacatatatttaagcatgttagttttggaatctttaaaactttgtccatatatataaaaatttcttaaaattaactaacaaattaataaaataaagctaatatatttgtttatttgcattatgtgacaagacaatcaacatgatgaaacaatagatagcggaattgagatggatatattattggaggagagtggaataataatgaataatcgccttttttaacggtctacttagttgggctggtgtggtggggaactgtctccgaatgaagctcttcctgtttggcaacccatattaacttactccaaccctactctactttggaaaactacgtacactacaatattttgttgctttgttgtcttaacagacaggcttttattcatggaccgtatatatatgcatataaactattgtttatttttttttgtaaataagaatcaatttattgcttcaaagaatcccattacatcaatctctatatctatacagtaacaaaagcctttaattcccaaacccatctctatctatactctttaccttcctcggcattgtataaaaatttttaatataacatcattctgaatcctctgtacagaatgagtaacattttaaactttgtaagaccaaagaatattattgctaagaggctaagagcatttgttattgaatatcaatgtgcagtaattaattacactgatactaataattaatgatattctttaaaaaagctattttcttaagttaaatgatactaataattaattacagtgattaccgaatgacagtaggatgctagatacaccaataataccttttaataattcacctgcaaagatttcttttctcactttactaattaatgttctttgctttatcaatcgagagtagcaatcgacccatattgtctgtctaattagctcgccatccaagccaaggcggccctaagtattcggctgtattattattattattattatcacttgatcattattaataatatttatatattcatatgaacagtttcttcaagaaaagctccacgtatttatctaatattgatcttatgctgtactcgtctattgttacgcttaactaaaaacaaccaacaaaacgattccgaattttcgataattaagacccttgtcatactagttagtaccagtattactactaataattacatttttttataaatagattttataatttggtgcatgacacaatacaaggaattctatcaatcattccattccaaacacgttttcctgatttggatctgagtgggaaattctagggacaaaaggaagaatactaagaaaaattggactaatttggaaaaacttgggattgtttcaaatttaatatttcagaaattggaaatcgacagctcctattaaatcaactctggattcgaagccggcctcgcctgccaattgggtaatcgtaacctttgaatgtttaaacacactctacgggggttttcaaaacatcacttgccttataaatttcaaaggtatcgaaaattactatcttaaccctttccctgagaatactaacaagttatatttgattcattttatgaggttagagtagtcatttcagaacggccgtcccatttgattcccgccagctttttatgaaacaggtatttcagttaataacatcacccctgaatctgatgacaattaaccaacataattaattccactctttattatttccatctaaaacctcatctcaatctcctaccattgatcaccatgacaaccacctccacctccgccacgtcatcacaaatcttacaccacaccgccactttcgtctccgaagccctctcgcaatccgaaattcgccgccgtctcttctcgattctccgccgcaaactgaccctttccccacccccttcccacgacccaaccgccctaatcaaacccctaaacctcgccgccgaaacactcgacaacgcaataacctccacaagctccaccgtcagatcatcatccctccgcctcatcgaaaacctcctcctctctcaccccgaaaactccgtctcctccctcctcctttccctcacctacggcctctggcgccgcccggtggacgccgctctcagcctcctagacgttttccggttggatccttcgtcggctcgctcagaaatcgctccctcgcttttcgaagagctctttctaattcaccttctccccgttctccgcgaattgaatgatcggagatcgaagatcttgtcgattagcactacttctcctccgccgaataataacaatctctttaccaatacattttacgacgacgacgacgattactcgattaacgatgaaatgggtgccgtgccgagcacgaaatctttgtcgaagatgagcgacgaacaggcttctgagctgaaaatattggagacggaatatgaggaggttgttgatgagaattgccgggttttggctaagtacttgaaagaggttttggaaaatgaagataagggtgataatattaataggttgacttttcatccacctttgactataatgcaaaacacaagccaagctcttgatgatcatcgtggatttaatgaggaccgtccgatgaggactgagcagcttagtaggatttccgtaaacggacggtataatgtaataattgtttttttttctccttaattaatttattaattatagactggggaataatataaccaatattgactaaattactatgaggtaaaggtaaaaaatttttatacaaaaatgttaaagaaagtgaatatataatttaggcttagttaaattttagttaaggt

SEQ ID NO: 260305 - DNA, 1363 bp, Cannabis indica
aataaaatcccagtttgaagaggaataaaaattacaatagcacaattaaagatatccttctttttttaggctagtgattaagaataactatgttaggcatttcgtcaaacacatggaaggtatgcccttatatacatattaacaaaatattcagcttgaagatgaagaagaaatatacaaaatttgagggcaaatgagtagaatcaataataaacaatcacactacaacaatattcttattaaactttcaaatctaaacttttattaatgtaatttgaaaaggaaaaaaaagaagaagaacaagaaaagaacaacttacaaattgaagcttcaaaaaatattaatagcagcaaaaataagtttgaaaaagagggagatggcttgatcaagagggaaataaatctgaaaagtctctctttctccctagaccacaacatagaaggttgagtagatgttttgcttgacatcgagggctgggacaagagagctggagacgatcgagagaggttggatgtgagatggaaatggtggagatggttgccttttgaagtggatctgtgtgaataggaggaagaaggaaaaatagtataaactgtataattgtaaatatcaaactttgtaaatagtattaaagaaaaaacccaaaagtaaaaaagtaaaaaaaagatagggcaagtataaatgtttaatattggaaaaaaaagccacttagtgtaaatttcccaaaaaaatataatgttttggtacctaaaaaatattattattattataaaaatatttatatctcatattattagtcgttgtgaatcattgtttttagctgtataatttgtatacggtgataaatccaattgcatgagcgataatttttaattgagaacaaaaatattgtatatcaattagtcgttgaacgtagttgtagcagtgagctagctaatcaatgacattgagtcatcatcgccacggataagtcagtcacactcatattaacaaaaccttacaagaaacctagaaaatataactatttaatatatagtttaatgaaaacgagaactttgtacacatcgaatatgtattctctttctcttataaccaaaccaaacaccatatttattatctccatccaataatcttagtactgtttgactggcatgaatatcagttgaatttaagacacactgcaaatccaaagagaactcaaatcaatggaaactagttatggtttcaattggtggtggccaagcctcatctctctcttctttttcttccctttcattcttctcaaattcatttccaaaagaaattactcaaaccacccacccgaacctctcactcttccaataatcggtaacctcttatttct

SEQ ID NO: 260306 - DNA, 771 bp, Cannabis indica
ggggttcaaattaaagagattaggtctgataatgctaaggaacttcaattccctgagttgtttagttccttaggcatagttcactatcactcttgtgttcaaaggccccaacaaaattcaagagaggaaacatcaacacttattgaatgctgctagggccttgcttttccaatcctatatacctcttccttattgggatgactgtgtagggactgctgcctacctaattaatcgaacccctacacccaatctcaagtttaaaaccccttttgaagtccttaaatccaaaaaactagcatatgatcatttgagagcttttggttgccttgcctatgcttcaacacttctcacttctaggtctaagttctcacctagggatgttccttgcatctttttgggttatcctattggtatgaaagcttataagcttttggatctaaataccaatagaattttatactctagggatgttacttttcatgagactattttcccttttgttgattctagcagtttgcctcttgaatatcaaagcttcttttcattgcctcagtctcctattgatcatgaatccccatcccattcttctcctactactgattccactcatcaaaacaggtttgaaccagttaacactactggttcatctcttcctgccagcagacctgttagaaacatcaccaagccatcttatttgaatgactatcattgttttttgtcctctaataatttgtctgttgcttctcaggaaagtaagccagtcactgcata

SEQ ID NO: 260307 - DNA, 1039 bp, Cannabis indica
aatatgtgtatcagaaactgattatttaaaataaaataataattgttgttcaaatatcatacaataataaaactggttttatacaataataaaactgattatttaaaatacaataataaatggagcaaccccattacagaatagttaaaacatgtgaaaccagtttcgacctatgaaactagttttgacgctataaaaaatcataacaaaatataaatgttaattataaagttaactgaaccagtttcatcagacaatcaaataaaaaaaatacacacacacaaaaataaaaaaaaatactaatcacaaatataatcaaaacaacacatcatgcataccaatattaaaaacaaaatataagtgtaagtttcgaacctataaacaaaataataaaaaagtaactttaaataaaaaaaattgtaataacataatgaaactatttttttataaatgaaattattagtttctttcaatgttgatgaaactgatttttaaagtttgtattatttttagattatatttttttttctgttgcttttaatgaaataattagtttttaacaaaaaaaaaaacagtagtttaaattaaaaaacagtttaatttctgtaaaaaataacatctacagttgagatcattttttatttattttagtttttttttttaaaaaaagaaaaaagaaataaaaagaaacacgaaatttaaatttttttatggcattcatcatcactttttcccatatttgtaagtttttttaaaaaaatgtcatatttagggtaattaagtttttatgccatatatatcaaaacatatcttcattttctcgtatttttgtaaatagcccatatataaatatgtaaatatgtagacactcttaaaatgataaaatgaaaagtgacaatgcaaaatgagagaaatcttctttcttaacaaggggatattttactagataatataagaatattttttatttaaggaaatatatttctatttaaagaaataaatttttatttaaagaaataaataaataattgattttctg

SEQ ID NO: 260308 - DNA, 4615 bp, Cannabis indica
  modified_base (3941)..(3941): a, c, t, g, unknown or other
taagaagttgaaagatgaggaaaagttattatttttaaaatgatctctttgtaggtgtgggcttgagttgtgttgagtttgtaagttagctttttggcttgttgattaatgaagattttttctttcttgataaaaaaaaaaaaaaaaatattgggctctttaagcccaaaatcataaagccctttgggtcttcttcctcgtcttttttgaattgtaaaaccccacaggcaagcagcgaaaccaaatcgtaaaaccctaaatttaacacttgtgtcggagcaaaaatggaagaccctccggcggaattcggagaatgcagcaaagatagtgaggtagctccggccttgatagcggttcacccttctcaggattcggtggccgtcgctgtgggatcggacttgcgggtgttcgacctccggtgatctttctatttttctgtattttggaaattttccataattttgaaaaatagccaaaatttcgaataatgccatagttttctgaaagacgctacatttactagaattggaacttccattccatgagtttagaacttaaggaagaaaacttatcaacttttgtttgaccttctcttcttatgcctctctgacagtcagggtggtgctgtttctttagaagataattcctcctcaggatctctccataaggattccatcagagctattcgctatggagcaaatgggaagctccttgtttctgctggtgatgataaagtcgtcaaagtatggttgaccgagtcttggcgctgtattacgactgtgtgagttattaaagtacacgtctttttgttaattatggaacggggtaggttacttgatgatggaatttggtgccaaagtttaatgtatatctttaatgtggaaatgatgcaacgtgatgattatttttaattcctttcaattgccttcaactgttgtaactaaactttatttgctccatcgaatatgaaatcaacttttgtcacttttagattttgtttagtctcttatggaactgaaatttacgtttttgtttatgtagtattgttttgtctcatgtgtttaacttcagaccgaaatttgctcgctacaatgacttaaattcattggtgtttgtggatgaaaatatatcaaaagtacttcacaagaatgtgatttcatatattttgagttgagacactaaacagtatattctgctggatttttgaaaaggtgctcggagaaaagagtcactgctgttgcaataagtaatgatggtctatatgtttgttttgccgataaatttggagtggtttggattgtgaaacttgatgggcttgatggagaaaatgttgtcattaagaaggcagatccaatgctttcacactattgtagtatcatcaccagcctggtaagttatttcatgtcactggtgtaacttacccttccttatgcatttttttttttaattctgtttgatgatggatcgtcgtgataaattttagactctgttaagcctttaggccattttggattttgtttctcaagatgttattgtaaaagcaattttgatttttgtgttcccttttaccattttttcacttttgaattttcacatcaacgttaattagccatgtcatggtagctcaagtagctgggttagctactgagtggcattgaattacttgtgaatgtgtcttataaaagataaattataatgttactttatctctcttcggttcattttgttggaacactgaactacttccattaaattatgtgtttttggcaggagttttcaccagatggcaagtatgttgttagtgctgaccgcgattttaagattcgggtaatcagtgatccttatttctgtcctgtaaaccagatatatgcgtatttttctctagttaacatacagctttttaaataggtgactgtatttcccaagaagcctttagatggagctcatgagatacaaagcttttgccttggtcatacagagtgcgtcaaatgttatttactaatttttcgatagttgtgtgcttgtgtttatatacaatcttgcagaaggcagacttgagtacttgtgtcatggtttgcagcttgcctgctactctatttaaagtttaattgtatgtgatgtgttagcttctcaaaacagtgtgaagtaatatctgctagaaattgatgtgtgtattatttcttttatcctctcggtgtttacgggcaggtttgtctcttgtcttgcctttgtttgcactcaggagtacccccaggggtttcttgtctctggaagtggtgattcaacggtgagctatcagataaaatttatgccctttaaattgtttgtactttcagttgctgggtttaagcataaaggttgtctacaattattattattattattattttccaggttcgcttgtgggatattccttcaggatctcttcttaatacttgcgaaattggagaaaaggtattattttccccaccgaccactctgttgttttcttaaatagttgtgttgcaaggcttctttatttagcatttaagtacatttttttatttctgcattactgagcatttaaaaagccaacagtacatgattttctaactcctaggcaggagccaaatatttatttttcttctaagagatagtgcttcacacagcctggatgaacagatgtcagtaatctacaatattttattttattttacactggaaataattataaagagaacattagctcattggattttagtgtcatggagtggcagaaaagtgctatggaggactagggttgtagctatttggttggaaagaaatacaaaattatttgaagggatgaagatcgtgcagattatggggaaaactaggcattaggtggccacatttgtctgttagatgtgaagagtttaagaatgtacctttctctgctttatgtagagaagagaatgccagtactttttgtaagtttgtattagttttgttttgttgttttttatcttcaggctgtcgcctgtcattgtttatactaatccaattttaagctccagcctgctaatcagagttaggaaatttttgtcataattttgagtcttgactgcaccattttcaattttagcttatagtatgtttacttaatttcatatctttctcaaggcaggactgttagagtcaaatgatggagaaacggagtgttgctctgctgtcacagatctatgcaccagtctcgatggctcacttgttgctgttgccgttcaaaggcaagttcctgagtactccctgtatactgttatcttagtgaaacttcctgttggttcaccaataccatgtatgatagaaaataatttatttatttactgcagcttgcaagggatagtaatattaaactgtgatctttcttcgagaacactctctcatgccaaggtaagggcaagaaataatcaggatctgacatgacacctgttactaattatatttggaaagataagtaaaagatgaatcttctggatgaatattccctaaattcatttctatatctaattttgatgttgaaagtcatttttcattacttggtttgagaaaaacatgtaccatgtagtagttcttttaatgatgagatccgaacaggtggtttcaatttgcggagggacattcattcctactagcttgagaacttgctctgccacagggttattgtggatggttactggtgtatctgatctgcatgtttcagaacacccctctttggcccgggtgagagttatctctggtttcaggaaaagcaatcccgactctcatcagcacgagccacttttgctggaagataacgagttacctgcagggacaaaactgctcgagaaacttcagggaagtttatcgtatagtgaagaagatttcttggctgctgctgaagctgtgaaaaaaagcaatgagcaatcttcaattaaaaagctaanactccgctgagaaccgagaatttaggaagagaactagaaatgacaagaaaggcaagccatgaaatgaaaaaagaaaccaccacacaagttgttttctttcactgtttttttgagaaatcaaccagtttaaaattttgtagcattgcttttgctcttcgaatagaaaagaaaatgcattctgagataatttattagttggttttttatgttgtaagctatttgttttattagattttgtttctgtttttgtctttgcggttttggtaattccatctgaatattttgagcaaaaatcaaaatttggcaaaattcagtgtaaagatagataaatttgacacccttgaaattggaaggaatattttttttagagttgattacagaatatttgatgacatttttttttaggaaggcttacaaattttgagtgtaaagataatttctcatgtttatttacagtttagggtttaattttacttatttttattaattattctagtattttcataaaattttgaaagataataatcctcatatttctttagtaataaaaagagagaagttttcttcaaaaaaaaaaaaaaaaaaaattgaagaagagagagaagttggctacactaatgtagtgtttgataacattttagaccctgtgttttacaaaagttacagattggacc

SEQ ID NO: 260309 - DNA, 1526 bp, Cannabis indica
agtagtttctccggtggtttctacatgggttattatacgattttttgttgcgaatttggttgcagcgctagttgcaataggaatttctatgtagaattccgtaaaaatgaaaaaaaaaaatatatattttaaagtgtaaaaatgaaaaaatctcttaaaactttattctattaacaaaaataataatattttattacgattataaaaaaatttgaataaattagaggttctttccttcggagtttgggaacgatgtggatcgagttgatgcagttgaaccagccaaatcgatgtttgagactaaggctaagatccggcgagctatagaggcagagggaataccacacacttacgtgtcgtcgaactattttgctggttattttcttcctaatctcgcccaagttggtgccactgctccacccagggataaagttgttatcttaggtgacggaaacaccaaaggtaacactaatcatcaaactatttattattgataagcaagtgtttcttttaaattgtttgcaaaataaaatacattttttcattcgttgtaatatttggttgatattgaattgtgcagtaatttttaacaaggaacaagacattggaatttacaccataagagcagtggaggatccaagaactttgaacaaaagcttgtacataaggccaccagccaatatttactcattcaaccaacttgttgcattatgggagaaaaagattggtaaaactcttgagaaggagtatgttcctgaagacaaacttctcaagactatccaaggttggtttttgaaactagacttgaattttataagatatttttatatatttattattatattaattagcttcacaaaaaagagctttgttctgaaataaaagtgtttaaaattaatggcagagtccccaattccaatcaatgtgatactatcgatcaaccattctgcttttgtgaaaggagatcatacaaactttgagatagaaccctcgtttggagtggaagcttcacatctttatcctgatgtgaaatacaccactgtggatgagtatctgaatcagtttgtctaatattggaggttgagttattgaggttgagggctagaggagccacccctcctcttgtttctatctttgattattcactaataagtgataatacacaacatgttagtttttgtactcaacatcttttagtaaggcaaatattatttagtaatcaagtttattagattttgtatgactttatatatccaaataaaattatatattatatggagtacttaccacaaatgatattgtgccacctcatttaagattacacatcacacttatggcatgtttactaatcaggattgggagtgataagtatggtaattactccttttcatttgtttattttatttaatggttggaatactctaagggaaagacataaaattaggagaaaaaataggagaagttctcctcccaatttcttcaggtataaaccattacggataatgctactttttaattttttattt

SEQ ID NO: 260310 - DNA, 775 bp, Cannabis indica
tctaccaaatctgctgtcacaactaagccgattcttctattactaatagcacgagtggtgtttaaggaaactttgttatcaactaatgaaaactagaagaaagaaaaaaataaatgtgatcgaatatgttcgtatttattttaggccacctgcatatccatatgcatttttcgggaaaaaaatggaccagtttgactaaaaaaaaataagaacataaaaaaagattgagccagtatccaaagtcaacaaaacgccaaacataatcaacaaatgattaataaaacatcatgttatctcgagagaaattactttatcttcaagttacatgattatttcattaattactgtgttaatcaatactttcaccaaacatgggccaaagcattttagactaagaggaacaaaaccaactaataataaacccatcaagcagaatttgcagggagacataaaattttatgtatttatataaacagagataataatgtatacataatattagtagctgcatgctgtcatttattatcatatgtggaaagctaggcatatttggaaaatgaagttcctacaattgtagctactcttgctgctatttaaaaaggatgttttcagagagtttatgtaaaatctaaaacatatatataagattagtagtatagataatgatttgttcttatatacttgtaaagtggactgagttgatgtcctttgaattgtaatttttctcatgtatacaattatcataacttactaaattaaaaaaaggtatacaaaa

SEQ ID NO: 260311 - DNA, 690 bp, Cannabis indica
aaaatgataaaaaaaaatctcacctgcatgagattatttatctcacactgctagatgggataaataatcccaatcaaatgagattagctggattagttattcagacttctaacgttccaaacactggattggataaattagtttgtctaatccaatccagtcctgtgtaccaaacgggcccaaaatttaaatgacactgcaaattaaagaaatgaatttaatagacactattttattggtatgaggccttcaaagaaagtgcataaaaacaaaattgtgaccgcttaggtcaaattgaggtagcgacacaacaaaagtggaagagtgcagcccaacaagtggtatcagagctaaaagtttcttatggtgcccaacaccacaagcacatcgtaattggttagcaattcaatttgtgtaagacctgatatttgaaatgcaccaataacaatacgtcacattttatggtgtcccttagcatttctcttattttctactaaattagtgattgtctctaattaatcttgtgctaattgttttctgcaaaagcacaatcacaataaataaataattggcttaattaatcatattcaactttcatgatatatattttaaatttaattagcatcattataaatgataataataataataataataataataataataataataataataatattgtga

SEQ ID NO: 260312 - DNA, 930 bp, Cannabis indica
aaatatcttatattttcccacctacaattactcaacgtggaagcccaagtaggcccatatctgtgtagacagcccatttgtgaggcccacgtgatctctgtgtagaatggtgaacagctgaacgtgaacatctgattctgtccccactaaagtgctaaaagtagacaaactgacagtagatatgagatttcattactattcccaacttttgctcaaacagtcactttatttttttcggggaaaaagaaaagtatatttctttcttgcaatgtatgccagcctatttttgttttggactcattatacaaacatcaatcatttgattattttacttactaataataatgtgttattgtttttttatactagatctcatttcattatgaattaatagagggaaatttaaaatcctaatacaaaatccacttggcttttttttttttttttgcttcttcaagttgttggttgacaaacctaaaaagtgtaaattctagctgggttggttagatctgtgacaaaggtcaacagtaattctactttttgatattttcctagctttttgaggtgtcacattcttgtgaattctatatattaattctctagtcttatatctttatttataaatttttttatgtataaaatgtagttatgtaagattttagatggtttaataaaatattttaaaaatataaaaatattttattaaatttatcactagaattagtttcataaatattaatattatttattttaaattaatttaaatatatataaatattagtgttgcctctgatttcgcccaatatacgtggaccaaccggacagggacacgtggatcagataatttataaatatttgctaagtctttgtctgccacaaggaaacatcctggacataggtcccggaggaggcacccggagttcaaggtgc

SEQ ID NO: 260313 - DNA, 775 bp, Cannabis indica
ccagacccgaacttgaacctaggacccaactcgtgacctggcaccaaaaatggaatcacactgggacctgagattgggatccgaatcttgacccatggcttggacaaaacccgtagtcgtgtctggatttgggacccagccttggacccgaaacctcacaaggacccagacctaaacccagtcccaaacccaaaagtggacctgaacccgtaccgtgtgacccaaaattggaaccaaaacgggaagttgaccgggagtggtactaggattgggtcttggaatcataattgaaatttgacctagatccagaatcgtaaacggacaaggacccggactccaaataagacctagacccaaattgggagccggacccggatctgaacctgaacacagaccaaaacatggaaccagacttgggacacaaaaccagggtcgggacctagaaccgcaccctagtctcgatcccaaacccaaactcagaaatgggacttgggacctgaaccagaacaagaccgagacccctgacagtgatctagaacttgactcgggattcgggtaatagggcctggaagagacccgtattcggtgtctagatctacgactcagactaggaccaaaacccagacgaagaaccaaacccgaacccaagcctagacctgggacccaaaattagatgctaaataagaatcgccgaaccaggaccctagaacaagactacggccgtgaccaagacttggaccaagaccgagaaccgaacaaagacctagcctcagac

SEQ ID NO: 260314 - DNA, 3136 bp, Cannabis indica
accgttgaaaaatcttctattgtccatgtactaaatcatgctattcggactttgatatctactatatcatacttcttgaactttgacatgtgccaaatcatgcccactgaactttcatccatgctagatttttcttattaaaattagacaaaaatttttaaattcaacaatctcaatagtttaagaaaattttttaaccgtcttcaaaatttaaagagcataatttaattcatcttaaaatttattagggaaaaatactaattaacttaaaaactaacaatgatgacgattctaaaaaaaacagttgacttcatcacgagtcatgactatatatatataaacaaaaaaactttaattaatataagaactaatacacttgaaaataatgtactttaagagaccacacggcacacggtctattattgcaagaatttgaagtctaattaaaagaaaagttatagtacactccttaaaaatttattcttatatactcttttatttgttttaatattctcaagaattttgcagtctacttaattgtggttatttaggatcgtttgtaaaattttaaatttaaacaactatttactgttcgtataagaaaacataaacatacgtatagtaaaatatttaaactttatttttaatatattgtacactatttaatttttttattttaaaaatttacaaataattttatataattacaatgtatatagttataaaaaaattagactaaatgtttttctacatgtggaaataaatataaagtaacatgtatttaagaaggtatatgtatactataaacttaccctaaaaataaagaaaatttaaaatatttctttttaattaatatcgtccttatatatagtttatatataaacgatgcatactgatatatactaaccagaaaaaactatatatattcattttgttggaaaggcacgttatttccatataatgaattacttcataatcatgaaaatcacatatgtatgattggtataataatatagcctaggttttaaagttaattccaaataaaataatatgggttggaactagaactagattgaatatagtgcttaatatatttaaaaatactataaaaatttaaagaatcatactaaaaagacgttttataaaatgttttaatttttttaaatttattatttatattttatatttataaaatattatttattggtttaaattatttattaattgttttacaattttgaatatatattttaaggggaggtgaattggtaattttgatgatgcatgagcatgagctgtaactagtaaggctgacgtatgtacgtacgtgggtaccagctaagaattttcctacttggttaaataaatgctgcacacgattattattattattattattattattattattacagtaataagtaataataattttcacacaatgatgatgagatgataatagtattttttttgatctaactttaacatgtcttaaattatacctcttgaatttttttagctattaaaaatttatcctgaattattgagattgttagatttaaagacttttgtctaatttcattcaattttactgttttagtaattgtttatgtactaaaccatgctccccaaactttaatatctaccaaatcatgtccttcaaattttgatatgtactaaatcatatcccctgaactttaatccatgttagactttttatactaaaattagataaaagtccttaaatctaacaatctcaatagttcggggagaatttttaacagccaaaaaagtttagcgcgcatgatttagtacatatcaacgtttgggagaaaaaattgaaaaatactaattgctaaatctttgtaagtaaaatgtaatttctaaaatgtacttctgctctgtttgagcaattggtaaatataaagttacttcttttgaaaaaaaaattgaaaaatgttaaatgacatgtactaccatgtcaccaaatcgaagaagatatgagatattgttattaactccttccatttttattttaatatcattgtaccaacgattggtactacagggagaatcatgttagcttggaagattggattcaaaaccatatttatggtcttgtctactcggaccccccctaagaaaactttctgggtagagttcatgaaaattggggataggtttggaggtccgtgactaattatgggagacacaaattttgtgcttaacgagtcgaaacatgttggttcaaagggtagggcccaatttatctcgttcatttctaacttggtgaaatttagggggcttattaacttacctatgtaaggagataaacttacttgggataatcatcggtctggtttgtaccatgttaaatttgctcttgataaatgtttagtgaatggtgcttggctaacgctgttcctgagagcggtcattagctcctctctgacttgcaactctgatcacagacctctttgccttcttaccggtggcttggaagataaattttaaaagaagctttaaatttgaagaaggctgcactcaagacgataggagcaagttaatggttaaatttgcctggaattcggttattcacttttgggctcctaccagggtcttcaagaaagttagagcaactcgggtcgctcttatgcactggaatagaacacaatattgtagaattgacaccttaattaaagatctggaaaggaaactcaacttcattcaaaatctaactgtgggggatagagattggactactaaatgtgatatccgtcgatttctcaacgaggtctgggagagaagagttatttgggaaacaaatggccagggtttcttgactcaaggaaggggataaatgtcacaacccgagccctaggctgtggcagatatgtaatatccataacttgggtggtcaaaggtcacactttgacccttgtaggaaaataaagcttgtaaatgatccttttatttatattttaaaatactaatttaaaagatatggattaactcctatattaataagaaaatattagtaataaaatcaggaccactcatcaatataaaagaacagtaatatccccacagttatgtaatcaccaaatagatagatttaataagtcaataaaatacc

SEQ ID NO: 260315 - DNA, 710 bp, Cannabis indica
ttgctaaacaacaatagataggttttgatatgctgaatttctgcataacaaaggtagcccgatcaatcttagccttcacctgattcttgactcctaccaattttttccaaaaccagctgcagtcggtgggggcttcataatcccaccagcacctatctttcaagtatacattatgtatccatttaacaaacaaacaatctttcttgctagttatgtcccatatatatctagtcatagctacagcattccatttctgaatatctctaagtccaagtccgccagcagttttggggagacaaacatgctcccaagccactaaactaggacccatcgtcatttgagttcccttccataagtacgatctacatattgcctcaatatccttgagcaacttctttggtaatatcataatctgagccagtaagtatgtatagctataagtacagcattaatcaaagttactcttcccatataggacaagtttcaagaacttcaccctctgattttacttaccatcttctctaacaaaatctgacattcagaatgagaaattttctttgagcagataggtattccgatgtacctgaatggtagggagcttcttttgaattgtgaggcttccaggattcttccaacttcagcatgtgtatgtgtttttattatcgatacaaattctatagtatcttaaactcttcaaaaagttaatacta

SEQ ID NO: 260316 - DNA, 1280 bp, Cannabis indica
ataatatctttaccaagatcaatattggtcccaatccaatgtatactccatacatccgatactagcatactttgcccatggagcttaaattactatagaaggatttttacatcctctagaataatttctccacccccagagtaaccaccatctctaataagttatgagttggtgaagatataatgattctaatatacacccctatcatctaacatataggtcactcttggaatctcttccttgactgtctcctaatgttccttgtttcattacatcttaaatggccttagctcaacagtaggattctagttaagttcatacacaagtgtacacttagcctcttactattggttctagggacatcttgttgtgacactttatcttagtctgaaactataagttccttctagactaagtcatcaacataacattctagtattaacattaatgtaaaatacttgattaagattaagtaatcattaaagataccataaaacatttcataaggattaagtatttttgcctaagtcattcgaatagactttgcaaaattctcctatcttatcctcataattctgataaattatttctatccatatgaatggttagatgtactttctcagttaaattctaaagttcctatcatgatcataacatagtaagctatcactagtatcatccacatgaagatgggcttggaattttaaaattctcccactcaaataaggtattgtgatactatgtccaagaactttattggtatctatttctattactacaataacatgttaattggaacaaaattaggatcaagaataagttctaataatttgctaattatattacatccatgtctaatcaaaatatgtgtgtattagagatactgtggtgtattgagcttagtctagagttcaaaatgaactacatatgtcaatagcttctgccaaccctaagtgttatagagatcatgtggagttatgaatataatctagagttcaaaagacataaaagatcattgaactgcatatattacttcttaacttcttccacccctatcagatcaaaatatctttttattaaacaaatattaataattgcttaagaattaacaattattcataaacattaaatttaaattctaagtatttatgtggtatatctctttggagagaataatataccatagattttgcatcaataatgatacacaaacacacacaaaaacatgataaacatctaaatattattggcattggcatacaagttaaagaaaaaatgaa

SEQ ID NO: 260317 - DNA, 783 bp, Cannabis indica
tatgaaaattctctcttttacagatatcatttagataggtgacagtgagggaagctcattttaagttgtaattgcaatgagcccaaattaatggcttaagtggagaattattcaacagttttttttttttggttaagttgaaaaataccacttttattaatcaattaatcaaatttacctctaattttatatttatttgaaacatacctctttttatatgtattgtacccaaaataccctaacataagagagtcacatagagagtatcttgaagtgacagaggcaaaattagtacaatgtttaaaaaaaaaaagataaaaatgatagactttaaaaaagagggtaaaaataaaagaggacaatataaaaagggtatagagtgtaatttcctcctttttttttatttatgaaaatacaaattgttgtcttcatgttaattatattattttaatattattttttttactttgacaatataaatgttgaaattaaaagtcaaaaataatattttatgtgaaaatctcttaaataaatagaattcaaaaaaaaattacctttatttaattaataatgtatattcttaaatttatgatattctcaattaattttacgattaataatttaaaatataaatatctttttagagacgtatcaaatacaattcccttccaaaaaagcattggatataataagtattatcacaatccaagaaagataacctactttcttccctaattgaaaattcttactatggtcttaacaagtatgatgatcttattggag

SEQ ID NO: 260318 - DNA, 942 bp, Cannabis indica
gggcaaaatagtcattttgcttatgtgagttttgtcttttgtgaattttattaaagattattaatgtgatttttagttatgttgtatgctgattgttaagtaaagaaaatcaatttctttctcatttttattgaaaaatcaaaattagacaaaaggttgcatttttctttcaaagtcttcctctctctttcgaacccacctagagcagctaggttttggttgatttctctgcattttcaagctggttttagcaagaaattgtgatctcaagttgttggtaagattcttgtagctttctcttaagtttcttgagttttaagaaaaagatgttttgcatgctttgaggttttatttgatatagttgttgtagttgtttgttgttgtattcagaggcttagtgttgagtttttatgttgatccatgcatgatttggtggttattaggttgtttgagcaagctttggagttttgaactcaagtttggctcattaatgatgaaatgttgtttagcttgttgtgcttgttgttgttgattgctgttgttttcagaggcttaattatacttaattgagtggattagaacaggttttgatgcatgttagtgggatttaaccaagtttgagttttgaactcaaactttggagctttaatggtgaattgtgtttctgtgtatgggtggttgttttattgctttagaaatgttctttggggtctaattagcaggtctggaaggttgcataaggtttggggttgaattggttgagaaatgaatttttgaaaaattcctgcactgaaccggaattccagttcagggaggcctgtaggaaccggtcgaccggttggcttctaggaatttttcccagaactggaattccggttgggaaaccggtctaccggttggggcaaatttgggaaccctagttcttcccatttttgtgttatt

SEQ ID NO: 260319 - DNA, 603 bp, Cannabis indica
atttttttacgtggtttttgcagttaaatctgcatactccgcaagtctatcttatttaagatattttctgaatataagatacaacatacaattgatcatatatattttctctctcaaattctccgtccttttttcagtggaatctgcccctatatatttataagaatataggttgacagttatttacattcaattcaaaatataaccgttgatgaaacataatcaattctcaaattcccatgtttcatttaaattgcatgtggataatacttgataaccgcttaactgcttgttattctcatccttaaagatgatcaatgctaatttgggcaactgtatcttgcttatctctgagttactatccttagctattataatgtagaaaaaatgctaagtgttagcgcaaatgattcgtctcgccaagtttcttatgaatagcgaggcgatggtctcgctatacataatttgaggttgctttgcataaccgtattcattccttcgaataaataaattatctccttaattggatctgtgtactccgaggcaggcatgtgtttcatcaatataggttttaatattatctcgcttaagactacatagtca

SEQ ID NO: 260320 - DNA, 980 bp, Cannabis indica
agagagagagaggggtacgagagaaaagagatttttgtaagaaaatttttactgtagatgaagaagagttcttgggtatgagtgtgagagttgaaacacgttttgagggaacccatcagagaatcgatcttgattgtatgtatatgttcttgctcaatcaataaagagaaagtttgtggtgtttcagaactgtagtagagccatagatcacattgatctatcagacttgaactagtatatatcttggtgttagattttatagttttactactttaattctttctggttttccatgctctatttatccatctttttcttcaattattgttcgtgatttgtgaatcttgtcattactaattatttaattgtttaaagtttagttattttgattctactattttagtcgtcagttcaaaaccacaagttaaacatgacatggatttttctttctgctctatacatggaaaaattgtttttcttttacattgaatatcgtaacacaataattttacataattcctaagtggctgatatccatccatatacttgattaatttgaaaatcagttagaccataaatcacatggatttattatggataagagccattcatagtttttagaattatatatggccacctctttcatcgcctaccaaccatgtgatgttgttttgtaatattaacacagcaacaaataacatccctctgtttggtagatcttgaaaattgataattatagcaataaattattatttacagatgaatttaattagtaatttctgtgtatgtaaagaacatctgtggattagctccatagtccgaaagtgactgaattgtcaagtaaagaaaaaaattattgcaagtaattgcagcattttaagtgtcagaagattaaaacatgttgagatgaataaatgggaattggacaaaaaattaataacaaaatcttgaaagaaatagaaaaataatttttttttttt

SEQ ID NO: 260321 - DNA, 335 bp, Cannabis indica
ctggtaaaataatttccaaaatagttgtatacctagtatacgccattacagaatctgggggtgccctgctcatgtcttaagaaagaaagatggcaaactagaaaagcgaactgaggtttgcatgtttgttggaaattctaaagagaataggggtggactattttatagtcgcaaggatgataaagtgttcatttccacaaacgccactttccttgaagatgactatattaagaatttcaagccacaaagcaaagtagttgtaataccctagcattagaagtggattagcaaaaccctaacctagataattgtgaataattgaggaattatattat

SEQ ID NO: 260322 - DNA, 584 bp, Cannabis indica
ttctacgcatcccaaatagcctacggcagtttgccaaccattttgtccaaaaaacactcttttatattcaaaaattatgttatgcacccctttcacccaattttttgtgttttattttgctattttacttaaaataaactaataaaattctaatgatgtatttgttaattactacaatgaaatgtgcaatactaatttctttttatatctcttctaatacttaaataaaattatagtagctaatttatataaagattgtgttttggtatattggtaaagacttatcaatttatccttttggttacaagttcaaatctcaatagaccattttttgtatttctttttttttagcctactatatctatcatatgtattatatcaatattattctaaaattactctaagtatttaaggatcatctaaatatatataaaaatcattcttataaaagtaagttaaagatataatccttatactaaaaattaggtacttgacttccgataaagtcacttctgataaaatcctaacaaccaagtttaagagaaactaaaattatagatattatcctaattctacttaaattt

SEQ ID NO: 260323 - DNA, 929 bp, Cannabis indica
atacactcaaattgttatttgcattgccctaaaaaattggcaccttcaccacatggacatcaataatgcctttcttcatggtgatctccatgaagatgtctacatgaaattaccacagggttactcacccaaaagccctgtcctaaaaaatgcagtttgtaaattaaagaaaagcctctatggacttaaacaggcctcaaggtaatggtacgccaaactaagtaccacattactacaacgaaaattcgtccaatctaagaatgatcattccctgttcatcagatacaaaacatgcatattccttgcctttttaatctatgtcgatgacatcattgttgcaacgaatagcctagaagaattgcaacatttcacttccacacttgattctcattttaaacttaaagacctaagcagcctacatttcttccctggcctagaaatggcccgatgcaacaaaggcatctctgtcacacaaaggccatttactctacaactcttacaagaaactggctaccttggcactaaaccagtatcaactcctatggaacctaataacaaactcaacaatgagtttggaaaactccttgctaaccccacacaatataaaagtttaattggcaaactcatatatctgactataacaagaccaaatatttctttttccgtcaataaactaagttaatatcttcaagcaccaagagaaccccatctccaagcagcccatcgtatactacattacttgaaaggaatacctggctaaggactcttcttttatgcctcaacacatgaaccaatacaccttgaagcttttgcagatgctgactggggagcatgcttggatactaggtgatcaatctcaggctattgtgtctttcttgacaaacttctgtaacacctaactaacttaggcatgttagtgtgattttaaa

SEQ ID NO: 260324 - DNA, 535 bp, Cannabis indica
aaatgtagctaagctttaaagctattctatttattttttaaatatttttttttgtacttaattgtctttatttctcccattaacatttgtttattatatttattactttttaacttttttcttaaactttaattaatataagtaatatatttaaatgacctgaaaaaaactataaaaaagttgatgtatggtataatataaatatgtgttcaaatagaaaaagtttattttagtgaagcattctaaatgatagagtagagaaattattagaagtactcttagacctattatttatggtaagtttgtcaactacaataataatagtaataataataagtgaaatgatcaaatgatcctaaatcatagcactatgtaagtaaatgtccttatttcaaaacttgtagagaaatgaccattttatactacaaaaatacatcaacacggaaaaaatttcatttttactctttgaacttttttatttagaaaaatatctcttcagtaaaaataatgaaccgtttttagttgttttatagtt

SEQ ID NO: 260325 - DNA, 605 bp, Cannabis indica
aatgtttgcaaaacagataggaaaaaacatggaagtctacgtcgatgatatgttggtaaaatcaataaaaatcagagatcacacaacagacctcgcggagtgcttcgatatattaagaaagtaaaatatgaaacttaacccgaaaaaatgttcctttggagtttcctcaggaaaatttctaggattcatagtcaacgcgaggggcattgaagcaaatcttgagaagattaaggctttgatagagatgccatcactaactaaaccgaaggaagttcaggcctcaacaggaagaatggcggctcttaacagattcatttcgaaatcaactaataagtgcctaccattcttctatgtatttcgaggcaacaaaatgtttgagtggacagaagagtgcgaggaggtcttcaagagcataaaaaggcatttatcgacacctcgagttttggcaaaaccaataactggagaaacattacttccctacttggctgcctcagaaaatacgataagtgcagcaataatgcgtgaagaggggaagcaccgacaacttgtttactatgttagtaagaggttactgggagaagtatcgaggtatccccctcttgaaa

SEQ ID NO: 260326 - DNA, 1397 bp, Cannabis indica
tttacctaagcacgtataactgtaaaattctaataggaatcggtgtggtaatactactataatccactctcattacggatattaaatcaaaacaaatattacctaaaaaatttatgtataatttatttgttcacttatcctaatgcattttcatttagctatgtaatatttaaaagaattgttattaaaatttaattgtgtaatataaatttaataatttaataattattaaattaaaataaataaaacccaatattaaattacacttttaactttttaacattactctatttataatatacaaatcttaaaatttaattattagatttttagcgtttcttttcaagtatagtgtggaattccagatgtgaccttttcacattttaaatttgatttagtaactttaaaactaatgatataaggcctgataatgaacatatgattaatcaattaactaaaaggattataatgaaataatttatatatgcaggtaaataaataggttgcccagccctagatatataaatataaagtaaagcaataggagcaatgaacttagacaggaataaaataagaggcataaactagttttggacttgaaatgtcttctataattttgttttccctaaacaaaattctaattctcagtcctattcttcatctcttttattttttggcctttgataatggggataacctttcatattatatcatctttcttatcaaaatataagaaaggaacattatagtacccataaagactacataggatggggatagtataaaatatatttatatatatttagaatattatttgtacttccctttctttcttctttttgtgagatgggatattaaataaataaggccaatcttggcattgaaacattcttttcaagctgaaaaaaaaagagaaatttacacctaccgaccaaattttgaaaaaaatatcaaaactaacgctgatgtttttatgtgtggaatatacctttagttctgcatttttctgggcaggtatatacgtggtgcattgcttatcttttttcattttatttgttacacgttagacttacgttttttttttttttttttttttttttttttttgttccttaagcatccatctacctcctctatattattgttctttttatttattcatttattttattactttttctgttaatgacatgacattaacatatttcttgcatattattttatttagttttgaaaaactttataataattttcaacttaatttacttctctctcgttttttttttcctattttcaagtttaaaaagattaatttttactacataaataattatttagttttgagagttacatcattgtatttttttttttaagatgattattatgtgagaagtatat

SEQ ID NO: 260327 - DNA, 519 bp, Cannabis indica
ttgtggaaaagttagggcaaaattttcattagataataatgaagattatcgtgaagtaatagggataaaattagtagaattattaaaaagaaaagaaataaacataataaattttgaaatagaaaataaattaaaagcattaagttaaaagaatatgtaatgtaattttatttggtggcaggagcggagccacacccatgacatgacgagagtggttatggccctccaacatttatgtatctctatattatatatacatatgtaaaataaaaatgaaattataatagaacaaactctattactaatttaaagattttttaccctattgtatagagaatttttttaaaccaattatgaagtagtaattttaagtttcactgtaatacaataaatccaattgtaggaaattattttatttattttattattttaatgaattcttatttttactttttttttttttgaagttcttttttaaaaaataaattgtcactacaaaaaaaaaaatgttatttttag

SEQ ID NO: 260328 - DNA, 996 bp, Cannabis indica
tttcttaaacccttatgtttttattttattgttttagaaattcatattaggatgttaatgaaacatgcttgttcgaaaatctagatcctggtaaaatatttccaacaactggtatcagagccagggtaatgatttattttcatgaaatatgaattaaatgatgatttgtgttgatttggatggcttcatgtggtttatgtgttacttgatgaatgtatgtgatttacaaaatttttccatagaaataactttatttttgtttttgcaaatattttattttgattccttgttaaaaattaagcaattttggtttttacggaactcgattccgataaaaattgaaaaagttatgaagcttttaagtttcgggttgcatggtgctcaatcgcacgcaccaggcttcggacaaggaagcctgacgcgcgcggaaaataggggacgctgcctgtctgaaggcgtgtcacgcctgtgtcttcagacacgggatgcacctcgcccgcacgctcccgtgcatcccgcccacctgacgctgcacacgccgaggaaactcggcagatgaggttgcaaatctcaccctgcgcgcggaacaggctgcctgtttgtcgagagcaagggtgttttcacaaaaaaaaaatccgatttttgtgggattttttcccaaattttcaatttttcattttacgaaccctaatatctaattaaatttttttttctatcatttaaacctaaatatcaatattctaaattaataatatatattttttaattagattattaatattttttgtatattttgtaggtttaaattttgaaaattgtattattttaatttttaaatttaatggttcagatttaaaaatttagttaatttctttaattatttatatattattgaattataaaatctaagatattttgtatatttaactatattttaaatttaaaagataacttatctttttatttgtaaatattatattaaattaatcttatatg

SEQ ID NO: 260329 - DNA, 830 bp, Cannabis indica
tagaactgagagcttaagacatatggattgagacttagagagttaaggtttgactaatgctctttataacgtagagcttacatccctaaaattcctttaaaataggtaaataaagctattatttacataataaattcataaagttcaaatgactaaattgtccctcaaaaatagggaaattgctaatattttctctctattttcgtgggctgttaaggcctaattcattgcttgacttgttgtccatggatgaaagttgcacacaaaaacctaccaggaaaaaagttggctggccatgtcagagtgcatgctgaccggccacatttggaagttggccgacctatgatggccatagggccgactaggggtggccacccaatccccttgaggtggctggttcgtcatttcatcgtccctcctaagtactcggacccattgttggttgaagtactgagtagatggcttggccttcttgttggcgagttgtactcccacacggcattgatgtcagccacgtgaacatgccacgttaggtaggcaagaatcaagatagcatgttatattttattgtaaccatgatagttatatttttgttgacctgtgatagcagattaccgacaagtaaaaattaattaattaaattaattataattaactaatttcttaaaataattaatttttagtttgaatattaaatatgaccatttttagcaattaatattaataatttatttttatatttaagtctattatatttttttttaacagttaagttctttaattataataggggcttacttcaaaatagtttgttttttttttttacattt

SEQ ID NO: 260330 - DNA, 661 bp, Cannabis indica
gaatgtattaaaaatatattataattttacacaatcaattaatacaagtcaatatcaaatattgtattgtattaaataatattaatacaatacaatataatacaatacattacaataaggcataccaaacgagccgtatagaagttatataatattcttatcttcacgtaatgcattaattaagcgttataaattaacaaaaagatgagttagaatagatatgcataataattttgctgtgatatatattttagttcatcttttttagtctcataattgctttcactcaattgtttttttagttgcgcaatttgattttgaaagagtatactactattaatattttctttagtaatttgggttatattaatttgctatacattaattcttaagaaatactattttaccatttaatattttttagattataaaaattcttctatatttcaatcttctaaggtacaacttagaaagaaaaagaaaaaaaacagattctaaccatattaaagtcaatgtagaatgtaatcaatattaagtagattaagaacacggtacatgttaagaggttcaattccattatttggtaataaattactcttttttttttattatatttaacttttgaataaagaagtaaaaataacttgatctctcttgaaag

SEQ ID NO: 260331 - DNA, 1014 bp, Cannabis indica
tacaaaacgttgattctttttagtaagctcggttaagggtgttgagattttagaaaacccttctacaaacggacgataataactggctaaacccaagaaacttctgacttctttcctggatccaccttgatcccatccttgctaacaatgtgtcctcgaaaggacacctgagagaaccaaaattcacactttttgaacttggcataaagcttgtgttctcgaagccgttgcagaaccattcggagatgtagctcatgctcctcttctgattgagaatacacaaggatatcgtcgataaacataattacacaaatatcgaggaaatccttgaatactctattcatcaagtccatgaatgccataggagcattggttagtccaaacgacataaccaaaaattcataatgtccatacaaagtacggaaagccgtctttggaatgtcctcctctcggattctcaactgatgatagcccgatcggagatcaatctttgaaaagactgtcttcccctgaagttgatcaaaaagatcatcgatcctaggtaaaggatatttattcttgactgttaacttgttcaactcccggtaacttcttcttgacaaacaataccggagctccccaaggtgacacactaggccgaataaaccctatgtcaagtaacccctggagttgaattttcaattctttaagctcagctggagccattttataacgagctttagacaccggttctgctccaggtgccaaatcaattataaaatcaatttcccgctgaggtggtaaacccggaagttcttcaggaaaaacatatagaaattcccaaaccaccttgatgtcttttggccgaacagagtctgaccgaatggtgtctaataccacggccagaaaccctagacatccatcacacaacaattctttagctgataaggccgaaatcactggggtctcagatccctgaaccgaaccgacaaaaacaaatggttcttcaccttcaggttggaagattaccatctt

SEQ ID NO: 260332 - DNA, 647 bp, Cannabis indica
gtcctggtctgagtttgggttcgggtccgaattttagtctaggtccagatcaggctcctggtgtgggttcgcgtcttgggtctctgtctaggttgggtccgagtcccaagttccaatcccgatttgagtctggattcagttctggtctgggttcaagtttgggtccgggtctagctttgggtctgattctaggtgcgggtgtttgagttcgggtccgagtctgtctccggggttgtgtccaggtctggaccctgatcatagtgtaggttcgggtctaggtccatgttcggctaacgagtgcgggtcaaagtttgggtctgggtcaggatctacgtcgagatataggtcaagcattttaatcccagtctgggtccttgcccgagtccatgttcgtatccggatccctatctaggtcaaactccgtgtttgggatcgagtcccagatttaggtccaggttcgggtctcagtttcggtctgggcacatgaccgtgttcgggaccgagttccagtctcagttttggtttcaggctatgtcaatgttcggttctaggtctgggtccaggtccaggtcacggttctagtcttgttctggggtcctggttcggcgattcttattgatgttctaattttgggtcccaggtctagg

SEQ ID NO: 260333 - DNA, 930 bp, Cannabis indica
ctaagaaggtactggaaaatcatggtgaaatcctagaaaatttaaaacaagtgaagatcaacctgcctctcttgcatgtgatcaaacaagtaccagcatatgccaaggtcatcaaggatttatgcaccatgaaaagaaaacaccatgtcaagaaaactgcattcttgacagaacaagtaagtgcggtgattgaacaaaagataccgatcaaatacaaagatccaggttgtcctacaatcgcttgccaaattgggacacaaggatttggtcaagctctcctagacttaggcgcaagtgttaatctcatgccttattcaatttacttgcaactaggcttaggagaaatcaagcccacatctgtggtgctacaattggctgaccgctcaattaaaaagccacgaggaatagttgaagatgtcttgattaaagttggaaaattctattaccccgctgactttttgattttggacactcagtctgaggttaatactgagtcaaaaattcccatcattctcggtaggcctttccttgcaacagccaatgctctcattaactgtaggaatggtctcatgaaattatctttcgggaatatgactatggaggtcaacatttttcatgttgcgaaacaaccaccagacgaggaggaagattgctatcatactgatgtgatagacacaattgttgaggaggaagttcttttgcatgatgattctgattctttaaatgatctcctccatgactttgatactgaaaatatgctttatccacctgaggaagctaatgtttcttccattcttgagatgtcccaagatgaagcatcaccgtcgcaatatgagaatttgcgattccagacccgatctatgaaacgcttcttcggtccatgtgcgatattgacaaattctggtaagagggtaggcttacctgaggaga

SEQ ID NO: 260334 - DNA, 1120 bp, Cannabis indica
catcggtttgcaacccaaacaactgtttggttaccgtaatgttgttgtaccaaattcccaggtaacgattctttgatgaagtagctgttggagtaaagaatcccagcgcaaaagttccttgtttggataccaatatagctgtgttgttattatctctcagaatttctgatggtctaatggtatcaaccacagcaaaagttgttgtagacagagaaaatagactcaaaacaactaataaggtaaccagaaatgatgggaactccatttattattagcttatgatgatgatagaagaagaggaagggagtaacttcaatctgagtaagaacaagaacatgaatttcaaaatccaaaatagaaatataaaaagatttaataatagaagaacaaaaaaataaataatcattgtttgtgggaaacaaagtgtttataggatacaagtttgagtgaatttttatcatgaaatataaccttataatgaacctgttggaattttggatgaattttacaaaaatttgaaggtaataaaatggaaagaaaataatctttattccatttctatgtttagttgtattttaaaatattggagtgatcattctaatagaatgatttttttcattattttagagtaatggctattctatttgtaaaggaagaaaagactaatccaatgtatagattttaaatttgattcaatttcattcttattcttattctttccaacaaaacgctaccttaaagaattgaagtgtgtaatagagccttacaagaatccaccaaaatgtatacatacactcaatctgatacaaacagattcagagaatgatgaaggtgaaaccagatcaacaaattatgtttaaacaagcaaacaccacaaacaatacatatatatatatatatataaatgtataaatgtttatatacttaagagaaattagtgtatgtaagtaccttattaatgcaggttttatatatattaccaaccagcatatatagatcaaagtagcactggtgctagcaacagtgaacagatctttgattgtgaattcatatgtatatatatatatatatatatatatactagatgagagttacgtggcgagccacgtaatattagttt

SEQ ID NO: 260335 - DNA, 872 bp, Cannabis indica
tgatatcctaagcactatataatgagatctaaggtgttcatattgggatgagaagttttctataattttttttttcgaaatttaatttaaaatataataaaataaaaaaaaaaaaatatattttttttaaaaaaattaattatgttgctaataaatttttattagttaaactcatataattagtctaatacgattatttaaataagataatgtacattcatagttggggtgggttcatttgaggggagggttgggttcactatatcgtaccattactatggctccgtaactcttacacaaggctcaaaagagagaaatttaacctttaactaaatatttttgttattaattgaataagcccaatactacctgggcctaaataaaactatcaaagtgattatattattttagcaacctagtccatttaaatattcaaaaataaatggacttcctatatgcatctaggcccaatagcaaacatataagatcacataaataattgatttgaatgggccctatcatgttactatgtttatcatagaggaaaaaaattaaaattacaaaattactatgtttatcataaaaatttgaactattgataattaaattatgattaattttgatcatttgatctatcaacaagttaatcatagctatttaaatcaaagaaataatatgtttattaaaaaaatataaaaaaaaacaagcatgtaacaaatatggacagttggttaagaaatttctattcttaataaataaaatattattataaaaatatcataatttgaatttaaattaggtagttaaaaaatattaaaaaaataataaatctaacaaaatcctaaaatatttcaatttaaatttgaatatcc

SEQ ID NO: 260336 - DNA, 988 bp, Cannabis indica
tgttcttcataagttacatcttcctgaagagggatatcctcatactcaatgacatatgacggatctggggtatacttcctcaacatagacagatggaacacaactgtcctggtaagtttaatcggtaagcgacctccccaatcctctcgataacctcgaaaggtccaacatacctcggggctagcttactcttcactccaaatatctttacgccacgcataggagtaactttcaagaagacatataatcaccaacatcaaactcaacttcccgtcaatggagattgacatagcttttctaacgactctaaacaacctgaagtctttcttggattctcttaatcttttcagtgctacttgtaataatttggggtccaatagtgacatgctcatctagttctgcccaacacaatagtgatctgcaagtatctatacttgcttggtagctattattgtatgtgaaatattccactagtgacaagtgttctacctaactacctccaaaatctaaaatatacaagagcaaagcatgtcttccaaagtctatatggtcctcttagactgtccatctgtatgtggatgatgagcagtactgaagttcaattcctaaggtttgttgcaaggcctttcaaaaccttacactacaagaatttggattaataccggtggtattattctcggcggaacagacccgcctctaataataggggtattaccggcggaattagtaatccgccgataaaagttatttaataaataacgttttaaataaataaataatattttattttaaattcattaataccggcggatgggaattaataccggcagaatcccgcctcaaaaaatgagggcgggaattttaccgcccaaacttttgaaaacattaatgccggcggattaataccggcgggacccgctggtataatattgggtttctgaccctttggattaataccggcggaactcaattaataccggcgggtccc

SEQ ID NO: 260337 - DNA, 520 bp, Cannabis indica
atattaaatgaaatttccattaagaataggtacatagccgaaaaaaaaaaaggaaaaaatttaaaaagtctgcgcatccagggaatcgaaccctggtcagtaccgtgggagggtactatgataccactacaccagatgcgcttgttgttaaacagaagatttatataatataataaacgtaaatattaattaaaaaaataaaaacagaaattgaaaatgtgttcggtttaatttattttctatttttttaatttgaaatcaaaaataataattttgaaaacagatttctgatgatattaaaaattttgaaaacactttttttctcaatcactttttctcgcttgtttctactcctccttgtgcgatttccctcttcaatcttccatggcatcaggtaaagatcccttcctctctctctccatattctctttctctgtatatatgtgtggctttctctctccctctctgtcatagtgtcaggttttatttatgtttcctttattctcagatttgagaatga

SEQ ID NO: 260338 - DNA, 2502 bp, Cannabis indica
ctcatatcgtggaaatcaaaaaaaacagcaaaccgtttctcgttcttctgctgagcagaataccgagcaatggcgaatgcaacatgtgaattaacttggctcattgcacttctcaaggacttccagatctacatatccctcccggctaacttgttttgtgacaacaatgctgctgtccatatatctgagaaccctgtctttcatgaacgaacgaagcacgtggaaatcgactgtcacatagttcgcgaaaagctcaccaacggcataatcaagctcaaccatgtaccctccaagatgaacctggcagatatattcaccaaaccaacctttccaatggtcttcaaggaaattgtatccaagttaggtgtaaaagatttttacactccaacttgaagggggctgaaggattagtctattagattcagttatttctgttacagtcggttagttggttgtacatttagttgagcatactatatatatgctgttactttgctttgtaattcattcaatttccagtataataaaacagagttctctcccctgtttctcttgtaatactattccaaggtttttgaactacaccttcatgatcttccacggatttctcttttcaaatttccttccctcattctctgcttccctctattttctcatttctccatggattctttcctaaatgatatctctcaagcacttactgtcaaggaaaaagaagttgtaaacatctccaacatcactgctcctcaccctccaccacaatgcaataggattttctgcgaaattttctcaagaaggggtcacaatcctaagcatttttttaatttcatcaccaggaattggacaaggagatttccagtagatacttctacatatgacactgatgtctatatggtcactttcggctgccaaggtgatcttcttagagtcctctccaaaaagccatggcatttccagaaccaacacttggttctgtgccttccaagtgctttgcaaaatgcttctttggactaaatcacaataattcgattctgggttcaggtgtttcatttacaactcttaagcaaatatgaacatcttgctcagattattggtggtttgattggtaactttattgatgttcatgaagattcactcaatgagggatggggtcctttcttaaggattcgagttggtatcgatgtctctaaaccacttcttcgtggtcaaatggtaacattcccttggattacggatgacttatggcttgattttcgttacgaacgactgcctgatttttgttatgagtgtggcataaagggtcatgtctttgataaatgccatgtctacttagagaaaattgatgagggtaaagaacctgatctttgttatggtcccttgttggaaggttctcctttacccaaatcaccgtatgatcactatcgtcaggatttctccaaggcaggcccttggtcttttgtgactcgtcttgttcgaaatactattttgcctattattcatcatccacgacagcctccagtgcttcctccacttgtaactggtcgtgtaaaagggaaagcaatcatggccccaatttcatcaaactcttagttttcttcattggcaccctcttttgcagtgctttcttgtggagttgagataattcctactattgtagattcctctactgctgcaacaataacaagaaacgtgtcacatcaccaacacccattcgaacatcgggggaacatgttatgctgcaaaaatattcattgaggaatgattgtctcgaagcttctggtgttaaaaaattttctggtgttgtagcatctgagttgaatcctgaattgattacatcctcggctacaataatcccttcacaaacagttgttctctctgctgcaactctacttgcatatcttcacctcaaaaaccaacacacggccaccaattaaatgttgtccatgccaatttccactgttactaccactttcacttcctcgatagttagcccagttcccgtgatccaaaatgcctcaatcaagaaccatcacatacctgatgtggtacctgcttcaggcagtagaatggcatcattgttcaccaaaagataacttgtttcctcaagtggtaatgtgcgtcaagttctcaaacgttgtcgtacaagagatactcctttagctgatgttacaaacttgaatgattcttctccaacatttgaatctacttcaggttcttctaacaaaccacttgtggaggacattactggtgactttttagtgaaggctggctctcaggcttgccaatcaccatgattttgttgagttggaaagctcagggattgggcagcccgagagcatttcgtaactttgtttgctcatttctcaaaaaaaaaacaagatgtaatatttataatggaaactgaacttagtgtaggcactatttctaaatttaagaatgcttttacttttcaaaatggcattgaggtgcctcgggtgggattaggtgttgggttttatgccc

SEQ ID NO: 260339 - DNA, 555 bp, Cannabis indica
agagaaagaggggtcgggtaaggggaagaaaaatccaaaattattttgcttttttcccttgaaaatccttttcttttataaaaaataataaaaggtcaaaatgactattttacccctagctaaaaaatcaagctcacatacacacaagggtaatttagtcatttcatactcaattcaattccaattaatttcaaatttcccattaataaataaaatgccaacatttaatcccacattgcattttgggctcgaacccggttcggcccgaattacccagttgtgactataccgcgtcaacctgtcaaaacatacctaaaaaagacaacacatgcatactatataataatatagttccaaaagcacgtaattaaattaatctcatcaatttaccattctcaggtcataattactaaaatgcccctggctcaccaacaagctcttaacatataattaataataatataattcctcaattattcttaattatctaattaggtttttgctaatccctttcttaattttagggtattaatattacatctaactacttgaaat

SEQ ID NO: 260340 - DNA, 981 bp, Cannabis indica
aggtaccattttcatcatccttttctgcttatttttctttttttagcctttgttcttgaagtttatttgtctgtcagtatggatgagttcttaagttctgtttctcatgctttagccctccctcctgatgaatccactatttttacttatgaggttggttcttcgagttcctcctctgcccctataagccttattctgaagcttcataccattaggccctataatcgtccctctctaatgaaaaccttgtctggtatgtggtcatcgttgtgtcgattccctgttgtagtctctgaacatgccgatggtatgtttcttgtcacctttggctgtgaaggtgataagggtcgagtcctagatggtcagccttggcactttgcccagagcatcaccatatttgctgctactgatagcagttttcctcttaccccagataaccttcactatgttcccttctgggtgaaagtttatggtatcccttttatgtgtaagtctcatgatctggctaggtttatagctatggaagtaggggatcttatatagattgacaaagataccatcaaggaaggtactggtccttacatgcgtattcgtatactccttgatgttaacctgccattaaggaggggaatgaacattaagttcattcgtatgggtagggaatttgtcaagtggcttgactttaagtttgaaagacttcctgacttttgttttttctgtgggaagcttgatcataccaagaggtactgtgtggcttttcttcaaaagtgtgatgagctttactctgaacccatgtgcccttattctattctccttcgtggaaaggaaaaaatcattgataagtcccagcctttccaatatcctcatccccctactataaccatgatgaattaccaacctgtcaacctcaacttacctccccaaaattttactggtcaaggcataaacttcccctctttcttgagccttaatgataacttt

SEQ ID NO: 260341 - DNA, 1193 bp, Cannabis indica
aaggtagtttttctcttatagtactaatcagttttcccatgggaagaacttcatctcatgttaattttttttgtttttcttctaactttgtttatgctttttaaaacaggaggattactaaggtcaaacttgattgacaagtcaccgcctatagaatcagttgcacggactctatcgtgggatgactcatgtttagagacagccacttcatacacgttgaaaccctcttcggttcccttagtttgtgaagaagacgaacaagaatggctttcttttgtccaaactcttctctcagctgctggattcagcagagagacagaatccaattcccgagattcagtgctccatagatggcaaacacccgaagctccactggatccttcattgagggacaagtataccaatgtagatgacaaagagcctatgcatgaggccaaacgcagatatttaaggtcaacccgaaagcttgtatttgactatgtcaacacagcattagcagacatgactggctatggaccagacatgagcttaagcatcacatgcaacggggcccatgataggctaatggagggtgattcaccccaattgttggactccttgtggggccaaatgaaggactggttttcgggtgagttgaggtgttattcggaggatggtggggacgccaccaccagcctggtagtggacggtgtgttgaggaaggagattgtggggaaggagtggaacgaacttacgagattggaaatggataatataggaaaggacatagaagggagtttgctggaattgcttgtggaggaggctgttgttgacttgacagagaggttttgagagattttgtctccttttttttttttgttaattttttgtattaatttaattgtaagttgttgtaactcaattatctgtgtatttgatttaaaaccaagaaatgatagtcctactactacccaccactaccatcaacttatttgtttatgttgcaaaaacagaaagaaaagaaaagaaaaaaaaagtgttgtatggattatgtgtataaacattgtctcctcttttaacttgaatagcttaaaatggaaattgagctagaagaaactacagaaacattattatttttgagacccatcttcaagtttgattttgtctctgtaattttttatttttctgctcccatgcttttttttttttttttt

SEQ ID NO: 260342 - DNA, 358 bp, Cannabis indica
gttttgtgcaagtttaagcttcgagttcaaagctttgatcattaatggcaacttgagtttcaatggtttgttctgtgattttctagctggaatgtattgtgtatacccttattaggtactctggaaggtttcattgcatttggtggagaattgagcaacaaatgaaaggctttgggaactctggtgcaaaccaactagccagtttgcaaagccacaaaaaccggctagccggttttggcagggttccccgggactttcaatttctcaatttttgcctttgcaatgcctcggttggatgattccccatttgtagagttagaataaccgatagaaagtatagcaaacctagggttttggt

SEQ ID NO: 260343 - DNA, 596 bp, Cannabis indica
tcacagttctgcttccatgtgtaggtaaaggaaaggcaaaagttgaacaggagtgaacctaagatgggatgaggttgtacgtgtagaagcactgtgacctggagtgttcggtatcgggacatctgggattgtattttgtagtcgctgtgcgacatgaatattatgtattttgaagtatcaagttaaaaagtttgaaaacaggatcctagaatttgtaaacagtttagtatattataaagtttactaattaatattaaatttttaatttgacacgtttttcaagaaaattttttgattagcaaagacagcaatgtaattgaaaaagcactgtagcgtgcgttagcattagggcgttacaattttggtatccgagccgccaggtttgtctacccggctagggatctactacacagtggatgtgtaggatttttagcaatggtgagtgactccagcagacccgaaacatttgggcctgaggagtcagagtggtaaaagactttcacgatgtgtttccgaggagttgctgggattaccgctgcaacgagaaattgattttgtgattgatctagcacttggagccgaacttgtttctaaag

SEQ ID NO: 260344 - DNA, 615 bp, Cannabis indica
gcaggaagaacagcaaatcctttaatgtgtgtttgtctttcttcaacttcttacttcaagagaagaagaagcccatttctgaacaactctttcacaatgcccgaaatcatctttaagagaagaggcacttgctaatgcacaaactaaggaaagagaaagtgttgagaaaacaaaaacacatgaataagaaaaatgatcataataaacagtacaaaaagttaaaagaaacaacaacaaaaataaatgaatcatgtcagcttgatgttcatctcaaacagttcagctagtttatttgaaaatggttgaaatgctagcataaatcagaagagcaacaaaagggtgtaaaaaatgcatctttattacaaagtttcttcacataaaaccagagttgttcttcacacatatcataggaagtagaaacaaaaaaaagcaataaaaaatgggaaaatttaataaaaaaaaataaaagcaattacccaatccaacaaagaacaacagcaaggagaatttgtgagcaggatccatagactttattcctcactgacataatagaatatggatgttgttaagactacaaaccaaaatgtatatatactataatatttatatatatat

SEQ ID NO: 260345 - DNA, 712 bp, Cannabis indica
ccggatcccaagtggaaccctaccggcctctgcatgattaagacacaaaattttaaaaattattaaaaaaatatgtatttttttaaaaaaataaaattttaaacctaacttggcgtaagactagcccgtcttaacctagatctgatcctgattataataatgcaataatataaatctgactcccagttcatattataattattgaatcaggaccgaccttaaattgaaacagactcaacaaaaaaataaaaaaaattatattttaaaaaaaaaatatttttcttaagacccactaaaattcagggacgatcccgctcgaaactggtaaaaagaccgaatttagagcgggattacatccgaaaccctaaccctaaaacatacatagtaatatttttcataccatgccaacagtaacaagtctcaacaaaagagaagccaaaatagcaccaagtaactgagccacccagtaaaaaaaggctctaacaaccgaaatccttccaccgacaagcgcgccgaacgtaaccgcggggttaacgtggccgccagagatgtttatgctggcggccacggcggctgtcagagcaaaagcatgggctaaagccactattgctagctctgaagctgatgttattccacctctttctctgtaaagtttgtctaattaaacaaaattaaaaattaattaattagttaattaattaataattaaata

SEQ ID NO: 260346 - DNA, 834 bp, Cannabis indica
aaactgtgggaagaatatgggttcaagcaatagctgttttttgggtttttagattattatgcgattttatgcgattccatgtgcgattttgtgcgacgtaatacgagtctgtataggttctgggtctttagattattgtgcgacattatgcgatttatatgcgatattttgcgaatttcacctaggttagtactttttgggtatgtttagcgacttttaggcgacattatgcgatgtttgtgcgatgtatggcatatggtataggttgtgcgattttaaaaatattacgcgattaatgtgcgatgttaactgacaggatcttgattttttagttgttttattctgtattttttagcgatattatgcgattaatgtgcgatttttctgcgattctatttcacagtggcctaatttatgcgatttgaagcgatgtttgtgcgatttttatgcgataaagtctaattaatctttctaaatgcagatggctcctgaacttattctcccattgtcagagcactttccggggcgtataacatacagaggaacggatactttgcttcaataaaggctaaatttgaagcttttaacttgactcagaaagtgaaggagatgccctttggtgttttttggaatgccagtgaattgaaattagtagggttattgtccatcagttgttactaaggaagaagaaagtgagtgaggccaaaaatgatgaagtgtggttttacgtgggtaaaaccgaagctagatttggacggtttgagttcggtttgatcacaggcctaaagatgagtggtggtccttcgtcagaagaattgactgcacaatgtgatt

SEQ ID NO: 260347 - DNA, 2036 bp, Cannabis indica
ccactatacaaaacatgcatttacactgttacgtacacagaaaacatcacttctattttccttcactttaactttaacgctcttctaaagctttatgtacgtttgcttcgttttatatataaaatgtcaactactccaaccaaattactcagcttaattgacaacttgtattatccggattccggaggagaaaaataagcaaagataagcaaagatctaattttgcattattatcttttatatatgtaaaaattgaacattatatgtttttgcattatactacatatgtatttatccaatgagattatgtgattttatatttaacattaaggattaggtttggtaaatcttatatatattttaaaaattaagtgtcattaattttattaattttaagggtatttgttcctttgttataaattttttgaaaggtaagcctattttcatattttgttaaactattattttttatagcattattacaatgcaccactggtgtttagtgttggaagttgttttactaaaatttaaatttattaacaagtatgtttgattatattctataatctaacactctaaatataaatttttttataaaatgaattaattacacataaaattctagaaaactttacattggtagcaacgaaatattatagtttttttccattgagatctctaacccttattcctttcagtcgcagagtaataataagatctaaacctgtatctctttcaggtgttgaaattcttcataatcttccctactatgattgagtactaatttgatatgagtgagaaatgtactcttatcactataaggacgaaatttacagaggagagaactcgaaaattagagagaagcctctcttttcaattttttgacagaatagacttatgaatagttgtcaggctatgagtttgtcatattctatttataggctttcatctagggttaggtttaaattatttagaataaaaaaaagataaaaatggcttaaaatcacttaagtggccgacctttattatggaccccgctagttataatttactattttattttcacaacttatcttttctttcataaatgctatattttaattttaaacttttaaatgtcaaatctatttatttaataattataattaattattaaataaaattaccatttaacttatttattaattagaccttacaaagtctttcaattaataaataattactaaaattattttcttctcaattaagtcattgcttagtgaaaattcataaataagatatagcctaatttagaattctaattggtttaattaagaccaattaacagagtctacaagccaatattatctcgactagtgtggaagaccataagcctatataatcaagcttcccataagtagattcaaaatttaccaagtaaattttctaacttattaacttctcctaacttcactatagattttaaattgtactcttaattatatagaacactctatatgttccaagatatagatacgctattaattatctattgttataattcaaataatcaaagattctctatagatgatttacatcgagtagggataaatttaccgttctacttctcaatgtattttatctttaaaagacttagcttcctataaatgatatttcaataaactaatataattactgaaattatagctctttcatttatctctattaagccaagctcgaatgaaatcatcatttcactactatgtcaattagaagtgatagatttcgtatctatgattagcaccctcactcaattgtactaccatgttctcaagatgtaagtattgggacgatctaattggtcaactttaacaaataattcaaagaacacaaataactcagttaagcaagaacctaaccatctcaggattaagatctattgatctaagatcaactaagtgatattaacttagaaagatacaacagtaagtttataatatctcatacaagttcaatatcggtccaattcgatgcatccaatactagcatactttacc

SEQ ID NO: 260348 - DNA, 1293 bp, Cannabis indica
aaaacaaaaattgcaacagttcattgtcatgcttctagctaccgaacagttgataatattatctttatatttattttaagtcgcaaggttctacaagcaatcaaagccaatggaatcttcgtatacctaatccgtgtcatgatgttgacattaaattcacagcacatgcataaataatgaaataaacactttactcattttcaaatttatttttctcaatggacagcacgaaatagaaaagtactgcaaaatattcattaataacagcttatatttccaatcaacatagctgaatagggttgatacctccttcaaagaaaatagctagggttgatgtgagaaataataaacggcagtcatggtgcttaacactatttaaattttgaagggtaatattactattagggcaatttaatatcaaattttatttttttattattatgataatgattataaaaaacatctaattagagggcaccacctcatgctcaaattgatatgaacccccaaaaggtttggttaagatggtattatcttaatagaaaaatgctaatgaacacccatagtgtttagcaccactattatgtcataccattaccggtgccacttattttaatttaataacgattatcgaaaattattaaccatttacaagatgccctgtgtgagcaagtctgtatgttgaaagtaatagcgatgagatcaatgttttgccaaagaaatcggtattcttggacttaactactaaagaaattgaacttttgttttcccaacctgtcaaactctcgttactaaagagagagaccatgacatttgaaaataaggaaaaccatgaaccaaaagtcgaatcacacaacgcaatacactatagacacgacaccacccgtaagagtaagaccatacctgtgcatccaccaccaccaccacaaccaccaccaccaccaccaccacaaccaccaccacaaccaccaccagatcacagacaataaaatgggaaaagaattactttcaacccatatatatataaatcctatgagcaactgactaatcagcaattaaattaaatcaaaattggatttatcaccttagcacccgctaatctatttcttaagaaatggtgaagagatttaggatcaatgaaaaccagaaaaggtagaccaccttagcaacctttaagctattgggaacatttctaacatgcaccagatcatactggctgattctaaaagtacaaggcctactaactattaaaaaccagaaccaacctgtaaatcttttaaccagatcatactg

SEQ ID NO: 260349 - DNA, 888 bp, Cannabis indica
gtttctgattttcatagtgtcttgcagtaagctaaaatatcattatttcattctccattgaaataagaaacgcaatttattttattacatatatcttatgattgtctacatagcagtagatgttcttacattggagcatacacagtacatgcagacaaactatttttatatatataatcaatgtatgtatattataaggactaattaataagagaaaaagatctatttaagatcatttatgacgatgcggtggaagaggtgggatgctttgttcatttctaaaaaaattatcgagatcaaccagggttttcacttttactagcctgtcaaaatttttaccaaaatacttctcaccccaaatacatgcttgtgtgtaattattttgactcttgggatcatttattcctatatcaaggtgtctataattgagatatgtcaatcttggattttgggacacataaggagtcatgaagttatcaacatttcgaatccagtttagatacttttctttatcttcgtgcttctcccagctacatgtgtaccataattcatacatgattccaactcgatgagggaatggaattgctgattctgaaatctcatccattatacaaccgtaagtgtacaacgcatacatcccaactccttcatcttcttcatataatttttccaaaattttgacaaacgcagattctggaattggtttcttaacgtagtctaacttaatcttgaaagcaccgttctgcccagctgatctatcaagcaaaatttccttattaaaattatcagtgccgtaatttacaacaccgctatagaagatgatagtatcaatccagctcaattgtttgcaatctgtttcttaatgccaaactcaggaaaactcttgtt

SEQ ID NO: 260350 - DNA, 561 bp, Cannabis indica
taaataaaaaaaaaatataattatgatgtagtttccaagagttagtttaagccttttgattaaataccatagttataaatcattatacctattaataggtaaaatgtacaatacatattgtattaacttctatatatatatatatatatggaacactttttaattggtattatccataaatggttactaaacaaatttaactataaatgatgacatattctctaaaatcatttcaaagtcttctttctcttttctgaatttttttattttttaatttttattcaatttataattattatttaattaattaataaataaaaatagttatatgcaattcaaaatatatagcaataaatcacataatacatatctaattactctaaagtttaaccaacatgtatcatgatttaaaaaaatggtcaatatgcaaaatgactctaaatctaacaattaagttaataaatgtccttttaaataaaaaattaacaaaatgttcattcagttaaaaatttgataataaaattacaattataaccttgaataattaagtgtttggtatag

SEQ ID NO: 260351 - DNA, 856 bp, Cannabis indica
aaaaataaataacacgaaagaactcaaaactggttataactaaaatagatctggttatataacataatgaatacaaacaagtaacacgcaataactcaaacaaattacaattaaaaacaaagaagaaatcagttcctaaaacactgaaatataaattaaagacaaaactagtttcacaataaaatacttcataacacataatacctcataaaactagttataattttttttttaaaaaaagtgggtttcaaatgtctcggatataataaaaataaaactgaatctataacataatgaataaaaaaaataacacaaaataactcaaaccggttataattcaaatagaaccggttctgtaacagtgttataatgaataaaaatcaataacacgaaataactcaaaactgattataactaaaatagaaccggttatataacataatgaatacaaacaagtaacacacaataatttaaaccgattacaattaaaaaataaaagggaaatcagttcctaaaacactaaaacataaattaaaaacaaaactagttctacatcttaacacacaatacctcataaaaccgattataatttttttaaaaaagtgatgatcaatttgaaaaaatactgaagcataaatatgaaaaaaatcagctccctaacaaaataaataacacaaataatagcacacaataactaaaattataatataaaaaaaccggttatatttatcaactagttacaaatttgagaaaaaaaaaaactagcttcgtaaagcaactaagataaaaactcacacacaaaaactagttaaataaaacaaatcaataagaagctggttccttaaattaactaaat

SEQ ID NO: 260352 - DNA, 3916 bp, Cannabis indica
agattaatccagacccaaaaaaataagagaagggaaagaaaaaaagtggagacagaataaggtcaatctctctctttttgcatattaaagcaagaagaatgaggcatatattttttttggtgctgggcagtgactctttccccgtagtccattggtttacttttacttttgggcgaataattgggcaaatattccaaagcatacctttttttgagggtgggaaggctgaagaaatatgttactactctctccaaggcatattccaaagcataccttccttttttcttctttttaaaaactgagtctttttgccaatacttatatttgatacatatcggttctgcccacaagttttaaggataaaaacctcacaaccatgaatcaagtctatttgggataatagttatcaacatttctaactaatgcaaagtcactaactagttaataaggttaggtagcatgttaaggtgcccataaattttcaccagatctaaaagacttgacagctaaaactaacacccatgtggccatgtcacttatgagtgtccattatccccatggcgttttcaataattatgggctcagaataaccatatagaattttggataaattgcagtatttgtcatcaactttgatgacaccccaatatttttaaagaaaaaagaccgtacctcctgttgcggaaagaaataaaatattatgatcgtgtcacgagtacattcttttaaatagaaaaaagaaaaagaaagaaaaaaatgaacaagagtacatggatatgcatacaaggacaataaattagctaagtcatatgcagattatgaaatatgtatgacattcaagcccacctccttcgaggagcacaaccaatcctcaaacctcatctatctgctcctgcaagaaaccggtttagtcagatattgtgtatggtttaaagactatcacaagatggtagatttaacattaagtaaatgtacttcagaagggtccaataagtttaataacagatttgagaaatcattcatgtcatgattcagcacattctaaaaaattcttcagttatttcttcttgttttttgatggacttggatatttagttttaactattagggccacaagtaaaagtaggagcagctaaatttccaaatataaattgctgcaaaactacacaaaaatgccaactaaaaatagcactaacctgcatatcagaagtccagagagtgaggttgtcccttaatagctgcatgatcagtgtgctgtccttgtatgattcctcaccgagtgtatccagttcagcaatagcatcctcaaaagccttgatttagaaaggaaaaacaaattgttggaatcaacttgataagaaagttaaaattcatgtcaatcaaaactatgttgctttatcaaatccctaacaaaaaataatagaatgtagaactacggaagaactcaataaaattatgaaggggaatttatatcttattggctatgttgttgatggggagttgcagaatatcacatttccagtcaaatttaacttcggcactactgatttagatatgagaaaataaaatataaatctcaatcaccaacaacttcattttagataaagactcaacaagcttgagtaactaagatatcgtctcatcatttccaataccacatgacatgatgcaagctaaaacatctctgtccccaatcaataaatagtctatgttatcaaatccaagaggagtagtttaaatgataaagcatgtggttggctcccacaagatctgaggttccgaatcaatccaaggtacctacatagcaatactaaaattgtttggtctatcaactttcaaagctaagttgtcattttcctagtagcctgtaagaggttatgaattaaaacaaagattttcctactaactttcttgttcgtttatgttgattgtaaaaactaagttcattgatcataggcaaaattgcctgtcttctcaatagccctctccatgtacttcttttccgctgtcctctatctactttcaagttatttaaaaaatcttatgaccactccattttccgagacaacatttaaatgttttgaacacttttattccattttatacaattctttccttttcccataccagtttcctctattccgaattccactacaataatatattcatggttcacggtcacctacacacatttacacgtttatgtactatattcagactacttgtatttataacatatcaatattcaaaaatgggaaaactttgttgcatctctaaattaaagaccacttataaaatcttaatggcgagctcaggttggatgaggcatggatgtgccaatttcagcagaatcaagtaccataccacaaaaataacccaagatttgtctcatcttaagtagaacaattcccttgcacagagaaaaatttcttctctcttaaacattacattcatacctgagtcacacttttaatacaattaacaccaatgcctcaccagcttcagttatttgattaactaatcagtacttattaacttgaagtgcagttttagggatcaataattctattcatctaaattctaaaggccacaaggaaaagaactaccatttcatctgattcccaagtctattaaaagctgttagaaaaatacttccataaatagtatatactcaacttgcctctcacctagcaataaagaattatttcaagcagaagaagaaaataagggggtaagactctgacatgaagcccaaataacaaatatctctgaccaaaacgtacaaatttattgaatagcaaaaaaaccaggcctatcttgaattcagatactgtcaaactcatttaattcgtacaaccttaaacttagttctttttaatctagtcattacaaatttggtcttgtaaatttgggtaaaaggacgggttgtgtattaaaaaaatttctatttataggaaacgaactccaagggcttgtttatgacaaaaaccaagtgtagttttccgtaaaattaatccatcaccgatgggtacaatcggtaactaatcgcatttgaaacaatttctttgttcagatagtatggactgtcaagcagcgaaatcttaacaatcccattaggtattagtcacaaaaatagggctaacctgttttgccatggcacaagctttgtctgatgaattgagaatctcgtaatagaacacagagaagttcagtgccaaacccagccttattggatgcgttggactcagttcagcagttgcaatatccttcaacaaataaaaattcgatttatcaagcttcgtattaatgcaaagaacagtacaaagtacaatagcactaaaaatcatttaaatcgaataaatctcagggtacctgagcagccttgtaagctcccatcgtctcctccgcggcagattttctctcgtctccgaccttgaactcagcgagataccgatgataatcgcccttcatcttcaagtaaaaaaccttggactcaccgctggaagccgaaggaacgaggtgtgagtccaatagcccaaggatcccagcgcagacggtagaaagctcggattccaccttggatctgtaatctttgacgagtggcacgagctcatcgttcttgcggccttcttccttctgctcgatcgacgagacaattctccaggcagctcgaagcgatccgatcacgttcttgtaagccacagagagaaggttccgctcctccacagtgagttcagtgcctcctggagcagtggacccaacaacaagtttctccataaacttaaccatctcctcatatcgctcggcttgctccgcgagcttcgccaagtaaacgtactggtccttggtaaggttttccggaacggcagacgccattgttgcagagctcgaagtcacaggagagagagagagagag

SEQ ID NO: 260353 - DNA, 952 bp, Cannabis indica
aaaacattttttcttcacaattaagcccttacttagtaaaaattcataaatatgacatagtctaattttagaattataattgattaattaaacaattaactgagtttgctagcaatattatctcaactaatgaggggaccatgggtctatataaccgagcttctaataagtagatctagaatttaccaagtaaattctctaacttattaattcctccttgtgccactatagattcagaattatattctcaattatatagaatgctctatatgtaccaagatatagatatgtgatgattatccattgttacaatcttaatagtcaaagatcctctatagatgatctacatcgaatagggacaaatttaccgttctacctttcaatgtattttatccttaaaatacttagctacctataattgatatttcagtaaattaatatattactgaaatgatgcctcaatcatttatctctatcaagctaagatcgaagaaaattattgttccacttctataattgaactatcacgttcctaagatgtaagtgttcagtcgaccagactttaacgaacaactttaagaacataaataatacagttgagctgaacctaaccatatcaagattaagatccatagacctaagatcaactagtgatattgacttagaaagacataatcgtaagtttatgatatcttatccaagttcaatatctatccaatccaatgtatactccatacatccgatattggtaaatttttccaatgccctgaaaaggacataacacttatctaaggtgcaagtagaccttatcgctgattatcatgccaatctaaattcagtgtactgacaaattatcggacttaaacttttaaacatataatcatgattatattccactgtgctgacgatactataatcaagaataaatgtatatgttctggatttaatagaa

SEQ ID NO: 260354 - DNA, 596 bp, Cannabis indica
atactaattgatagggcctcattagtaaatgttacaagatctcgttcattggagcccaatcaagacaggcttatcgccaaatgtctcttttattacgaaactccccgaagcattttgccccttattatgcccttcctcatctttgggagcctaggtatccaccgtaagcctttcctcgtttgaatctcgcctttaactttaaggctatgccatcccctaaggtgctactaaatggaagtatcttatcttatcaacgtccatgaatgataaatctagcatagattgaactgtcgagggttgtcacgtaaaccatatcatccatgatggagctcgagcagaatgtattgatttgtttctaggaggcaagaatctgaagttagtatcaattaataaattgggacacctttgtaagtaaattttcgatggagaaattgaaagagtccaactcaagcaagtttcaaattcaaaagtaatcaattcctttttcaaatcctgctgtagctacacgagcccttcacgcgtgccataaatgacctacaaatggaacaaccctagaaaaaaatgagaagtagcaaaccaacttctaggagagacat

SEQ ID NO: 260355 - DNA, 3375 bp, Cannabis indica
catgcatagtgtcactatatcctctttaaaaacacctatagtgacgtgccaggagggttgggacacactttcccagtcactcttggcatgactctataggttggcatttttaatacaaaaaaaaaaattggaaaattataggtattactatttagtgacacttcaaatttttagtgacccactttacaagagactaataacaaaaatttagagtctaattatgtgtgtcactaaaaatgattcctaactctttagtgacgcgcaaaaaagtgcgggtcactaaatagtgtcactaaaagcttcaattgtagtagtgcttttttgatcactggggtcaaagtccctactcaaaccggtactagaaggtggcttccatgaatctcttctcacattactcttcttttgtatttgatcctcaactcctttagaaataatagccaactctacaacttgagcatacaactgtacaatcccaagttgattagtcgtcacaatcacatctcaagctatatgctcctctaaaccccccaatgaacctttttctttcttgaggatttagtggccacctctttggttgcaaatttagctagtcggtcaaacttagtgacatactcaatcattatcatgttacattggatcaattgtataaaaccctttgcttaacaacactaatgtactcattgtagtaattctcattaaatagtgaccataatgtatctcaggtcttaatatccaaatcatgaccctggacataatctcaaccatataccaacatcttttatatcttaaagatagcacaaccaacttaatcattactttcaacccacaaaaatcaaggacgtgaggaactatactcatcaactattccgctttaagtggatcagggtgaccctaaaaaataagaggattctacttcatgaaacgctcatacaaaagcttcaaacggtattcccacatccaacagcacaacataaggtgctagagggatagggacattagcaggtcgagccttctgctctatcatttctcctatctactcaccatactgttgaatagtcctttgcatggcagcatacatcattttctaattctatggtagtggaggattctcatgctttcaatcatccctataagtcaaagatttctaaattatgtctatcctatcgccttacaggcatttctaaataccctgcaatccttagcttacactgatcgaaactctcgcctaaaataataattctaataagcatttcctcttatacattacttaattattaagaacatacttatatcatatttttctattaacacatatagtcatggcatactacaaaacaaaacttaacttatgcttttaaagtaatcacatattgcatgaaaacaaataacacttactatatcatgagtcaaacttgtctttgcaacaaatgtacatattcagtcagtctttacaaactttaaaattttggtcactttgataccatgctgtaaaaccctaaccatagggacaccatgtgtgtgcttttataaattagtttataataaaaaattaacggtttagataaatattgataattaaaaactttactaattattcaaaatatataaaaaaaaatcatggcattataaattattagctttgggaatcccctttaaaattttacaaaagttgtcatacgatgttatatcaaatacaccttgcaactcaaaagcgccataatattaaatcttgaaaactcggcattggtagtcgtataagctgatatgtacatttgtcagggaagacctcagactcatggctaacctatcttgttcttgcccttatctgcaccccaaagcacccatgagccacaaaaactcaacaagaaaagtaacataaaaacacaaacaaatacaatcaagtaaagacatactttactccatgaacatgaaaacacacaacacattgtaaacaattattaatatcaaatatttatctaataagacaaactaatattattactttataaagtaaccattattgtctgctgcctaataaaacagacaatcaactctaatactattgcctaatgagacaatcaattccaataccgttgccaaatgggacaacaaatttcaataccatttcctaatgagacaaccaatatatatgaaacctaacaacagtttcaaaacaaagtaataactcttcctagtaaattgtaattaccctataacatttataatattttgaggtacaattgtactttctttttacctttaatcaaaattcataagtgtcgatcaacgtgagtagaaatcacttgacaatttggggccctatgtcacaatagcagttaatcagtaaataactcattttaatctgttatgggacttaagctcaaaactagaggtttccttatcgataaaaaatgtggcaatagcccaaatatcaagaaaacataataactaaggcaccaaaaactggcatcatacgggtaactgaattcgaaaaggtgaaccagattttaaggtgcataccagaccatcatggtaaccagattcctctagttaagtggtttgcacctgaaaaccaaaatttgagttttttccaaactcaaatcttacccttcttgctccaaacctgatttatacctctaggacaattcaaatactcaaactaaacttgctcgacaacctaaaacatataaatatacaaaaatcacaaaatcaccatgggagagttaacctttgagctcaaaagctctaactccactctccaaaacaacataacaacctaatcccctaaaacaagcatcatttcaaactcaaaacagaagaaaaaccctctcctatctcaaatatcacaatagaaacataaacttaaaaaccacttcaaaaacatattttcaacttactaaaaccaaaaggaatactaaggaaacttatcccaaatcttgtacagctcctaggcttgattatacagcaagatttgaaaagaattggtgagaaattttggatttctttggtcttttggttcaaccaaacaagagagggagagtgaatggagatagacatatgtatataatttgtgtataaaagcttcaacaaaaaaattcattttaaaataataggataataacaaaagaatttacataaaaaatttatttaattaaaaattggcaatgtaccattttgtcctcacaacaacataacacttaactaaaccccatgggtaaatcgatcattgataaataacccacttaaccccataatttctattatcaattaaaacctcttggtaacacaacattacacactaatattgtcgtgatatttctggccgaccaattgacttttcacttttgctgagcctaaaaatattttatttcatat

SEQ ID NO: 260356 - DNA, 719 bp, Cannabis indica
aaggattaccgagatagatatgtgatcgtgtttatcgatgacatcttgctgtattctgaatgagaagaggaacatgagtggcatcttagatctgtattgcaacggttacgagaccacaagttgtatgttaaattcaaaaagtatgaattttggttatctcgtgtctctttcttggggcatatagtagataaagattggatcatggtggatccggtaaagattgaagctgtttcggattggccaacaccgaaattggctactgaagttagaagctgtatgggcttagctaggtattatcgtcgatttgttgagggttttttaaagattgttgtacccttaatggagctgacccaaaagaacttgaagtttgtttggactaatcggtgtgagaaaagttttctagagttaaagcagcgctaagttaccgctccagtgctaactcttccttaagacaaggaaaagtttgttgtttattgtgatgcctcgagacaaggtctcagctatgttcttatgcaagctggaaaggtaatagcctatacttctcgctagttaaaagagtacaagcagaggtaccctactcatgatttagaacttgcagcagtagtatttgcgctaaagatttggcggcattacttatatggcgagaagtatgagatatacattgatcataaaagtctaaaatacttcttcaccaagagagtcctgaacatgagacagag

SEQ ID NO: 260357 - DNA, 2737 bp, Cannabis indica
agtctatttatgcataagtcaattactttgtattttttgagacctatctaatgaatcttatctctgggagtggcccgtgaactagtaacaatttgaaaggattgttgaaactacgtacaaaaactttatgggtttttacttttctgcactgtttgtttttctgatttcttctggagttacagagttgttttttgcaactacgaaaaaactgtttttagtaccagtttcattattccgcatttaattaaataataaaactgaaaatattaaaatactgaatttcataaaatattatcttgaataccaaaataaataaaggtatactaaaacactactatatttactataaacttatatcctatatattacacatgaattagtttcaaacataaatcaaatcaaggaacatttttagacaaattaagctcattgaacattgtgtgtaaatctagcataactctatagatgcaaatatatcattgaacatgtagacaacttttattcttttttacacataactttgcgttgtattttcctagacttggctccaaaccgaatagtttagtccttactcgttatgattgaaaaacattatcattaataattccaaattttttatatattatatcaatgagtgaagtcgttgtcgtggcttaaaaaattgaaatctttctagagatgaaacatattgtcatgatgtgcaataaaatattaataactacaaccataaaaaatattctttttaatcacaataaaatttgtaaatttgtgactaattataaattttcattcttacgttctgactaaatagtccctgactaaaagtattagtcacaaaaattacaatttgttgtgactaaatatgtttttagtcacaatacctgttgtgactaaaactaaattagtgacaacttgtaactaaatattatttttagtcataagtaatttttttattgtgactgaaaatcacatttagtcacatattttttttgttgtgattaaaaagttgttactaaaaatgatctttattggtagtgtaattttattgcataaaaacaatataaataaattccctagagaatattatataatactttgtaggctatcattattagacccaatacaaagtatataaatctagattatcccaaaaatagaagaaaaaaaaaaaaccacaaattactataagagttttttaagataataattatatatgttaattgtttattattaattcaaaaaaaaaagaatctatatggaagatgaccctaattaattaggcgctccaacaacgaaggactatataaattgatatgaaaagtacttccaggctccagcccatgcatgcaggctagatagagatttggattaatttttgtcgagttatatttatatatttatataaatatatatgtatagctaagctaagctagttagttggtagaaagaatagattataataattatctgtttagtattttatatataaatatataccacatgaatgaagtcatcatcatcatggagtaataaaaaaataagtacataggcaatcaggcatggctattttcaccaaccgatcctcatctaaaccattaaacaataagtatagacccaattggcgccttctttctgaatctattcaatgtatttttcttttcaaatagattaccaagacattaatcaattaataagtctaactcatcaatttggatccaatatatactaattaatggtttttaaaaaaaatttagcatgtttgttattatttttttgtttttaaaatatagtgttttcaaaaatgagaataaaaaataatttctgaaatttttaaaacactagtcatgtttagttagtgttttctaaaaccaatattgaccaaaagtgaattgttttttaaaatagaaaacaacattttgctgttttcaaactaattttttgtaattttgtttttcgaaaactatttctaaaaaaataaggttgaacaagcctggttgttttcaaaaaataattttctttttaaaaacaaaaaccagttttttaataatgatgtcaaatatacatttaatattttcgagctcgtttggatggattattaagtcgtattgtattgtattatattgaattaaattatatattatatttttatataacactatgttaaactttagtttatactaaaatataatatatttaggtgcccataaaaattaatagtacatatagttttacataaaaatattgtataaaatataatttaatataatataatacaatacaatataatacgatataatacagcatagcttaattatcgcctattaatttcatttttttggtcaaaagttattgatcaccttataatataatgtgatcatttatggacggaaagaaattttaatgaagctaaatagatatagcaagctactgttttcaaaaagaaaaaaaaagatataataagcaacgattatttgttattacgtgtacgtattgatattatatattaaattgaccagtacatatgattgatattaatttatatgcgcacgtacgcaaaaatgtgcaacttttctacattcaaaaacttaacgctaagcaaaattatgcgtagataaaaaaaaatgatacaattaatatgacgagtgatgacatgatatcctaacagcgcctacctaataagtatctatgaacacggtggaaaaattataatgagaactattttacaaatacacaaaaa

SEQ ID NO: 260358 - DNA, 895 bp, Cannabis indica
aatggggtagggtgtctaagaggaaaccaaaaaattgctcggcaatgttataaccttgccatagccaaggctaaaaaggaagtaccctctagccagagtttggacaagggaaaaaggatttctaaatagggaacttcccaaggtggggatgaggatgtggatcctcgactaggggaccaagcaacaatgttggaccagtggaagaacttgaagagattgagatcgaccctgatattccggccaaaaagcttaaaattggaaaaggtttgttgctcgaagtaaaatcagcattgataatatttttgagagcagacctagacatttttgcccggtcacatgaggatatggtcggaattgatccttctataatttcgcacatcctaaacattgatccaaacttccgaccaattcaacaaaagcgaagactgttggacaaggagcgagccctagttttgaaggaagagttcgaaaaggtacgcaacaacaatttcataatcgaagctttctacccaacttgagttgctgatcccgtactggtacccaagccaaacaagaaatggcgagtttgtattgacttcaccgacctcaagaaggcgtgccctaaagactgttttccacttccaagaatagatcagcttgtggacacaacagtaggacatgaaatactaagctttatggactcctatttgaggtacaatcaaatcaaaatgcatccaccagaccaagaacatacaagtttctgaatagatatgggtttgtattgctataaagtcatgccataatgctctcaaaaatgctggagctacataccaaagattagtaaataagatgtttaaagaccagatcggacgaaacatggaagtgtacgtggatgacatgctcatcaaatccagaa

SEQ ID NO: 260359 - DNA, 903 bp, Cannabis indica
agagctagttacctccacatttacgagttttgccgtgttgaatatcgtgagccagctatcagagacaagtgcacgatccaacctcgcttctatccaattcgaagatcctcttcctttctcccaagtataaggataccctgagagagaaagatcaataagaccacaatccaataacgattggttgaaaccatctatgagccaattttgataaggggagcctcctctcttgtcctcttgcgatactacattgtttaagtccccaataacacaccatggcaagttattgtcagctgaaagtgtgcgtaacaggtcccaagttctagctctcagacttcggttgggttctccatagcagcccgttaaacgccagttgtttccttcagcagtgtgaactttaacatcaatataatcatgtgtataccccaacaaagtgacatcatccttgtttctccaaagtaaagctattcctccacttctcccttgagcatcagccgaaataaccccatcaaacttcagttgggccctaagcctttcaaccttttcttttttacataaagtctcacataaaaaaataaaattgggtctcttttggaaaacaagatcctgaaggaattgtaaagcccgtgggttcccaagcccacggcaattccaactcagaacactcataatccttggtgggcctgagaaccaggacccaccatagacccgttttttgatccatcaaacacatgatcaattccttccacctcatcttcctccattaattctttgccattctgtcccaatctcctttttttagaatcaacgataatcatggcctcagtaaggaagttttcaactagtatttccttattggtattgactaacgcaatcccttgatcactgtccgtacagctcacaatt

SEQ ID NO: 260360 - DNA, 591 bp, Cannabis indica
ctcaaagaaaagcttagcaaagagaagaagaagtattttggatgcaggttgtaatcttgatggatatgagtctgctaatgccctggttgcatcaagtgaagccattggtgatgagtggattggtcaagaaaatttgtaccaaaaaagtatatgcaacctccaaatttatgtgtaaagttgagtgccttaaaaacaattttttcatgccactcagggggtagtaaggcataccaattggacaaatgtaaaataggccaaaagtttagcaaagctaaagaaaaatatgtatttaagcaaaatatgtatttaagcataaatgtaaagatgttcggacccagtaacaggccctaaaaaaacactaagggcctggggatgggccttaaaattgtctccccttaaagaaaaagattaaaattgtctgaaaagagggaaaagagactataaatataaaaaataaagaaaaaaggatagtgatagcaataacaaatgatagccggcttaatcgatgcgaggtggaagacaaggccccctgcgctcctcgagcaaggcgtcaagcctcttcttcttttcccagaagcgagcgaggacttc

SEQ ID NO: 260361 - DNA, 780 bp, Cannabis indica
tgcactggttgttcctcatatgacaagtctggttgaagttcaatgcttcataactcagaatgtgggacgagtcagagatatacttccgaaacattgaaacatgaaacatatcatgtacagctgccagcgctgggggcatatccaacgtgtacgccacttgccctatcccctcaaggatttcaaaaggcccaatgaaccttgggctaagctttcccctcttaccaaagcgtttaatgcctttcatcggtgatattcggagaaataccatgtccccgaccaggaaatctatattccgacgctttagatcagcataacttttctgtctactcttagccgcgagcattcacgctctaatcttgtcaactgcctcacttgttctctgaacaacctcgggacccaagaactttctttcgcccacttcatcccaatgaataggtgatctgcattttcttccatataaaagctcataagggtcatcccgattgttgcctatagttgtcgttataagagaattcgatcaggtgaaggtactttacccatgatccttcagagtcaagcacacatgcctgtagcatgtcttctaaaatctgaatagtcctctcggattgcccatcgtctgaggatgaaatgttgtgctgaactttgattgagtacccatagctcaaagtagactctcccagaatctcgatgtaaacttcggatctctatccaaaacaatggacttcaggacaccatgaagacgaacaatttttctgacatataactcagcatactggtcaa

SEQ ID NO: 260362 - DNA, 955 bp, Cannabis indica
agaagtaaacaaaaaccaaaaatattttcatactcttgatattgttcaaatctcttagtaagagaagcaatggcttgatcaacaaggtaaagaaaataattaattctaaaagattcctctccagataactcaacagatggggtatttaaattttcatcaaattgtctttttcttcgaattgtgcgcctttgaggaaatactggatcgatattcatttcaatagcaatttccttagcattagccaaggcgttataaaaacctgtttctctatatcccacgaaaaaaaattaacccttttattttgtccatagcaatatcaataagcatatcctttgattgtaaaagcttactaaccaaattaattgcagataagatttcaaaccaaataataattgctattaaaaactcaaaatcaccaagttcatttattgctaaggattttgcttcacttctgattttagaatcaagttcatccttttccgatacttcaagtaaagcttctctaaaatctgacatttgagatcttatagctttaacactttctacacgactctcccaacgagtggatgacaatgatttcggagtcaatcctttcacattatctttcaaaatttgccatctcttagtagaattggcaaaaattgtataaatgcgttgaataactccaaaaaaatctctagctttactacacgattcagccatgtcacacaaaatcaaattaagactatgacaaccacaaggagtataaaaggctcttggatttatgtctaaaaatttcttttgtacaccttgatgttttcctttcatatttgacccattatcataaccttgccctcgcacatcaaatatgtcaagatcaagttttttcagctcattttgtagcacatcaaaaagtccttgaccagttgtatcattcacatttaaaaatcctaaaaaagattcttcaatgctaaca

SEQ ID NO: 260363 - DNA, 580 bp, Cannabis indica
atcaagctcaaagaagccattcaccgagaagagggtgagtaaaagccgaacaaaacgaaggctccttctactggaacgtccgccgagcttccccaatattccagcaattcaagtggcaagcgttcaggcaacaaccacaagcaaggaaacaggaagaagggaaagttcaccgaaaaacccagacagactccccgtgatcgcgccaaacacactgcattcactatcttaactgaagatatagaaagtgtgtatatagcgactcaatcgttaattctgtacaagaagcccgggccaatgaagaaagataccaacaaaaaggacatgacaaagttttgtcggttccatggagaccatggccacgacaccaacgactgctacagaagtacgtcaaggccaaccaaggtcagaataaccaggatctgatgcctctgccaatagatggacacttgcaagtcatcattggaggcccgcacatcgctgaagacacgggcaaagctcgagaacgatatgctcgcacagctcaatacgagcaagaagaagtcatcctggccgtggaagaaaggaagcccaaagttccacg

SEQ ID NO: 260364 - DNA, 1179 bp, Cannabis indica
tattaaatttttaggctgttaaaatctttttaccaatgagtcgttacagccaaagaatttttgcccttcatttaatcttacttatggccaattgatattacaaaaattcaaatgaaataatttggtacatgaataattatcacgtttagctccgtaggtaaaattgaaaagaattatataaaagtttttgaattgaacaatttctattttaaaaaatttataaaacttaaaaagttagaaagatcgacacaatttgatgcatatcttatatttatgaaattaaaaaagaaatcataattaacctaatttttttctcatgtaagaatatatatagagtgctgatttgtaatgggtaatattatatttttagtattttcgaataaaaaataaataattatatagacggggtcttcttgtttgacagcagcacaattttaatgaatttgtagttaattggtaaattctgaatagtgtcatatttggttgtaatcatgtagtcatgaattaagaaaaatacaaataatggcaactagttttctattttgtattacatttaaagtatccatttacaagtaaagtcatcttcgataaatgttagataaatgaacaacaaacaacttacaagttaattttagaaacacaacgctttatatattgtataaatattagttatgtcacacactaactcttcacgcactatagccatgagcgagcggtaccccactaatttttcttttgattcttcttttaactagaaaacataaagtgctttgcctgcacttgtattttatttaatgataattaaattataaaattatattacattctaaatttttatattttttataattattttactataatatgaataataaatttattaaacttattttttttttaattgattcactataaatatatattattataagtttagttttcaaaatatatattctttgaataaattagattaaaatttgaaaaatatataattgatataaatttataaaaaactaatttgtatattttcaaaattgatgttgatatcgtatctcattagttgtagtcgctattacatttaaagtcattatcattattgtatctcacttgtagatatatttaggtttgaatataaatgggccaagatgcaaaatgcccctaaatttaacaattaagtta

SEQ ID NO: 260365 - DNA, 1330 bp, Cannabis indica
tttttcagtttgatttggacggtttacaaatttttttgtacaaccctaaagaaagtgtgcctaatccattccttactctccatattgatttttttaaaaaaatatttggttcaaaaatttcataaggaaacaaaggaaggttcaatagaaaactctacaagagcctatttcgtcataaatggcgaatgaataataggcaggtgggacatatagacactattgcaacacgtgttaaacaacctctatcatttatttgtgggtcccattatctacacgtggcaaaatatcctgaatccaccagtctcctcagatgatcaaacctcttacgttggtcgttagtagtagttaataccgaatctttctttgtccacactctctccatcgccacctcgcccattcccaatgccgccaccagtagctgcgcttctttaccaccccgtcggtccggtaccgaccagaaccggtccgacatctcaacaggaccggaatcatttccttatctctcttcgagaaactggcgctgttcatttccggacccggtttcctttacggttcggccaccttacagtctccgccgagaagaagcagtttcccgagttacggactcggaaatcaggtgagtctcttctaactattttgttttcaaatctaattagtgttaacagtaatgaagatacataagttaaatcatttgatgttaaatttagggtttgtgaaagttgcagatagtgaaattttttcagtcgaaaaagatgatggagaaaattcaggatcagaggtgggatggttaccttcttttcctcacgtgttggttgcttccatgtccaattttctctttggttatcacattgggtgagtgttgagctctatctcaatgtttatagtttaatactgtttgtactttattgttaaagggcgttttaaagctcaatgaactactgggaataaaaattttggatttatatgtgggtttttaattttattgccttttttttttaaaaaaaaaaaaaaataaaataaaaatcagagtgatgaacggccccattgtttctgttgcgagagaacttggttttgaagggaacacaattctggaaggacttgttgtgagtatattcatagctggtgcttttcttggaagtgcatgctctgcctcaataattgataaactgggtgccgccggacctttcaacttgttaccatccctttgattcttggcgcgttaataaggtattgtttgtttcattaattttctgaaggagctagtcgatttgatttttggttgtgataagatgaaagctctcttacaatatactgaccagtacaaggtttg

SEQ ID NO: 260366 - DNA, 617 bp, Cannabis indica
cttcggcccgaaccaaggaatccttttgatatgatgcaaaatggatcttatattctatcgttgatcagagatttctctatgaacaatacaaatcggagtttgaagaaggggaaggagaaggagaaggagttctcgacccgcaacggatagaggaggatttattcaatcacataatttgggctcctataatatggcgcccaccatatcgtattatcataccgttgtcacgtttgagttctttcaagtacgtacaattacagctctgattacttcggatctttccagcggtgtatttggtattgcttctttgattacatcaacaataacgtcaccaatatgagcatatcgtcgattactagctcctatgattcgaatacacatcaattttctggctccgctgtcatttaaagccaaaatttaaaatctttaccaataattgaaataaaacaagagaatcagttactgtaaatatgttttacaattcaaaaaattgacctttaaaggtatgagagaattttgtaacccaaatccaccaaaacagagttagaacatgcctgcaaaagagaaaaagaaaacggagagagagagagagatgttcagactcacatgcaactaca

SEQ ID NO: 260367 - DNA, 542 bp, Cannabis indica
gcaaaagttaccaatttgaccctttgtattattaaataacaaaaaggatcctatatattccaaaatagtaaaataagactttgagctcaattttcaacaaatttttttttttaatataattaactttaagacaattttaaacacgaattgatataaaaaaatataaccagttttatcataacatttttagattagattattattaagttttattttgataaaaaaaaatcagttcaagatcctatttgtacaattttagaaaatatatggtccattttgtcatttaacaaaacagaaggttcaattagtaacttttacaaaatacaagtccaaaaatagtatttacccgaattttcattgttattggtacaattgtatatcaggtttcacatatttacgtgtgacgatgcttaattataccaattaacaagataaatgtggtagtattggacaccatgacacttagataacaaataaacaatgctataatgaaataattggttacttacacgtctagtggtataataggtgagacctgggat

SEQ ID NO: 260368 - DNA, 705 bp, Cannabis indica
cattaaagaagctttgagttggattgcaactcattcgtgggatagagtcatgttggaaacagatagcttggtgtctgtccaagcgattcaaagcggtatttttatgccttcacagtttggtcttattgttaaagatgttcgaaatttgcttttgcctttatcttttgttgatttgtgttttgtaaaatgatctgcaaataagttggctcattgcttggcaagagactcttgtttctctacaggtcgtgtgctttagttgcagaactgttcttctgaagtgcgttcaattattttgaacgattttattaattattaaatcatatgatttttattcaaaaaaaataaaataaaccaattctataatagtgttataatgaataaaaacaaataacacgaaataactgaaaccggttataactaaaatagaaccggttataacctaatgaatactaacaagtaaaacgcaataatttaaaccaattacaattaaaaataaataagaaatcagctcccaaaacactgaaatataaattaaaaacaaaactagtttcagaataaaatacttcataacacataataccttataaaactagttataatttttttaaaaaaaaaaaacgtggggaagtgtctcgaatataataataaaaataaaaccggttctataacataatgaataaaataaataacacaaaataacgcaaa

SEQ ID NO: 260369 - DNA, 643 bp, Cannabis indica
tattaaataattagttttggaatttaagtggttaaattggaaaattggcattttttgagaaaataagaaggaaaatgagaaaaatggcaaaattgcaaagtggggcccaatatcaatccatggccagccactttctatggatttgccactttatttttctattattttaatgctaattaaatttaacctaaccctaagtggtttcctacaaataggtagtgatggcttaaaggaaaagatgatgcatctcattccttaagttaaaatttgagcctctcttcctatacctagccgaaactactctctcttacttcctctcttctaaaccgaaccctatagtgaaagagtgagtgcccacacacgtcaagtggtactcaatcatattgtgtaaggctgttaagaatccagtttcaagagaagaagattcggactcagatcttggtgatactctgctataaaaaagatacaagagttagagatctgagtggaaggagacattatattccgctgcaaccactgtaaggcttctaatactttatatgtgtttatttcatatcgttttagaagttcatatttaggatattaataacatacttgttagtaaatctagatcctcgtaaaataattccaacaactagcctca

SEQ ID NO: 260370 - DNA, 708 bp, Cannabis indica
ttgagttcaaactccaaacttggataaaaccaactaacaaccacaaaacctgcttaaatcaccatatctaaacacaattaaactttagaaatcaacaataaacataaacagcaggtacaacatcaaaaacaccaagcatgcaaacatttatttccttaaactacaagaaactaaaaaggaggtgcaagagctataccttggcttggatttacaacacaagtagctgagaaagattgaatttctgtagaaaaatccaaccctaacagcccaagaaaaccgaaagagagagagagcttgagcgaaaaatgaatttccaattttttttctaacttttcaaaaataaagaattataaaattaattttattaaaatacctccagccaagatttaattaacaaaacacattaccaagagtaacatagtccactaaaggacagacaacaaatgggcaaaattaccattttgcccctccacaataaaacaacataaaaggggttaagggtattttggaaaattcaaattcccgtccaatcccgacattcttaacgtctaacaataccgtcccgctatactaaagtactaagatgtgattctactgagccctacaccgcgttccaatattgtcgggcactgaacatgcaaaaatatgcaatttcactatatcacatataaaatgcattctgaattcaaataaatcaaacataaataa

SEQ ID NO: 260371 - DNA, 606 bp, Cannabis indica
tttggatctgcataactcttttgcctactctgagaggcaagtattctggctttgatcttttctatagccttgttgatctgttatactgattcaggacccaagtacttcctttctccagtttcatcccagtgaattagagatctgcacttccttccatacaacatctcatagggagccatccctataatactctgataactattattgtatgagaactctatcagtgatgaatacttgctccgggagccttcaaaatccaacacacaagcatgtaacatatcttttaatatctggattgtcctttcagactgtccatcaatctgagaatggaaaatcgtactaaactttagtttggtacccgtggcccgttggagactctaccaaaattttaggtgaactttggatctctatccgatataatggactttaaagcccatttctttcacatataactttgcataccgatccactgtaaaagttgtttcactggtagaaaatgtgcagattttgtaaatcaatttaccacaacccaaatagaatcgtacattcatgtggttctaggtaacccaaccaggaaattcatggttacatccccccacttccact

SEQ ID NO: 260372 - DNA, 589 bp, Cannabis indica
attttattttcatgattgtgtactattttaattatgtaaaatcacttataaatttttaaaaaatttcaaaccacaatgccaaaagtaaagtttaaatttgttttacttataattatattttcttatgtgtcttatttttaatttacattatatattatttagaatttttcaaaaatttacttgtggtcttaaataaattagcacgacatacatgattgtgaaataaaataaattaaaaaaatatctttgtaattatagtagaaattattgaataaaaattctaatttctataaaaagattatttaattgattaatttttaatttaataaattacaattatttaattatatatctcaatataagaaaacaatactattcatcgcaattataatttcatcaatatatatttatttaatcaagcattatatgataatattaattggtaaataagtatagtacatatatataaatattagccaccttatatattatttacatttcttaaaattttggcgggccatggccacacaacctcctaaagtatttatgctcctgtgtaaaagtagatcttacttgttgagcattcttt

SEQ ID NO: 260373 - DNA, 859 bp, Cannabis indica
tttgtataatttatagtagtgttccaacatctgaacgttgtatatacactaaatatagtactaatgaaagataactgttctaaaaaatctatgttgtattgtatcactgtttcatattttatcataatcatatggtcatgacattcacaactttacgtattccctattagtaaaatataataggaactaacacataattcaaattaggaatgattaaaaagctagaacttaagagagagtgatgatggtgtattatatatttgaacattgttatttattttgagaatcctgaccagtctgatagatcaaatttgccaatcaacttgcaccggctacgtggatcaggctggtcgggatcctcagaattcaatcagacctttcgaccaatttgcatttgtcatgtgaattgagctagttttagtcggacactcgggatgtaaaactttattgtatacattcttaccatataagtactttattaataacgataaatttaatgaatttaaaaaagtattcaaaagagttttctatagcgactaagaaaatgacaacatgtaatgttacaaaaagtcatttcctttcttcctgtaacattattggaaattcttttgaataatttttgagaattatcaagttcatgtaaaatatctatgtgaacaaagtgatactagtttctttttaaactattattgagtgtttatactttatagacataagagaaatttgaagaagttataagtgttattggtacccaccaaattgatataaaacaactacaagttagattttattttattgagttgatgtcggctagtggtgccttataggcaagagccacttttcctaaattattgttaat

SEQ ID NO: 260374 - DNA, 1001 bp, Cannabis indica
atatcaattaattaaaataatttgaatatttttggtatgtaattacactgtgtaattacacccaattctcatgggggtatgagaattgaagagagtaattgaggcctcccaattacttctaattacacagttactatgtaattacatggccatacaaacacgttaaactgtgtaattacctccaattacatctaatttcaactcccaggtggctttccaaacacgccctaaatgtatttcatatatattaattagtctaatttgagtttatttaatattttagatttaatattttttttttattggtcaatcagatcaatctaatattttgtatttattgaattggataaaaacattaatgttaattttcatatatattataaattacgtataacatcaaaaaatctaattaagtactcattcaaattaaatgaaaacgctagtaattagttttattaagtgttagatgtattgaatttttggacactccgtccaacattccatctaatctaattacatatttaaaaataatattcaatcttatctaattataattagatatctaatatttggtggttgatttaaattagattgatcatatgcatcgaattttatcaatatataaccacccctatattcaaccatgcaattaacccggaactaagataaaacgtatatcacaaaattgatgagcgattataaaatcagtaatggtaattttaacatgtggaattagtattagcattcgtaaataaatcggtcaaatccttaaacatgtatacatatgtacatatattttaagaaaggtcaaagaataggtttgaatatctggtaaacaactctaccaataacagaaagcagtaataaatatgcacaattttacactgaatttttttttgttagttttctttaaaaaatgaatgaacgaatggaaaatgaattaatgttgacaaaagtgatggatatagtaaatcacattaaattccaaaaaaaaaaaaaaa

SEQ ID NO: 260375 - DNA, 1513 bp, Cannabis indica
aaaaatgattttatttttttgatggatctattattgatgatgatataaaataatttttcaatatacatattttatgaatgtgcacaaaccatatttttttagactaaattataaaatgattctttaagaacgtgaatagaaaactatttatatatgtattaattaaaaaatataaatataaatgattataagtacaaattactggtatatattttcagttatattttaatttgttactttttttagttgtgccgtagtttgatttttagtaatgatattctttaaaaattaattaatataaaggttgctatcatggttgttgtaagagttgtttaagatgtagttgatgtgtgaaattaagttattataagggttgctaagacggttgttgtatgagattgagttgttggaagtgttactaattaattaacacggttgttgtatgagatagcgttgtcgcattagttaccttaagggttgctgacatagttgttttttgagattaaattgagttgctataaatgttgttgtattagattggcttgctaataaagttgttgccttgtaggttattgtgttgttgttagcgttgttaacaatggttcttctgttatattggattgttgttgttaatatagttattgtataggattgaattgatataaaggttgctaatatagttgttgtatgagattcaattgataacatgtttgatgtataagtgttgctagcttggtgtttagatgatattgggtttagggtttagggctaattgttttaagggatgctaacaagattaatgtggctattgtatgagattaggttgctaagaatgttgttgtaaagttactaacatagttattatcttgtatgatattaggttgttgtaagtactgttgctaacaataaaaatgtcatttctttttcttctttttttttccatcattaataaaaggtgtgcttaaatttaattgaagtatatgtgctttaatagtattcacaaattttttcatttttttttatatattttcaataaatatttataatttataattttttctttattaggttaatttataccttgtatgttaaaacacaatttaaaataaaaccaaatataacatactcattatttgggtaaaatttagctcaaaatatacccacccattagtaaagatggaataatataacaatttcaaaaatccgtacactaactcattgaggttcccaatatgaaaatgataaagaagctcataaacaaagtgatcatcttcatcattgattaaagagatcacaagactgttagaaatttatctatttagggtcacaattgtatatataaaaatatgtgttgagtcatcatataaataagttaaatttatgtggtctattttagaataaagtttaagacttaaaaacatgattgtcatgattttagtatgtcgataccattgagataatttctgatttgatgaggggtcaaattagaaatagtaaataaataattaattac

SEQ ID NO: 260376 - DNA, 1177 bp, Cannabis indica
gcattattgatgtgtataaagttgtatcaaagataaaggagatctcatccaacatcgatacttggacgtcgcaattagaaagatttggagtacagagatcaatagacaaagcagatgaagcttcttcaagcagctatgtccacaagcaaaaagagttgaggcaagtttattctcatgtcgaagacaatgttgttgtcggatttggaaaagatattgaagagttggtaactcttttgactgaaaaagagaaccctcatatgcataaggtgatttctttatgtgggatgggaggtttggggaagaccactcttgcaagaaaggtctatcagcatcctcaagttaggactcactttgattgttatgcttgggtctcaatatctcagcaatgtaacaggcgtgatgtcttggaaggaattttatttgctttcacctctcccaccaaagaaagaagagaagaaatcaaaatcataagtgatgaagaattaaccaaggagctttacaactttcagaaacaaaaaaaatgtttggtggtccttgatgatatatggacaactgcaacatgggatcttttaaaacatgcatttcctactacatctcaaggaggcacattacgtagcaagatcttactcactactcggaataaggtcgtagctttgcatgccgatcaacatggtatcgtccatgaacctcatttcctcaatgaagaggagagtttggagctgtttcacaaaaagctaccaagtaacacatttccctcttttcatttcaattaacataatattcttctttatgttcatacatactataggttctgtatatgtttttaagtcatattagttgtttcattcatctttttgtgcattttccatggataaattcagcttcaaatgatgatgaagaaaggaagaaagaacttgcagtagagatggttagaaggtgctctggtttgccattagccatcattgtccttgctgggcttctatctaagaaacataccttatatgagtgggagctgatgaaagtaaatgtaattcgctgcatcagtcaaggtgatcaacaacatgacggcgactcaagataccgtagtgtcttgtgggtgttaggtttgagttacagtgagttaccatctcacttgaagccttgttttttgtacttggctcgttacgctgaagatgtc

SEQ ID NO: 260377 - DNA, 583 bp, Cannabis indica
taggattgaattggaaaatatggtattattgaaataagaataactagttgaaataaagtgtcaaaattataactagagaatggccctttactggccagccactctagtgatttttgtccaatattttattcttttttaatccatataattcaaccctaatccctaattgaaacactataaaaggaacatgatgctctcatctcatccaattgatcaatcaactacacttaaacctagttttttatgtcaaacaactagtagatgagagacaccttctataaagttttcaagccttcttcattgttcttcgtactcgagcctatagtaatagagttccatgcccacacatagcaagtcaagtactcagtcatagtgagtaagacgatggtaaccaaacctgaaggagagaaagagatccaggctcagatcttgataatactcagtgacagaaaggaacaacggttagagatttgagcgaaaagagttattatatttcgctgcaaccaatgtaagattttctaaactcttatgtgtttaatttcattgttttagagatattcgtatttaggatgttaatcaacat

SEQ ID NO: 260378 - DNA, 955 bp, Cannabis indica
gaaagtgaatgccttagagacagctggtcttgagattttttatgacttctagaaggccaatcccaaggaaaattgtgattacttgagtaattccaaagacatgtttctcgactactgcgctgctcaggcggcctacggggaatccaaggcgaccacttccacctctcccactgatcaaagtgttgaagtgcctcctgctcagaaaaatgatcctctagctccaactgacctagttgacccgtacaaagagcctgggactccagctatttgaatgcttcctttttctatcctttttttttatttgttcggccataaggccttttttaagacaaagtgaccgactaagcggtctttaaacttggaatatatttttcattttttggaccactagctgattgggcagcctttaatcccgggtttgcgtgcttttattatccttaatgaatttcattatctgtttataatcatcgtgcaattgtgtttgttttatttttttactaaatgctttgtataggtataggtgccccacaagtgaccgagcagacttataactcttggtcactttttatttatttttacaagtgtactttcttgtctgttcagggttttgggttcgaccaaaccttttgtatgcactggatggtaaattaatttcatgctaatggattcgactcaatttgaattttgaaatcaacatctttattcatttattgatcgaaaatatgtatgttaccatagtaacttacaacaaagctattatgctgatttgatatgatctttagcttaatcatgaaataaaacaaattgcagaaatttaaaaattgtactttcaatggtggtcatccgacctgagtacttgaagattttattcaaacctttggtcgtggttcgcccagaaggccattttcttaaaagcaaatgttcttttatttcgtacttgatatggtcatctaac

SEQ ID NO: 260379 - DNA, 1583 bp, Cannabis indica
aattataaattcttatttatgaatttttcactaaggtatgagttgattgtgaagaaataggattttagggtttatttgttaattaggagaccttgtggagtctaattaataaataatatacatgaaaattttatataatatttaattataattattaaataaatagttttggcatttataggattcaaattggaaaatatggcatttgtaaaataatagataagtggttgaaaaatggcaaaaatataactagtgttgtgcccacatcatggtcggccactataccctatttttgctattattttatcatttttttattccatataatttaatcctaatcctaagtaaattagtataaaatgaaaaaaaaaatagtctcataatccaataaatgactgtaaacctagtttacatcttgtcagacaactagagattttgagacttcttcttcttcttcttttctctcttctaatttcaaaatcctatagtgttcttcacataaaaatttgagcctttagtgattgagtgcatgcccacccataacaagttagtcctcaatcatattgtgtaagactgtaatgaatccaaacaactaaaggagtgtcgggcacaaatcttgattatattctacaacaaaaagaaacaagggttagagatctaagaagaatgagtcatttaattcttcggcaacaaatgtaaagtttctgatgctttatatgtgttaaaatttcatcgttttagagattcacatttaggatgttaaaaacatacttgttagtaaatctaggttctggtaaaatatactccaacagggtccacttgctctgcctccacagcaagtgtcagctgctttggtcactattgtgccagcaaaacaacctcttgttggtaaccatatggagcctttgtatgagtggttttggaaacaagcactgcagtgcttttgcgatgtctggatgtcatgaaagccaaggaatggcttatgatgattgagaggatcctgaactttatgggtgtcacttggaatgatcaggtgactagtgccacatttcaattctaggaagacgctctcatgttgtgggagttagtatccctcacccgagacgtcttaaaaacgacctgggaagagttttgagaactatttaatgccaagtattataatgaggcagtccgcaatgccaagcgaaaagagtttattaacttagtttatggtgaaagaatgtcggtaacagagtacataatgaagtttgattgcttagccaagttggcttttggtatagtacccacagactttagtaagaaagagaagtacctggcaggtttaaatgtaaacatgaaagatgatttggtaattactacaagtgatacaacaatctatgctaaaattattgagaaggctctgcgcgccgagggctcagtgaaatttcttttagagcctttagagactccatgtgtggttgggaccaccactctttctaattctagatatgctaggaatggtggtgattcctgatcataagaggaagacttttgcgacatctagtggttcgagttagaattaaaggttccaagggaaccaaggt

SEQ ID NO: 260380 - DNA, 639 bp, Cannabis indica
atacttggataatatttggagattagttagcttgtccagtccacttggcatatactccaatttatcacaatcagagattttaagatgcctaaggttgatgagtttcccaatatctggtagtgataatagactttgattccgagaaagatccaagtttctcaattgtgtcaactgacctagtccacttggcaaagaattcaattttttgcaaaaagaaagttcaagatgccttaacttgatgagtttctcaaaatctctaggtagttctttgagatttgagcaataattgagcttcaacgtttgcaaattcaccaaattcgtaattgaattgggaagtgacttgagataagatttccctgaaaggtctaaatatctcaagtgtatcaacttgccaatagaattcgataccatctttccacttgaaaagttcaaatccaaacaacgtataaccttacagtttgatgttatggcattgcaaaatgactcctccttagagtttgaaatactaaaaaatgttcgaatattttttgcatgagccaatgaagctgaaagttcacttcccgagtaagcatcgtttacaaaagacacatgaagagtagttttcttgatatttccttgaccatttgaaattgcaaaagt

SEQ ID NO: 260381 - DNA, 928 bp, Cannabis indica
aagacatctgggatttggaagttttactttgacactgtagtcttaacagagacattcaaatttacaaggcaaactaaggttatgcttaattggggaaaagaaataggaaagaaaaaatccattttcatttactattcaagcctttcaaggtttcggaagccattctaaccattgcattgcacaacataaattctcttccattctcatcacaacccatttctatgttttaattactcccaaccataaaggacatttagagtctatcctttcttatcaggttttaattaattttcttctgatggttcagcaatataattgactaaaattaacaaatgttaaggaagaaatgagtagtaacctcttttagttcagcagtggttattatgtcaaaatccttgggtgtccgctttaacacaagatccctaacacaacctcccacaagataaacctcgtatcctaaaagaataaaccaatatagtaataatgatctctgaataaaccaaaaagctacctttcatcaaattctgataaaatgtgctattaaataatgagtccatctatcattgcaatgccagattattaagaaaaatattaatacctttttgcttaagattattaagaaccttcctcgcaggcttagatatcatagagttcgtaattccgagctccttggagcttaatttcttccatttccgcaccttttcattccctgaatcccctaataaaataacaatatcgactaaaaatccattcttttgctattcccaagtaaaacaaccaaaactttttccttacctctttcatgaaccgaatcacaagaatctgaaaaactatcttttgtgatatgttttggcccttcaagtgcttcaatggccgacgctaccgagcgtggccacacctgttaaaagaaattggcgcttaaacattt

SEQ ID NO: 260382 - DNA, 633 bp, Cannabis indica
tatgtgtttctaacacgaacaggtagagaaaaaagcaaagagatatggaaaaagggaagggagggaatggatactgaagaagaaggaacagatgagaagaagagggaatgttgtatctgctgacacaaaatacactgctaggaaaagaaggcctcaattttgataaaataaataatattattttgggtaaatagtacccaaagttttatgttggtatgcagcaaagttttatgtttgtaaacagcaaaaacttaatgtttatttttaacggcataagtacttaatgtttgtaaaattgtaatttttttctaattttgtactttgtcagtacagactttgatattgtcttaaacagggcacatataaaacttaaatttttgatcatcggtctagatagaaatatatagtatcaattacttccaaatatttttttaataaatttaaaacagagtctgtactgacaaaactagaagaaaattacaattttagaaacattgggtacttatgccgctaaaaataaatattaagtttataccgcttacaaacataaaattgaggaaattacactctataccctttttatattgtactcttttatttttaccttcttttttaaaatctatcatttttacc

SEQ ID NO: 260383 - DNA, 2185 bp, Cannabis indica
ggaccctttgttttgtaaaataataaaatagaccatgtatttttcaaaatgataaaaataggacattgaacttaatttttgacaatttttttttaatataaccaacttgaagacaattcctaatacgtatagaaaatgtaaacagttttgtcatagcactttttggtcggactataattaaattttattttaacaaaaaattaattcagggtcttatttgtaccattttagaatatacagggtccattttatcatttaataaaatacaaggtctaattgataacttttgcaaaatacagggtccaaaatggtatttgcccaatccaatataaaaagaaacatatttatagaaaaacttatttttatgattttttttgattttaatatttacagaaaatatggtcttttttatgttgtactcttgctaatttgttgttgattttttgttatttttatgttattttttgttgttgttttgatgttgtttagatgttattttcattatattactgttatatattttttttggttgttttcttgttgtttctagggataaccataaaaatgtaaaaaaaaattctttaaacattaaaaaaaatattttttttttgttttaaaaaaagtagtatcttatttaattatcccttttctaaatataatataaagatcatgggaagctcaaactttcaccccaaagtatggtataactaatttacatagtttcactataaggcgtaatttcaaatatttagagtattgctcatgcaagtcttaacattgtttttgttgttgctatatctagttccactattagttttttttttttaatattattagttaagtttttatctttcacactatattggattgtaatacaattagtgatatatacaataaaacatagtattcgatttggatcttacaaataaatatatatataaatgtatagttactagagtattggcacatcaaactaaagtaggtatgtatgtgaaccaattatagcgaaacatatatatattgaaacccctaaacatttctattattgtgtaaatcgggttttctttcgtgacacttttgagttttggctttttttaatatttgttcgatactaaataaatgatacattcgaatatttcattcctattttttttttttttgataaattaaagggaattggtcttggatatctttgtatatagatcaatacagtaatagaattataggttgaattagatgatgtattttggccctagctataaaaaagggggttgatgtagtcacaaaaagcaatagaagagcttatcttctcttggattctgcaaagcaagtgcgtctgagactatgagcataaactctgtacaaaaatcgtttgaggatttaggtgtagattgttgccacaatttcacatttgtataggaccaccactacaaatgcttttttatatataaaataaatgaataatatttatcaatttttgtatagaatgaattcacatcattatgtgttgcttcttcttattttttctttataaataaaatatacaaattaggtgatgaaactcatcagcgttaataaagtagtttccttcacaattgtaataaagtaggttttatacacgcgtactcttttgaataatttcagttaaaacatatcaatgcttttcaaagtaacaatctttactatacataatttttcattcactacaaattaaactcaaatcaattaaatgttggtttatacataaatactgagctcgagcacaatttttctcaattttttactataacctatcagaaatctgtgtctagcaccaacataattgaaaaaaaaaaatgtaatatgagtaaattttatttaaacaaaaaatcagtccaagatattatatgtaccatttcaagaaatacaatattttaattgtcatttagttaattcaataatatttacaaaacgtaaagtcccaattaatatttaatcagaaatttgacgcgtcatatagatgtacaaataaggtcttctctataaaaatgtgcaaaagacatgcataagattatcaagttaaattcactcaataatttattttgttctttactcttcaccaaataatcatccatggcctatggacaagttgtcctcaaattcgttgatgtgcaaaaaaagtttgatgaacaattttttttttttt

SEQ ID NO: 260384 - DNA, 507 bp, Cannabis indica
aggcgagccactccgggcatacatcagtagattcatgacggaagcgaccaaagtgtcgcgggtagccgaggatggaaagttatccgcgatactggaaggcattaaagtcgttggtgacctatggaaggatataaggaagaacgggccggtcgactcaatgagtgatttccttgaccgagtcgaaggtgagcaaaagccaggcaaaatgaaagttccttccactggaacatccgcccaacttcccaattattccagcaattcaagttgcaagcgttcaagcaacaaccacaagcaaggtaatgggaagaaaggaaagctcaccaaaaaatccagacagactccccgtgatgatgccaaactcagtcattaattccgtacaagaagcccgggcccatgaagaaagataccaacaaaagggacatgacaaaattttgtcggttccacggagactacggccacgacaccaataaataatacaacctgtagcgggaaatagaatatctgatt

SEQ ID NO: 260385 - DNA, 662 bp, Cannabis indica
cagccatccatattgttagattcctaaaatagaagttataagaattattttttttgagaaactttaacgagtgaaccaaaaaagctaataacatgaacacgagttcatgattactcaggattcaggccgatctactattaatcatctttatgatatgaattaggtctttatagtaaacgacgttcttgataaagacaatgtcgtatataatccctattatatacaacacattcacttagatttcatactacatccataatccaaattgagactacttgtaccaaataacaggcatcggtgaaccgcactagcaaccgttgattaaagattcctgaactttaatatgttgttgactattttattaaaggctaagtgatcgtaattttccatacaatacaagtcatagcctcatgtatgaataagaaattttttgatatttatatataaattattcaatattaaaaattaattcaagtatatatgaaaatattaaactcttatttataaacaaaaatatctttacaggcttttcaaggcataaaccctaataatctcccacttcacctaaaagtaaattggcatctcctttagtctcatattagttatatgacccataaaagattttgctggtagcgtctttgtgaatggatctgccatgttat

SEQ ID NO: 260386 - DNA, 460 bp, Cannabis indica
tcaaagtcctcaggaaatataacatgaaactcaattgtctaaagtgctccttcagagtcagctcgggtaagtttttgggctttatcgtcaatgcctgaggaattgaagctaatctagagaaaattcaagccctcctagatatgaaatcgccaacaaaaaccaaagaagttcaaagtttgactggacggattaccgcactcaacagatttgtttcaaagtcaacagacaagtgtgtcccattcttcaacatcctacgaggaaataagcaatttgaatggacggaggaatgtgaaaaagcctttcaggctaaaaatgcaactcgcaaaacctcatgtgctttcaagacctcaggacggagaagagttaggaatatacctggctatcacagcacatgctgtaagtgtcgtaatgatcagagaagagaacaatatccaacacctggtctactacatcagcaaaa

SEQ ID NO: 260387 - DNA, 525 bp, Cannabis indica
aagagtgcaattctatatttatggtaaagtaataatagaattaataaaccgagttattgattagttcaatagtaatttagagtttattggagcttcaaatataggttcatagtcctcggatcatgtctatagcaaactgtatagggcaaggttttatttgtggaataaattaaaaaaaataatttctatgagaataattctggaggaaaagaataattttgaataattattattttatataattatttagctataaatttattaattaaatagatttaactatttagttttattcatataaaactatatactagttaaatataatattattgctaaacaatattatgagagagaactatattattttagtggaaaaaaattaaattattatagaattaaataagagattaataagaattaatcaattttatttattgtaaaaaataaataataaatcttatttaggattcaattggtaaaataattttatgcattaaataatggctcacatgtgtcagcctatgg

SEQ ID NO: 260388 - DNA, 683 bp, Cannabis indica
aaatttcattcacctcatgacttgcactttaattggtgtttaatagaataaaaacgttggataaaagagttagaaacatgctcaataaatccatgtacgtttatggacgctatttcaaaacataaacatgtcatgaaccgcaaggcaaccgttttcagaaaactcaaatttgagttttgtaacttctcttcaaactacattaatttccaatacttttatgtgtcataattatttatgagtatttatcctcatccaacaactataattctataacattaaattttcataacatatatgcaatttacttacttaaattacatatttatatttgtgacctatacaacttacaaaacagttgctgttttaatttctaattatgttataattttcggtttataatagactatagattatattattgctaaaaatttagacccaaaaaatctgaaaaaaattcgttgatctggcgtgcacctttggagtgaatttcagcagaaaatgttaaatccattgggattgggtgggaacccaaaacctaaaaacttgacctattttaagccctaaataatataatttatttacaaaaactataatatatattattctcataataatatatatttgtcacattttaatgaattatattatttgtttaaaaaaaaaatataacataaatgataata

SEQ ID NO: 260389 - DNA, 716 bp, Cannabis indica
aatttcagacataagaaattgtactttaaagttgtcacctgacctgagtactttgtttcttttatcgaaaactttgggcgtagtccgcccagaaggccattcacttaaaagcaaatgttcatttagtacttaaagttgtcacccgaccttgtactttgtttgtagtattttcataaatgttctccattctagtaccgtggtactagaatgagttgcatttcttcgtcatacttacctaatttgtatgctacggagtcgagaacttcgaccacttaatatggtccttcccagttaggtcctagtacacctgccgtactgtctttggtgtttagtaatacccttctcaggaccatatctcccacgaagaatttccgagctttcacttgtttgttgaaataccgagctactttttgttgatgggccatcaactttaagtttgtagctgctcgtctttcttcgatttcatcaagtgattctgcaaggagtatgtgattggtaccttgatcgtacgtcaatgcaactcagtgaaggattgattgtcgaactgtttgccattgtctgagactattttgtacggtagtcgaaccggcatatgatgttcttcacaataaagtcttgaactttctttgatgtaatggttgcgagtggttcggcttcagtcaacttagtaaaatagtcaactgctaccactgcgtactgcactccgcctttacctt

SEQ ID NO: 260390 - DNA, 1018 bp, Cannabis indica
gagaagcatgataagtttgatataaaaatatttaatatgtttatgcatgtgttgtaatgcttattagcattaattgtggttcgaaagattttaatgatggaaagaaatggtcgcgagtgtactggaacatgtacctggggcgatctagtaagaataatggcgagcttaccaggctcgaagttggtagtgtgggtatgaatcttcgactaccacaagactgagagataatacatgctaaaagtaagagattacttgagtggcaaggtagtagaacttacatagttgatcccgggcagcgtggtgatgaagactgacactaagctggaccaattggtagagttttgttttgatgaagcggctgctaaggccgataggaaggctaaatccaatcgaaggtggaaagagtatatcacttggaatgtggatataatggctaaacaactaggagttgtctgtctttatgctcatgtggttgagctaacccttactgctaagggtgcgagaactagatcacaaaagatataatgtaaagaaagattcatgaaagtagatgatcaatgttggatcgggtaaagggtgttagccctaatgaactcaagggaaaagattaccaacccactagttatgggttttagtagaaaaatttgaggtaatgttggggattggatttacttgtaaagtatagtgtaaatattgattgtgaaagaaatgtggcaattcttgaatcaaaaggtgtggatctatttgtgttctttgacaaggttcaagggtcccaaaatccattaatcacggcatttaaggcagaaagtttattatgggatggatgtaccaaccttttagctggtgtggcaaatattacaaagggaacattggtggaactcagacacaatcttgtggtccaagggtttctaatgccttttcagaagggccatcagggttattgataaagcaggaaattgactctgaattgaattgatactggaggtaacacatgtatctaaagttttgaattggatgg

SEQ ID NO: 260391 - DNA, 3301 bp, Cannabis indica
tttttaagcattggtttgaattatgagattttgagttataaatttataggtttctttttattttttataaatcacgcgctattaagaaattcaatgccgtgattttcggagtagtttagcgcgttaatgagcgagattggaggttggtattagtttggttttatggtaggggtgatgatttgtcacgtcattagtattgtattagattaattaacgttatttctgttaatagattataaattaagtatattattgaaaaaattcctaaaattattaaatgtattccaataaagaggtccaagttcgggaggtggtacaggtccgggttgaacccgatgcaatgttcagcaatcagccctatcaatcaaaacattaaactggttttaagttatggtggcaaatgtcaaataccctcaaaatgtgtaatgtgttttattggcttggaacatagacacaggcaacaaatgggacacgagattttcttcctttattttttttgttttctaataaattatcccttttctttttcaacttgacactactatagacagatttcgcacttgaaaattctgattcccaaattctttctctttcctttcctacatatatgacaatgaaagaatgagaacaatacaacaacaggtccaactggtggagtggactctggaggaggttcttctacgtacctttatctataattacatttattcttttctctctgtctctctaccgaaattcatattgaccaacctcgacctttatccatggcctcagcccttgctgccgagcttttaccaggtttgtagtataattatacataccatagatttctaaagctagtcgaattcgaaatcttatatttcttttcttggcagaacatgaggcgagagagcatctactagaggttgaggaagagaaggagaatggagcaactgaagtgaaatttcagattcgagatctgacaaaagaattagagaacggggatcagattctaaagggcgtgagtgtggatatacccaaaggaatgatcgtcggaatcatcggtcccagtggtagcggcaaatcgacgctgctcagggcactcaatcgcctttgggagccaccttctggctctgtcttgttagacggacgtgatatctgcaaccttgatgttctaacgctccgccgtaaggtcggcatgctctttcagcttcccgttctcttcgaaggtatcttccatgcattgtacttttttttttttctttttctctaatcaagtttttattccttctaatacctcttaatttatatttatacatattaaagagaaatttgttaacaacagattatacctataataagaaattccatattcattttgtttgttcttaattcataaactacaaaattttgtatatgtacttgttatgctcctggttccatattttattgttacggttaacaatatatagtatactatatttagcttctgtattatatgtagcagtatcatattactcaaactataatatatattgtctatttcaggcacagttgcagataatataagatatggaccccagctaagcggtaaaaagctaagtgagcatgaagtacacagattacttgccctttcagatcttgattcctccttttacagtaaaatgggttctgagctctcagtgggtcaagctcaaagagtggcacttgctagaactttagctaataagcctgaggtaaatttgtgaatgaacaagtactcactagttcacatctaaattatttgatccttttactgtaatagaaagacattcatagaatattggtcttacatttttgggcatatatatggtaggtttaaataagttgagttttttgtgtttgtggtaccaattatggttatgtgattttgcttgaaaggttttgcttctggacgaaccaacaagcgccttagatcccatatcgaccgagaacatagaggatgttataataaagctgaagaagaaacaggggttgactgttataatggtttcacacagtattaaacaaatacagaggattgctgatgtagtttgccttctcgttaatggtgagattgttgagattttaaaccctaataagctctccgaggccaagcaccccatggccctaaggtttcttcagctcagctcttgaaagctctgaattattgtatatcttttttattatttccgagctgtaatggtctattccaaatcataattgaggtttggaatgctcaatggtgaatcctataatttggttaatgatctcaccaagttctgagttgcttccttaactgaataatcttactttgaaaatgagaagcattttagttttcagtatataaaatgtttttatccagacccttctcatatatttaattatgcccagaaaacccttttttttcgaagggatacaagatgaccatgtacctctaagatgtgtattttagctacatataatatacaatgaaaccttatccaaaagattgtcttgacacattctctaacctaatgaaattagcaaatatattgttcagtttagaacaggaagattcatattcacctattaaatataacttttgtgcttacagttataataaattttgttataccaaaattatatttgagagggtaatattaatgagtggttacaggttacttatgcgttaataatgttatataataaatacaccaccacacattgagtatgctattaacaataacaagtaacaacttaacaacaaattcatgtttatattagccatgatcaaatatctgagtcgagtctaaggtgaattaaatttttggactttcactctcaaaaattataataaaaaaaatattaaaaataagtgtcatgaaattagataatataacatactccaatcaattacgcgatgaatatttattatatataatacatttaattttacttaaataaaaacttaatgcttaatgaaattttttattttttattttgggctctcaaaaagtgtgggccctaagcacgggcctagtccacctatacctaaggccgttcctatcaaatatttaagggaaattgttataaatagccttaaatctcacactatgaaagttaggggtgtacgtcggtcggtttggtcgggttatagcatatttttattaacccaatataaatatcgagttgcaaaaatttaatcataacccgcccaatgaaaatttagaaaaagttcaacccgcccaatgattttgtcggtttggtcgggttaacccgtccaaacccttcttcatttttttataattattattgttaattt

SEQ ID NO: 260392 - DNA, 960 bp, Cannabis indica
gcctcacccattttccattttctctctacatctctctcgtccaggtaaacgaaggtggacggccaggcggaggcctctctctttctcgttcaaatgaaccgtggcagacaactcctctctctctctcggctaggtgaacggagcagacgacctctttctcgttcctcggtgtcttttcccgttctctccctctcgattccttgcatgaagccccaccgttgttcgtgcaaggatcaatggtgctcaatcgtgtgagatgggttctggtcagcttctctcgcctccgtggatcactaaatgagacccaagttgtgctcttcttcctccaatctccatctcgctctaccgtgaatcactagatgagtggccattcatggagatccgagctacaccaagaaccagatctattttttcttttttttttttatatatatcttttaggtttttacatgccaaaaaacttgttacaaacataaattatttgtggagatactcaagttttagtttttctgttcatgaaaattgttcttatttgcaggatcaatggtggcctagttgtatttgagtatacagattatttgtgtacatattttgaatttgtatcattgtaaactctggtgattttggcaaaatgattaatacaaaatattgtttacttaattaaaattattattgttatatttatatttgtataaaattaatataaattattatttataatatataaaatttgaattaaaataattaaatattactttttgtagaaaaatatttaatacagtggcacttttagtgtgtcactatatctccaaaaatattaataaaaaataaaataaaaaaaagatatagtgacacttcatgtgtgtggttgttaccgcctatggtgacgggcagaaaatgaatgcaaaagggttcagtgacacgtgtgaagtgtcactaaaaactgtctttccagtcacc

SEQ ID NO: 260393 - DNA, 507 bp, Cannabis indica
ccgctattcttttatattaataaagtaaagtgtatttttataaataatttaaaaaatgcgtattcccaagtaattttctcttaaaactacaattctattactagttttttttttaaggattcgttcataaattttcaattaataattttttttatttatatatataataggaaaaaaaaataggcattttcttttaaaaaaaaaaaattgagccttgaaaaaatgggagccttgtgaaatgactcaagctgtccaatgcttgggtgattaagtctagcacataatttatattaagctaagagatataatttcatctataaaaataagtataccttaaaaaaaatataaaaataaagataaaaattaaaacatgtaaaataaattaggtataaaatacaatttcctcaagtttatttgtggggtaagttgaaaaatacctcttttattcatcaattaatcaaatttacctctaattttatgtttatttgaaacatacctctttttata

SEQ ID NO: 260394 - DNA, 1303 bp, Cannabis indica
gaatgaaaaccaattctcccttcctcattttcttgtgagtgagctatgtgtatatctagctagcttggcttttagattggaaaaaggactacattgtgtgtttttatatatggaatgagaccaaagtagaattgtcttttaaaaggactaaaatgtaaaataaatgaaaggaaattaagtggggaaaaagatgtaacaatgcacgttagtcaaaaaggatgcattggatcttgaaaagtcttatctcatgaatgtgctatgatataaaagagaaatgctaaaatgtagtgttgtaaatacaagttagattttttaataaaatcggcatgagcacgattaggcacgaaaaaagacgaattttagcatgacacacggtataatgctacaaattagcacatcacgacataaaaaaatatgactttaagcacgacaatgcataaaaagcacgcaaagcacgacacataaacatgaatagactaacccgaaaaatacaacacacaacaaatctaaaaagtatatcacaacatattaaattagttaaaataatagtaaaacttaaatataatattaaatattttaattctataattaaaaatattaaaacaaaattaagattatatattaatttatttatagggtgtgatataaaaatttgagtatttataagcaaatattgaaattctaatgatgttaataattcttgtatataattatttataaaataatgttcaaaagttatataaatataactaaaattttaaaatatacatataatttagtaattataaaaaaatatataaaaaagtaaagcgtgaatttaaatccgaatataaaaatagattggcatatttaagaaatatgggtcggaaagagcaaagtacgacacaaaagtaccgggtctacgggtcgtgttgggcttactttttaaaaatgttggcactacacggtacggtctatattcttctgtggtacattaagacactgtctgttttttgaaaagcataaataaatacgagttgggtcatggtacgatgaacttacaacactactaaaaagaaccacttagtatcataccactattagcgtaattaaaatattagattttatataacttaaatcaataattgtataatactacttataaaaagtgttaaaacccacttatgatgctgaataataatgctatatagaaagatgaataaatcaagagcaaattaagtcattcaatacgtttctaatctaactttctatggaatatgctttcaaggggaagaaatttcacataataggtctttctatgtag

SEQ ID NO: 260395 - DNA, 606 bp, Cannabis indica
attgaattggatccatccaatccaaaaaaaaaaaaagtttaattttaatgttaattttcatatacacatataaattttacatataacaatataaaatctaattactcatccaaactaaatgaaaatactaattagttcaattagatattggatgtattagatttttagacacaccatccaccatccaatctgatctaattagatatttaaaaataatatccaatctgatccgatcacaattagatatctaatgtttggtgatcagttgtaattagattggtcggttctcattagatttaatcaatttatgcacacctctaatcgcaggtccatcagcttagtataccccaagagtaggctgatgctctccaaattaagaatcattaacttaggacaccagaaaatagaaaaaatggcgattagagtatacataatagcacggtggaagtagttttcaccataaaaaatatgaagcctcattaatggtgataaaacatgcgttgccataattaaatagaggatgaaagtgcaattaatgcaagtagtagttggataatcaaaatcttaggggtaatcaaaagcaccgcagagagagagagagagaga

SEQ ID NO: 260396 - DNA, 558 bp, Cannabis indica
attttttaaacagtttttttattaatcaatattttggactctgatcatacctgaactcaaattccccccgccccccacggccttggtgatgaacccggcctctgacccgaacccgaatccgaccccagacctagaccagacttaaataaaatcaaaaaataaaaataaaaatgaactttacagaacacgcttttgttttctgttttcaaaattaaaaaataaaagtggttacagaacacatttttatttttcaaaaatattttttttaaaaaaaaaattacttttattttgtgattagaaaataaaagtgttaccaaacaacatctttattcatttagttattattttatttttataatttttaaaaatatttaaataattaaaattacgtggaccactaaaaattttccacgtgtacacttgtgtgtacacttgggtagtccacttagcacttaaccgaatttaaatatcaatttgttgggttaagtgtcacaaattgtatagttcaagtaattttcctaccaatattcaaattttcattttttatggtttttaaag

SEQ ID NO: 260397 - DNA, 650 bp, Cannabis indica
ccaatacttttgaggtattgatatcaaacacacgtctgtgagtgatttttaattgtttaccaagttgacatggttcacacttaccaacactttctttaccaagcttgggtagacctcgaacaatacctgcatttgacaatttttttcagatttttataattaatatgtccgagtttggcatgccacaaatccgtggtgttgttgatggctgaatgacaagtaaacacaggagttagggtataacaattatcattggatcgaaatccttgcaaaatacattgattatcatcattaagtacataacaatgatcactgtcaaatgagacagaatacccttggtcacaaatttgactaatgctaagtaagttagcccttagtccttcaactaacatcacatttttcaatctgggtaacccttcaaaattgagagttcccataccaacgacttttccagctaagccattgccaaaagtgacttccccacactgcataggccgaatgttaatcaaaaagtccttgtcacctgtcatatgtctagagcaaccactatcaaaataccacatttgagatgcagcacttttatcagaaaaaccagctagacactttttcttaatccatttttgtttcaaacctttatgtttcttttgaga

SEQ ID NO: 260398 - DNA, 600 bp, Cannabis indica
taagcttcaagctcttgcataaaggatggaacctatactcactatttcgggcagccacttgcagacatcgagtgaggtattccatcacaaggacaaaatgcaatgcagataggggtcaccttgcctaagccccttctcttctttgaaattcccttgaattctcccattcatgacaatcgaataagaggttgatctaagacaacccattactcaagagacaaacctctgtggcagattatatgcatttagcaaagcttcaaggaagtcccaactcaccatatcataggctttccttatgtctattttgatagcacactgggagaaacatttttccttttgtaattcttcaaaagatcttgaagaatcatgacattatgagctaaggatctcccttgaacaaatgctccctgattctcactcaccaaactcggaagcactttagcaagtcttgagcataaaaatttagaaacacacttgtaaattgttgaacagcaagctataggcctgtagtctactgcagttgttggattatcatgcttaggaatgagggatataagtgttgaatgaagttcttgaggcatggtacgtgttatgaaaaaa

SEQ ID NO: 260399 - DNA, 516 bp, Cannabis indica
attaggtaatgcaaatatatgagcatatctatttctatgcatatggctggttacattacctactgttgaatgttatggttttgtattaccagatatttgtatactaatgcttattcatgacagatgccagtagtgatttggatttcatctacaatgcgtaatggtttgattatgattgtgtataaatgataatattcaaataataaactatatgattattattattgcttttcttgctgagtccttgtgactcacgggtgctatgtggtgcaggtaagggcaagaaaaagttagagctgccatgaggtgactaccttgtctagcaatatatattgacctcaccggcctgcgtgccgaattgccaagagttgttttgggcgtgctgtacattctgtgtattttgattttgtgtttaaatggttgttgtatatatttctttagtaaaactttttgaaacatggatccccgaaacacgctttttatgccgttataatgtccatttttagtgttttattt

SEQ ID NO: 260400 - DNA, 420 bp, Cannabis indica
gggcataaaacccaacactactgccccacaagaaaatgctacagatcccccatgaggaggctcccgtggggagggggcataacacacaaaaatgggatcccaccatctcaaccacctccagcgcctagggatattggtgttgacgagaggggaggagaccatgttcgaaaccctccttcaccaatcaggttcgccccatcactaataacacatcctgagcttccacgtactaatgcaccagcaccacatcaacgaaccccaagagagatgtcacggcagaaggaagaacctcccagtcgtcttccaagtctcgaccctctcaaaatgggcgagaggactactgagacaaccatgctcgacaggtacctcaacctaggggacatggatgggaaagatgatgcactgtctcccgtgataact

SEQ ID NO: 260401 - DNA, 638 bp, Cannabis indica
gttatattatatactctatctatccatcaatgtttggagaaacaaacaataaatagtttcaacaaaaatatataaatgcatcatcaaaattcaaaatactatctttaattaatcaaaaaatataaccaaaatcaaaatacattcatcattacccaaaaaaaatacattcatcatcacctgccatttatttgaatagcctcagccttaataacgactcccacccatcataaatttatacatagttaacaaattattatgtcataaaattacaaaaagtaatatgaaattacaaaatttgtgataagataggaaaacaaatttaatcatccatattcgaaactatatttaatttgaaagataacaatcacaaattaaaaaaagaaggattactctgattttgcattttattatttgttttgttcattaacaaaaatttatacaatacttgatataatgtcactgccaaaaacaactctccaatagcatattaacccaatcccaaaacctttccaaatttgctgcactcactcacctgaattgacttcaaaccattaactataaaatcacataacataattcattaggatgtcaatatttaattttttatataaacacattacatatatatacacatatat

SEQ ID NO: 260402 - DNA, 752 bp, Cannabis indica
aacccagataaaaacctagacagagacgtaaattcaaaccaagactaggacccgaacccaaaccaagatcgggacccaaatccacacaataattgggacctggaccaagaatatggatacggacctgggaaacagaactaggaccgggacctagtacccgacccagacccgaacttgaacctaggacccagctcgtgactcggcaccagaaatggaaccagactgggacccgagattaggatccggatctggacccagggcttggacaaaacccgtagttagtgtctggattagggacccagccctatacccgcaccctaacaaggacccaaacccacacccggacctaaacccagtcccaaacccaaaagtagactcgaaccgtaccctgtgacccaaaattggaaccaaaacttgaagtcgaccgggattggaactaggacttggacttggaatcataactgaaattgtacctagatacagaatcgtaaccggactccaaatcagacagacaccagaaatgagagccagacccggatcccaacccaaacctggactcaggatccaaacccaacctaaactcagacccaaacatggaatcagactagggacatagaaccagggtcgggacctagaatcgcaccccagtctcgatcccgaaccaaaactcagaaatgggacatgtcacctgaactagaaccggactgagacccgtgacagtgatccaaatcttgactcttgattcggttaac

SEQ ID NO: 260403 - DNA, 1973 bp, Cannabis indica
tttgaagagctcactcaacatttcgccacacgatatggcagaaacatgaaaagaagtgaaaaaaaaagaccactaccacactgagttggaagaagagaatatctctgaaaattcttatagaagtttaaacataatgtaatcgcgaaggatgctgctttactaagaattcaatcaaaggatcattactgagttagcagcttatactaaaaaaaaaaaaactaaatgacagaggtaatagattgagcaacaacagactttgagctgatagaacaataggaataagagacgaaaaggaggaaacaagaaaggaaaaagagacagagagaagggagattttctctaatcttgacgcctcaagaagggaatcgacctcctcacataggagagaaacgacttatataagagctccattatgagactagaacataaccaaaggagatacatggataagaggtagagagtcaaactggactttgaagtcaagctcagtacaacacctactcagatcttttgagaaaacaaagataagtcaatatggagggagccttgtaagattatttcaccagttgtaataatatatcggacgaaacattttgccttccacaactatgtagtcaactgcacaaatgattttaggtcgttcatcagacaaataaaatcaatgatcaaggcaggagacctctaaaaaatatatcaaaaaagaatcgagatagatgagttgaggaaccttatactgaggagaaaactagaggacaattgaggtagcaagcatgggaagagcccgaattgtccaaagggaaagcaacattattaaaacatagttccatgattttgaggagtgtagagccaggaaaacattacccctcatgaaaagtgaacttttgagagggtgaaaaagactatcaacttagtagcataatgccaactacatttttcctaaggaaacatattttccagctgttctaatcacttttacagagaataatctttgaggagtgaagtttcctcatgatgatgctctatagtagtctagctgcaaatacaagactgactcataggcaaaatcttagtagatggaggaagtagcgtgaatatactattctatgaggcacttgttaacatgggaatagatgagaaaagaattataacttcgaccttttccattacaatcctttgaaaacaatgaagtttatcctatgagagaaattgagcttgatgtaaaagtcataggaaggactttgaaaggttatttccttgtaatcaaagttgtgtcttgttataatgtgatcataggaagagtttggtaacatgatgcaaggagtagcctcaacttcctaagatgtccatatcccaattggacacacatcatagacattaaaggatgccaaaaataagcaagaaaatgttacacactaatgaggaaagttaatgcagtgatccaagaaatagtgactaaagaggagaaatgacaattagagggcccctaccaaccactactacaaaagacacttttggtgtcggttcaaattttatttaatttgaaaaactaaaaatatagagtacccttagtttaggtgttaatttaaaattgacatttaaaaaaccatatggtatcagtcaacaaacctgcaccaaagctaaaatcgagacttaaaaaaatttaaaaggaaaattttttaaaattaaatactcctttggtatcgatatcaaactgagaccaaagtttagattttaaaatcaatataaatatctatcagacccattgaaactctattcctacttcttcttccttccacctcccctagactcctttcctttttctcgttctcccgcacccagccccttctcttcctcactcggtgatccaaaccggtagctcatcctctcggtgacccagacccccctctctctctctcgctctctctctctctctctctctctctctctctctctctctctctctctctctctct

SEQ ID NO: 260404 - DNA, 501 bp, Cannabis indica
tccaaatttaactcttgactaaacctcaatagtaaattgcaacaaattttcaaaaatatgaaattttaccaccaaatattttatatagagagttaagtgtttcaaattaaactacataataaatttcaccaccattatcccaaataagaataatatttaggtaacgtttagttagagataatgaaataatttttatttcattcctgtatttttttattgtatttgaaagtattaaaatattattccaatagaaagtctttctacaattttagtggaatgattattctattttgaaatgaaaaaaaagatcattctaatgtaacataagataaaatttaatgattttttttatcaatttttttttttataaaatttaaattttatttcattctattcttatttatattgtcattatcattcatatttttatgttttcattcttcctaatccatcttaatttacaaaattacttaataactgaaaataagaataacatttagt

SEQ ID NO: 260405 - DNA, 4190 bp, Cannabis indica
cagcattacctcttgcatctttttgttttgctctttttgggatgcgatttcagcttcacgatcgacagccttttgccttaggagtaccaactctgagtagctgccttcatcataagcgtactcatcgaagtttccttcgtactcatcatcaggggttccttcttcttcctcagaacccacatttgctcttgaggccacgtcctcatcatttggatcttgagcatcttgaagagggcgaggttgacgtgtgcttcgagtctccaccattgttgttttgttgtaatgtactgtctactttcagacgcttccttcagctctcaatgaaagcacaaaaatgttgaccgaggttttcgacaaccaatataataataataattaagaaagcttaaaggaattaagagaaagatttttacgtggttggggcattaatgagccttagtccacgagtctgtgtatttatgatagtatttattgcagagaatgttcttggtggatttttcctcttctagttcttatgaaacccagaattttcgacccctctttaatgagtttgggaggtatttatagtgttttttgtggggtgatccctagatttaaggtacatgtatttctgtaactatcagtaaagccacacattcccaatgactttatcataggtaatgcatggtctaatccctaggttctgtaggaattttatgagggcagtccttaatcctttttgactgatgtgattcctcacagagtagccgtcactagactttattgatcatagcctagtaggtacagattgggggttgtgccgtcagactttattacgtatggcagtttcgatacgcctcctcccatgcggcattaaatgcgagatgactgttcagatagaatctgacaccacccggagatgctttgttgcaatcttgctctccgggagcatacgagacttacatgccttctccgggaggcatgtctaaggtaatcctgcgctttaaggagacttagttattttgtttaaatgctaaaccctttccatccacatgtcatcatccggttagtccacgtattttggacaaaatcagggccaacagtgtgcattgctatatgaagtttgactcaaataaaattataattttaattattgtggattatgggtattaaagtgctataggctaaataatattttaacaattattacttcttttaataaaaagttggtgtattattaattaagcaaattagctaacaaaatagcttgaagatcagcagggacaaactccccactaaaccgacattatgaaaaagaacaagttgaacacgctaaacaaatagtcaccttgttcgttaatcgtttaacaaacacaataaaaatattgtttaaagaaacaagtagactactagatgtttacaataaaaaataatcaaaccaaaagaataagacatttaatgggaataaccaattacatgaataactacttgataatcagtttcaacaactacatggaaaaaattctgatatttgatacagctaaaaatttctttgacacccacaacttcgcatactcggccatacttcttttaacaattatttaagttgagcatgttagttattaaaaaaaccttcatttgtggaaagattcaaaatggtgagtttgttagaaatccatacacttctccttctctcttgcttgctttgttgccaaacagtataatattctccactttctttattcacccacttattcttcttgacaaacataaaaatagattaaaggctaattggagtaacttaacaaatccttgcagccaaacatatattaaaggccaatttaagtaagttgggtaggtgagcattcactatgaattgccactaaatctaactcaaacagttaaaaaggtttaagtagtaggtgagaaggtatggtggagagtttaaatccttctattaatcaaaaaacaaaaaaaacataatcattgggtccttctgttttcttttaatgcaaatttagacttccagttttaaataattatacatagatccacatcccatcaatatattaagaaatgttagtatgctattattgtatttcaatatcaaatctcactttttaatttgcataagaatgatattaaggtggcatttggttggaagtaatgaaatagaacgaaaaataatttttattttattcttttgtttggatgcattttaaagtattggaatgtcattccaatagaatgtcctttctattattttagtagattgtccattctattttgaactaaaaagaaagaccattcaaatgtagcataaaaaaatatttaatgatttttttattaatttttttatacattttaaattttattcctatttctatgtttttattccacccaactaaacgccacttaaggtgcaatactgtaatatatttgagtttgttgttcaaagttgagttggaaataccatttttctacaaaaataaataaataaaaaaaattgatgtcatcccatttaaaactatctaaatcaaatacatcataaaattaaattaaatatacatcactccttgtttatccaattaaggaccaaaaatcctatttttacccaaaatagtttatgccctagtaatcacaatcatgtgaataatttagcaaattcataaagaatatttttgagccattcatattcatatttgattatggtagcccagtagcaagatgggtgagctgaaataagcacaaatataaatataatatgacaaaaattgtaattaaaaaaagaagaatgaaaacttactggaaatgaatgtatcataagctacatatgagagtgtacttgacctccaaataaccagaaacttcttcaacaagttaacactattgttacccaaacctcaaaatgatgacaatgatggcttttgttacaagatatgttagcacaaactcatttaccacaccataggatgtgaagaaagagttgtacaaagttacaattctcacagattcagtacttctcatttacaacaacacatatatacaaaattgccatgtgtctgttgcatatgcaaatttctgtttctttttttcatttaatgtttcatccacgagtcaagtcgatgccggtgtggtggggagttctcagatcgacccccgctcgtgaacccggccaaattccactagcagagggtgtataattctgatgagtagatggaggagcactagatggtgtagctaatttatcaatactcatgctacggtgatgaggctcggaactctcgtcactcttggggccactggcttcttgcttaccaccactcttgaacttggcactaccatgtacaaaactgcatactactacctgttgtagaaacaaagcaacaacatcaagagttagactagttagtgttttcgtttgttctcctatcatcagcgctacaccaaaatcctgcaagaattgaaaatggaggagacaggtttgaaagaaaatacctggacagggctagctgccataagcaccgccacaccaccaccaacgacttgaccatctggactagcaagggaaacgcttacaccaccagttcgatggcggggaccaccatcctcagaaactaagtaagaacctgacaagcaaagtatttgaaaacgaccctgcaatgttgtggaaacaacatgctatggttaagttggtctagaaactaaacagagtcaatgacaatggcgtctcaaggtttatttaccatcacaatgtaatgtaagctttagatattttatcaaagggagaggtatgaacttgaaaagggaatgagaaaaactaataatttatgaatttaaatgtgaattttgtaagcatattggactaaataaaaaaataaacactgctagtaagaaagttgaaacataacagttatcaccacccccacaacattgaaaatagtgacccatcttttgttataccttcattcaaaggaaatcaaattttaggtcatatatcatgaaagaacaactttatttgattaacctagtgcataagaaaggttactcatactccataacaatcttctttgattaactgaatgctacttagctctggcgataaagttaatccaatcgcctttcttttattactaccaattaaaatacagccactgctaattcatcagcacattacttacctaacgaattttagtatcataagacagatc

SEQ ID NO: 260406 - DNA, 758 bp, Cannabis indica
tagagttcagaattatattttagaccattaagaaaagtatgcaacaaattcagctacagtatttatggataaaaactataatagttctagtcgaagctagcatatcaacattaagtatttagacataaagatgtgtgataagtggtctttaagaacacaatattgagttaagtgatcgcatatccttgactaaaggcatgccgcaacacaaattcaaggatcataaagtaaatatgagattcagttacccctatgcagtttttagttgcacaactaaaattattcaatgaaactctaattttgatattttctcatatttatgtgcactttaatttcatctgacaaaatcatctttacaggaccagaataaacataaggtttatggtttattcgcttaagtacattgccacataaagtacattgttatataatgaatatattgtaatatatgaaagataatactcgacatataatgaagacatattgctatgattcatatgtttattatgcaatgaggaacattgggtttgagtgctgaatctcaatactgaccaattgagagaatattagaatattttctaaattaagtataaaattgataaaagaatattttatattcactgaatttggacacaattaattggttcattgaatttagacataatcaattggttgatgtactatatatggtcagatttcgatattcattacccaattcgacttcccaaattaattgtcaaaatattttgacaattaat

SEQ ID NO: 260407 - DNA, 2503 bp, Cannabis indica
ggtaaaataattccaacagaaaagaacctggggagactgctaacgaacaaacagcttcaagtgtctaaacgctttgggattccccaaccccctagcgttccaacttaatattttcatgatgactggcggggtcgcaacgcaacctccgctgaatcgtctgaagaatcatctgaatccaacatattggaggaaacattctgattgaagcaatctccttaggacgaggaaggagcagctgtggtatcgagttgatttcagcaacgtttcaagacttgtcgtaaagaaagctgatcattctgcctctttggcattttgttggggttagaattttccttattagcagccattggagccttagagagtgtagaagttgttgtgacagttgtgaataaggtacggggaagggaaacatgtttgtttaaacattgttgtggctgagtgaagtccgcagatggagggtaagtagccacgggtatatggctgggagagccaagtccaatatcaggggtatagatgtgtggcaagagcacagtattagaggacattggttgttttaacttcaaattgttgtgggagggggtagaaagcacagtcgggctttggcttagcaggttttgagtggaggaaatgtcagtgggtggtgttattggagaggaggaaggggccataaaaggttgatccaggctgctagtgataggacaatgggactggtgtaacacatcatgcgagtggcccaagtgggtagaaaaccctggtgaaagctgggatgcaagagcaggggcagtggcagtgatcgatggggggaaaccatgggataatgtgggggtaggaatatttacaggacgggaggaagattccccagcagtaggatgattgggaatggggggtggcagtttattcagttgtggtaatgtggaagtaatagcgttacgggcaagtcgagtcaagaaaggccaagcattgccctttgcaaagtcttgtccgtaagtatcatatgcagaagtgggaagtttggcccctttcatccatggaccataatcaaagtcatcatgatttccacgatacattctctccatgaaagcaatacatttttcaaaaggatggccaaggcgaccacactcaaaacagaactcaggcaaacgctcataacgaaaatcaatccagaattcatctttaatccttgatagactaatcatctgtccacgggggagaggtttggcaatcggcaacttcaccctaattctcaaaaaaggtccccatccttcagcaagcgaatcttcatgaacatctatgtattcaccaatgatattttcaattgcttgggcaagtgatttagatttgctaaggaaaggcaatcgatagatttgaacccaaaaaggagtataggctaaatcactaatgcagacattttgtagagcatctagtgagcatagaacaatgaggtgattttggaagtgccaaggctccttgttgagaactcgtaatttatcccctgcgcagccaaaagtaattctgaacatatcatcttgaaattcagtaataacagccggatatctgcccttccaatgtcccgacatttggctgtagaaagtcggcttgtggactgaaaaagcagtaacaacccttgcaacaagaacatgaacagcagtggataaagcagcgggcgtgtcctcatcagtaaggactagcgtggatctttcctcatcagtgagtgaaagattgaaatgtagtgagcgactaagaggatccatgtgaaggaagtaggcgagaaaaaaggttgctgaaatgggaaaaagctaaagaaaaagaaaaagaaaacaggggaaagaacccagaaataagcggttacttgaagaaaactgctttggattgaagggagtaaccagaaaaaagagttggaatcaaagaaagttggttaaaaatacttaactgctacagacccaaaaaaggcactcaaattatttatttcattcaacttattgtaaagaaaatttattgtttaaattagtagtgggcaacatctaatccaataaagaaaattagatatttaattttaattagattggattgtatcttaaaagttaaattttaattggattggatcacttattaggtgttattttcaaaatctaattaaaaaccgatctcatctaattatatttatatatattaaaaaaatatttatatttatttatgtataataaaaaatatatattaattatatttttagtcaattttattttgtattgaatttgtaatatttagttgttttgtatatttattttcatgatagtttgttctattttattacttaataaagttattgttttacttattttaaacttttagttatattggacttgtaacaatgatatttttatggagtattaaattttaatgaatgatgatatttagtttttagcttatttttttttatcatattattaatgttaatattaaaaattaagtgcgtaattggatatcttattaaaaataatctaat

SEQ ID NO: 260408 - DNA, 713 bp, Cannabis indica
tgtaaagtgttttgtaatcgggatcccgaaatatttcgtatgaaatatatagaagttttaattaaataacaaaattttaattaaccacgattttcattaacctcgatgattagcaacgagctgcacagtacgtttaaaatcacgtcaacacgcctatgcttattagggtgttacagtttagttagttactacatatatttatataaaaaaaaatatatttacaaacataatattgattttactgtaatggttaaactaaattacatataggataaatgtcagtagttcaatttataaagagcatttgtctttttttttttttaagtttactttgccttacaaataaaatttatactcccctcactttaaatcatgaatctgccactgttctcatgcttatagtagtgtgaaatttccacgtacttagtagtatgaatgaataaggcttttgaaaagccttttcaaaatattaaaaacaatcattaattatagtgataattagtgacgaataataataataataataataataataataataataataataataataataataataataataataataataaagttttaatgagttgactgtgcttaatattattgttcaaacatgatcctaaagtaattaataattaattagtgaagcatctcaaccaccaattaataacaaattaatagtcaagagcattttcaacagcttg

SEQ ID NO: 260409 - DNA, 867 bp, Cannabis indica
aaagagttttatttagggcataaaacccaacatgacattgtttagatgtcatgcatattgaaaaaatttgtatgagagtattatcggtaccatacttgatatttccgccgacaacattaaggatggtttatctagtcgtttagatctcgttgaaatagatattagacaatctctggcccctgaaaagaaaggtgaacgattatatttgcattctgcttgtttcacttagtaccaaaaaaaaaaaaagaaaaacaaagggtttgcaaatcattttcagagatgaaagtacttgatggatacccatctaacatcaagaacttggtaaatatggttgaaactaatgggtataaaatcacatgattgtcatgcgttaatgcaacatttacttccaattgccattagatcagacttgccaaaaaatattcgagtgtttgacacatgtttgcattttccttaataagttattcgggaaggaattataaatagataaattagatacattacatgaacatgtagtcaaaaccttgtgcaaccttgaaaagttttttctgccatcttttttggagatcatgatacgtttaatggttcatctagtgagagaagcaatgttgtatgggccagtatgggaagtgttggaaattattttaccaggatcttagatctactcacaagtatgtttattaacacctaaatatgaactttctaaaacgataaattaaacacatataaagtttaagaaaccttacattgggtgcagcggaataatatgactccttccgttcagatatctagcccttgtattcctttctgtagcagagcattatcaatatctgaacctggatctctttctctgaatccttgatgctg

SEQ ID NO: 260410 - DNA, 597 bp, Cannabis indica
taagtttagtttttaatttggttaatctacataactggtttttcggtgtcatatttttaactaggtgataaatattatggatttttctttgtcaaattctaaggtctaactctggcgacaactccaatgtccaacatcggtgacaacttcgatgtctaattatagtgacttttcagtagcaacgatttttttgacaatgataataattatgttgaatatcctcatctattttctacttttattgaagctaatattttattttagtggataatgactattttgtatagtgagttgatgattgagtcttggaacttttcaaaaatttgcaactggttttaattttgatcttgtgttggttttaattttgatactgagttgaaggtcaagtcttagaacttctaagaagcatgtaaaatttatgtgagttttgatattcataactactttttttttttgttaagaaaccaatttctgattatatagaattaattggtttattaatttatggttttaataaaattattttagcattcctttaatttttgtaaaaaaaaatactttagttgacattatttttttattccaatattttatttt

SEQ ID NO: 260411 - DNA, 517 bp, Cannabis indica
aatattttttaatgataaataaacccccacaaagtaaaaattctggctctgttactgtaaacaatcactgaaatagtaaaatgaaagaaaattagacaaaagtccttaaatccaacaatctcaatagttcagagggtatttttaacgaccttaaaagtccaggagacatgattttgtacatgttaaagttcaggggacaaaaatcataattaacctaaattatatgatattcaatacttaattataataacgcgtaaaaaaatgttgcacactaataatactctttagcgttttttttaaatatatatttttgagcatattgatttggtaagtatcaaagttagccatgtagctcattgtatgtggttagcaatttttaacattatttattaaaggtgtttattatgttattactaatgtatttgattttgatcctctatatcttgacatctaaaatttattattacagacaaattgtctttaattgcatgagttttaaatttaaatttaattattt

SEQ ID NO: 260412 - DNA, 520 bp, Cannabis indica
aaaaaagtaattaaatttggtacgtagtgtaaaaatctcaaataaaaatgaataaaataaataaaatattggaaggaaaaaatataggaaaataattgatagtaagaaataaaattccacaaaaaatagacttttaaatttaaaaaaccataaaaaataaaaaaaaattacatattatatttttgtaaactattattagacatgaagtatattattattattattttgagagaagaaaaactaaattgtattttttttagatgcaaggaatatattgtaaatgaatgggattcatggttgttgtgggcttatgtaatttgtgggcatacatgagacatattatttggatagaaggatgatacatgtatttaatgcatataagagatagaatgagatgatcacataggtaatatttgaaataaattgaaaggtttaattttgaaaaataataatttttcaaatatttaatatttaacaattatattatggaatcattcataggttatagaaataaaacaat

SEQ ID NO: 260413 - DNA, 2332 bp, Cannabis indica
taattcgatcttattttataatagtcctatttatgtagaatttcagtccaatcctatccaatcctgaatactgaacgagtgattgaaggttaaaatgtttacctcacaaccaatgagcgctaaaaagttctctttctttgtttttcgagagatatgttcggttcgaatcatgtggattccgaaaaatattgcactaagaaagttcaaaagatcaccaatctacaacaacaacaaaaacaaataccataatcaatttcttctaatgaatcaaacatgtttgatctttaaaaacaagacatgtagtgcttacatttggaggagatcctccacattcgagtatagtaaacccgatcgcagacataagaactccaaaccatgttcttgaaggtacaaatgctcctaacattccatcaagcaaaggcacagcaataacctgttcgaaatacactacttatgataacgctttttgataacacttttgttttcgagcaatgatatatgcacacacaaacaaaactcgtcttaattaaagatgattggttgaaattacttgaacttactgtaacaagagaaatgaatgaagcccgaccggcttcagatgtaagtaaaccaattgcttcaatgaagtatgctagactcaaccaaaacccgagctctatccctgcatttcgggtttgatcgtcgtgtctagcacgccacacaaatggcaagaatgggattgctgaaacgatgaatcgcgctgctgaaaaggctgcggggtccattgttgcttcggcccctttaacaaccataatgtcacttgctgcatgctcaaattagagaattttacaaataattacatataaaatggccaaataattacatataaaatgttcttaccataaacaattgtgataacattgagcaatattatactcctaatcttcttggatttggacccaaacaaaatctttggccaaaaaagttgtttttccttagaaattttaatatttgagcccttttctttgtttgaacttttagtagtaatattctgtttaatagaaagagtagtctcactatttattctcctttctatttccaatgatttcttgggctgtttttcatgtataaaactaactcttatttgagaagaagaaaaagaagaagaagagtggtttggatttggaatattggtgttgaagaaaatggaatcttttctaaatgtttttgaaaatggggaagccataaaaaatgaaaaatataagtgtggcttttgtttaagctttgttatttttataatggataaaggagaacataaaaagaaaaacaagaagaccttgttaatagccaattattatttttattttttttttcattctagagtgggatttttggagccatgaatatgtaaatgaaaatagatttttgggttatatattttttttaaaactacaaacacatgtggcacgtgggataattaatatgattttgtttatgacaatatgattattttttggggggagcaaatgtggttcacaattggaattcatacaacaaaatgtcacaacataatgtgaaagggaatctacttggcatggattggagtttttgattcgtgggaagtgtgggtttatgttttgtggataccattctttataaatcttcaaacttgtgataaactttgtttataacgatggctgtcggttctgagtttaaatgagttgtagaaaaaattaatttttttggatttttattataaaaataagtagtatttttaaaaattattaaaatatatatatattttttaaaagatatttttattttctagtattatgttactaaattgagccatacacaaatcataatgcatatggctccattattagttctttaatttataagctcaattgaccaatgctttccttttcaagggtaattgtaattcattgaagctcggattgcatagatcaactactcaagacactcataagaaaaatgttgttatagtgtaattaattaagtatcgtgtcacataatttaatttaataactattataaaatgttactaactatttataagatgtcacttctataggtacgtagtactaggcactaatattgtactttgtaacaatgctcttgcaatctcctccatcactcattatgcaatgctttggattgttcatcattttatacaccatgttagagccatactatagctcaactagcactagaacttcacaccatactctagcctcaacattgctcggctaggagctaactattagcttgactatacctcatgcatctttgacacaacacatactttctaagtcgacctctccaatagctc

SEQ ID NO: 260414 - DNA, 727 bp, Cannabis indica
ccacgggagaaagcagccttaaatatggctatgatgatgattttattactctgaacagaggtacaaaacagggatgaaaaaccctgaagcaacaatggagtcttgctccttacaaagtgacaatcgagttactcactctcaaatactctctctgtctctctcaaccctctgattttctgtcttaaaactcatcatcgaacatagagaacttcagagccttttatattgatgtcaactaactaacttaactgtcaagacatttaagttagttggacagttaccaactgtcaaaactgacagtaacaccaaatttaagtggtcaaacctcaacaattccacctggtttgatcactttaaaatctctgttaagttttccaaaaatagactgctttctaattccaatataggttgtcttcaatagaagacatggcttttagttgattctgagtaagtttagacaatgtctaaacttgtcaccagtagtactctttgtgaagatgtctgcagggttgtcatttgtaccaattttcttgacttgaacttgctttgaactaattatgtctcgaatgaaatgtaattttatgtcaatgtgctttgacctctcatgaaacatgggttttcatgagatgcaaagcactttgattatcacagaaaacagtgatatcatcagagtttacttccatttcagatgacattcccttgagccaaattgcttccttgatggctt

SEQ ID NO: 260415 - DNA, 1089 bp, Cannabis indica
ataattgtggcccccaaaacctcgagtagtgtagcaccacttgtgtactaggaaagtggatgactcgtcacaacattagaacgcaagacaagacccacatatgttagttgggcgcttaggtggattctggaaccctaattcctttgatttgagttcagtcttcaacaaggcatgactacatagatgcaacatagtatacaaaaggtaagccacactccaatctcgagcaacgaaacactcaacgagtgggtagaacacctggtggcacccaggtgacacctagtgcctaggtgagcatcctgctccctaggcggcaccacaactaaggtttgagtttgggatccaaagtacacttcagttctcacaaaacagccaaggaacaacatgtataactgagtcactgcaatatatatatattattttttttttgcttaaaaaaccaaacttcattaaaacaaaaacaaggtgatgcttacaaagggaagcatctccctaaaccacattggattgcaaagataacattgaacacatgaagattcacctcccaaaagttaacaaaacacgaacaatcattacataatccccacttggctagagcgtgtgctcctacattcgctgttctcggggtccattgtaagaaaaatttggttccttcaattgcctgcagcagctttgcaaaagatgaggcagtcgaccaattcagagctttactactttccacagctttcgttagcacttggcgatccgagagaattcttcctctgtccaaccctagaaacttcagcacctctatgcccttcataacagccaacagttccccttggatcactgaagaagctgctactttacaggcataaaaagcctacagttgattagtggagtccctaacaatgacaccagcttctgcagtattgttcgagaaggcaacatccaccagcaccttgaaactaccagccacatcacttctagagaggtcattaacaatggttttatttttggccaaactcctgttggagttccctttagtgagaaaggagaattcgcctaagacatacttcgccatgatatcaaatgggagcaaattttttt

SEQ ID NO: 260416 - DNA, 933 bp, Cannabis indica
accctaatggcaatattcttttgaatattctagatatgatttgaaagaggatcctttaccttgacagccacctcaatttccctgaagctttctaatactccctgatgctccggaagcctcagccttccatttgtgatcagggttgccactgtcggtccccttactgacattaccactagcaggaggattcgatgccgtgacggcatcctttgcagtctgctcttttgctacatgttgctcagcctccttagcaatcaaggctagctctaccactttcttatacaaagcgtcatgtgacgtggtaatcttcaagtcccgactgattgtggcattcaatcctctcacatatttctgtttcctagtgaaatctgtgggcaccagatcaccagcaaacttagatagccgatcaaaccagggtgtattcggccactgacatctttccctgagtaagcttcacaaagtcttccatgtgtgaacttctcacagcgatgtagtaaaacttttcctcaaacaaacttttaaattcttcccaggtcattatactgacatcccgggtttggcccacgatatcccaccagacgcgggcatgatctggtaacatgaaggctgcacagttcactctttcagttcccgtcactcccatattatccaggatacgggtaatagtgctcatccactgctcggccttaattatatcaaaacctcccagaaaagtcggaggttgcagcttcacgaaccgctcaaataccgagtccctatgcggcataacaaacccctggttacccaccactggcataggtgctggtggtaacacttgatcaacaggggcagccagtgccggttgccttaatcgtcgcaactcttcttcttgacgaagtatgacacttcgcatttctttaaacatctgctgctattcagcaggaggattagcat

SEQ ID NO: 260417 - DNA, 918 bp, Cannabis indica
tgcccaaccatgccacattgaaaacatacttttcgattgcattctccgggatggtgtttcatgcaacgtgagcactcggggtaagaataaccctggtgtcctcctttgccttgaaaccctcggaaccgcttgttctgtcttaaacccaccactgatgacgtaggtttcctcttccgctcaatgatggagctcctacaacttccaccatattcttgattcaggcaggtaatattctaaccctctaccataatctcctgaggtctcataataatttcctcagcgctttcagcccaagaaacattcttcatatttgaacctccctgaaagtctgaagattcatggaaccaaatatttccatgcaattgttccacttgattaccatccattccatgcttcgctggtaataccgaatcaaaaatgattggcatatgtggtaaagatgccacaggagacctttgtagtttcaacctctgaatctcttcttcatgtcgttgaatcacagcttccatttttccaaacctttgctccaaatccaacagaccctgtgacggataattatcacccccgtcggaagccatccaagggctttcaccttggttttggggacaacttggactccattctctccaaccgttactagccctggccactttactctgactctccatattgcacaaggtgtccattctataagactaacctgtcagttagtaagtcagcctggtcaggcaacggcctatttacatacttactaccgcacttacggattttaaggccatgcacttaacataaataattataatcaaatatgcttcctaacatgcttcacattcacaattatttaaaatactaaacaagtacgggcttactgaaccatgaaccgagctttctctgatgaagattgtacatgtcttagca

SEQ ID NO: 260418 - DNA, 473 bp, Cannabis indica
ttatttttatttttttaataaattaggaaatattctaaccataaaatatcttatttttctaataatttattcttgtaactatttaaatttattaaattatagactaagaatataatattaggaatatttaaattttaaaactcaagatattatattatattatattatattattagaaatttaaataatttaaattttaaataaacttgaaatttaaaaaattggttagatatttaactttaagttagaatttagttaatttaggagtttgttagttttttgaattttttcaaatattctctaacaacctaaatttaaattctagttaagatatatatatattttaaatttttaattttaaattttaaaatagagaaattttagcctactttctaaattatctgttatttgtttttagtttgtttaattatttgattatttattcaaattctttttacaaacctattatttat

SEQ ID NO: 260419 - DNA, 618 bp, Cannabis indica
tgaaatggtatcttgtttggctatgtaaagcccaacagagagagaaaacaaaggaattgtaccaaaaacatcaagatgaacatgaagaagaaaggaaagttgaagggggtacaaagagtttcgagcttatcaaccacaaagaggttgaggattatgtaaaacttttgcaataatatgttctgagaaagaatgaaaagataggagattgaatggaaatttcaagttttatttttgtcttttagtcgtagttattagaattctaatgtatttcaaaaataaaagtgtgtataaaatatctatactttgataatgtgatttgaatataatttggtaagaattaagagcaatatgaccatgactaattgactagtcaacttcttcttgctacctcctacaaattacaataaccgacaaaatgctaaacatgaaagtaaccctctttcattaccatgtgggttcacattatgaatagataaaataaatagcacaataatcaaatctcttattttttttcctctataaatatcagttaaaaatatgacacaaaaagagtgcctacaacctccttcttcttcttcatttaaacattcaaaattctaaacctagctaatacaacta

SEQ ID NO: 260420 - DNA, 599 bp, Cannabis indica
tgtaaacaattaacacaagcatacaatcggttatacatattatttatgctatcttacctcgttcaagattcaagcgtggcggtcgacttgaatggaaaatccttgagcttaaacggaggtcctaagtcacataatacaattaagtaaattacttgaacaacttaaccaaagccctaactcaaaacctagggtaatcttaatgacacattcaatgtagtttcaccccaaatactaaggaaaaccaaaccatgctcggaaaataacacagattcggagaaattgagattttggggtcctggcatgtaaaccggttaactggttttacataccttgtagaactggtggaccggtttacaccagcgaaccccaaaaattgcacaactcgtccaaatctttcccaaacgcaaccataccttccagaacacctgaaaatacattctaaaacaaatcccacacaacagtagcaagaaaaacaaaacaaaactcaacatgcaatggttaagtcaagtttgagctccatgaactcaaacttgaccaaacccacaaattaccatcaaaaaataactccaacaatcttaaaacttcatctaagacctact

SEQ ID NO: 260421 - DNA, 757 bp, Cannabis indica
ttttagattaaaaaaacaaaaaacaaaatgttgttaccgaacaagacctaatttaatatttataataaccgaagggcagttgtgttaactagttaatactaagtatggaaaataaatttttatttttgagatcttcctaggatataatttataaatattaaattaaaatttatatttagaattctctaaattagtaatttcaattaaatatatatatgttaaaataaatagattaaaataagtatcaaatgaaaatacaactcttttaaataacgagctttagttataagaacattcgatctctattgttgttcctacatatactactacaaattacactatttacgctattatttatagcattgaccgacgtaaatagtacccaaattataagaaccctttgtttaaaaatgatactaataatatctaattagtgtcatgagagtaaaactaaaacctacgtaataaggtgaattattttaaaaaaacttgctttcattcagcgttagttaatataactgtcgattattgtattttcgagagttcaaaacagacgcaaaataaattggtgagaaatataaactgacgctaatttaataaataccctaaaacacaacaaacacatcaccactacatccaaaatccaaactcttcgaatgctctggcgaaaccaacctcgtcccttccgatcgtccccttcgaatccggccagtgctctccgaaaacaagcctcgatcctctcggtcgtcctctccaa

SEQ ID NO: 260422 - DNA, 586 bp, Cannabis indica
ttgtacccaattattatggatgaaacaaatgatagcaaatatgggtttgatttgaaaactttaactattttctgtgataatactagtgctataaacatttcaaaaaatcctgttcaacactcacgcacaaagcacatagacatccgtcatcactttattagagagcttgtggaaaataaaactcttgtcttagaatatgttgaaactagcaagcaaatagcagatatttttactaaagctcttgactcggtccgatttatctctctaaggaaatccttaggggtttgtactgtttaatgtttttgttcttcttgatccttgatatttgagttgacttagagttcataatgtcttgtctttgtctttgtcctagaagaaaatctcaaccttataagaattacagtcattattttattgctattgtttttggtgttatggtttcatacaggtttggttcaggaaaattgttcactcctcccaaggattattcaggttcatcaaacagtgttatgtaagctaccattttcaaacattgtgtaaaaactgtgtgttgaagctccattggatgaatagagctacctatctc

SEQ ID NO: 260423 - DNA, 2105 bp, Cannabis indica
ttatttgatagttattttaattattagataaatagttttggcatttatagggttgaagatgtaaacagtggtatttatgaaaaatatgtaaaatagctgggtaaaatgacaaaacccaaacttgtgtggggctcattaagtggccagccctcaagtggttttttaccctatttttatctctttttttattcctaataattcaaccctaaccttattgaagatagtataaaacgaaggttatggtctcttcatccaactaatgcctccaaagctaaaaacctagctttctgatgagacctgctccttcttcttcttcctcttgaatttttcaaacactaagcctttcttcacaaaataaattcagccattagtgattgactaagtgcccacacacatcaagttggacctcaaccatagtgtgtaagattgtgaagaatccaaacacaaggaaggagtttcgggttcagatcttggtggtactccgctacagaaaggatacaatggttagagatctgagcagaaggagtcatttaattctgctacacccactgtaaggtttctcaaactttatatgtgtttatttacattgttttagaaattcatatttaggattttaaacaacatacatagtagtaaatctagatcctggtaaaataattccaacacttatcacactttttgacaaactcatgggtgtccttattgatcattagccagtaatatgcttgtctaatgatctttttagatatgctctgccaacctgcatgatccccacaaaagccttcatgaatttctctgatgatctcatttgcttatgtagggagaacacaccgaagtagatgcatcgaataacctcttatgtatagtttgccttcaattattgtctatcgaggcactgaatagaagagttttcgcacctcgtttttgtcatttggaagtcgcctgttgagtagatagttgacgacaggggtcatccatgtaggtgaactgtctatcaactccatgtcttcctttacacatatacttggctcgcgtagcatctctatcggaaccaagttcaattcatccaagtcgttctgcgaggccagttttgccaaggcattagcgttagagttttgttctcttcgaatttgtttgattttaaagtaatcaaatttttccaagttctttcaaaaccttctctagatacttagccatttttaggcccttgccatggtattcccctagaacctgatttacaatcagttatgagtcactatggcagatgagattcttaactttcaacgcctcagctatctttaagccagggatccaggcttcatattcagcctcattgtttgatgcatcaaattgaaatctcaaagcataatgaaacttaaagacctcttgtgaaattaatattacccctgcacctaagccctgctcgttggatgcaccatccacgtataacttccacgtgtctgtgtctcggtgaaaaggcagaatttcttctggagttattccttctattaagaagtctaccaaggcttggcccttgatggatgttcgagggtggtatgttatgtcgaactgctccagttcgattgaccattttatcaatcttcctgaagcatttggttttgataaaatttgtctgaagggctgatcaattaacacttttatggggtgcacttggaagtaaggccgtagcttgcgagacgaatggattaggcagaaagagagtttttcaagagggggatacctcgactctgcccccagtaaccttttacttacatggtaaataggttgttggggcttaccctcttctcgctctatagccgcactaatcgcatcttctgagatagccagatagaggagtaatatttctccagttattggtttggcaaaaactagaggcattgctaaatgccttttaatgttctgaaaggcctcttcacactcttctgtccactcaaatttcttatttcctcgcaatacattgaagaatggcaacacttatcagtcgactttgaaatgatcctgttaagtgcagccatccttcctgttaaggcttgtacttctttaggctttgttggtgatgacatgtctatcaaagccttgatttt

SEQ ID NO: 260424 - DNA, 525 bp, Cannabis indica
aagtcttccactcgattgagattaaatgtgcatatcattttctactaataatagacttaatttttttggttaattttctataaatatatattatgttaaattgaattaatagtaataataattagaaaagaataaggataattaatattatccagttaatagggcaattgcatggcaggttcaacaatcgttgtcccttatatcaagtgtgaccaattaccaaaaggtatacaaagctagctcatcagtcaatttaatttgacttttaaatttaatttatcatcatcataataataataataatattcttattattagttcctttcaataccacttcttctatattattaactaattagaaaaacaataaataagtattttcccttttttaatttcaaaatatattaagccctatcgataatgcaacatgtttttttaggaaaattaaatagataaatttttactaataggcaaattttaaatgatataccacttataattttgagattttttttattattattt

SEQ ID NO: 260425 - DNA, 566 bp, Cannabis indica
tttttttttttttttgtagaggataccaaaatggttttgttaagtgaataagtgcatgcaggcaactaattgccaagatatagaaaattctggtaatataattataatatggtcagttttggttcatgtttgataattagtcagcagagacggcctagaacataaataattatggttaatatttatttgttatatataaggtaaagatctgatgaattaaaacagctgtagaagaatgttgttggcctgagtattcattgttttagggttaaagatctatttctaataaccgaagccataggtcataggacatagttacttttatgtttggattttttattttgtaccgtaaaactaaataaaaaatcgaaaaagtacatatacaccatatttctagtagtgaacaatctgaggagacagagattcatggtggtttgaaacacacggtagttggcgagaaccacagtgcttcaatcgcacggacccacggtggtcgggactgtatagaagagacttggttaaacgaaactaactgttgaatcaatgggtggttgaagagaatggaa

SEQ ID NO: 260426 - DNA, 534 bp, Cannabis indica
aaatatttttctagtctaacaattaagttttcatgttgtgtgatcgttttttaagtccaataatgttggactagaaatatttttgtagttcaacaatgttggactagaaatgtttttctaatccaacattattagactagaaatgtttttctagtccaacattattggactagaaaaataccccttttatgtccaacacaaaagggactcgaaaaacttatctagtccaatgttgatggacttaaaaggggtttttctagtagtgaaaatgtctgctcaaccaagtatgtaatctctgtttgattttatccactatgatcccacagtcctcggctttccacttgattaatcaaaaccaaggggctttcatccaaggtagatctatagcccataatgtcatgattcttcaggatcttttgaaaaattacaaaaggaaaaatgtctctcccaggtgcgctatcaaaattgacattagcaaggcctatgatactgtgagttggggatttatggaagacttactaatgcttttaacat

SEQ ID NO: 260427 - DNA, 228 bp, Cannabis indica
aagtgtccaccataacacattatcttttacatcaaacaaccaagttttacaactttagaacaacaaataatgaaaaaaaatgtgaaagaaagaatattagtggagattacatagtcaagataaattaaataagagagtgactatgtcatatggaacgagaagaaactcaaaaaattttctatgattgacagatttcgaaaaatcatcaaaaattatttttaataactt

SEQ ID NO: 260428 - DNA, 541 bp, Cannabis indica
aaaagaatattgatatatttaatataaaagtatatcacccacaataatctctaaaccatgcgagacttttgtgaagtgactcacatattactaaaaagcgtaaaaaatattagaaaaaaaataagaaaataaagatatattcaacaaaaattaataatgtaaaataaaaattttaaaaatatatattatttttatttgttaaaaaatttaagattttttttataaaaaatttaaacatgtgacaaagattaaatagtgcaaaaatatgtgaaaataaataatattaactttaaaacaaataaaatatatataacttataaatttaaatataattttaattatttaaatattttaaaacaaagaattataagaaaatactttttataggaaaaattatttgaataattttcttataattattttaaacttgataaagattgaaaaatgtaataatataatttgcattcatttgaaaaaaaaaatataactaattagataagaataagttcatcaagcacccacatagaaaataaattatgct

SEQ ID NO: 260429 - DNA, 593 bp, Cannabis indica
tactgctggctcatgtaaaatttccttcaaataacttattcttgatcatgtatgtgttctaatatatatgttacaatagtaatagtaaattgataccactgaagtccctagatatagaatcatattaccttatctcagtgggaggatttttctagcccattatttgaatgagactagtgattaacctactatgatatgttcaaaaaaggaactttaaaataatacaaaaaaagttaatgtaaccattcacatggatagcaataacttatcaaaattatgaggataaaataggaaaccttgcaatgtctatttgaaagacttaggcacaattcttggtccttatgaaatgtttatggtatctctagttattattttatcttaagcaagtattttacattaatattaatactagaatgctatgttgatggcttagtctagaagaaacttaatgtttccagactaagataaaatgtcacaacaagatatccttaagtaccaatagtaagaggtcaaatgcacacttgagtatgcattcaacaacactcctactgttgggtgggagccatcaacgatgtaatcaaacaaggaacatt

SEQ ID NO: 260430 - DNA, 1452 bp, Cannabis indica
acatgtaggtctatgtcatacagataaaggtgaaatggcattaatgtttatatgatgtgttatttatgattattggtatttttacactgtcttgctgggcttggctcacgggtgctctactgtgcaggaaagggtaaatctatctcttattagccatgagtgcgagagttgggcgatgtatgtacatgttcaggccacactagactaagcgggttggggtctaccaatgatgaacttttgtgattctgttttgccgcttagatcggctagtggaaagacttgtaatattttgaaaaatatttttggggtccctaaatatgtaactttgattgtaaagttaaaactattacaagttatattttcattctattttcgtttaaagtttaaagttcccgcgcttttctgtttagtaatcccgtttaggggattagggttcttaatcaccttgggtagtgtgcctaattgttagggcgttacatgctcatactacaaggtaggtaaatagagttgtcccttcatgttttcaagcatttaatgcttcaactcgaaaaatgtaacttgggtcgtgtgctaacgattggacaccctaatgtgtactgatagcacctttagggggaaaacccaaaatttgaaatgttgaattaccaaaataccctctcagaaacctttatgaaggggttttggatttcatttttctcttttagtaattttgaaacttagagatttcaaagaaaaagaaatcaaattctctcaaattttcaagtttccttcgaagcttcaaggattttcaagatcatttccacttgtactcaaattactcagtgatcttcaacattgagtaagtccccaaactctttatgcattctttgatttcttgtattttactttgaattgcttttgtgtggacattttaggtttatgaaatgaattgttcttcattttttaagattacgacttataatttgatatcgaatgaatgcacacggaccataatctttgatttcattccaaatttcattttctttgttagaaaacactcgaaaacactacttgacagttttggaattattttaccacgaccttagatctactcacaagtatgttgtttaacatcctaaatatgaacttctaaaatgattataaataaacacatataaagtatgagaaaccttacattgggtgccgtggaataatatgtctccttccactcagagctctaacctttgtatcctttctgtcgcagagtatcaccaagatctgagtccgaatgtccttctgttgaatctggattcttcacgatcttccacactatgattgaggtaccacttgctgtgtgtgggcactactctatcactcaaggggttcgaatcaactataaagaagagggaaagagaggtggcggctaggttaggtagaaggctcaggtttttctctgaacggaataagatgcat

SEQ ID NO: 260431 - DNA, 617 bp, Cannabis indica
accaactaggtgattacgacaaagattatgacaaaaactactaagaggagtactttgacagatatcctcatatttactaaatatcatccctctattgtaatccttttattttcttctccccacaacatctatctcttgctctccacttctaatcatcatgtttatattcttttatactctgttcaattttctccccatagtcaagccccttagatcttctcttaatttttcaattttgtttcttttaaaatttcgacccttggctttgtgtttcaacaatggagttatgatattttgttcatctatgaaaataataataatttcatgtaatatataaaactattaattgtttattatgatacaatatttaattataaaactaattaaatttttataaaaaaataattacaatattttcaaactttacattgaaaatataaaatacaatactttaaaaaaagtgcttgtttttaatttggtggaattatcattctgtatggcaaaaaaaaaatctcgaatgatgtattataaaattaaatttttcattatgttacctgttgtgataaatccaacacgcaagtatacgtatcgttctaacaagtaatactcaggtaagt

SEQ ID NO: 260432 - DNA, 620 bp, Cannabis indica
ccaacctttgagacatccacaacatggttcaagtcaatttttcaagttgacactcaactttgggatccgtaggcatatcttaagtgggagtagattgtgtgcgctggaacaaagattgtccctttaattttctccctactcgtcggttatgaccacgcctttcaccaagtacttcactgagtacactcatttcaatctcctcaacaggtccaatgtcagaagtactggctcattttttataatttgaaacgagctcactctattttaagaatataagttagaaagcattataaatatacataagagtgttttatttaaaacatatgaataattacttatatatttttgtgcagtcaatggactaacatatgtaactgctacattatcacatggcaatcatgagactttaatctaacaatatttgtctcattttcgtttaccttcttcttaaggttagaacaaaatccatcttgcaattgtgggaatatgttaggaattgaccctgaacatcagaacctgtttcatcaaaactagatgctcctggtgttagacttttatttgggcttacattaaattttatggttttattaaaatttgggttgattggatagttctttgct

SEQ ID NO: 260433 - DNA, 2394 bp, Cannabis indica
aaagggttttatttagggcacaaaacccaacaattaaaattatccttattttaacaattaatatatagctaatatattccaacaaatgactagttccatttgtagtgctgacaatgccaccaatttcaattcgtctcatgatccatcacttgattcacgaccagctgtgagtcactgaagcattaaactaatttggctttcaaggcttcagcgacccgcaatcctactaacaaggccttgtattctgcctctttatttgaagcattaaactagaaccttaatgcataatgaaacttaaagttttcagaagatatcattataacacctgccccgagccatttttattcgaagcgccatctacaaacaatttccatgcctcctgatttgttcatgttctggagtcttctccaacatttactccttttactagaaagtcggctaaagtctgaccattaatggtggctcgaggatgtaatgctatttcaaacttccctaattcgattgaccactttatcaatcttcccgatacatcaggttttgataacacttgttgcaaaggctagtctgtcaaaacattgattgggtatgcttgaaaataaggttgcaactttctcaatgcatgtaccaagctaagtgcgagcttttttttttggaacaagaaagaaaaattattccaactaccactgaacaatacacactgcctagcagcaaaccaacattcaaagactatttaaaacatccattacatatttgtctctagaattttgaattgacacggtgctagagtggaatctagccttgagacaaacttaacctgattactcaacattttaatagaataacaaactttatcaaaaacacaacaaatattacgattgcaccaaataacatagacaacaactactatgatggtcgaaatcaacaaagttgttatctcattcattttctccactgagacaagtaaccattcattgaggttagaaggccaatcatattttccaaaccaagaggaaatctcagctagcagtagctgagagaaatgacagccgaaaaaacatgatcatgcgattcaggaaccaactcacagatcgagcaaaggacagaatccagagtaatatatctagcaagcaaatctcgagtaagcaaattattattaactgcttaccaaagaataaactgatgctttggaacctttagcttatgccaaactatcttatgataggacaatttctctgccgtgagcaaagaaagataaaacttcttagctttgaaattccccgaacaaccagtagccaacaaattatctttgttgataacctctctcaacttaataagttttttgaagtaccagcttgtatctagacttgggttgaacgactagaaatctcggttcttcatatagatactattaatccatttaatccagaggcaatcttgtttagtagcaatggcccaaatatacttagacatgagggcaatattccactttttgcctttgctaaacccaaggccaccatggttcttaggtaagcacacttgactccaagaagaaaattgcatactgcttctattaccagatataccacataagaagtcacaacaaagcttatcaattttagcagtaaccttttgcgaaaggataaaaatacctatccaataattccttatacccaataagactgaatggaccaagagagctctgcccacaaaggaaaggcgacaacttgcccacccatgtaacaccttttggatcttctctacaattccactacaatctaaatctttctatttggtaggtctcaaattgacaccaaggtaacttagagggaaggaacctttggtcaaattcaaggacaataatagctgcctctaaatactcaggtctatacctccacaatagattgaagattttgaaaggttggttgccgactcagtagtacaacaaaaatcctcaaaggatttttgaatgattcccagagaagcagaattacctttgctaaagataacaagatcatcagcgaagcagagattaacaaggttcagggacttattaaggggatggaagccaaaacccttcattttggacgcttgaagaagaagtctcgtgaggtattccatcaccaaaacgaacagtaatggagacatggggtcaccttgtctaagatatttctcacccttgaaggagccatgagctcaaccattgagtaacaaagagtaagagattccccttaggcaagtcacgatccttgaaatgaatctagtaggaaaacaaagacccttttgataaatctgccacaaaatcccaatcaactgtatcataagccttgcttagatcaatcttcattagacaatgggctaagatatttttcctgtcgtagcctttgagtaaatctt

SEQ ID NO: 260434 - DNA, 1313 bp, Cannabis indica
ttttttttagtgtagctctatttagttataacatctcaattagaatatattttacttggtcccaagtgtattcttggatagaggttctactgtattagagtttaccaatgattttcatatacagtttagggtcagcaagtttgtcttctccttcttggcttagtttaagattcacttccataggagtattagcagctttacatcctaattttcctaaatcttcaagtaattgaagagcatagtgtccttgggatataaaaattccttgattatttctagcaatttcaaggctaagaaaatacttcaattctccaaggtccttcaacttgaatatgttcgtcagagtaactttcaatttctccactgcaaccatattattactggctaatatgacatcatccacataaacaaggaggattatgatgcttgatttattcttctgaatgaacaaataatgatcaaatgatgaatgttggaagccctcttcaaccaaagttgtagaaaacttctcaaatcattgtctagaagcttgttttaggccatatagggacttctttagtttgtacacaacattaggtggtaactctccctcaagactataccctggaggttaagtcataaacacctcttcatgcaaatctccatggagaaaagtattattgacatcaagttgatgtaaaaaccaaccttgaatggcaataagggcaaggatgagcttgacagaaacaagctttgtgacaagggcaaatgttttattatagtcaatgtcttcttgttggttgtaccccttagctacaattcttgctttaaatcttttaatggttgattttgtagacccacgtacaccctatggcatgttgatcagcaggtaaaccaactacagtacaggtgccattagcttcaagagcttcaatttcagtgtccatggcatcatcccaaataggtatgcctcgagcttgatgaaaaaattctggctcgaagtggctggaaatagctagcacagttgctcgaaactttggtgatagcctgttgtagtcaagaattacagaaagagggtgagcagtagatgaattaggtacctgagattgcacattgttaatagataaaaaatagtgataatcttgaagataagatgatttttgggtatgtctagttggttgagtattagtaactagttcatgtatgttaatgatatcaggttcaggaatgtgtggttgtgtttttagttgaggacaagcagtgatggacccagaatttttactttgtgggggcttatttatcattcaaaaatatttatacctatattataatca

SEQ ID NO: 260435 - DNA, 4208 bp, Cannabis indica
ttttttccttctttttatgacatttcctaatttcataagtacctaacatacaacaaattgggaaacaagatataataatcataatatatagcatgtatatattaattcttcgttcactacagtatagtatatctcagaacctacttcactacaaatgaatatctaatatattcaaactaatgaattgaaacctgattttatctttttatgtgaaactttgtgtcgtaaagatgtgttggagcgggttcgtataaaattgaagtttggtggggtgtttgcggtagatgcttgtggtagaagtggggggttgctttattatggaggaataaggaggatgtcaaggtgctgaattttgctacaaattttgtttatgtggagatcatgtctagtgatgttggggcgtggcgccttactcgattttatggggagtcaaaaagaagtcttcgttggtcatcttgggaacaactccggactttagctaatgataatactctcccttggtgtgtgattggtgatatgaacaatgttctctctcaggaagataaacgaaggggacacccctatcccaactggttgcttgatggctttcgtgacactatccaggcatgtggcttgaccgatttaaacattgttgggcatcagtttacctgggagaaaagtcatggtatggataactggatcgaggttcgtttagatcgtgctttggtgacttaaagttggcttcaacgcttctcttcagctaagcttattaatcttgaggtttcttcttctaatcactgtcctattttacttgatgtggctgttaaaaatattgtctctgttaaatgcaagtttcattttgaaaattgttggcttcgtgaaccactttgttttcaagtggttaaggagtgttgggacgagtctcagttggcgggcatccaagagaaaatccaacggtgtgaggagatcctctcggatcggggcaaagattactccgaaaattttgcttctcgtattaaacattggaaaaatgaggtgaaacggtggaagaatggtcgtgatcttgatgttattgctaaatacaaagaggccgaggaaaaactttttgaagttcttactcagaaggaggttttttggcgtcaacgctcgaaacagttgtggctgcaaaagggagataaaaatagcaaattctttcatgctacgccgtcctctcggcgtcgaatgaatgctattgataagcttcaatgtgaagacggaagatgggttgactgagattcgcgtttgtctgaggttatgtgttcttattttcaagacctgtttactagttctgattgtactatggatgatgttcttgatggcatttcaacttcagtttcatcgggtcagaataactctcttttgcaaccactgactgatgaagaagtgaaagcgactctttttcagatgcacccagataaattcccgaaacctgatggtatgactccgggtttctaccagaagttttgggcaattgtgggcgctgacgttataaaataggttcgctctttttcttatttggtcagttgccaaccggtcttaatcatactaatttggtgttgatccctaagaagaaaaatgccaccactatgggagacctgcgtcctattgctctctggaatgttctttataaggtgtgctctaaagtgctagataatcgtttgaagcttgttcttccttttgtgatctctgaaaatcaaagtgcttttatctcgggtcgtcttataactgataacattatgatttcatttgaggtaatgcattatcttaagtgaaagcgggtcggtaaggaaggttatatggctcttaagcttgatatgagcaaagcttacgatcgggtgtaatggcttttgcttcgaaatatgatgcttaaaaatgggctttaatgaccgtgtggtggatcttattcggcattgtgtttcaacggttacatacacaattattctaaatgggggtagagagatggggccgattattccgggaagaggtattcgacaaggtgatcctctctccccttatgtttcttctgtgtgttgaaggattttcttctcttataaggagatttgaagctaggggtgttcttcatgggtgtcgtgtttgtaatggtgccccaatcatttctcatatgttgtttgcggatgattgctacatttattgcaaagctattgatagggaggatcgtagtgtcgtcctcttgctacagcttttcgaacaagcctctggtcagtgtattaattattctaagtctactatcctttttagcttaaccaccacctcagctactagacaagaaatgtgcaatttattacgcatgatcgaagctcctgacaatagtatgtatctcggcctcccttgtattatgggtcggaacaagaatgccatccttggtattttgaaagataaaatgcataaaagaattctgagctgggaaggtcacttgctttcaaaaacgggcaaggaggtgttgatcaaaactgtcgcccaagctctccccacttatgctatgtccgtcttcttgttgcctgtggaaacctgtaataagttggaaggaatgatgagcaaatattggtggagttcgggttccaataaaaaatgtggggtaagttggtctagttagaagaagttgtgtcgtcataaacatcatggtgggcttggttttcgtcacctgagggatttcaacttagccatgctaggaaaacaagcctagaggttagtcacgaatgagcactctcttgttagtcgggtttacaaagcccgatattactcacatggttcgtttttgattgcttctcttggtccgaatcctagatttatttggaaaagcatcttcgaaacacaagctttgatcaagcaaggtgctcgtcaggttgttggtccaggtacgaatattataagtgttcaggtacgtttgacccttggctcaaaaatgtctctcatccgtgggttaccactactgctaatggaatggagcattggaaggctaacaatctcatggtgccgggcgaaagaacatgggatttgaaagtagtttctgatattttcaatgaaagagataaggagctaattttaaagaccactattgatcaggaggctagtattgatacttggtattggcatttggatcttcatggtgcttacactgtgaaggaggcttatcgtttgatgcaccttgctgatgttactaatactagtgactttgagatgaagatttggaaaattgcttggaagctacatgtccctccaaaagtacaccaacttatgtggcttgcttgactggttgtttggccacaaaaattcaagttactaccaagcatatccctcttgaccaaatgtgtcctatgtgtaaccaaatgcagagaccatcatccatttattggtgcaatgcccctttgcaagttcaagctggcagaggtcgatattaaatatgggtactgtgtctttggtaacgttttcggattggtttagccagatgctacttcagcactcaaccatggcccaggaggaattgttaatggttatttgggcgatttggcaagcccgtaatgagctggtttggaggaaaaaatcattgtcagcagcggaggttattctattagcaagagtagtccttaatcaatggagaaatgctcaacaaaggagaatggggtatttatttgttccttcgggttcgagtatggatttggagcattgggtgaaaccggttataggaaagattaaggtaaatgttgatgtcgcaatctttgcaaatgacagaaaatatgaagcggctggtgtagctcgggaccatcacggtcagtttgttgaaggcttcacggttctattagaggggcgtgtggacacggctatggctgaaatagtgggggttaaggaggctttgagctggataaagcgtaaacaatggggttcggttgaagttgagattgattctttggttgctgttcaggcaatccaaggctcgattaccattccttctccttttggtcaacatgtggctgcttgtcgttccttattggcctctttacctttagtcatgattaattttgttaaacgttctgtaaacaaagctgcacattgtcttgctcgtagctcttgtttgtatacagaacgtatattcagcgagagtactattctcgctgatcttctttctattgtaatgggtgaaagtttatcttaaataaagttaccatttctct

SEQ ID NO: 260436 - DNA, 660 bp, Cannabis indica
tatatattcatctcttttattattttttagtcaattatataaagatgaatatcatgtttgtataatcttcagaatatatgtaagattttatcgatgacacataatcttcgggatatattcataatttatatattctttatcaaatcatagaaacaaattatataaaatatattgtaaataataaaaacacataatatatatgaatttaaaaataaatatataagaataagaacatatacacatatataatatataaataacaaagaaaagagttcttgaaattatttcaatcaaatagtatatatatatatatatataaataaatatatatatatatataatttatcatgacttcgaaataattcaagaattttaacagacaatatttaccttaggtagagactcgtgttaataatctattataaaatagaaatttttacatcaaaaatacaaaatgcaatctttattacaccaataccactacacggctatatctaacttttttactcttcttcttttattttattacttattttaccactatgcatactcattcaaagcatcggtttacgtgctgacctatgcccctatcaatcaaccatccatcatttctccctttttttttctttttttttttcctatttcttttctatttttttt

SEQ ID NO: 260437 - DNA, 1706 bp, Cannabis indica
accaattggcaatgagtggagtagcccatgttattatatatggctcaattctctaccatttatttcatgtaggacaatgtccataatatttataaattgggtactcttgggctacggtggccaccttagatcagagttacctaaacactatttttctaatgatttactctctaaattttagtgttactatctaaaacttttatctctatatatgttgtaatatagcatattggactaccaagtgttgaacgtggaattgcctacaatctccattgtgggatcactagtcaaggctggagtttcggtcttgatttataggtaataacacaactctacaactaaacacaagtttctatcctttgcttttaattgctttctcatctcattacttaattagtggagaccaagattctgtaattccattgatggggagtagaaccttagtacataatctggctagagagttgggcctcaataccactgtcccctacagagtttggttccagggaaagcaggtattctttcttttttctttcatttttaaatcctctgttttgaaaagaaataaatttagtgagtggtaatagataaggtgtttttggtgttatatatgttttaaacaaaagattaaagtttatgcatggaatattaatgggaatgaaggttggaggatggactcaagtttatggaaacgtattgtcgtttgcaacaataagaggtgcctctcatgaagctcccttttcacagcctcaaagatctctcatgctcttccaatcatttcttcaaggcaaacccctccctgaaattttctgatataattaaatttacacatttatatatgctattaatttattatattagtcttatcagtttgtaatggatccaatcacattgaatttttgcatatgggaaagaacaaaaaataccacacagattacaacatacaatacagcaataatttacactaatatatacaatgtaatttaatcaattatcctatactttcatgcatataagaaaaaagtttataattacctaattttattattaattaaaccgttaactttcacacctttttagttttaaagtaactttcattattctctttctttaatcttacaaagctctctcatttatgtttgagtagaaatactttcgtagtaaatgtatactgatgcttaagaaatctatttgtacaaaataaagactgcgttatttttaattttgtataatatatattcaattatagttacttctcaaaaaatttataactatacatcaaatcaaaataatacaacagcaaaattaaaaaaaatatattaaaattaatatgaaagaatgtgaaaggaaaaattaaaaacgaataaatgttataccaattggactcttttgaaacccacactttaatacccaagaaaattatctcccagccataactttcgcatcttcttcttccagctgcctcctttatcagtttttttatatatatatctttcatttcgtatatttaatggctattacctatagttctgcttctccatctctattgccaaaaaaaaaacttcaaaaataggtacataaaaaaagtgactaacaaggctaaagggaaacggccagtcatcgacgatgatgactccaatttcgctccccccgtggctaaaggtggttgtcgtccagtaaagaagaagtcgaaggtgtctttgcct

SEQ ID NO: 260438 - DNA, 919 bp, Cannabis indica
agatagataaattcttccataacaccatacaaacactataatcaaattaaagataaattattagtatactaacatatacatcatcattatacattaacactagaaaaagttacaatattgctatgcaatcagagataaacagatctcaaaatgaagaaaaaaatgtgaagattatgagaaccattactaaatcaaaagcaaatttatgaaacccaaaataaatgtgataaaatttttactttgaaaagctcctaatatcccatccaaacacccaacctctacgacagaactagccacctgtgaaccccgacaatgcaagaacagctacttgcgaacccgcgcaaagcaaactcgccaaccgcccgtaacctgaaacacaaaaaattcaggcttgattttcttttatccaaaattaatcaattacatgaaagtaactatttccacaacccaactctaattgggtcgttccaattagaaatccaaaattttaagagcagagtaaaaaaatcaaaaggaaaattaatacacattaaactcactcaaacttgtatttgaacaattctttttcgtaggatcaaaaccataaacatttaagaagaacatgaatggactggagaagagaagagaagagcgagagacttacgtgagtttgcctcttgggtttggacttttgatgcttcgtcttaaccatttcaaagtatccacagtcgtcgtcttcgccaatagccttgttagttcacactttcagttaggttctccctttgttgagacaaacagaaaggagatacattagtgaggcacttaaaaggctcatataaaagtttttgctgggcttttcaaacaggaaaaaaaacaagaagaagaggagatcgacgatctcaaacaagaacaaaaaccagaacagtactgaggcaactat

SEQ ID NO: 260439 - DNA, 673 bp, Cannabis indica
aatagaaattagggttgctacctctttgaaaaagtcaaaaattacccaaaaatctcgtttttcgcccctagtcgcgactacataaagcctagtctcaaccatggacaaaatacgaaaaaaaactcgctgtttgactcctagtcgcgaccatggaaagtggtggtcgcgactactgaagcaaaatttgacagcttcagcatctttcaataaaatgtgcataactttcacatacgaactccaaatgagttgattcaagatgcgttggaaagaagaaaaagaaatctaaaactttcatgttttgagttttcctaaatctaataagaacattgtcgaatttaagcttgaagtttcagctttattttcttgcagaattttctctattctatagcttgttattttccgaaatttgatcaattgatatattccaagtgtgaaacctgaaatcaaagaaagcaagcataattctattccaaaaagaataacaaagaaggaaaacaactataaaaagtgacccaaaatgtagactaaaaatggcctaacacatccaatgtaaggtttctaatacttcagtcaaacataagttttcaacataacttttcattattcttctgacagaaaattctctcttcagaaaaactgagccttcccttttctataccttggccgaacctct

SEQ ID NO: 260440 - DNA, 682 bp, Cannabis indica
gacgacactataatcatgaacaaatatatacatatttatatatgttctggacttaatagaatttataaattaagtataattatgaaataaatcatgcgaaccatgcaacgtaaaagcgatttttgatcttatattaattagtaaatctgattatattgaaatagattttatttagggtacaaaacccaacagttttcaccctcgttgggtggatcttatgttggccactattatgaatgttgagtacaatgtggtacatggtggtagatctatcaggtcaattaagccaggaagaggtattcgtcaggaagacccattgtctccatatctttttcttctttgtgccgaggggctctcttcgctaataaaatagtttgaaagccttagtgagctgagggattgtaaagttgctaatggtgcacctattaattcccacatgttgtttcctgatgacagttatgtgtattgtcgagctacggaacgtgaagttgataatgttattcgacttctgcatacctttgagattgcttctggacagaaggtcaattttgacaagtcttctgtgttctttagtgctaatatttcggtcgatttgcgtgagagactttgtacgactgggaatgaaggctgctactgagaacaacttgtatctcgggcttccctgcattattggtcaaaaaaa

SEQ ID NO: 260441 - DNA, 738 bp, Cannabis indica
ccctttagaatagctatcaaacatgcaaactaaggttaacagttctagcctttcttaagttcatgatcaggacattcacgaatctagtaatggtatacactaagtacataatcattccatcattttaaaaattttctatcactagggtatttccctagaacgacttaggcaactgctagtaactaagcatagaccttatactttcatcaatatgcgaattgtatttctgggaggtaagtttggatataattcaaagctcaacttaatgatctttgaactgcataaccaaatatttctccatccctatcaattcgtatgatctttaaccacttaccttaatatttatcaacatttctagaaattcatgaaatttctcaaacatttcaagtttctttgcataaggaaaaatctagagtgattatcttaagaatttaacgataactgatatccacccctgagtgtacatccataagatcaaatacaattgatcctactttcaagtgaatattggcatattgactctttgcagagaatgatcttatcaaaactattatgaacaagatgcaagtgccatagatatattaaacggtggttgtggtctttttatgacttacgtctacttgcaacaaagagctcttagaatagtccaagttggttatgctcacagaatacaaaactcataatccatacattaacatacagtttggatccattaaagaaaatggatattaaacttgt

SEQ ID NO: 260442 - DNA, 943 bp, Cannabis indica
gtacgagaactcgatcaggggaaggtactttacccatgatcctttgaagtctaataaacatgcccatagcatgtcttctaaaatttgaatggtcctttcaaattgtccatctgtttgaggattgaatgttgtgctaaattttagttgagtacccatggctcgatgtaagctctcccagaatcttgatgtgaactttggatccctataaaaaataatggactttgggacaccgtggagacaaactatttttctaacatacaattttgcaaattgattaatggagacattcaagaagtgcgatgactttgtaaacctgtcaactatgacccacacagaatcgtactgtctagtagtcctaggtaatcccactacggagtccatggaaatgtcttcccatttccattctgaaaggttcaatggttgcagcaaacctgcaagcctttggtgtttagctttcacttgctgacaggttaaacactttgtaacatactctgctatatcgttcttcattctaggccactagtgcatggacttaaggtcttgatacatttttattgtccctagatgaacagaataaggagttgtgtaagaattatttagaatttctctcttaatatcatcatccatatgaacgcaaacacgattcataaactgtaacaccccattattatccactgtaaagtcactggtcttcccagctgaaatcttatctcgagacttcactaaatcttggtcttgatattgcacttctttaattctttccaggagagtagactgcaaagtaatgttagctaaccgtctcacaataaacttaatgttagctcgggtcatttcatctgccaattacttggaaatctgtttcattgtattcatctggttttgactacttagggcatcagctacaacattggccttcctaggatgataaaggattttacagtca

SEQ ID NO: 260443 - DNA, 3766 bp, Cannabis indica
aacaagccagtattttcacctgtggtattttgatctgtatgatcctcccctgcaagacttgagtcagtactggtgtgagataaagaagatggaactcgagcagatgggggtgatgcttcagggtctgctgcagagtgagtcgatacagaactggagtaggattgatcatgatcattaacagtaggaaagggaagtgtcgaccatgttgagctatgaataatgacaggttgtggggttttatagttgttgagaaacccctgtttgaagggaagttcaagctcattgaacattacattcctcgaaatgtatatgcgacctgtaggagtgagacatttataccccttgtgtgaagtgttgtatccgagattaacacattttaatgaatggtactgaaatttgtgtgactgatatggccgaatgcatgggaaacatgcagtaccaaacgttttgagaaaattgtaatctggtttatgatgatacagcacttcatagggtgacttattacctaacacaggagtaggtaatctatttattaagtaaacagctgtgtgaaatgcatctacccaatattttaatggcatttgagcttgagcaagtaatgtaagacccatttcaacaatgtgtctatgcttgcgctcggctctaccattttggttagatgtatggggacacgagtgttgaaattcaatcccttgatcttgaacaaaggttgtaaaggggtgatattcaccaccccagtcgattcttaggcacttgatcttcctgtcaaatttattttctgccaggtttttaaactgaataaatgcttcaagggcatctgatttaaatttgagaggatacagccaagtgaaccggctatgatcatcgaggaaatgtatatagtatctgtaatttgcatttgaagcaacgggagcagctccccacaagtcagtatgaatcaagtctaatggaaaattggcacgactagaggaaagtttatagggaagagcatgtgctttgccatactgacaagcatcacagaactgttgcatttcatttttagttttctttacattagcagactctaaaacaagactcaaagttctaggagagggatggcctagacgcctatgccatacatcaagcctagatacagacgactcgacaacacatggttgtttaacactggatttaacagaaaaacatgcaggaaaacttgaaaattttgactggtgtttattgatgagtggtgatggatcatgatgagtggatgatgggaatgattgcggagtttccagtctgtataacccgtctctaagtgttcctcgaagcaccaccttccgagttcccttgtccttaatcaaacaaacatcagcatgaaactcaatcagtatattgttgtcattggttagtttagatacactaattaagtttttggcaattttagggacatgtaacatatctctcagcaacaattgattcccatcatcagtatctaaactaccattaccaacatgagatatattgactttagatccatcacctactgtgactttttccttacccccatagggttgtttctggttcatggctgcaacatcagaggtaatgtgattacttgctccactatcagcgaaccaagcatcactttcaaccacttctggactcacaatgaaggcattgtgatttgcttgagtgttcttgttcccaagattagagctgttggggtcagatcccatgaagctttcgtcgaatctgttgtaacagacagctgcagagtgaccatatttgccgcaaacttggcaagttggtcttgctgtgttggtgcggcctcttccacgaaaatgccctgaacttccacgacttccagagaaccggccaccatttccagcatattgatttggattctgagttcctcgacctctgctggcatgattctttcctgtgttgcttttagcagcaacattagcttgaggtgaggaggatcttgtcgatttgctgccattgttaagagtctgcaacctctcgatcttgctatcaaaactcaacagtatgtcttgcaactcttgccaggttgtggttgatctagcttcaatctgaactacaattgacagatactcggcatccagtccagataacacattggccaccaaatgcgcttcgggatatggaaatccagcaagtgctagaatatcagaccaattcttcttctgtcgaagatactctgccatgggagtgtttcctttgcgaactgtttgaatcaaagttctagtttcgtccattttggactttgaatacgctccatacaaactctctagagccctccagagacctactgcagtcgtggatcccatcacttcagtggcgattccttctgtcatggagctataaagccagcccataagcaattgatcattgatgacccattgctcatattcaggattagtttccagttcaccttcatacttggcttcaccagtgactggaataaactcagggggacacatctttgttccattcagatagccgtgtagtctatgacctcggactatagtggagaccattgtcttccacaatgtataattatttctgtcaatctttagtgaaaagggttcgttcagtgtagttggctggtgtgaatatgtgttaggaagctgagatggttgagcaccatccctgttggtgctggtgactaagccaccttcggtttgttcttgtggagttgccattgaaggaggcgaaaatggctctgataccaagtaaaatttgagaggaaatgggtgaaatgaattctcagctcaatgaaccagagcctgagatgttgatatttatattaacatgagtaaatgttttacatgaggtaaaaagggaataacggctccaatacagaaagaatatgcagatcccaataaagattgcatagaggggaatattctaacagaatgcctaatcatttcttcacacattcttggaccacaatgacacctgtcgatacactgcagagcacaatcaagtgcagtactctgttgctgaactaccaccagcagccaatttctcatttctcaacacattcattattgggatagtatatctaaattgctatctcatcccaataattgtcatttacaattggtgtgagttcttaatggtttttcatccttctctgctctatcgccattcttggtttcctctttcgccaaatcaatatctcgtatgtggatttaactctacctgaggacattacatccattgagtataagtagatttttaagaagaacagaaatattaaaggaaaggtaggaacctttaaagttaggcttgtagccaaaggctacacacagtgagaaggcgtcgattatgacaaaaccttctctcctgtagtaatacttaaatctattcgcatttttcttttcataactgccacatatgattatgtgttactaaggaaagatcaaaagatgtgcaagttacttaaatatatttatggattgaagtaagtctctagatcctttttttaaaaaaaaagtctctagatcatgaaatatcacctttaataagactattaaagagtatggcttcaaacaaaatgaggacgaagcatgtgtatacaaataattaaaggtaatgtagtggtattcctagttctttaagttgatgacattctacttattgaaaacaatgtagaaactttatcagacgtaaagaagtggttagccagtaaattctaaatgaaggatttgagagaagcaaactatgttctcgaaaattaaaatctatagagatagaa

SEQ ID NO: 260444 - DNA, 854 bp, Cannabis indica
tatatttatttgtaaaattagtataatgacacaatcaagcttcactctctctgtcattaatttctaccaaaaattaaatcaaagcttaattgttaattaaaatatagccaaagaaaaaacagccacaagaaccagattatataccgttgataaatgcgaaatacaacttaccatacaattatttagggaaatttacatggagtactaacttttccccatttcttacaattatattggaacatgctagattttacatttttactgttttctttttattcggcagtatactgccattgggcatatctttttatatattttgtgacttacacgtgttttcacgggattttgccacattttttaaaaaaaaaaaaactaattgctttaaaaaggtgggatttgacgtgttgtgtcactttttgtgacagtttttttttcttttttgggtattattatttttatatattattttcaaatatattaaaggttgtataatcatttctttaaacccactcccccataatcttgttcatcatcttcttcttcttcttctagtgttatagtgagatttctctcacctagaaactcgagaccagactcctgtttggaggacacttgtactcaattttccgaagaaaagctgagatgtcaatgagatactcctcgagtttaaacctcgcctgagctagaatcagcgagatgatgcgaatatgaccaagtctaatcgcattcgtgtgactcgcattatgtaggaccaaggaacggatttaactcgcatgtaccaggatatgtgcaagtatcctctcgatcctcctgcgaaaacttagagatcgagtctctatgatgcgagctggtct

SEQ ID NO: 260445 - DNA, 885 bp, Cannabis indica
ttttgagttttaattaaatattactattaaatactaattgaatcatcatcgttgcataaagtttatacaacaataatctaattagtatttaatcgtgatattcactaccatttcaaattttttaaaaaataaacttaaaaaagttttactacaaaagaaacataagcagattaaatataaaaatccatactagtttcacagtaagtaacctttaaattcatgtatggcaagccctaaaaatattgaaagcttagttttaactagtaacataaatgtttccatattcaatagcgaaaaaattataagcatgggatagagagtttgatataaatccaaattggatgaaaaagatactgttttttttttttttgtttttgatagaatctgcattattctgaacatgaaaaggaagggacagaagtgtaataagaggcatagagaaaagcagctaaaaaagaaaggagacactgctcagaagggtagaagcagtactactactactactactattactgccactattgttatagtctgtctgtctgtctatctatatctctatcataatgatcataagcattatgtcacaagatccaagaaacattaaacaacactcaaccccactttttcttcttcttgttgtaacttgggccctttttaatttcactcccaaattgaatataattaattataaagtaatattattggagggttctaccctttaaaagggacatctggcatcaaatagattaggctacttgtagctcattagctgcatggtggtcctaattgtggaaagaatttattgaataaaatatcatatttattgaatggatatgtagtagtgctttgtgtataactatggagcatgcacaacatataagatca

SEQ ID NO: 260446 - DNA, 1075 bp, Cannabis indica
aaatcttatatttttatgaacttgtttctgtccccaaaaagggggataagtttaaagacagttttttcactctccgggcccatccttctaacgagggcccggtcccttttaattttcaaaagaatgtaaaagaatatcgccatcgttttttcttctcttccggcttccaagccgtggatcgcccggagcttctcacggagtgggtcaggatccctcctcttctcagcactgcccctacctagttattcctccagcatgccaatgtttcgtgggggacttggtcacgacgaagaactgtcggaaggccaagctcatctccgagagtcaatcagtagatgacttcaatctctccaaggttctatgcccaaatattcgtaccccgaacgctgaaaaggtgctcagggcggacatcatagcctcggcggaggaccggtaccaaaagtacctctttaagagggaacagaagttgacatatattaaggctcaggccgcagccgggaggacccctcaactggaggcgggcagagagcggacgccttctcggcctaagttgttggtcccggttcccaatactggggccccagacgtcagcacattcgaatccggtaagtctcccttaacggttcatcatgttccttctgcccaagagtattcacggtgtaggcctatatgatttgacgagcatcttattagatttaggatgccccctactcggtggggtgatcatgccaaagccttttatttttccaacataggtcattttttaggtcggtcccggataggttccggacctcatgcacccattcctctggatcactcagcttatctgtcttccagatggtttctcccctcggacagctttcttggggatgatgaagccagtattgtagtgcaagactttgctaggactgagttagatagtcagggtaggactagttttaacgctttgttttcatgtacatacttttttatggccattctgacactcagtttatttgtccttttgaagcagctcagccaatggaggatcttctagcgactcttgcccaaacatacagcccggactcttctcttc

SEQ ID NO: 260447 - DNA, 569 bp, Cannabis indica
ttttttggcaatttagttagtcaaaattattttttaattaatgtacatttttgttgatcattttaaattatttttaatacatttgattttgtgtctctagttactcttttcttgtaaggaaagattccttatcagctggtctcttttggtttaggaaacttcttgtaagagaagaaattctcttatggaaaattgtctaactttgagaaactttactttcctttttttaattgatgatttcggttttgcgttttttagaacagatcaaataaactttatttgacaggtttgaagtccaaattcgtgattttggatcaatttggaaagtttcctttttagtcttgatctgctgctgcaaaatccgattctgatattgcaaatcaagaatttttttaagaaagttttgtacaactgggaaattatttttttcgctgtctctagggttgctacattctataaataggacctagagagcagccaaacaattttatctcttctagtctcatattttcatatatgaagagtgtttcatttgtaaaaacctagagtgttcaactaggttttgattt

SEQ ID NO: 260448 - DNA, 2388 bp, Cannabis indica
ttgtacaactctaaatctttttcctaataaatcacgataagtaaaataaaataaaataactcatgataagtaaaatacgtgaaatgtctactgcaattataatatacactgttatgatattttttggtaaaaataaaaatgtggcttatagtagaaataaaagtgatgttccatcagaattgtacaatatatattcacattggaagttggttataattgggaatcatatatgtaaaatgagctatatatatatgcacaggacagcagccatatatatggtccaagcaggatatgtgggccctcatcactctcactactattccatcgcccttaccagccttgaaaggccaatatcttcttcctctcatacctaaattatactgtgtgttctgaaaatgacattaattatcatgtttcttagaccaatcacaatgatcgagtgtagattagactactaattctttagatttctgttttgattttttgatggaaatataacggtatttcaccagcccaactttgactatttctttcctttttttttctttatataaaaatatttaagggagtttttcattttggttaaaatattttgaaattgatggagacgttgatttatgttattgattttcaaacaaacagaaataactgaaaaacaatttgtaaaatataaattaaacacacaacaactttgttccaactatccaatgtcctacctctagttagattgagaatgagaaccttctactaccaaagagaatcaacacaagttacatgcagggtggcggcatatatatggcaatttgtcattggtaacactcaacttacaagttattttttattttaacaactcagctcatgggcagatccacgaacggaaaacagtccctcacagggatacaaaatgctagagctcctttaattgagtgtttgttatgggagtgttagaattagaataggtgggaatacgagttcttcttccataagtttagtttgagtcccacgaagttttggtggataatataaatttttttgtacactatagttttacattccctcctttcagccacacctactatgtcttgccatttattaattcatgatattatataaaaattatatgggaattaatatttaattgtatcaaaaaaagatgttaaacaccctagtatttttttagcatttatctaaaagaaactctggcccataattttgatgtggaaacagcaaacccgcctcatagaaaactcttccctctcgctctcaaataaagaagactttctcattttcatacataaatctctcattaaagtataactagcaattgactgaccatatatattatagaagatataaacaatacaaaaccagtcataatcagttccacattagtctcctcttgttaaactaattttcaattctgttagtctattcttatgtatttaatttacttaattagctagtcttactgctatttcttaggcattagttaacacgagttttactcgtaaggattcttatatttgcccatataaagactgtacatatcaatgagaaaatcgaatcactttttcaaatcttatatacattacattaaattttttaggatttatggaaaaaagaaacatatattatctcaaatccagagcacagcatgcactagaccttgtcacttgtttacaaataactaatggcaaatgctaattagtgattcgatcattttaaattagcgaaacataattagtcaagaatgtaagttttacacagtatatatgatggaattttgagtctttctacaaataacaggtttcttatcaaaatttcttgcaatatggctgtaacttgtactgtgaataactgaattaactgatatacatagtacataaactgaaagcgatcgttcaattgataatcaatttgctgttctggaaccacacatgacaaactgtgtggtttatacaaatgatctttcttctataccgcaaaaacaataaccatatgcaccaggctttcctatttattttgaaggaccgcataatattaatatgaacaaatgtcaaatatctaagaccatcattgcctcaccaacccatgcatactattctgctcatcaaagtcttaagcatccaatgcatgtaaacatattttgactagaccgtttatgttcctcctcactagttagcacctccacaaatctattacagactaacctgaacaaataacagattaaatccagaagctcatattgtcaaaaagccttcatggttcaatatttcatctttcatcaaatgaatatttcagaatcctgcagttgaggaaaagaagggatcggcctgatattttaataagggcagacttatagagcagggtcacttctacaattatatc

SEQ ID NO: 260449 - DNA, 518 bp, Cannabis indica
aaatagtcatcatcacattttctgttgtcgctgaaacaaaaattataaaaataacatattcaaatataaatcaaataatacacattgagtttaataaaatctccaaaattgaaaaattataactctaatgcccacaattaaataaattcataaataactataaaaatatcaataattagtgctacttgcctttactaatccattttatgaaatgcggtcattacagtgccggagcctagtgtggtgaaaataaatgttgatgctggtgtaaagaaaggcaatggcaaatcgggtataggttgtgttatcagaggagaaaagggagaagtgttatttgcttcattgactgcattacctagagaacatccaccgctgcaactggaattgatggctattgtacgaggtatataaacaggattatagagaaatatacaacggtttagcattgaatcggactgtttggaagttgttcaattaatctaaaaaaaggaagaaaactgccgtgatgttgattgttt

SEQ ID NO: 260450 - DNA, 926 bp, Cannabis indica
ttaatttggtatattagtaaaaaatgcccttgatattatgtgtggtgttgaaattgaattatatatataggagtgtgatggttcgattctgttagatgggtcctcatccgaaaggagtgcaagagcaaacacagggctaagagggttcgaaatgattgaggatgccaaggcccagctagaggccttgtgccctgctgtcgtttcttgtgctgatatacttgctttagctactcgtgatgctgttgacttggtacttaaccattcatttgtatatctcgagacaaaagtagatgattattcttcttttatatgtgctaattatgtatatatatgtgtgtgtagagtgatgggccaagttggtcagttccaacagggagaagagatggaagagtgtctttggcatcccaagtgactactttgccatctccttttgatactgttgatgttcaactccagaagtttgcagccaaaggccttgatgatcatgaccttgtcacactagttggtataatatattaatttataaagtagtttaaccaaaacttgtatattattaattaatatttgtgatttgtgtgtgtactataggggctcatacacttggccaaactcattgcatgtttgtaaactacagactttacaacttcacaaagacaggaaatgctgacccaaccatagacccatccttcctaactcagctccaaaccttttgccccaaaggagaagactcaaaactggtgtcgttggacccagacagccacaccaacttcgatgctagcttcttcaaaaacgttcgtgatggcaaaggtgttttggagtctgaccaaagactttgggggaatgatgatactcgtcctcttgtccagaaatatgcaagcagcattagaggcttattgggttttagatttgagtatgagttctctaaa

SEQ ID NO: 260451 - DNA, 943 bp, Cannabis indica
gactttgtaaacctatctgctatgacccatatagagtcgtactgtcacgtggttctaggtaatcctacgatgaagtccatagcaatgtctttccatttccactctggaatattcaatggttgcagcaaccctgcaggcctctaatgttcagccttcacttgctgacaagtaagacacttagcaacatactcaatgatgtcattcttcatgcctggccaccagaacatggccttgaggtcttgatacatcttcgttgaccctggatgaactgagtaaggagtcgtatgtgactcattcataatctctcttttaatatcatcatccataggcacacaaacccgattcataaatcgtaccattcctgtttcatccactgtaaagtcaccagtattcccagctgaaaccctatctcgggatttcactaactctggatcctgcaattgtgcttctttgattcgctccacaagagtagattgcagggtaatattagccaattgccccacaactaactcaattttagctcaggtcatctcatttgctaactgttgggagattcgcttcactgtatttatctaactccgactttttttcctacccaaggcatcggcaacagcgttggccttccaagggtgataaaggatctcaaaaccataatccttcaccaactctagccagcatctctgtctcatgttcaagtctctctaggtgaagaagtaattcagacttttatgataagtgtatatctcacatttctcgccatataagtaatgctgccaaatctttagcgcaaatataactactgcgagtttgaagtcgtgagtagggacctctgcttgtacccctttaactgttgagaagcataggctattacctttccagcttgcataagaacacagccgagaccttgtctcgaggcatcacagtaatcaagcgttgctttaac

SEQ ID NO: 260452 - DNA, 1052 bp, Cannabis indica
aagacgagtttaaggagagagagagatgggtcagttggtggagtaaaatcagaaaaataattctaatttggctcaaaatgcatttgttgaaagtaatcccattacgcaaaaattacaaaaattctcctagggcaacataacagtcatttaggcattcaagggaattatggtcattccatacacaaataaactcaaataattttcagattatccacacataaataaaatgctaataattttatcccagaattgtatttcggccccgaatccgattcggcccgaaatacccgattgtgactataccgcgccaacttgtcagaacacacctgaaaaaagacaaaacatgcatactatataataatatagtccataaccacgtaaataaattaaattcacagttttacccttcttgggtcaaaattactaaaatgcctctggctcaccaacgggggtcttaacatgtcatatatcatattaattctcttatattaaattatataataatataattctataataatacgcaattaaccagttagggtttgctaattcattctcttaatcctagggtattacaaatactctaaaattcattcttgcacttgctgccattaataattgtcaattatatcaaatggacattaacaatttcctccatagaaatctaaatgagaaagtttacatggcacttcctccaggctccaaacatcaaggagaactcccttctaataatgttgtatgtaaactacataagagcatctatggccttaaacaggcctcccaacaatggtatgccaaacttagtttcacattggtaagtgaagggttcaaataatcctcttcggatcactctatgtttattagatcttctaacaacatttttcttacgattttagtttatgttgatgacattttaattcgtagcaataactctaacgatgctgaactatttaaaagatagcttgattccaaatttaaactcaaagatcttggttctttgatgttctttcctggactagaagttaggaggttgtaatacccagtttaaaata

SEQ ID NO: 260453 - DNA, 552 bp, Cannabis indica
cgaaaccgtacaaccgccaaaattaaagggtacgtttttccaagaaaagatcttgacaaaaatgttgggttttgtgcccttaataaaactctatttcaatgttatctttatcattaaattatcaataaagaaacaaaagtattttcatcacttatttagtgtgtcatttggttcatgttatcatttatatgcttatttgatttataaattcatccaaatccttatcacattgatattctagtttattgtgtcatcaacacagtggaaagtaatcaagattatgtgattaaatgtattcctagatttattagtacacagggtttaactgatatgataatctacaacatagtttacttgcatcttggataagtgttatgtcctttccatgacattggttaaagtaaagctcgggttggattcacggagtatgcattagaagcgaacgatattgaacttggattagatatgataaatttattgtaatatctattgaattcaatatcacctagttgatcctagatcaaatgatcttaatcttgacatggttaggtt

SEQ ID NO: 260454 - DNA, 499 bp, Cannabis indica
gcccttatgttagaaaaaatgtataattttaaaagaggaaacaaaaaatttgggcccctgggctgggtgggccctagggacaggcctagcccgcctatccccagggccgggcctgattaagtcacatgtggtagttaaaatagataagtaaagatctctcaatattaaatacttgccatgatcgtcttggtcatcctggttcaataatgatgtgaagaattattgaaagctcacatggtctttcattaaggggtcaaaagatacctcaaacaaataaatttacatgtgaggcatgttcccttggaaaattaaacacaaggtctttgctaggaaaacttgcaattgaataaccttcatttcttgaacggattcaaggggatatatgtggaccaatatatccaccatgtggactatttagatacttcatggtactaatagatgcatctagaagatggtcgcatgtatgtttattgtcaagtcgcaatatggcatttgcaag

SEQ ID NO: 260455 - DNA, 540 bp, Cannabis indica
tctccaaatctcaggtttaacttccaattatatgcatattactaggtgtttttaatcattcatttttagaaatttgtattattattacaaaggagacccttatacatttttagaaaattttaataatttagaatattaaaatcaagatataaattaatagctttttataataattatgcttattttgatatttataaaaacgtgcaaattataattgaatccaacattataaaaattttttacttttagttataacaaaatttgtgactaaagatataaaagttatagttatttataaattatcattattgtgttatgattaaaaaatttgtagctaaaagtattagtcacaaaaattacgatttgtcaatgacattttacagttaaatattatgttttagttataagtaactttttgttgtgactaaaaattacaaaaaaaaatatatattttcactaaaagttatcactaaaactacaattcttttagtatgatttcagcatgttaagttatttatgaaatttcttaaaaatttgtgt

SEQ ID NO: 260456 - DNA, 1450 bp, Cannabis indica
aaccagatgcaacctccccctgttgagggcgaagatatatttgttgacattgcccttcagcatgaggggtggaatcgagccatgacaaataagtttatggccttaaaaaagaatgatatctgggtcttagttcctaggtctgaagcttacaatgtggttgggtgtaagtagatctttaaagagaaattcaatgtcgatggaagctttcaaaggtttaaagcttgtttggtagcaaaaggttttcatcaaagacttgcccttgactttggtgaaacctttagtcctgtggtaaagggtgttactgttcgggttgtgctaactttagatgtggcttatgattgagaggtcaggcaggtcgacattaacaatgcatttttaaatagagttcttaataaagatgtgtttatgtctcaacctcccggttttaaaatactcaacacccaaactatgtttataagttacaaaaatatatttatggcctaaaacaggtccctcaagcctgatatgaccaattaaaaacaacacttattcaatgtggttttgagaactcaagagctgacccctcattctttattttcaaacaagctaagtttgttataatagcactaatttatgtagatgatatagttgtgacaggtaataactcgggtgaactagacaaattcattaccaaattaaacaaaagtttctccttaaaagatctcatgccacttcattacttccttgatatagaggtcttcaaggataacacaggaatatatctctcacaaggtaaatacattactaagtcatgcaaaaagtgcaaatggagaatacaaaactgagtgtcactcccatgacaacagaaaagccattttcctttacagatggaaaactcctgactcaactaaccacatataaaaagtgtaatgagagctttacaatacctgtcacacaagacttgacattttgtttgttgtcaacaagctcaatcaatttctcaagaaaccaacaaatgttcattggggagcagctaagagaattctcaaatatcttaaagggaccttgtatcatggtattcatatacctcctagtgataacttaacacttattggtttttcagatgctaattgggcgtgttgtcttaatgatcgcaagtcagttgcaaagaaataaattgttgttgctagatcgagcacaaaatctaaatatagagtattagctcaacttgcagtagaactgtcttagttacaagaacttctcaatgaattaaagttcaatttctcatcaatgactgttatctgatgtgataacttaagtgcgagtgcactggcttcaaatccaatttaccataccagagtaaagtacatagaacttgatgtgcatcatgtgagagacaaagttatagagaagaaattcaagatcaaatatgtcccttctcatgatcaaattgtagattgtctcacaaagg

SEQ ID NO: 260457 - DNA, 511 bp, Cannabis indica
aaatttgcctttgatagaaccatttatgagtatagaaaaagagaccgattggatgcaattcatgatcttcattatccatctttagtcataacccaagcactccatcataaccgccaagaagtcccattccaccctatcataagccttggacatatataatttgatagccattttttttccattaccaaatcggcctttcctcatacaatggagactttcgaacccaagaatggcattgtcttggataattcttcctccaataaatgcactttggtttgaggagatcactgaattcatactttgtttcatgcgattcgctaaacatttggaaatcactttatagatcactgaacataagctgatgggcctgaattctgtcatacttgggggctattttaccttcggtattaagcagattagagtctcattgaagcttcggcagtcagcattgtcatttaacacctctaggcacgcttgagtgacttcttctccaacaacgtcccagtttttt

SEQ ID NO: 260458 - DNA, 2108 bp, Cannabis indica
aactaaaatgagagcaggctttcttttctttcttctgttttttttttctttcaaaacccacgtattaatattactattccaacttatgatgtgcaggtcttgaatttaacagagctcgagctaaaccgtgtggatattcgggttggattatccggtgcactttactttatggatgggtctcctcaagcagtgcggcagttgcgtaatcttgtgtcacaggtttctctcctcacctccacttatatttttcctttttgtcatggattcctttttactttatcatgtttgggggaaaacgaggtgtcgggcctgcactttatataaattatgtcatttttttgcttatggagatttagactgtttgtactattgttggttcttcttgtttcaggatccagtactgtgcagtgtgactgtcggtgtgtctcattttgagagatcagccctttgggttcaagtcttatactacccattctatggtagtggtgcttctggggattatgaaggtgactatgctgaagaagatccgcagatcatgagacaaaaaagaagtttaagaccagaattaggagaacccgtcatactgaggtgtcaaccatacaagattccattgactgagcttcttctgccccacaaaatctctcctgttgagtttttccgactctggcctagtttaccagctattgtagagtacactggtacatatacttatgaggggagtggttttaaagctactgctgctcaacaatatggtgcctcaccgtttctgagtgggcttaaatctctgtcatccaagccatttcatagagtttgttcacatatcattcggacagttgcaggatttcaggtaattatatttttcacttcaattttaaatcaaactctagttgtattttcacatcatcaaagctatcactgctacatagtttgagttgggcaaatggttttccggatgtagtgtttacctggtttaagtaatattagttagaattgaatctattcaattagagttttggctcccttgtagttacgtaacaaatcgttaggttcttaggttgttgccacctatgatggtttggtttgttagctaataatactttcgccaacgagctgtctccaacatttgatttacttaattttcgtacatgtacagctttgtttcgctgcaaaaacatggtacggaggctttttaggtttgatgatatttggagcgagtgaagtgagcaggaatgtggatcttggtgatgagacaacaaccatgatatgcaaattcgttgttcgagcttctgacgcatcaataacgaaggaaatcggatcagatctacaaggctggttagatgatctcaccgatgggggtgttgaatacatgcctgaggacgaagtgaaagaggcagctgccgagagacttaggatctcgatggagcaaatagcattgctaaaggcagcacgaccaaaggcgaaaattccgaagcctgatggtgatgaagatagcgaaaatgatgaagacgaggaagacgaatacaaaaagaaggaaaaagaaaaggaaaaggaaaagaagaaagagggcgaggaggagaagaaaaagggaccttcaacgatgtcgaagttaactgcagaggaagttgagcatctttctctccaaactgcggtgctccaggagtggcacatgctgtgtaaagatagggataccaaagtgaattaaaggccccttcaattcctagaagcacaagaggtttggacataatttttggtgttgtttgtattcttaattcttttttctattctatacggatgaagtagtaggtgttgaaaatctctgattttagtgagtatatttgttgtggtcttcattttttcaaatgggaattgccttgtatattttgtacggctagttattgatatttttcatgctgagagtgagtgagagttgtcgttatgttggtttgactcccaactaatttaatcgttaatgcatagttaccttacgttttcactttgttaatcgtattatttacacagacaactcaagacctaaaaataaaatccaaatacataaaaaagtcacactaccataagatttcactatgcgtttggttagaggtaatgaa

SEQ ID NO: 260459 - DNA, 536 bp, Cannabis indica
attctctcggataatcggtcttcgtataatcgagtactatagctgtaaatttcgttttttttttgttgtatgtatatagtgattatttatcctttgctctgtttttgtttacttgtaatattagtgttaaaaataatttttaaaagtgcactagtgttatcttatcaggaagataacatgttgatatccggtataaattaatatggggatgtctactagggaatgatatgctttgaaagatcaacatcaagctcaacatgggcacgagggcagtatatttgtttgtagtaagagcgatcttgactttagaataggggtagagtcttttgttcggtttgatgattgtttttttttttcagttctgagaatgaaagatagttcttttcagtttatgggagtgtgctgtgtttttagttttaagtttttaaaattatgtttttaaaagtgaaataactttttgttatttaaaaatttaatcgtgtttgggataaattttttaaaaactatttttacagtgttttttacttaaaaagtaa

SEQ ID NO: 260460 - DNA, 1656 bp, Cannabis indica
aacgatcacttactggttgtttgaaaaagtttcagggtttgcaaagggacttacggtgatggaactactggagttcagagagactaggcttgaagtcgaagggtgttatttgataaattgaagaagaaggtgagagacagtgagggcatgcacttttagagaagaaggtggttaacaagtgttcgagtgcaaaggtttggtgggcaggcgaaagagaaaggattctacataatatatacccaaaagaagataatcgttcaatcaatgaaaagagtagatcgaacagatgggaactaatgggaaaagaaacgatcagagcattaaacggtgaaatgatttgccttgaagttttaaactagccaaaataaaagcatacaaattttaaacgggaaaaatacgatcgtacccttgaggcatttaaaagtatttttaggggacaattaatacctatattttgagcatcaataaaaagctgacacatgtatcaaagctagaatataaaccttctcaaattacgcattattaaatgtacttaaatgactcatcttgggaaataaaattaatagaaatactcgaactcgctgccatatagacaatagcaagacatgagcaataactattgactgatgagatcagcaaggtaaacaagtccatctcgggataaatagaatacataatagaactgtttggaacgggtagataatgaagtttgcagctcattgacccacatacttgtgagtatgttcaaagaataaagacaacaacttcaacattcactcacctcactcttaacacgttgaagtaaccatcttgcttataccttactcaacagttaaggaaggctacgagatacacaccatgacacaacacttaaacattttttcacaaagatgtttaagaaagatattatttgaatgacgagaataattgagcacaatcagcataatcgtctatagataaagacaaagatcagttagacaattatttataattatctcatatgatcatatcctaagggaataactgtcaccctagacttctatagatagggacagaatctaagaaatagaggacaaccattctttgaaaaaatagattatattgtgattatttatcattaattcctgaaaaatagtattattgtattctatatacaatctctcaaatctgaataagatggacacgtggactatggagatttaacttcaaaaccacataaaaaacattcttattatttattgcctatataattaattctgcagtttatttattacagtaaaggctaattatttagttaattaaaatctgcattaacaccattgtatcaatctaaacaatcaatgattctctatgaatggtttacattgggggtgggcatcatccaatccaatccaattgaaacgaaccgatctaatctaatccaattacaaaaagttggatatccaattataattgtattggattggatgctaaaagttggattctaattggattggatcggttattggatgtcaatctcaaaatccaattaaaaaccgatccaaaccaattaaattttatataattaaaaaattatttatataataaaaatattgaaaaatataataaatatttattatatttttattagattttttttgtatgttgaatttgtaa

SEQ ID NO: 260461 - DNA, 3835 bp, Cannabis indica
ggttaatcccatctcaagataccaaacaaacattaatattaagtctttgagcagtaatattaactataagcggtactcttggtgtatcaatcaaacattgacaataaaaccgtgtcaaacaatagattaatctttggactaacgtattgtttacacaaaatatcttataattgtcacacaattatcgccacatgtatgtttgaaatttagcaaaatattcactcacatttgaattagtcaatatatgcatcaattacaaacacaaccatcttgatatttttaataaattaatctacacaaaagatgtcactttagcgacatattattttaattaatttattcaaaatattataaataaatcaatactaaaatttaaattaaattgttctaaatatatatatatattactataaccatacaatatataaatattatcaaatctataaaattaaattcagttaaaccatttagctcctcatatatatgtgattgtataatatagtataatattcctaagagagcaagaaactaacaccaatattaaatttcacatttttttaatttcaatacaatttacgaaagaattaatataagttattgaagccccaagccttaatgctaggggtctcattaatctgcctatccagggtgatatgctaacctgggataaccaccgatcaggggcgaaccatgttaaatctgccctcgataaaggtctcatcaatggtgattggatcaggctgttcccaagagctgtttagtgctcctcccagacaagcaattcatatcaccgtcctctgtgcctttttttcggtggtttggaagaaaagttcaaacggtattttaagtttgaagaaggttggactcgggatgaaaggagcaatttggtagttgattctgcctggaaatctgttaattatccttgggctctggccagggtttttaaaaaaattggggctacacgagtcgctctcatgcattggaatagagctcaatatggtaaaatcgactccataatctctgatctggaaaggagactaaacctcattcagagtttacctacgggatctagagagtgggctactaaaagggatatccgtcaatctctcaatgaggcccgggtgaggaaagagttatattggaagcaaagagctagggtatcttggctgaagaaaggtgataaatgcacagaattattctttctttcggcaactatgaaaggacaaaggaatgccatcgagagtatcttgaataaaaacaatctgtgggttactagtagagagttaatcggaaatgaatttatggaattcttcaaaggaattttcacaaggatggatagtggttataaccttaattgcaactacctaatcaaggatagaatctctgagggtgaccaagcggagcttattaggtgtcccgatgacgaggaaatgaagtgtaccctgttcaccatgggaaataacaaggccccaggtcctgatggtatgtctgtcctcttctttaaacactattggggatttgtggggaaggatttttgtgaagcagtctcggattttttttcgaacatgtactatgcataggggggtcaatgctacaaatattgtcctaattccaaaagttcaaaacccgaaaagacctaatcactacaggcctctctctctctgtaatgtggtctacaaggttatctctaagatcattgccaactgaattaaaccactcctacccactctaatctgtcctacccaatctgctttcgtgccaggaagaaatattcaggacaataatgtgatcgcccaagaaatcatccattcgttcaataagaaaaacggaaaagaaggcatgtttgcgatcaagattgaccttatgaaagcatatgacaggctgagttggagttttattggtcatgtgctttcttgtttcggggcgctgagtgatctaaggaggtggatttcccaatgtattacgaccaccaccctcagtgtttgcctaaatggtggcccttgtggtaagattaccccttcttgcgggcttcgtcaaggcgtctctctgtccccctatctcttcatttgggccgcagaaattttgtcaagactcttggaagaagcccaacaaaagaaaattatcaatggtattaggctcaataagggaggccttattatttctcatatcttctttgcagacgaccttattctagtggaaaaagctaagctggaagaagtcaaaggatactgggattgtctagaaaaattttgtacttggtcgggccagaaaatcaataaacttaagacgtcgattttcttcaccaacaacactcccaatagcatgaaacaaggaataaaggagctgggtattggttcgccagagggtaaggtcaaatatttagggctgcctttattcagatccaaacaaaaagatgcagattttaactttattctggataatctaacgtctaagttacaagggtggaaagctaagactctctctaaagcgggtcgggcgactctcataaagtcagtgggtctaactctacctgtgtatgctatgcaaacaactaagttttccaacctcctggttactaagattgacggcatggtgcgtggcttctggtgggggtcggagaagggtaatcatggtctgtacttaaaagcctgggacaaactctgcctccccaagtccttaggaggtctgggtttccgtaagaccagagaaatgaatcaggccttcccggcgaaatgggggtggaacctcctcatgggtaactaatccctttgttgtaagattctagaagcaaaatatctcaaaggaaagtcttttctcaactgtaatgcaaaagactataactcgtggttttggaagaatgtggtcaaatcgaaagacattattcgtcagggtgcttgtaaacaggtggtggacgaccaagacaccaacatatggaaagatccgtggatagctcacatgaaaggttttaccccacacccaagatgtcccactactcatggtgcgatcaaggtggttgagcttttgttagataatggtgagtggaatatccctaagctcaactgcttgtttgatctcgaaacgacttcggaaatcttgaaagggggcatagcgacaggccatggaaaggatagatggatttgaatgttggaaagcaatggtcgtttctcctgaaaatctgcttatagagcacaggctgttggtcgaacaactcattgtgaggtggtccccacaatgtggagaaaattatggaatagcaaaatcccgaagaggctcaaggttctgtggtggtgtatcctgtctaaagctctccccgttcgttcggtgattagaaaacggtttccaattggggatgatagctatcctctttgtggaactgagattgaaactctggaacacctgttcctttcctataatgtggctttccacttgtggcggtcctctccctggggtttctttcctatttgcgatactgggattaggatgtgggactggctaaaattcctatgggatctaaaaaaacaaaggcgttaacacagatgaggccttcctttatgcatcattaattattgactccatctggcggactcgcaatgaaaaagtacacaataattgtctcgttgatgtgtttaaatgtattgactctgttcgctcttcttttgcagatcactaagcatatttgctcccttgcattatctcacacccccccccccccaccaggattgggtgaagctgaattgtgatgtcagaatggagttggacagcatgtgtgcagctgtagtggcaaggaatcatgttggcaaggtgatctgggttattacatctaagctggtagttc

SEQ ID NO: 260462 - DNA, 803 bp, Cannabis indica
tagaattgacatggattaattattgaaaactcttattgaaaactcaatctagaaaagaacatgacgctatagcaaaccaattatcaccatattaacatatcatttaatgaaaaaacaaagaaacattgtttagagaacaaagtatcttgcgacaatcctcaatgactaccaggcagttagattcaaactccacctttggccaagactgatccttaatccaactaagagcctacttaattaaagacatttctttataaatgattcaatattttcaaacattttttgtgcaaaagaccacagtctaacatagtgtgcataatgtaaatcaaaaccaaagtactcaccagctaacttgaaagactaaggacacactacatccaataaaaacattattcaaaagccatctaaacacaacaattgcaagttccacaaaaatggggaaattaagccaaattacctgaaagaactcagtagctgcactaacattgccttctttaagctttgccattgctatttcgcgattacttattcttctcctaaaccattcaaatacacaacaatcaaaatcacataaacataaacacaatcaaaatcactgaagtggtttatattgacaacaacatacctatggcggtcttgctcagttgtagatttacaaggtacattaccaccatcaaaaacaaccactggagttatcttatgatgtcgaagtaaattgattctatgcataaagtaatcaatgtatctcaatttcttctcaccatctgagtttaaacacagctccatactacaagaatatgctg

SEQ ID NO: 260463 - DNA, 616 bp, Cannabis indica
tagaaaaccctaagtcttgttttcttgttcttggaagatcattaaccgaaatcaccatattaagatcatcactatttatctgtaggaatttttattcccaatttacctacacacagcaaagcacttaatcaaaaataccaaggtcaaattagacctttacccagtcaaacattcctttttgaccctacccaacgacatcccctttttgaattaaagctacaagtcgtttgatttaaatcagcaaccctaaaagcatttgacatatatatatatatatctttatcttcacaaaacattcaaacagatcagccttctctagccctagccgtgagcctttcttcactgttcttctttgaagaacatgaagaacaataaacacactacccagaaaaactcaaccagtaaaataacaccccaagccgtgatacacaacaatccagaactttatatcccctcaaacccgagcaccttcttcgttgttcttcactgaagaacacgaagaacaacagagaacaaaacccagaaatttatcccttcccaaaccgattaataaacccagaaatatacacaaacaatatatatagaaaatgcataaagtttaaaggaaagaatgcac

SEQ ID NO: 260464 - DNA, 510 bp, Cannabis indica
taatagaaccaaaatcctatgctcaagcttgtaacgaacaaatatggaacaaggcaatggacattaaaatagaagcactagaaactaatgaaacctggattgttgttcttctccccccatgacaacatgtcattagtaataaatgggtgtatagaatcaaatacaacctggatggctctaaagaacgtttcaaagttcgactagtagcaaaaggctacactcagcaacagggtgtcgattatttcaaaatatatgccccaatagctaaatttaatactctcaagttgttatttgcacttgcttccctcaaaaactggcatctccaccatatgaaatcaataatgccttttttcatggtgatctcaatgaagatgtctacatgaaattacctcaaggctacacacctaaaggacctgtcccaaaaaatgtagtttacaaactgcagaaaagtctttatggcttaaagtataccaagcttagcaccacattactacaacaaaatttcattca

SEQ ID NO: 260465 - DNA, 3754 bp, Cannabis indica
cgtacatcacgttttaaaaatgtatattataaaatttcttaaaataattcttaattttacgaatacaataatataaatattaattaaataaaaaaaaaaaactacgcagtgactacagttcacatgcacggcatatatgtcgtgcacgtagataaaatcacaaaatgcggcaagaaatacaacttttttagacggcacatgcacgatatttaacctatatacagtctcattggaattgctcttgagttgttaaacaattttatatagtagctagtttatatatgaaattaatataaaatataaaatatttaatattaaattacaacaatagtaattatataacaccaattaaatggtattatatcactactagcttttagcattttccagtctcaaaacaaagctttctcccctgattaattaatattggagtcctatatattactaaatttcaatatcaagatgtagtacaagacatcatatcttgacagtgccaatacctcagatatttttaaagcctacaaaatagaccatcccctcttgatgataatgaatatcgaccatgaacatatattattgacctacatatatatatttcttttaatttttttttatataaattatcactacttaggagtttgatctgatctcaatctcatcattggtttattactaggatctccatcttaattattgtacaatcgaatctacttgtgttgtccaacaaagacattgaattctatgtaactcgtgttctgaaaagacatttaactgattggtacagatagtactagctagagcacatcatttttccccggcttaatttttttttactgtgtaacacttaatatggacctgctcatccttatcttattaaatatatgatcaggccacccttatactcaatctgtatagtttacttttttttcttttctctttttaatgtaaacgatgtttaaaaaaatgaacaattaattatatagttcgatttttaaataatgaatattaatttatgtttataggactcttaatttaaagagtcttgttggccaaacttcagggagtcttctacttttcttgtatgacaaaacttctagctagggtagtaccaatttaattttacatttctataaatatatgcattttgtaacagaaagagagtataattattaattaagaattttgaagagaaagtgaaagtgaatgtatatttgaaaggtgtgtattggaatatgagtagaaagattggaaaactttgagtaaattaagtttttaattattagcaaaataataaatatgttttaatttatggttttcataattttactaaatcaagtcatttttattttttataaaagaaaaagaaatattgtacgttatccatgttttcgaaaggataacacgtggaattcttgagtaaagaatggcctattagggcctcgcaaggagtcccgctaggaaagcaggcccaacccacttggaagggcaggtcgaagcccatgcaaatggatgggtaccttcgagacatgactcatccagatcaggaaagacctcccgccttcacaaggagaagttatcaaagcccctccggatacacatttgggatacatccaaagaagacattctggaggtgcctcaaaaccttatatagtacaagatgatgtggcagcccttggataccagatcccacagaataaagggtttatccctatgtcagagcctaagagtgattgcaccaccaaaaggtagccacccttttgtccaatgacacaattttgatactatagtacataaaaccgacgcacgtaggacatttgttaaggaatgcgtggccccagatgtacgaatcgcctctgccccacgagctgggcttcagctagtgggcccctagtcatgtattcattgtatttacctcattaattagtgggccaattttcatgcaaaccctagagggtcacgaaaatatccagacccatattcctatatagcctataaatactactttataccctcatacaaatggttaaaaaatcatcatagaaaacaatcactactacaaaatagtttttcccgacgtttttaaatagtcatttaaagtattcctgtcggtttctataatcgtcgcctatacgactgttgcaaaatgggcaaaataggcgacagttaaaaaccgttgctaatgtggacttctcgatggtttaaaaccgtcgactataccctgttaatgggcaaaatgggcttgctgcatgcccaaatgataataagtcaatagctggctaagagatgttatctgggtgaatttttgatttcttggcaatctaagcagcaaattgtggtggcaagatcgagtacagaatcagaatatataaccttagcttaattagacgctgagattgcattgttgcaagctttactaagagagatgaaacttacaatgattgttgttcgtatgatttggggtaataactaaagtacgagtgctttggtagctaatccagactaccatcctcggacttagcatatagaattggctgtccattttgtgagaaacaaagttcttgctaaagaactagagattggacacgtgccttccgatgaccatattgttgatagcttgacaaagagtcttacttcaactcgttgtcattttctcatcatcatcaaatttaacgtgacagagttaccattgagtttgaggggtgtggtgttagagaaaattcaaaattgacacacgcagaggagagttcggactgaatgaagcaaaccaatgtatattcactttacctaatttcagttcttcagtatggaatttgtaatgattggtttaatacatgtattgttgttattggtccttgatcatttgctttgcactgatattctcaatatataatgaaaggccactcagtctattgagctaataagttttcttctcactaaaatatcttaaaatcaaacttaactggtaatctttttatatgtggctcttataaaatctgtaacaaatacgaatatggtcatcaaaatgcagatgtactgggccatgatgagttagctaggttatcgtgggccatggcctagtatctaagatcggagctggaaatggtcactaccaatagtaccatgcatgggtcgtattattattattattattattatagggtataattatttcttaatttttgtgtccacacaccatgttgtcccacgaccaggttcgtgtactactactgtttaatttccagtatccatgataaggttagaaaataatttcacggattcacagggattctataccacatttcaaaacatgaaaatgagacaaataaagaaaataatatgaaaaagtgatatataaacccttgaagcgtcaaatcagtatgtacgtaccgcgtttttatttatttcctaatattatacaattatttaatttcatctagattaatcataatatagtgaatccacattagttactacttaattaatttatgtaattgtcacgcttttaaatgtaacctttcatttgattttatacattcaaatacatactttttctatgcaaatagtatagtttatgaccaatacatgaatttaaagtgagggagagtgtaatttttttttaaaggagagtagtaaacgtaaattaatatttaaaaaataaaaaaaaaacatttctggtgagatttgaattctaacatctatcatatcgtgtctataaatatattttttattataaatatatgtcgtaactaattaa

SEQ ID NO: 260466 - DNA, 650 bp, Cannabis indica
gtaacaaaacaacatctaaagacggaattgcacacattatcaccacctattttgctgatttattttctgctactactgttaatcaacaagcaattactcaagtggtagatacaattccagcaagtattacatctgaaatgaatgcgttccttactgccccttttactgtagcagaagttgagatagctttgaaaacgatgagcccgacaaaagccccggtagtgatggtatgtccgctatgttctaccaaaactattgggatattgtgggaacttcagttactgaagttgtgttgagtgtgctgaaccatgcacaagatatggaacaaattaatcaagctatcatcactcttgttcctaaaattaattctcctcaagtaatggctgattttcgtcctattagcctttgcaacgttgtctacaagcttatttctaagatgattgtactgagatttaaagaagctcttcctcttgtgatttcggagacacaaagtgcattcctctctaatcggttgattactgacaatattctagtggcttttgagcttgttcacaatattcaacatcgaaaacgtggagctaagtgtttttcagcgcttaaattggatatgagcaaggcgtttgatcgagttgagtggtcttttttgtggg

SEQ ID NO: 260467 - DNA, 1413 bp, Cannabis indica
tttgtaggaaaatttagataaaattttaatttgatgagaagaaaaaaatattgtgaagtaatagggatacaattggttgaatgaagaaaaaaaaagtaaacataataaattttataagatgggataaaaattaaaggcattaacttaaaaaaaatatgtagtataattttctcaaaagaattatgtgaaaaaagttcaaatccgtaaaaatatttaaaaaactgtaaacccatcattttgtaatgtttttttttgctaatattgggtatttattataaatattcccaaaaaaaattaaaaaaatagaagagaatctcatttgctgggcatttttatatttttctttaacattcaattatttttgggataagctggtttttttttattatatccactaattaaaacaagtaaaataaaaagagtatacaatgtaattttcatattattttcagtgtacttgcttcagttatatagaaaatactagattgatatattttagaattgaatctaatatattttagaattgaaaatctaatacaaaaagaaaaagggagtgagagtgtgagagtgagagtgagagagtgtgagagtgtgagagtgagagtgagagactgtctggtgtggggagagtctggtgcgattgagtggtcttgttctgtgtgtgtttttttcccccatctgcgcctccgtgtgtgtgttctttagtgcttctcttcattcgtgtttttattccttttgttctgtaagtgattgagtggggtatctcgtggggtgttgtgttgtgattgttaggttcaaagctgtgttgtgtagtgctttttgttgttgttcgttggtggtaggtagtttgtcctttgctgtcgttatggacttagttaatgccaccaaccttgcattcaatggtcaaggtaggtgcctttctcgggtggaatccactatttcattgactccctctgcctcgtcccagcagttgttatcctctttatgcctagtggggaaagttattgcccctatgactgttaatgaggacactgttagagagtttgtggtcaaaacttggaagttccaggtgaacgtggttgctctgtttaagactactaatatccctaacaattttgagcttggctttgctcgagtggaagaccgagcctgggcctgtgacaatggaccgtggtgtgtccggggctactccttcattctcaaagcttggtgccctaagaaatctctctcgggttcctttgactcaactagaatatggatacaagttcataacctcccaagggactatttctctgttgaaaatggaaagcttttggggggtaaagcaggcaaagtaatcaaggtggagttcgatgaaggtaatccggctttatggagtaagtttcttaagatattgatagagctgaatgtgaa

SEQ ID NO: 260468 - DNA, 547 bp, Cannabis indica
agtgcgagagcttggcggttcttatacatgttcgggccacactagaccaaacaggttggggtctaccagtgattgtatttcgtaacctctgattttgtcgcttaggtcggcacatgaagtaaactataatattttgtgaaaaggtttatgggatcccgaaacttgtatcttttggtttattgtaaagttaaaaattattacaagttatattttcattccattgttaataaagtttaaattttcccgtgcttatctttcaaataatcccggattagagggattagggtttcaatatcggttgtcatagcatgcctatttgttagggtgttacaatttggtatcagggcgccaaggttttttaacttcctgtagaccggctggacatgtacaatcattgtcaaaggcaagctcggctcgtggtgcagtaagcgttgagagtaaatgcttaactgcttatgtgattatttatttaccgctttccattttaggcagtatgtgagcatttattatatttatgtgacatggaagccatgtttagtatattaat

SEQ ID NO: 260469 - DNA, 507 bp, Cannabis indica
cattaatatgatgttgaatagatcactatactattcttgggctaccaaccggtgaggatggttgatagaggatggtgctaagcttacagagaaaaagatatcaaaagtgtatacctgtaaccagataaattacctaataagttttgtattagtcattgttccttattgtctatattttgatataaaactttcattacttgcactacattattaattttaattagaactggactccgccttatgttctgaacattatttattttaaaattacacgtaaaaaaatcttaaaataaaactaatatttacgtgccgaagcacgtaacttctacctagtatccagaaaaataccaaaaagtctacctagaaaatatctatctaaataattcatatactaattacttattttctaattaaaacaatatattttagtctatttattttatataaatcattaataaaaaattacttaatttaagttgatctaaaattaattaatgaattaatttt

SEQ ID NO: 260470 - DNA, 1008 bp, Cannabis indica
atgagtgctcacacatgtaacaattccctgagacttgtgatcaagaaagcccaatgggattcgatatggcaagtgaccaatgaagatatttcttcagtcactcggggggaaaataagacatagtatacgggatctatgcacggtacatgatcattcataaaaattatggtacgcgagagtcatgtatgtcacatacactttggtatacgggagccaggtgttaccctggtatacaggagccaggggctgcagtgatattcgagaattttgctcaccagagttaagcactactatgatataagcgcttggggtctcataagaatacaaaaaccaagtttatcaatctaaagtgcaagtgtcagttttcctcctcaaatcagaaaaattaaaaagaaaagagaagcatcattaattatagaaatctctctagaagcacaacactgcatccacaagagatttcctaattgattaaacaaaaccctctaggagtgggatgctaccccaactgttgtattcttccactggctaaactcttcctaagtatgggatgcagtacctagcatgagtttaatccaatatttttttattcgttttcctccattggaggtttttttaacaaggttttatgagtcaaaatcatcaaaccaggttcttcaaaaacttgtgattttgtccctatacaaaagatctagcaggtttttctgcactactcattgacagtgagtcatctcacttatgatcataaaatgagctcatgcttgtgccccaagcacacaagcaataacccactacacctcaatagtgatctatctcactcacagcaaataccttcaacatacaaccttcaaagtttttcacgccaatcactaagagatgaatgctgggaggaaaaagaagccaagctcaaacaatgtcaacaaaatttaaacatcatgacaaaaaaggtgatggttgataatcaagcatcaccaactgttctaatcaaaacagaccctgaaaagagtgggt

SEQ ID NO: 260471 - DNA, 1393 bp, Cannabis indica
gattttagactttttttttttttaaaaaaaatgggtaaaatgggaagttcatgtaattaatggactaaatttgtacaaattaaggaagggtataaattttgatatgacttgtattattaaggcaaaaaattgaaatttccctaatataattgtataagtagactttataaagattgtattcgacttgggagttatgagctaatttcagttttaaggctgctatgtaactcgcgtgaatatcttttataaactaaagtgtagtttttcagttctttcttcatctcttattcaattccacaaaatccatgttaatcaataattgttattttttatgattttgaataaaaattattgggatgacccataattcaataatcattaatacaaaacatacataagtgaaagtgatacctccatgaaatggacaaagcttaataataagcagacttcttattctttgcaaacttcatagcaaagattatgtagaccaaaaaattgaagaagctaagagctgccaaaacccaaaagaaataatcaagatgaccttcatttagattatctggtatccatccaaccttgccaccctttgttgagaagtaagttaccatagtaacaataaaagagttcaaatagaatcctaatgaaatatttagaagcagtaatgcactgcttaaactcctcataccaattggtgactcttcataaaacaactctattagtccaattgaagtgaaaacctttccaattcccaccaaaacatattgaggtatttgccataatatactaagtggtacacttattttttggtgaactaatccaagttctttcccaaggtaaagtctataaatttctacaaccgcggctgcagacatgcttagaaccataatgaagtgtccgatcccaattcgttgcaactcggtgaagcctttttcattgcctgtaaatctcttaacaaagggtacaattaccctatcatatattggaataaccaaaagaataacaactacatcaaaagttgcaagtgaaactggtggaattgttaatgaaccaatagttgtgtccattaccatcccttgttctagcatcattgtagaaacttgagctgcatcaacaaagaagattattccacatgcccatattggtaacaacccaataaagctcttcaattcttcaacttgatttacactacaaagcctccatggattgaaggacttcccactagtactaatctcatcaccagaagacatcacagctgccttatcaagaaatctgtgtcaaattgagattaattattagaaacaataaatggggagcacaaacaaaagataggaaatttaacaataattacttcaatgtattagtgcgtttgagtttaatgcagcttccttccata

SEQ ID NO: 260472 - DNA, 548 bp, Cannabis indica
aagagggaatcaataagaatgaatcattgaggtttaaagccaggctagtggctaagggttttacttaggtggaaggtataaaatacacataaatcttctcacctgtggtaaagtacaacacaataaggttgatgttgtctttagctactcaaatagagtttgaggttgaataacttgatattaagagtgcttttctaaatgaattcttggacagacaagtctacatgaagcaatcacttgggtttcaagtggaagggaaaggagttgaattagtgtgaaagcttaacagatccctttatggtttgaaatagcccccaaggcaatggaataagagatttgatatgtatatgcatcaaatcaggttcaaatgatctgcatactatcactgcttatatttcaagaatctggagcaatctacagctatgttcttattgctctatatggatgatatgctcatcatgagcaaagataaatctgtgatcaaaagtatcaaaaccaagcttaaaaaagaatttgagatgaaagagcttggaccagttcaaaagata

SEQ ID NO: 260473 - DNA, 792 bp, Cannabis indica
atttgttgttgttgttgtaaaaaaataatccctttttcaatgtcagtattgcttctcttcaatgaagcattattctgaatagcatctgggcataccctacactcccattccaccttgcccttttcttcatttcagcatctttgttttctttttcttgtggtagcacaataaatcagcataaagaaactttatcttcaatggtggatattagactatgaaatagaccatataagacatgaacattaatgatgataagtctatcatatatacttacaaacatgtttgttttgtttgattcttgagtcggtggattattttggtacaaagtcatttgtgtcacaatttgcaatctaaaacttgaaaatctcttgcttgaatactaaccacaaaaagagagagagttatattatgtcaatttagacaaaattatattatggcaaacccgtttccacgaaaacattgaagaagtttaacaaaatcgataaatttgtgttgaaactaatattatatagaagatgcatttactcctctaattgttaatttgtatacatcttatcatagaccttctcaggttagacagtaaaagtcagagaaaaacaatcactcattattaagaccaaagaatcgggtgaaaaagaagtagaaaaacttccatttggccatattttaaaacaaagtacttaattttattcatttccattaacataagaatgaataatgatattatgaatctcattttgaataggcatgaatataacctatcctaatggagaacgaatcaaatcagatggt

SEQ ID NO: 260474 - DNA, 630 bp, Cannabis indica
ctttcttgaaggtcatgccacatttctgtagcaagatcaaaatacatgatactttgtcctatttcaggagatacagagttcatgagccaagacattaccatgttattacaacgattccaagagttaagaagggggttaccagctgcaggtcgaggaagagtgccgtcaataaaagcggatttgttcttggctgtgaacgccatagttatagcccttttccaagactggtagttggcgccattgagaatggtagagacaagaactagccctggatgatcggctgtgctgagaaaaaatggactggtaacatcttcatgagctaatcgatcttgaagggatcgacgaacaggttgggagatgttgtcattgggaggagctggagaagagtggacaggttcaaggatttcttcctcattctgcgatctggatctggatctggaagggggaattcgttgagaagccatgggaatgctggcgagaggtgcggaagtcgaatcgggatgagaagccgattgggtttgctcatttgcaggtggaggaacaccatcctgggagcgtgtggaaggcctcgccatggaaggatggtcaaggtggtctgctgataccatatgagaaataaagaactcaaag

SEQ ID NO: 260475 - DNA, 1782 bp, Cannabis indica
ttattttttaaaattgaaaatagtttttaaaaactaataggggtttgtttggcaaaaatttttaaaaacaattttttaaaaattgagttttaaaaaactaaaaaacagaaaacatcaaaatgttcttcctatgttattttcaaaaattatttttttctctaacatattatattttatatttttgttcgcatactcgcatcgtagactcagaaccatactcgaatccaaaactgaatgggttcatgtcatacgaatctggatgggttcatatcatggtatgatgttaaaatattattttttttagtaagaaaaaatttaaaaatagttttaaaaaatttgtacaaaacaccattaaatttttaaaatgataaaaaattgttttttattctcacttttaaaaatacaattttaaaaactgaaaattaaaaagatatccaaacagacatagttctatacattatttatttatttatttaccagcagtctgattttttgaaatacgtaaaaatcagtacataaacgtcggaatggcctaatagaaaaaatagttgcaattgtggcttctgttggagttgtattcgggatgatcgttgcttactgcatttacaggagaaatttcttaagaggtaatgctgttgtaactttttctgtttcttagcaaggcatgcttattaattattatctacaaacctttgatttcaaagaaatttaataattgatgcattaattagcattttccttgctcaaaaaaaaaaaaaattagcattttccgatatctttggcttatctcttactatatatgtgtcacgagaagacgagtcaaatcaacagatatgtgtttaaaagatgaaatattgtaatgttgtgaaagtgatgcaatcgtatatgacaaaaagcacgtgtgtcttgctaaaaaaattcatctacatatatagctcatttttaactctccattcacaggtactggaaaaacatatctcaacaaggagagaacagaagaagcggagcttccactttttgaccttgctattatatctcacgcaactaatgatttctcaaacgcaaacaagcttggacaagggggtttcggagcagttttcaaggtaaactttgataggcctaagacttatatcttttgtctattaacaaataattaaatgaaatatatagtctcttatctacattgggtgagttgtcttactcttttaattttattggtccaattataatctgaggtgacctatgtcttataaagaccaatatgcttataatataaatagagatggagcaactcttttagattagcttcgaattagataagagtagactctttgtgtagagaccaatcctctcaaaaaattgagaatttggagagacgagcctctcgaaagcttgatattgtaatttttttcaatgtttttttagaattaacattattgaggaattaatcaatggtgttaattttgggaaatatctcatacaactctatcattattctatcaaattggtgcggtgaggtacggatatggtgcctaagaaacaagcaaagaccgattattcttccattgtttcaaaggaacattttcaagttctgaaatttgcaattttttgaatttgttgagaatcatagggttccatctcaaaactaattggcaatgagtggagtatcccatatttttatatacggatcaattctctaccatttattctatgtgggacaatatccacaatagaatcaaatgatcccttcatgaatcactacaaaagatgatgcgacaactt

SEQ ID NO: 260476 - DNA, 1393 bp, Cannabis indica
tcccccaagcctcaatgaattcagattcttcatcatattcatatatgcaatttccaaaatcagtagcaaattcacgaaatctttcaaaaacactactcaagtgttttgctgcattcggatacatatgccaaatgcataaacgatgataagtttctgaccattgagactttattgcttttgccattgctgcattttgatcagtaagaattgtttttggttttttccctgacattgcttctatatataaaaggatcaaataaccacataaatgtttcactagtttcatcatataacaatgcagctccaaatatagtagtttgtttatgatgatttaccccaacgaacatagcgaaaggccgacaatcatgattttttcggtacgttgtgtcaaagctaacaacatcaccgaagttgtaatatgattctttcattcgtgcatctgcccaaaatatattgttaacatatcatctgtgtctgcttgcataaaaaaaattagaatcttttgaagatattcaagaacaccacctgtatctcttgcgtgtatttgaattgttcttttggtgcgtatataatttcgacaatcatccaaaataaattcaagattttcatgtccaccaactcgcctcatcattagttccatactagctttaggagcgaatcctgaattttctgccaattcaatttcagatgcttgagcaagagttattcttctttgtgacctatccaaatggctcttactaggacttgctgttatatgtatatgctctggattgaactcaacaacttgatattttcgtgaaggatgaaattttatcttcatcctcgctaaacacccaaaccttgtttcaacacgatgagatttcacataatcatatcgtttgtcttttttacaaaagccttcacacgagcaacaaaaaattctatctttcacttttctatcttcattatctttgtgtcatttgctttttcgtatgctaaagccaactttataagcataagtattataaaatgtgtaagcttgttcttcagtgtcaaattctttattaatctttcgtatttcttcattaggaatgttgcaatgaatctgttttaaagataaaaaaaaaaaaaaaaaaaaaaataaaagagagagacatgtacaagtataaatgtaactgaatagttggtattataattatcactattgaattgcagtaaatatcattataaacaaagaaaaataagaaaataattatatatattgtgagtggacataagctttatttgttccgctaggggtactaagaaatcaagaaagaatttttttttatcttacagagaaatatttgtatataaagtagaactaaagctacttgacaaatactataagtataaatttattcttcaattttaa

SEQ ID NO: 260477 - DNA, 3944 bp, Cannabis indica
tttatacatctcaagatactattaaaaaaatacagtacacaatcagctcaatctaaatcaaatcaaatcaaatcaaatgtgtatgtaccttctgcggagaaggaacatgagcctgttgggagaactcatccgttggaaagactagatcgttttcctcagtagctaatgcctcaccgagaataacagcattcaaacgagggatttttccggcgccggaaggcatagtggccatggaatcaacatgacgaagatgattaattgttctgatatcgttattgttacgactatgagaaggcgaagaagccatggtttcccaatccctcctcacaacaagtctcctctcgttattattattattattacagtaatttatataattattgttgatgaaatttgattttaggattactgaagaagaagaagaagaagctagttcagccctggccgcctgtgccaccagagtttgacctttgaccaatttatagggaagaagatgaggtaattccaatgccattattcatcaactttcttaatattaatattaaattaattatctaaccaaaaaataatattaattataattaattaattaatattctcctaattattcgctactgttcatgtgacttatctctaccactctaactttttttattctctaatctacagagattccatagatacaaacactcatatcttcatctcaaactctgcaaaaatcaacattaattaattaattaaaataaacaaatcagcatcattcaaagttgactctggcgacaaaaactaagaattaaatatcaaccaaccatatctttttttcttcttcaatacagattagataagataatatattaacattcattcattcattgattcatgtcttcaacttcaagtagttgaaagttgaagtaagcttaaattcataatcgtaaatgaaatcaacaattcaataagatcaaatttcaagacttacttacggtatgcatggaagggaaaatggtagagcttaattttggctatggtgttttttttttttctatcaaaaaagtttgtgtttgtttttgtggtgagaccagttttcagtgtcttcttcactttttatattaggattttggaaagagagaagatatttttttacttttgagaagaaggtttggatttggacgtttcttttcattgggttgtgttttttttttttatctattttaagtaaatataatttgtattatgtgtactaggtggaataataaggcatttaatgtgggtattaattaattaattaattggtatttttgtaaatgaaaaaagttactgacttgaaaaggaaaaagtgaagtgtaacgtagataaatagataaaataaaagggtgagtgagtcagcataaccatgcttaaacaaggaaggaagctgtagactgtagtatcagcaaacagagcagttagttacatggattcttggccaaatctggacagttttcatttgtatatatcttattgcatttaaatgttaataatattatcttatttagaatttttgtgtattcttattttgaactaatagagtgattagaattacttatgaatttacgatgtatatattcgtaattagcacaaaacccttctcgaaccaaaatagtttatcgtctaaccgaatagtatgttttgtcaaattatgggctgctaaattcttaacgcgaactacatgagacaaaattgctctcagaatttaaacaataaaattataacgtcttcaaacagtacactcagtacattgaattacccttcttattattaacagagtcaccagaactagcaaatatgaaaaaataaaatattgcaacactgaaaatagaattatattataataacaatcttcaaaatgaatattaatacataaacttagagtttaacacacaacttgttgtatcactacactagccaaagatatgtcctttaattagtaacaacttactaacacctcactaattcaaaaaactgaaaatcaaaattcaataaattacatttaaaattaaatttgtcagtaaaatctctgtaattaaaagctctgtacaaaataataataaataaaactattataaatcagaaatagtctactgcagaaaaaataaaatagaaaatttcacctgttatgtatctataaaaaactataaaaagacaaagaacatttgaaattaaatcagataaatctgtagatgtagaataaaaagcacttgaaacccatagagcatcagtatcaatataggtgattgccaactgcagcaccttaaattatgaaaaagagctttagcctctattccatagttatcgaaaccaatttttgtttaaaaataactatggaatctcatgtatagtgacacttcattattatcattaaagtggtaatgtttatacagttttgataaatatttgaaaaataagccctctgtgcttgtgtgtgtttttttattcctaatttgtcaactggtgcatacatatatatatatgaattgggtcactcactctagattttcacagctaagtctttgtataactcaccaaaaatttaccaaaacaaaacaaagaacaacaagaactaatggactcagatttcatctgcaatatagcataatgaccattagtagagcttggtgaaagtactgtgtttcggtttttcatcgaatggctttcgataatctttctacttcatccaacataccagcacggctatacagttcaatcatacaagaatagtgttccgaaatgggagaaataccataatgttgggtcatatattcaaagtacttacaaccttgagtgagatcattagcttgaacacaagcacacaacacacctacaaatgtaatagcatctggctttggtgcaccattcatcgtctccattgttgtaaaaagagcaagagcttcttccccaaacccgtacacgcctaagctagtgatcatcgcgttccaagtagctaagctcttctttcgcattttatcaaacactttctttgcatcctctaagctaccacatttgctgtacatgtcaatcaaagctgtaccaagataaacttctaatgtaaacccattcttgagagcaaaatcatgaacccatttacccaaattcaagctccccaattcggtacaagctttcaacaaactcaccaatgtgaattcattaggcataacattttcagattgcattcttctaaagagttgaaatgcttgctctggttgttgattcttagcataaccatcaatcattgctgtccaagacacaacatttttggttggcatttgctcgaaaatcgctctagcggtatctaactcgccagaatcgaccaacccactaaccatagtagtccaagaaacaacatttctaacagacattttatcaaacactttgcaggcacaaaatttatgaccaaaactaaagtaaaaatcaatcaaattattctgcagaaacacatcattagagaaaccagtcttgatagctaacccgtggacaactcgggcaaggcgaaaataggaagaagaaacacaagctctgataacaaaaggaaaggtgaatttatcaggaggaaaacctcttgatatcattagcttaaagagtaacaaagcttggtgggaatagccattagaattaaaagttctaataacaaaattccaagtaatggtgagaggtttaggaatgtgattataaaacaaagtagaagcataatcaatttggttaaaggaagaagaacaacagaggtgaatcaatttggtaatgaggagttggtcattggaaagaccagctttgataatggtggcatggatttgtttaaggtgtttgaaattggtgcagttttggattaaagtgaaagcttgttgtgaatttcttatggggttaagaccaaggtgttgttgttgttgatgatgatgatgatgatgatgagtgtg

SEQ ID NO: 260478 - DNA, 1702 bp, Cannabis indica
tgattgacaaattataaatcaagactcatgaactagacaacctatgaatcaaaggaaattgactagccatagaaggatttggtccgagatgtacaagatagagctcgtaaaaggggctaagtaccatacaggggtatacaatgggctcaagcattagagagagtttttgaaaaaattagataccggtcaaagtcttataataaaacaaatgaccgaacagagttcctagacagtatttatgtactggacagagttcttagacaagatctaagtactggatagtgttcctaaacaagatctaagagctagatagggtctctaacacaccaaaggtaccaatccaagactcaatattgttcatcaaaaagtcatatattatgcatcctaaagctatcaagcagattataatgtaaaaagactactctaaaacatgagaatcaaatagtttctaaaaactttaaaaagcttaaaactcatcaatgacagattcaaagaaagagagaaatgtcgaagaagagaatatgaggaaagtaaaaggcatgcatgggagagagaagatcaaaagtttaaacatggaaaaatatgcagctgtcacacgtttttccataattaattaataataaagtcattatttttcataaaagcacatcatccgaagagtccaatacttagccatacaaggttgcacagtaaaggcttcaagagccaagacaagagctaaaaagtccatatccgtacaaacgttcgaagaggaacttttgaggtgaggctcgtataagagatctcctgctagagagatccacaaacaggatgactagggtttaccaacaggtagaaaatggataaataacttgtccaggtcccttgaacaggtggccaaactttatcctgcttgaggacggacaagtcttgcctaatagaccatacaacaggaatggacaattcctaacaccaaggaatgacggtaggagggaggacaatcctaaacagaggactgtgatgactggacagggcctggttaggtagtacgacaatttcctcccccagaatgtccaagaacaggtggaaccgaggcctaggggatttctattttcaacaggataagtcctagcctgaatgaaaatacactaaggcaacgattcaagaagggagaacatgcatgactatattctgccccaaaacaatgaccttagaccgatggatccacccaatccaagtgattagtacgatctacccccaacctatccaccaaccagcctggccaggtgtggagatctggtgagcttggccggtcaaggatttgtagccggccaaggagggttgtccgaataagaagctgctagaataggtccatctatgcaaatacagttagatcagctcgaagacatgatcaaaggcctgtccgacccaaagctatcagacctagaactgtacaaatcaaggggaccacccttcttagcatatacattgcccctactaaagtttaaaatgctagcttggaagatgtacaccagaaaagaagatcccctgacacacttggatagaatcaatgtggtgtatatcccctaattttccccaacatgcccaatatgataataaattgaatgcaaagtttcataatttgcaattaatgaaaatattttcaaaaataaatattttagacaataagttacttgatttggtaaataaatataataattgc

SEQ ID NO: 260479 - DNA, 459 bp, Cannabis indica
gcttcacatttatctgaccatacaaaccgctgaatctttttagtaagctcggttaagggtgttgagattttataaaatccttccacaaagcgacgataataaccggctagacccaagaagcttctaatttctgtcactgtttttggtcatggccaatccttgaaggattctatctttcatggatccaccttgatcccatccttgctaacaatatgccctagaaaggacacctgagatagccaaaattcatatttcatgaatttggcataaagcttgtgttcccgaagtcgttgcagaaccattcgtagatgtatctgttgggttttatgccctaaataaaactcatttcatataatcagatttacttattaataaagaccagatttaacattttatgttgcatggttcacatgatttatttcatgattataggtatataatgtatgaattcttttaagt

SEQ ID NO: 260480 - DNA, 550 bp, Cannabis indica
gagagtggagtgagttattagacataaaatgaggcttaaacttagggtttttaggcttaagttaaggatttttatataggagagcttaaacactagtttacaaataaaataagtagacatttacatattaaattaattaaatacaaaagactaaaatgccctttcaacatagatcttttttatttactttgttgggttggtacggcccaattcccagtctagcttgtagtcaacgtgtaaggctattcactagaatcctaataggtctaatcctagtcggccaggcacctgcaacaagttggctgctcgaccttgtgctatccagacatagggtcgtccaggggtagccagccagcccccttgagtgtcaggacccctgttggctaaggtgttgaatcgacctccttatttgtgagttgtagtgccacgtagtgctaatgttgtccacgtaagcatggcacgtcaggtgggcaaaaatggagataacaataagatagtgttgttgggttttatgccctaaataaaactctttacaatttgattagttatc

SEQ ID NO: 260481 - DNA, 547 bp, Cannabis indica
aagcacacgaatttttcaaaaaaaaaaataaatgaaatttccaaaccatgctattgacctactttcaaattgactcaaaacaataaaaagtcaaaacttaatgacttaaaatttcaaaatcaaaagtctaaaaataaaaatttaagttcacccccaaacttaattgacacactgtccccaatgtgacattaaagaaagagaaaagagaacttacttgagcgccacatcagtatggcggcagtggtggtggttgcaaaattcaacttggatacagtccacctcttgcatccataagggcccttgcaccaaatgaagagaactgtcctccaacgttgctaatttcaaagctatccataagatgagattcaccttgacaattcccacatattattcttctcatacatcgtcaaaaagttcaaaaacattctttggaccttcgtttcttcttgttggcagttacttctcgactatcatttacaacttccactcgacaacaggaaggaatttcaattgcgtaaagacattgaaagtctcttcttccttttgt

SEQ ID NO: 260482 - DNA, 1901 bp, Cannabis indica
tctttgactatttggattagatcaatggatgattcgtagtgtttatatatcttggtacatatagagtgttctatgtaattaagagtgtaattcttaatctatagtggtgcaagaaagaattaataagttacagaatttacttggtaaattttagatctacttattggaagcttgattatataggcctacggtccccacactaattgagataatattgcttgcagaatcagttaattggttttaattaatcaattataattctaaaattagactatctcttatttatgaatttttactaagaaatgacttaattgtgaagaaaagagattttgagatttatttattaattaagagattttgttaaggtctaattaataaataagttaaatgacaattttatttgataattaattataattattaaataaatagtttcgacatttataggattgaaatgaaaaaatatggcattattgaaagaaaggataaatggttgaaataaagtggcaaaattataactggtgagacccattaagtggtcggccactagagtgtaattttgcctattattttattcttttttagttcatataattaaatcctaaaccctagttgaaatactataaaagttgctctcattctcatccagttcaaccttcaaccaaactaaacctacttttctaactctgtcagacaactagtagatgagagactcctttcatagtgatttgaaaccttcttgctgttcttcatctattttcaagcctttagtgatagagtacccacacatagcaagtcaagtactcaatcatagtgcgaaagacggtgattaactaaatcgaaggagagaagaagatccagggtcagatcttgttattactctacgacaaaaagaaacaagggttagagatttgagttgaaggagtcatattattccgctgccatcaatgtatggttctctaaactttatatgtgtttatttcatcgtattagagaactcatatttaggatttaatcaaaatacatgttagtaaatctagatcctgataaataagttccaacaagaattacccaaacatttattataaatttttcatttatatgtttctttactaaaaaaaataataaataaataaaaaaaatgagggttcctataaatattttaaattgtcaatgggagtttattgttcctaaattcttagccattagaggttgtctttttctctagccaggcccgctagcccaccctgggcttttgcgtggcttagtcgggctctgtggtttttctactgcgattagattattgcaattatgtttttgctattgtgaatagtcttgtctctgcaatatggttttgagtatcttttgtttaggttacggtggttagtcttgtctcaatgacatagttttgttttgttttgtttcgttgttggttcgtcatttttgttcttcggcagctcaccatcaaatcagtgttaatggttgggaataacaacttttatgtgactggaggaattattagtggtgtatttacatatcttgcacaatagttgagtgctcatgctaagggtttgaatgaacctactgcaactattactactattttgtcttctgagcagtggtggaaactaaatataggtgttcttaaaattaactgtgatgctgaatctttttcgcttgattttattttagtttctttcgtcaaatgatttgggaatcagatgtctaattggttggctcatttttctaattctattcttaatcgtatttccaatgaaggagaagtcctatattaaattgtaggggtgttcaataaaatttacaaactgcccaaactaaaccgaataaatcgacaaaaaatacaacccaaaataatacaatgaaaattcagaccaccccat

SEQ ID NO: 260483 - DNA, 690 bp, Cannabis indica
ctttgtactcatctcagaattgtgactcactgctggtgtagcattgccaacaactgatttaccatcaagttaatagagtccattgttcaaaagacctttgattacaatctttgaacctctgaaaactctgagtattccatcttcaatcttgactgcatatccattcttgtcaaacattccaatggataatagatttctcttcaaatctcgcacatatcttacatgttgtacaattatggaaacaccatcatgcatttgcatttctactgagccaattcccttaacttcacatgctctgttattaccaagtaacacagtacctctatgttcttctaaaaaagaactcaatagttctttgttgggtgtcatgtgaaaagcatcctgaatacaagatccaggcccttcttccttatagtaatagcattgttttcctgctgcagctttagatttaaacctatcatttttatctttgttattattgtaagagttcttgtatcccttgtaatctttcttcttaaattttccttttgcaatgaataatccatccccactattatctgctcgatcatccttcttctgaatttcttttgaacacaatgcagccttgacttctgtcattgtcaaggtgtcctctccattgaagatggtatctacaaagtattcatacatctttggtaatgaactaagtag

SEQ ID NO: 260484 - DNA, 558 bp, Cannabis indica
taaaggaagcaaataacgtaaatgtgacgcagtaaaaccagtttttttaaaataacaaaagaaaaaataaaacttaaaccccaattacgtaaaataacataccaacaattaaacacgaaaatcaattatttagtacaaccaactaacaaattaaacatacataagaagataaattaaaacaaattaatatatttcaaaaaaaaaattcatacaaaaaatgaatccttaaaatttagatcatatttacttttttcttgtgaataaccttcctaagaattttaattttaattagataaagtttcttctctaagtcaaaacttgaatccttagcaacatatgttagacaatttatatgtataaactgaaatatatgtatgtgtatataaaatgcggaataaataaatatatacactatataacttaaggatcgaaatacctccagccattgattcttgagcttcaaacccacataagttttgatctgcaaaggaaactggttgatgtgggtaatcgggcttcctcgctctctcaactctctttagatggattttgctgtta

SEQ ID NO: 260485 - DNA, 1059 bp, Cannabis indica
tccgctttcactgatttaggggcgaacaccttctggaggaggatccccaggtgatttaccctcatcaccagggttctcccagcaagggtattacgaccctcccactttcttatcaggccaccacgcacctgcggccttctacccaccttctaacgctaatacacaggatcattacttaaatcagacttttgccttcaatgagggtggttcaggcatggcacctccatttttgccagagagcccgtcctaggagcagtcttgcacctaccattatatgggtgcggtccaacaatgtatgtcccaatatttgagggaagattgggaaggcatccgaggggttcccccactaggtctctacgaaaaactcttttgttcctccgtttgggtctggtttcttccttccattcttttgggtgttgttatgttgatgtctctaaatttctatcttcttttttttttacctgtttccttgcttgacagccctttttacagatggtcgcagcgtctcaggagatgctttcacaaggtggagcccctggattttcttccagctactagatactcttgggtgagttgacatcaaccaaagaggagagcgactggctatctaccctgttgacctctctcgagtcctgcatccaggaatttgagggtgagcttgtagcggcaagggaggcttagaagaaagcagttaaggcccttgctgtttatggtgattataaagtaacattcaacctgtcacttgaggaagtcacgagggagcaggatgatgtacgcacacgcttgctgcaactgctgacgagggggacgaaacaacacattgacttaaaagtgctcgcaaaaataagaggagactcgagtgtcaagtttgcaaacttcaatctcacatctgggaattgaaggaagagctgagggtggctagccaaagtttagcggagcatgatagtgtcgtagtggactaggccctttataacgtgtggcgtgccaatcccaataccgacttcagcttttttggtcttgcagctattcagctagctgttgaatggaaggcttacttcg

SEQ ID NO: 260486 - DNA, 1594 bp, Cannabis indica
tccaataactatccaaatgtttcagatcagtaatgatccgtcggatcggatcactgacccgatctgaatgaatggatctttttgccatgcctagttttatataggggctttataatttagagtagttatggagattctgacttcgtagaattgttctttggtagctatgagactaatttctatgtttacttgttgaatttgatgtgattttgagttagaaatcgagtttggaaaatttttaaagcttagtctgaatgttaaaggcgtttttcatttaagggcttgattttaatttctattaagtaaggatgataatatttatggtatatatgcgtcctgtgaagttttgagtgatttggataagttttggtagtatttcattgagtacaaaaatttggattttcgagtttcaccgtttttagaaattcctaagagacgagaaactgtatttttattataacttttactcgagtgtccatttttgacgttctatataccatttcaaagcttgcaaggagctctaaaaatagtatatgttttagagccaaaatataagttatagttagtgtatttttaccgagggctttggtagaaaatcctagattatcttatgtgaatattaagcagtgttttaggataaacacttattggtttaccgtttttgtgacataggactgagatcatcgaggattgttctccacttgggttggccaatatatatgaacctagattaaaggtaagaaaattatattgtacttcatagtactttcattgtaatataattaagatttttatgaattaataatgttgagatatagttaatattgctatataatgaaaagaatgattggtaaagtattgataatgtgatgatattatgcaagtgatatatggactcacctgattaggtgatgcaatatacctgacaacgtactaagcgtaggtacaggattcagtaacatatgatgagtaccgagtgtatgtacgggctcatttgattaggtgatgcgatatacttggcgacgtaccagcgtaggtacgggcgttagtgacatatgttgagtatcgagcataggtacgggctcacctaattaggtgatgcaatatacctgacgatgtactgggcataggtacgagtgttagtgacataggatgagtaccgggcgtaggtacgagctcgtttgatttgacgatgtaatatattggtgccaggttatggcataggctcacctgattaggtgatgcaattatatgatatatgggtgcaggttttggcacaggctcacctgattaggtgatgtagttatgcgatacaagagtgctaggctatggcacagacttgcctgattaggcaatgcaatgcaggattatcagattaaagcgtcgacttgcctgattaggcaacgcaatgttaggaagatggttactttacgaggtaacatatatataatttatatgattaaatgaatatgaattttgttatgtgtataatagttttgtattaccaaatagttgtataataatatttattcgcggcagatgatagtagtaattaggatttaatcttatgaacaatgtgtgatggtttgattct

SEQ ID NO: 260487 - DNA, 943 bp, Cannabis indica
ctctctctctctctctcttcagaccacaaaaggaaactcataaaccatatcaccagcgtaactccaacgaccacttttcgaccatcgtccaaccccacaagccagaccatttaaaaccccatgcgtcggtaacctcaaccccaatgcggcaccgcccctttcgccgttgttagcccaggatcgcaagtcaaagtttggaggttcaaactttgaacggatttttcggccacctcctgtgtctgtttgacgatcgagtcatcttcaccactagactcagctcgtcgaggagaacaatatacactaagccattttgtctaactcactactttttttggtgacatttttgtagctctgcccctttttgatgacttttcggcgatatcgtgtaccgttttgataaatgtttagtatgggtgtgatctacttgttgcgatagtcgttttgatatatactatccctattttcggtgatgttttcggtacactaatttcttttgccaccgatagttaatgtgcaccgcttatgtgaggttttagaacttcaaattttaaatatagtcatattatatgtcgttggactcgattttgaatgtagaatgcaatggtgataattatttagccatttaatggtataagtgagagtgatatttaagattgaagctcgggatttgagagcttaggattgttttttgaacaaagtttaacgaattgggagaggtagggactcaacttgattattggacttgattttatatatgttgaataacattagacatattccctttttatttttttgaaaatccggtagcataacggctgtattttggttaaacccaaaaattataacctgcataaatatttgcacaaaaatatatttggagtgctccagaacaatttaaaaaaatatgcagcttaaatttttaatttttcaaacaatttgtaaa

SEQ ID NO: 260488 - DNA, 1595 bp, Cannabis indica
aagtctagggtgaaagttattcccttgggatatgatcattcgtaactgctcataaaacgtggacattccccatgttttatttttgtgcacatgagataattataaataaccgcctaattgctctttgtctttatctatagacagttatgctgactgcgctcaattgttatcgtcatttgagtgatatctttctcaaacatctttgtagaaaaatgtttaagtgttgtgttatggttcatctcgcagccttcctcaactattgagtgaggcataagcgagatggttacttcaacgcgttaagagcgaggtgagtgaatgttgaagttgttgtctttattttctgaatatactcacgagtatgtgggtcaatgagctacaaactcataatctactcgttccaaatagttctattatgtattttgtttatcccaagatggacatgtttacctcgtcggtctcattagttaatagttattactcacatctcgctattgtctatatagcagcaagttcggtatttttattaactatatttcccgaggtgagccatttaagtgcatttaataatgcataacttgagctggttcatattcttgatttgatacacatgtcagctttttattgctacttgaactataggtataacaattgctcattcaaaagtactttttaaagtaaaaagaaatttttaaatgcctcaagggtatgattatatttttcccatttaaaatttgcatgcttttaatttagcggttcaagactttaagccaaatcatttcaccatttaatgctctgacttttcctttctcatttagttccaatccattcgatatactctttttgtgatcaaagggttatcgtcttttgggtataaatttcaagtttcctttctctgtcgccattactgcccacgaaacctttggattcgaaaattcttaaccgccttcttcaatgaaattaattgcatgccctcactgtctctcaccttctttcttcaaatgtcatcagactgcacccctcgagttcagaatcttcaagacccaatctctctacactcggagtttccatcccgaagttcttcaaaatccagaataagtcatgttatccagaataattcaaaatccaaaaggagagctgcgagatgggttcgttgatgactaacagaaaaggagagggaaagctgtgagatagagagaaagagagagattaggattcgaagaagaataagaaagaaaaaatattattttttaaattttataaattgtttttcataatttttatttaaattatatatatattttttaatcaatattacgtgaaccagtaaaaacgtattacgtgtacataagtgtacttgtaggtagtccatcgtggccgttaactaagatttttagatgaaaaggataaatagctaacgaaaaaaggatttgggtagttttgccaagaaaattagacattataccctttgtatcttgtcttcttttatttttactttttttttttttaaattactttactaattttatccctgtcacttcaatatactttatgtgacctctcttatacgaaggcattttttggtacagtacatataa

SEQ ID NO: 260489 - DNA, 814 bp, Cannabis indica
tgatgatgattgcttgaagtcttctctcttgctcttcaatacgttttctaatctcaaaattacttgtttctatctctccagatgttcatcaatacgatttacatccttctttatataggccaacaaagatagatcaatcctcttagaattaggattttaaaaaaatgagaagtgttgcgctatagtgcccataccctgcgctatagcacctaagaaaaaaatcctgaaatacccacgtgctgaaattatcttttttccaataaaaaatccctttttttccaagcaggcgctatagcacctagcaccaatttttttttacttcaaccttgcttagtaaatcatgcataacttttgcgttcagactccaaatgatatgatttaacatgttttcgaaagctctgaacgaactctatcattttgggtttcataagctcttcgagaaaatgatgaaatcattgtcaaaaatgggctcaaagatctcattctatcacaaaatgtctcttcaggacaaacatacacacttggagaaaatacatcaaatctatacaacaataaatactaatccatctaataattgaataagaagaagtgtacaaatgtgcactcatcacatccccaaaattaaactattgcttgtcctcaagcaatgaaaaaaataaaactaaaaagaaacaaaaacagacaagtcaattattggatgataaaagaagaaacttagaccgaaggtaatttatctcaaaatacaaactctttttccattattcaatatgcacttcaaacaaaggactagaattttaacccatttaaatttaac

SEQ ID NO: 260490 - DNA, 754 bp, Cannabis indica
  modified_base (680)..(680): a, c, t, g, unknown or other
aattttaggtataatattaaaagaaacccccgtagaaaaatgtacgtcactgaccatatagttaaacttcttaaattacactttccataattaaactcattattgtattttacaaaaaaagaaaaaagaggtgtgacaggtatacatatgaaataataattattacttcacttaatttttttttaacatattgtaaattgaataatattaagagatttttacactatttttaattttttaattcaggcgatttttttttttaaaatattgtgtgttaagttttcatggttgttccacggttattttttaattgttttaatgatgttttaattgttttattttaatattttacaattattttatataaaaaataatatttttataaaagcttttgtgacaataacattgtaaacctaattcaatatttttataaaaactactaatattaattatttgaaagcagcataagatagtaagaacatacgctcctcttacctagatagtaaagatggcaagtgatgatgaagaatcatgattcatgaatgagattattaaaaccgagtacttcataaatatgatcatatgtgcacaatacacacaaaaagaggcaattttaattgcttaccaacaaagaatctcatacttttgtttgagtgtagtgtagtgcaagccaaaaaacngaaaaaaaaaaaaaactagtattagtttgcatataaaatccaatgatttcttatctagtctcacacccaaaact

SEQ ID NO: 260491 - DNA, 533 bp, Cannabis indica
tacaaaaatttttacttttagtcacaaatttgtgactaaaagtaaaaaagttgtgactaattataaaacaacattcttatgttgtgactaaaaatatgtggctaaaggtattagtcacaaaaattacaatttattctgactaaatatgtttagtcacaatacttattgtgataaaaactaaattagtgacaacttgtaactaaatgctatattttagtcacaagtaatattttgttgtgactaaaagtcatattcaatcataaaaaatttatattgttactaaaagattgtatctaaaagtagctattttttgtagtgataataattatctatgaattggggataaaccaataaaaaataaaagatatccaataaagaatataaaagagatgcaaagaaattagggttccatttaattataaagttaaagtaaataaatacaattaataagaaagttttatataactaactaacatagattaaaaaaaaaaagactaaaataatcttatttccctcaaactcacgacgttgct

SEQ ID NO: 260492 - DNA, 1275 bp, Cannabis indica
aagggagcttacaagctgggaaggtacaacgagaatatggagcttgttctcctaccaagatactagaatggagagcacctttgcaaatactattactaacgagcttacagaacattactttgcagtagcagttttactaactcaacattagagtgtaaaagagctagtactgacgatctttttggcatggcctcctaccgttcttcaacggtggcctctgttgtgcaagtcaagcaggggtagccatttgatatctagaagaaaatatgtattatatgtaagcttgtagattcaatttatgtaagttgcacaacaataaagaccaaataatgaataaaaaaatgtttatgttcaaattattgtgtctaaaccacttactaccaagattaacttcttaaagttatccttttccagttccacatgcgtacaacatgtagcaccctaagaaaattcccaagcaaggtctatgaaacttggtaaatttcaagtgactaagagaccgtaagtctacgtgctcacttgagggcacccacactgtacaatgcatcgaattagcataaagaacttatgtagagaaattttaatgcttagaaaataagctactaaacctgcttctaagtcaggtgcagacatacttcagcttggcataaagaaaagtaaattcgaatacttacatgtcaaggccataagaagatatctaggattaaagactgcctagtcggtcacaaaatcgatgataatatgcaacatggctaaaaaatagtaatgttaaaaaacagagtgtctataggccaagagtacaaacatgaaagccctagggctgaaaataagtagtgttcaaagataaaaggcccataggccatacaaaagatgaaaacaatgtgtatactataaaaccataaatctaaaatactaataagctgaaactacatgtgtgcaggtgcaggtggggctgaattgaaagctgcaaagtctgaatcactagagtgtgggtcggccatagcctccataggttggtcagccacctagtcaaggccctggccgaccacctcctcagcaggtgggtcggccattgctcatcaaattgctctgaagaagatccctctggctagacggtggtctggttcgcttccaatctgctttcgaatagcgctcttccttaggccagtgtgcagatctttaggaaaaaagcatcccccaattatgaaatatcagtgttagggttgcatagcttgaacttataaatgagttacgaagataagccaatgtactcat

SEQ ID NO: 260493 - DNA, 3297 bp, Cannabis indica
aagaacatctcaccatgcatgccatcaagaacatatcaacatgcatgccttaagactatctcggcatgcatgccatgaagagaatctttctattcatgccttaagaccatcttagtatgcatgccatggacaacatctcggtaatgctcatgacaatgagcatctcagccgtgagtccttacatcccttaataatgcaataaacacttagtaaattttttaaagataaaaccattggatgtaaaatcaaaaggacaaggtgagcatgtggtcaagtacatgtcatgtcagtgtacggtcacgtcacttgtgagacctgaaatgagtcgataattgtgagaggaggacttcccgtacgagtagtggaggtacctcgcctgcacgccttgacatcctaacaaagggtacgctgcaaccactacctctacatgctatgaaaacctaacgcctaacagccattacttgacacatgaccacctcctgcaccctgtcacctctaagagtatgacctctaacctatccccttgggaccattagggtatcaatctgtaacaccgaacacctaaaaaagtattactaatgaaaatggaacattgacatcacacgatcatcaagtaagaagttagatttatactttcaattaaagagcacatcctagatgccctccatttgtagtgttgaatgtattagaaagtggagagtcatgatatttttccttgagaatttgtgaaagaggatgtcatgagcaacctcatgtttgtaacaggatgtaacccaagttctcaataatattaatgaagtatcaaatttcaattgttctacatactcgtagcaactgtagcaaataggcaatgactcaagtgtccgttagtatcaatactatcaaacacttggggacatcacaccatatatcaacaagaaatatgtatataaagtgacaacggtaaaactcttaggaacacaaggattagctaaccttgcggtctaaaagatagcactaaagcaacctcggaaaaaaaagaaaaaaaaaggcaaacaaaaagatagaataagtgtagagcaataatagttgtctagccaaaaatattcttgaaagacacatgcaaaaaatgagaaggaagcttctcaacacatataaaactcctaaagcacgcaaggagacaaaaaaaaagtaaaaaaatgttgagaaggtttaaagaaccaacatctccttaaatccaaaataactaaaaagaaagagaagtttcaaagaaacaacgtctcccttgatttcgaaaagtcaaaagaggttaaggaatgttaacatataaatactcccttgcataacaaaattactacaattttcatcataaagtgaaacaaaaagaaaaataaaaacaaaaatcaatacagtcatccaatttaaagaaacaaggggatagaggggtcatactaacaagccctaaagattctagaatagaaatctcacacgagatggaacagagctactattcgcctgcatcaagatttctagatgcttgacgatgcatagtctcctgcttcctctttttttcttcatattctaccttgaaggactcaatcatgtaataggaaaataaacaaaaaaatgctaaaattagcatggagattttttatctacacaccatataggatgcgtttgatattgtcttattcttagtccttactgtcccgctacaaggcaacaatatactttttaagcttggaaatttgggctttaagcagtcgttttttctccaacgccctagtctccttgtgtttagcctagtcttgaagctcaatggattattaaagttacttgattaaatcctcaattctaggctcaagctctttgactttggcttagaggcaatcctgattgacagtcatgttggtcaagtcttgtaaaaccttttggcgatgagagaggccaacttgatcgaaagtgtcagcatcatgtgtgtactggataaggatagacgcctgaaacatacaaaaaaactttgaaattaagatatcattcataggaaggtataaagaaaaaaaaaccaattctaacaaagaaacactaacccaactaatacatttgaggactggctcacatcggtcctcatctgaaaactggtggaggcatgatcactcttgcgaggtgtatgttcccaagaaacaatcatgcctgctagaaaattaggtcatttgggactgggatcatgctagttcatcagggccataggcaggatggggaaagccgaagagacattaggggttgaaaggatcaaaggaaacattggatgcatattccattcctcccaaaccaacttcatcctaaaagtgaccctcttggctcttagaatgatcccttttgacatgggcacactccccttggccttgcacttcaacgccatccctcaggttatcgtgggtggcttgctatagctcctcctcatggtgaacctcctcccctactagaggaagaataggagaggtcaaaggagataagtcctatagcgcaaccatcaaggaatgtcgaaggtatttttattggacaaccctagatgggctgcaacctccttgcacttacattggtaattctgaaacaactttcctgcttgggacatcaccttcttgagattgagggattttgtcactgttggtatgcctacaacatgctttgagataacaggtgtatgagatgtgctccctctcatttctgtgggatgacctcaactcaagcccgcaacattggagaccgcttcacataaaaattcagtgatcgtagcaagggtcatcgctcctcctccttcaaggtgttatcccttagaagaatttctagaagttgggtcagttactgggtcataggatgggtcatcacccagggcatccacatttgggaaagcaaagagagtagactcaggtagggtaacagcggtcaaacccgacctcaccaagtaagtcagtgtagggagattcatgcacgtcctccttccatatggaagatcgtagaatctctatatggcagttagaaagttgttactgagggtaggattccccttggtcacggaagagaaacatatgtgagactatgtcatagttattaaaacaaactaggaatatctagattagaataaacataccgaaagcattaaacttaaagtgaatgttgccaagcatcttttaaataatacaactaagcttaatctaaccataccaggattaagatccataaacctatgatcaaccagtgatattgacttagaaagatataacggtacgtttatgacatcttatccaagatcaatat

SEQ ID NO: 260494 - DNA, 4814 bp, Cannabis indica
gctattttatgaacaaccctagtattaaagtacttactcctttccttttttaaaaaaaaagtacttactacttttaaaacataatattttataattagttagtaattttttatataatttttattaaattaaaataattgatattaaattacactaataataatattatatttcacaagagtatcagacactataaataacatttatcataaaatatgagtgctaacctttttaatatatatatatatttttttaaaaggagctttaatactttttaagctatgattttttctaatatattaactaaatataatacgttgaaactctatttatatttcatcagtcttcaacccatttatatatgttcatatatgttacagacttacagttgtgatcaacatccttttttcttttttactctttgcctagaggaagaggaaaagaaaagaatagaatatccacctttcttgagaagcaaacatttttattttccttttccctcttgcttttgaaagattctaaatcttggtcttgggtaaaaatttcctttttctttctttgtttcttcttttctttcaagccaaatgaactgcctttaattggtaaattttcaataaatggctcaaagtgagaggattatacccttatttgaatgtaattctttcacgtgtcaaattctttaggctaaatcaatcttaaaaaaaggctgaagcaaatatgatgatgaagtgttatagaaatgtgaggttcatctcttattcatgtattgaatgggtagtctttaatcgatatactgtttattaaataaataaataaaaaaaaaattgaagatcagaagatcactaaagaaccatctcaacccaaacaaatcaatacaaatagtcaaatacaatcaattggagctaacaaacatcaaaaaaattaataaaatccagagagatagaacaaaatatgagactaaactaaacataaattgaaccctgaacctgtgtctccgataccaacgttgccaagctccatcgcttgttgtgaagcaactttgatgcatcacgcaactcctcacccacaactactatcgcacaactctggtaccacctaactccatcgtcgatgatcacacgatgtcgctccctctatatttcttacactgtctcacaaatttttgtcaaactctctaactttttaatctctctccatctcatttttattttattttaatttaagtttctttatttcattttgtttaactgtggttttatgttttgtttaaaagattagattagtgcagggtggcaaacaacagcagccttcacaacatctacacaatcttcaaaacatgacaaaaattcattatctctcatgatttaaactccctatcagccatcaattcaaattctttcttgggaaaagattgcacaaactgaacacacagttatcaacaactaaaattacaatctataaaattgttgtctgtgatctcaacaggctgctaaaactgcttggctcggtatcaaaaatttctgagaagcttcaactgctccaactcttataccgtataagatagaacttcaaaagctgttatacaagaatagagtgaatctgtaagcagccatatttaatctaattctattgttaccctctacaggtcactatttccagcctttgcattgtttgatccagtgataaaatcacctaaaaaaaattaatatatgtaaatagcgagctacaaaagccaaaaaaatagcaaatgttacaccctacctgtagcttcgtggtgagcttcacaaaacaaggaaggagtgccctgcccatctgttactgtggtgctgtgaacgaaaaatcctaatgatggtacttctgtccttttagaatggtccatgacctgaagttgaagtcaaacacaaaaatcatgtattgatttaagtaattaaatgaagagaaaatgaagaaagcatgataaaaccgtttgtttctggatagtaagttgtaacagctgaaaggatgcaatactattctgcttcttccttaagatgatacattcttctagccattcaccaaagatgtaaagtaatttaaatactcagcccaaccgtacatgaaacatgtttttaccctagccttatgaattaataagcagcatttaacaataatctgctagctttaggtaggtaacaaactctcatctctcttccccttataattccaagattcaagtctgacatcatgttttcaagataagcagatgccacaaaccctcttggaaaggtcatttatttttgcaaagagatgatcagttgttcatgacttcatgctaactgacaatagttgtttaagaataatgtcccatttttcatactaggagccaccaacaaaaaaatggcatacataaaaagtatcatcaatctctaacaaacataccacaaataccaagtaggcaagtaaacaccgttggagagctcaattttgaaaggagatgaaagtttgtacctataaagctgctccacaagaacaagtaaagcaatctgatgattaaagaccatggatgataactttatacataagttggcacgttccctcaatcgttgaccatggccataaggtccaccaatgcaaaaagataatcccgaagctccctacaaagtgtattaaataataataataataatttttaatattataatgaccacacaagtttcagcatgcagtaaacaaatatccatggctttataatttggtactctgacatttagtcagaagtatctaatttttatagtaatttttaaatttagaagctagttgccataatagctagatggaaattatcaagtcaatctttgatcctgttggttcaaaacaaactccaagatattagcttcatagatgcaaagccacagtttataccttaacagcttaaatgaatacagtacaccaccactatcaagatataaatatgccatcccatcatgataaccaatgaggtagccattgtgaaagtcagatagatgttacatggttatctcaacgatagaaatgcaagctgttaccagacacaacaaagaaagaacaagaggaaccaagcatttcaagtaattgatatattttgacaaggacaaaaatgaagctgtttcttttattatcatgaaagaaaaggagatagtatttagaatgataatagttcgtactgtattccctgcatctcccaataagtctgccatctcctcggaccccaaatctcggccacgctcatctaacagcacaacctacacacgcacgtataacaatataggatgtgtagcaacaagatgtagttcttcttcaatatatagcaactatctatccatgaaaccaaacgacagataaaagcccacacattaaatgtggagcaaagcactaatgacgacagtgccacacacattactgtattagttgtattgttaagatgatgtcccattgcaattctcattagctaaatagctttaaattaattgtttggtgattaatgaagtttccaatcagcaagatgtttaaagtaaccaacaagttgcaattcttccttaatacatagtttaaattaaagtagattcaactatctatccatgaaaaaacaaacgacagatatctgcacacacatgtttttattaattgcagtacaaagcaccatgatgatagtgccacacacatttttgtattagttgtaattcaaagatgatgtacccatagcaattctcagtagctaaatatctcaatttggtgaataaagtaagtttatacccaatcattaggcctgataagattcataacagcattgtcttcatcctcaacctgaaccttccaatcactacaaagcacaacatttataacgacatcaattctaacctatacaaacacgcatatatatagatacatggttaaacattatttagggccaccctggtccaaagttgattgacgcataatccaatctaacgtagactaaattcacagagagttttcaaagctatttacacgaattccagtcctttgccatacttatacatactgagtttaaagaagaagcttaataaaaatctaaactttaaaatatcatttaacagcaatatcagtatattctgaacatttcaatcataaattaccgtgaatttttaggatttgatcgtatctgaacttcattgacagtgcaataaagcttgatcttttcaaaatactcatcaaaaaccagttgtgctccttgtgatctctttttgccaacccataatatccgtataggaagtgcccgctgcccaaaaaacataaaaaaatcctcgtaaaattaccaagattgggaaaatacgaaacagaaagaagggaatagcttacaactgactggcctacgtacttgcaccgtttgcctgaaaagtttgaacaatatatatcaagttcgaagattttaacagagtaaagattggtacattgcaagccataattcagtttttctttttctagggttctgagtgtgtaagaacctgaagaagaggagggagaagtatctgaacataatatgcgaaagctgggagcgagagaggtagccatttcagataataatggcgtttcaattttgtgcccctgctatgcgagcggaaatttgaggatattgttatttatagggggagtttatttgcagaaaaattacataaaaaataaaataacatatataaaataagggcttttatataagagaaaattacgctccacaacgtaattattaaattatttgtataattactgctgctaattttattgataaaatgtggtatgttaaactcctatgctcatta

SEQ ID NO: 260495 - DNA, 797 bp, Cannabis indica
gagggctcaaatttgactgaaagactagagagaacttaagctgtcaattttgagtccatcactgtctatttacaggaatccttctaggtttaggtttaatttatttggtattaaaaaattgataaataaataataaaaagaagcttaagtggccggccataagatgtggggccaccacttgcaattttgctatttttcaactatttatcctattctttcacaaatgccatattttccaatttaaccacttaaatatcaaaaatatttatttaataattgaaattaattatcaaataaaatttttatttaatataattattaattagacttaataaagtttcttaactaacaaacaaaccctaaaacctattttcttcacacttaagccctagcttagtgaaaattcataaataaggcatagtctaaatttagaattatatttgattaattaaaatcaattaactgactcttacaagcagtattatttcaacctgtatggagaccatgggcctatataaccgagcttctaataagctgatctagaatttattaagtaaatttcgtaacttattaattcctccttgcaccaatatagatttggaattgcactctcaattatatagaacactctatatgttccacaatataggcacgatatgaaaagttaaccatcgttctaatctcaataatcaaagatgatctatagatgatttacaataagtagggataaatttaccatttcacccctcaatgtattttatccttaaaatatttagcttcctataaatgatatttca

SEQ ID NO: 260496 - DNA, 623 bp, Cannabis indica
gcggtaatcaagcgttgctttaactctaggaaacttttctcacaccgatcagtccaaaaaaattctggttctttcgggtcagctccgttaagggtaaaacaatctttgagaaaccctcaacgaaccgacgataataaccagccaaacccagaaaacttctgacctctgtagctgacttcggtgctggccaatcccgaacatcttcaattttggccggatccaccatgatcccatctttatccactatgtgccccagaaatgagacacgggataaccagaattcacactttttgaacttagcataaagcttgtgatcccgtaacctttgcaaaaccgctctgagatgcaactcatgctcttcttctgtctcagagtacaccaagatgtcatcaataaacacaatcacgaacctatccagataatctttaaacactcggttcatcaaatccatgaatgccgccggggcattagtgagtccaaaagacatcaccagaaattcatagtgtccataccgagtacggaacgcggttttcgggatatcttcctctcgaattctcagctgatgatagcctgagcgaagatcgatcttggaaaagaccattttccccttcagttgatcaaac

SEQ ID NO: 260497 - DNA, 539 bp, Cannabis indica
accatcgggtctatataaccgagctttcaataagtagatctagaattcaccaagtaaattctccaacttatcaattccgccttgcgtcacgatatagatacactatgattatccattgttacaatcctaatagtcaaaagatcatctatagatgatctacactgaatagggacattgccgttctacccttcaatgtattttatccttaaaacgctagctacctataaagaatacttcagcaaactagtataaatactgaaataaggcctcaatcatttatctctactcaactaagctcgaaagaaatcatcgtttcacttctaaatacttatagaagttatagattccatatctatgatcaacgctcccactcaattgaactactatgtctttaatttgtatgtcacgagaagatccaattagttgactttaacgaataaattgaagaacataaataatacaactaagctgaacctaaccatattaggattatgatccataggcctaagattaaccattgatattgacttagaaagata

SEQ ID NO: 260498 - DNA, 631 bp, Cannabis indica
cagctgagatatctacttctggtgattttcttagtgacttttctaatgactttgtccggcgacagtgacttttccggtgacactaacttttttggtgactttttcggcaccaataatttttccgacaaaacttattattaatttacaaatatgaaatttctatcttcttttacaaaaatatggtattaaaaagtccatataaatgtaaaaaaaataaataaaaaaaaaaaactcataaccccatggtattatttatttatgctataaaaaaataaatttttataatttttctatatatatagtgtaatttttactaaaaaaaacttgtaatttgtaatttaataaaggttaattaggtaatttacacagtgaaagcttacaaatattctcacttttataaaagttataaaagttatagataccctaatatttatgtggttgttctttttttttttttttgtagaaacggttgtcttttattcttataaaattaagaaataaataaatttctaatttcatcttgtatatatacaatcacaactcatcatattccaagcacacctctataatttccaaatagtttatattctctcaaataattaccttttttttttcaaaatgggctgtgaaa

SEQ ID NO: 260499 - DNA, 750 bp, Cannabis indica
ccacaaggtcagagcatctctctttaatttttcactctggaaactagagcttaaacacttagcctctttttttgtaattctcgtgagaaataaaaactcgaagtagacgtagctccaataccatcgtgacatggagagtgaactgctataaattttatgtatctctctaaattatttatttaaactattaatcatctcgccaatctagcgagatgatgttggtcactttttagcatcaatactaagattgtgaaaattgatgcctatctggtagttttaagagaaaggggctcagttcacgtcatcaagtcaactccacacaagtgtaaagttgacttgggaggaaaatgttaacccaaaaactttccctggtcacttggatatcaatgtttgacacatggcaagaaagatgacatcacgaagttgagtatacttgagtcatagcaagtcgacctaggaagggtccctagccttgcgcccaggttgactttaggaactccaggatggatgtttagacatcaaaaatttgtttctaactcactaccttttagtattttatacaatgaagacatggagcaatcaattccaggccttgagagctaaaattacactaacctccaccctgaaagtcaacctcggcatctaaagtttcaccagtgtccaagttgaaatcctaacaagggcttcagtttccagggccttcttagtgaaaatgggtcaaaattttcattgggacatcaactagacata

SEQ ID NO: 260500 - DNA, 1427 bp, Cannabis indica
cccagcaagatgaaaaaaccagcccaagagaactttctctctccaatcaaaggttaattcctttttcctttgattacttcggcccactaagcgaaaagcagcccaattaaatgcaaccctaatattcttatgtataaaagataatgatcttttctaaccctaacactcaacctacggcagccattattctttcaaaagaattcaaattctttcaaacctttttctctctatctctctaacggcagaagctaaagaaaaacctagggttagggtttgtataattctttcttctcttttctttctcttcaacacaaatggcagctagggctttctagggttagggattatttctcttcttcttctctttgcagccgcacttagggttagggttcttcaatattatatttttcttcaagcttcttcttttctctactaatggcagcaactaaatggtaaggttttctatcttttcttcttctacttacatcaactaaaaattctatgggatcttctaatatttttctttttctttcttgctacaggttctaaggttggggttctccaaaatgtttcttttcttctttgcagcctctacccgaaccaagaggaaaccaaaaaacccacaaagtttctacccgaaactatgcctagaaaactcactcactcaaaaccgaaccccaaaaaaccctctcaccatctctttggccgaaacacaacaaacccgaaaatcaaaggtcaactattatttctctaatgtgtatttggtcaaagcagaagcctttgtttccttcaaagtttcggcccacaaagtattcagcccaagaaaatcaaaccctaacaagccttaacctaatatatatataaggtgatgtattttctaaccctagatgaaacacacggcagccacaatcatttcttcaccaaaattaaacttttcaaatatcttttccttctctttctctctaacggcagagacacaaattagggttagggtttctcatcttttctcttcttttcctttaacagccacacttaagttctagggttagggttctaagattttctttgttctcttctacttcttctcactctaatggcaacaatgaaatggtaaggtttttctatcttttcttcttcttcttacagcaagcaaacttctatgggatcttctaatatgtttttcttttcttgctacaggttcttgattttttgctcttctctacttacccgaaactacacccaaaaaaaacacaaagcttctaccttttattttcggcagcagttagaaaaatagtgttctagggttttctaggtttattttcttctcttctaaatgttctacccgaaaatacaaaccaagaaaacctaagctctttctacccgaaataatcaaccccaaatacccactcacggctaaatctcaccaa

SEQ ID NO: 260501 - DNA, 712 bp, Cannabis indica
tttcaggttagacccgacccgacaattcgagttttgtttttttcgattttttcgacagcgggtcggggcgggcggtcggattttcgggttttcgggtccaaatgttcagccctagtaaaatggtcaaaaactataaccccgttcaaacccggcattctatttttctccaacatttatcccactaagaaaaggttctagacttacccatgtgatttaaatggccatccatcgcatttttagtcgtcaccgagcaaaaattataaaaatagcataattcatatataactcaaataatacctctacaatttaataaaatctctggaattgagaaactataactctagtgcccacttttaataataggacccacaattaaataaattcataaataactataaaaatatcaataactattgctaatttcctttactaatccatatcctaaaatgcggtcattacaattatccccccattaaaaggattttgtcctcaaaatctaacctgaatagctctggatattgagtcttcatgtcagattctaactcccaggtggcttcctccaccttgttgttcctccaaagcactttgaccaaggctatggtcttgtttcgaagaaccttttcctttctatcaaggatctgaactggttattcttcataggacaagtctgattgtagttcaagggattcgtaactcaagacatgagtcgggt

SEQ ID NO: 260502 - DNA, 1609 bp, Cannabis indica
taaacaactgctaatttccaaattaactaagcgggctttacatcattggactgcaatttagcatattctaaagtacttgaaaagtacaaggcattatgtgttagtctacaagggtggtgctttaaatcacgtaggctataccgacttagatttccaagcttgtcttaatgacagaaagtctaaatctgggatggtgtttactcttaaggggtggagcagttgtttggagaagtgctaaacaaaccacaacgtcagactctaccatggaggttgagtacatagctgtcaccgaggctaataaggaacttgtctggcttagaaagttcttcacaggacttggtgttgttcttgaaatggaaaaactactggctttactttgttataacactggagccatagccaacagtaaagagcctcgaagccacaagagaagcaaacacatagtgaggaaatatcacatcatcagagaatacgaggcaagaggggatgtactggtggagaaagtggatattgaagacaacttagttgatccatttaccaatgttttgattgcaactacatttgaaaagcacagactgaatttaggtttaattgaaatgtactgatagttttatgttagtgcaagtgaaagtttgttggactttgtgccctaaataaaactccatttcaatgtaatcttttctattcaattatcaataaagaaacagatttattttcattacttatttagtatatcatttgattcatgtaatcatgtatgtgtttatctaatttagaaattcatccaaatccttatgacattgatattgttgtttattgtgtcgtcaacacaatgaaaagtaatgaagattatgtgattaaatgtattcctatgatttatcagtacacagggtttaactgataggataatctacaatgtagtttacttgcacattagataagtgctatgtcttttttaggacattggttaaagtaagctcgggttggatgcatggagtatgcattggaagggatcgatattgagcttgaactagatatgataaacttaccgtaatatctattcaattcaatatcacctagttgatcctagatcaaatgatcttaatcctcagatggttaggttctagttcagttgcattatttgtattgttaaatttgttcgttaaagtcaacaaaatggttcttttcgtgacatataggttaaggaaatggtagctaaattgagtgggagcggtaatcatagatacagaatctatagcttatatccgtatatagaagtaaaatgataatttccttcaagcttggcttaacagagataaatggttgtacttatttcagtgattatattagttcactaaaatatcattcataggttgctaagtgttttaaggataaaatacattgaagggtgtaacggtaattttgtccctgctcaatgtaaatcatctataggggatcattgattatatggttaataaaaaatagataatctcatagcgtatctatatcgtgaaacatatagagcgttctatataattgagagtgcaatttcaaatctatagtagtgcaaagaggaattaataagtttattgaatttacttggtaaatt

SEQ ID NO: 260503 - DNA, 761 bp, Cannabis indica
tagcgtatctatatcgtggagaaaatatagagtgttctatatgcctgagagtgcgattccaagttctatgagtggatgcaaaaaaaatttataagttagggaatttactgggtaattctagttcggcttattggaagctcggttctataggcccatggtccccacactagttgagaccatactgcttgtaagattcagataattgataaaattatactatgtctagtttatgaattttcactaagcaagggctaaattgtgaagaaaagagaatctatgttttatttattaattggaagaccttattatgtctaattaataaatatgttaaatggaaatattatttgataattaattttaattattaaataattagttttggcatttaaatggttagaattggaaaagtgacattttttagaaaataagagaaaattgtcaaaattggaaaaatacccatgtggggcccactaactatggccggccacttaaatggaatttttcatttaataatttcattattttaatgcctaataattcctaacctaaacctagtggttgcctataaatagatagtgatggctcacacttaaaagataatgaaatttcttgccttcaggaaaaattgagccatctattctatacccatagccgaaccacttcttctctttctctcttcatattttcatacccttgagtgatagagtgatcttggtgatactatactatagacaggatacaagggttagagatctgagcgg

SEQ ID NO: 260504 - DNA, 719 bp, Cannabis indica
gtttagttacagtaaagggttcatagaatagtccaagtgaatcctagtcccagaatacaaaactcatattctatacattaacatacagtttggatccattgatagaaaatgaatattgataacttgtgaaagtcatactgtattgtccaatgtattctaggaaactgaaatagaaatttctatttggaatttaaaatttaaagtgaaagacttaaatttataccaaatatattttgagtaattattctttcttggaccaccactactaatataactctagtctaatttgcctaaagtaaatatatacaggtaggagatttctaagatcgatgattatatcatttcggcatagaatgtcggaaatatagtcatctgcgccattcaatttcatagaagaaattagaatgacatcataagcaaataatttataaactattcatccaatgatatactatttaagcaaattctaaatgaaaaagctaagagaaaaattaaaggataatttcgaatagaaatccaacgatatcccgttttggcaagagttaaagttattcttattttatgaatctcttcattgtttcatattgtaaacactagactaagttgtcatctttggatgtacaactagatgttgcatttacaaatacttatctattgagatctaacgctattatgtttgtctaacagacgacaatcctttaggatttgtcccattaaaa

SEQ ID NO: 260505 - DNA, 891 bp, Cannabis indica
gtggtattggataccacacggccggaatcaatttggccataggaaatcagagtggtttgggaatttttagatgtgtttctcgatgaacttctgggtttaccaccacagcaagaaatagattttgttattgatttagcacctggagcagttttagtttctaaagcaccttatagaatggctctggtagagcttaacgaattgaagattcagctcaagggatggttgacctagcattttcacgacctagtttgtcaccctggggagctcccgtgttgtttgttaagaagaaagacagatccctacgtatgtgcattgactaccgagagctaaataaattgactatcatgactaagtatcctttacctaggatcgacaacatgttcgatcagcttcaggggaaaacggtcttttctaagattgatctccaattgggctatcatcaattgagaattcgagaggagtacattccaaagagtactttccgcactaggtatgggcattatgaatttttggttatgtcttttggactaaccaacactccagcagcttttatggatttgatgaatatggtattcaaggatttcctcgatatttgttttagtatttattgacaacatccttgtgtactctacatcagaagcagagcatgagcaacacctctggatggttccacagcgattatgagaacataaaatgtatgccaagtttaaaaagtgtgaattttggctatccgaggtgtcttttcttggacacattgtcagtaaggaagggatcaaggttgatccagggaagattgaatctgtcagggattggccgagaccaaaaacagttatagaagtcagaagttttctgggtttagctagttagtatcgtcagtttgttgtagggatt

SEQ ID NO: 260506 - DNA, 681 bp, Cannabis indica
aagaaaaaaaatagtagtttaaataaataaaaaaaaacaagtttaatttctgtaaaaaaaaataatatctatagttgagatcattttttatttattttagtattttatttttttaaaaaagaaataataaataaaaagaaacacaaatttaaagttttttatggcattcctcaagactttttcccatatttgtaagttttttaaaaaaatgccatatttagtgtaattaagtttttatgccatatatatcaaaacttatctttattttcccatatttttgtaaatagcccaacatattattattattattattattattattattattattattattattattattattattattattattattattacccaacaactattgtcatttataccatatattatttatttcatatatatatatatatgtatttatagatatactatttattttaatactaaacttaattatttatacattcccaaagccaattgatgcaacttaaaataaataattatcgaaacatatatttaaatttttggtcagttagcgcaactactattcaagtcaaccacacttgacccaaagagtaagagacaattgtagtggacaaaaattacaccaggcccaaatgcctcttacagcccaaattgaaatcacaacccttcaaaccaggtcaataa

SEQ ID NO: 260507 - DNA, 853 bp, Cannabis indica
ttttagtataatttagcttaatatttatttctttaataagtttactgtagtttcttctttcttttactattttagtccactattaaaaaaaagaattcataatttcttttcctttttctccaccgaaaagactaacttaaaaaaagttcagttaatctcatttttatagttgaatatgaatacaagaagaaaaaacaggtaataaaagaacatcaattaattgtcaaaacaaaatctttaataaaaattaactataccctttattttctttcctttgtcatgaaattaattcaaatttaaattttatattattattatgatttgtaacagcatgcagttgtatttgtaaatggagaacaatattatggagcaaaggccaatcttaatgtttgggcaccaagagtcactgatcaatatgaattcagcttatcacaattatgggtcatctcaggctcatttggcaatgatttaaacacaattgaagctggctggcaggcatgtttttcaacaacccaaaaaataaaaatacaaactttacttttcattcattcatgcaaatagatcactcagcatatatatatatatatatatatatagatattaatataactatatatataaaaaggaaagatgattttagcaatgtggaacagctgttagagactacttttctatagtggtgaccattgacatctttcccttcatttattttttcaggttagcccagagctatatggtgacaactatcctagattctttacatattggacagtgagtttttgtatatttatttaattaatttttggtaaaattcaattatgctcaatttaaatggatggtaaatttgttcaat

SEQ ID NO: 260508 - DNA, 481 bp, Cannabis indica
ctctccgttagaagaacttccaggtcagagttggctttgccttttgctgcaagggaagcctccaagatcttcacatgctcctaaaaagaatctgaagaccccctagagccatcacgagctgagctcagtttcattagggcctgaaaataaagaaaaacaacatcagtgtcaaacatcacaactttggccagccagtcccctctttggactgctatggtcagccaaccccccatataagcttccaaggccgaccagccacatgcaagaagccgcgtggtcgaccaacctatacaatgtcaagaagatgaacagagatgaaagtataactcaccagagaaagatcttgaagcctgccagagtaaagcctgagaggaagagccctctctatgcgcttgttggctgactcaggagccctctgtccagcaactaaccttgatcctctactgggcctccatgtaccttggctggtaggctgtatcat

SEQ ID NO: 260509 - DNA, 830 bp, Cannabis indica
caaacccgaaatctcattttttttcttcacggctgggtttcgttctctctctcagtctctgcctctcactacctgtttttaaacccttcaaaccctaaacaatcatataaacatcttatatataatcctaaccctaatataaccctagattaacaactcaaaaattttaaaaacaaaaaatataatatatatatatatatacatacctacgttaaacataatatataataataataataagaataataataataataataataataataataataataataaataataataatagtaatagtaataataatattagtattaataataataatagtaatagtaataatattattattattaataataaattaaacaatatgctataatatatttacccatatttttattattaatttacctacaataatattcacaaataataaaatattaaattatctccaataatttaattatttatctagcattacacacaccctcaaaataaaataacaaaaataaacgaaataaaaataataaaaaaaattattgtcactaagaaaaatttcatactccaccaaactcataaatattcaaaataataaattatccccattgacaaacaaaataaactaaaagtatataaaaaaaaaaattaatcaaccaagaaagcggatattacaattatctcctcgtaaaaagaaatttcgtcccgaaattctactcgactcctttttttttttttttagaaagcgaagactcaatgtcttatacctcagcaatcccacatcgcctggggaaggtctagtgggatgattctgagactgtgtagg

SEQ ID NO: 260510 - DNA, 699 bp, Cannabis indica
ctttgtgaagtacgggctctattcgaaggatttcattcctaagccagtgaaggggagttagaggaaatctggcgcttgacgggctgagagagctcatcaggaggatgagctgattgaactaaagcatgaggctaagttgaaaggaggtgcaagggccaaacagtatgctcaagagcccttgaatcctgaagatgaggctgaggaagagcaggtgactccgctcaaaaggaggaagaaactttcggcccagtccaggcccgttgaatatgccattcaaattagggagcccagttcacctgctcgaccatcttctcccgtgctaggaaaagggaaagctgttatggtagagataagagacttgtcaagtgatgatggactttcgagtcttgcccggataatcgtcttgcaggctactccgtctcatttttaaacttcctgactattgtattttatgcttctgatgtctttttcctctaaccatgttgtttttgttccatgcagacatgtctcaaaagatgctcgatgctctgaagaagagagttggaggaagctcaagcgtatctcctctggccaagaaatctagggtcattgaggcgaccccttccaaggataaggcgccggccggggaggttattgaccttttcgaggagctaactattgcaaaccctgttgggttttatgccctaaataaaactcttt

SEQ ID NO: 260511 - DNA, 930 bp, Cannabis indica
cttgtaataagtttgtaaatatttttgggatcccaacggtttaaaagtttaaaagtattacatgttttattttcattccgattaatttaaaagtttaaattctgcgctatttatgattagtaatcccgaattaggggattaggattccataaacattttgggtagcgtgcctaattatttagggcgttacacaaacccagacactgacttagactcgaactcaaaccgacacctagaatcagacccaaagctagacctggacagaatccaaactcgaacccagaccaggatcagaaccaaggacttagaccgagaactgaatccacactaagatcggcattagaacttgggactcagaccccacctagaccaagacccaggacgcaaacccaaacccagagccggatctggacctagactgaaatccggacccgaacccaaactcagaacatgactcgaactccgacccgaactcaaacccaaactcgaacacagaatcgcaaatgaaactataaccgaactaggaccaggaccagtagcaagacctaatcaaaaacctgaacccatatccaaacccaaacagagacctaaacctgaaccgagactaggactcgaacccgaacctagaccgcgatccaaacccacacaataacccggacctggacccagaataagtatagggaccttggaaacagaactaggaccgcgatctagttcccgacccagacccgaacttgaacctaggacccagctcgtgacccggcaacagaaacatcacgagacttagtgttgagattgggatccggatctggacccagggctaggacaaatcccgtagtcagtgtcttgatttgggacaaagccgtggacccaaaccctcaaaaggacccgaacccacacccagacctgaacccagtcccaaacccaaaa

SEQ ID NO: 260512 - DNA, 1954 bp, Cannabis indica
ttctgatcttgaaacaatgagcattaagcactcacagaatcagaagaggtgacaccatcaatgtttatgattcgattagagatatttcatatgaaatcaaacccttgtaccaaacaacccataactgtcttcatagaaattaccacatatgtataataataataataatttatcgtaggaaactaaaccaagtccaaaacatgttggctgcgctacaacaatcaccctcttttatagtaagcgcactcattcgaattcactcgccatccttatccaccaccgccactctttcgctatttcaacccccgtataagcatcgtttttatcaccactctccccgtagatccttccaatctggaactgctgctatggctgctggaagtcatacctccgccgtcgccgctgactcccgggaacacgtcgtcggaaagtggttctcggcgcccgacatccggcttcgtgaccaccgattcactgtacctcttgactactcacgcaggcactcttctcctaaaatctctgtcttcgctcgcgaagtggttgcaggttcgttgttgtgtttgacaatgtaacagatttttcaatattttattagattcgtgctatatgtttatgtgaatatttacattcagataaaatcaatctgggtttgtttctgcttacaagtttttgaatgttagaaatgtttatggttctgctgttatataaaattataaatgatgttgacttttaatttcctttttcatatttctaattcggatttatgaatttttagtcgatcattcccactttttgtttccttagtagattcgttaccccattagttaagctacatgattatgtaatttgttttactgtagaactaagtcatggtgatcagggattatatttctcgtggcatctacttagcaatgtgacggtgtttctctaaagaaaaggggaaaaagaagaagaagaagatattttcagcagcatgcaaaaattagtaattataaactgaggcattacgtagtgaaaacaaataatctcaacaataaactatgtctccagagtgtaactatattgattgcttgactaatctgtacacggatatacattatttctatatgcaggactactaagaagtatgaaacatttttcctgttagccccgttgctaaagttgaattttccttgcagctgggaaagaagagcagccattgccttacttgttattcctacaaggtggaccgggatttgagtgtccgaggccaaccgaagccaatggctggatacaaaaagcatgtgaagactatcgtgttgtgttgatggatcaggtgttgtttactggacattttcttaagatatgtgctatgatatttgataatacaagtatttttattgatcttttcattttacttgtagcgaggtacaggtttgtcaactcctttgacatgttcatccatgttgcaattgaaatctgctgaagatttggttgattacgttgaacactttcgagctgatagtatagtatatgatgccgagtttatccgagttcgccttgttcctgatgctggaccttggacagttttgggtcaggtagttgttacaattttttgctggactctgtgtatgcattaattgagcctctggatctagaatcatgtcctacctatccacgaacttgctttattcaagtagcacattttaacattcatatcagagattactgtgctaatgcttaaaaatttccttgtttttgaatatttttccatgtacactgatacttattttatcttatgtttgtttttctttttccttcctttcataagaatgctcagcttggataaggttttcgtgttgcttgtggtccaatgaagccagtctgagtcataaattaaatgacaacttgttctttttgttgtatagagctatggtggtttttgtgcggtaacctatttgagttttgcacaaga

SEQ ID NO: 260513 - DNA, 365 bp, Cannabis indica
gtaaatattgaagataaatacatgtgtgggactataggagtaacttttagagttgttaagtgttagagtaatttttagtagtaagtgaccaaaaatgatgtggatgagagagaaaataaaatattatattttggaatgatgtggaattttgtgacaacttttagaattatttgcattggagatactgtaagtactaacatcgtagaaaagaaaaaaaaaacataaaaacttacaaaatacatagaattattacatgtattaaattttattatcacaattattatccttctaattttcttcttaaattccttaaaaactagtacaatatttgttctactcattctttttttttttaatgaaaattt

SEQ ID NO: 260514 - DNA, 534 bp, Cannabis indica
aaaaaaaaagagatgaatatatatattttcatgtctatatgaacaaaatattttataatgaaaaaataataatagagaaactagaattcatttggcttgttattacaagaatataaaataatccaagcaaactaaaaaactctcaaaaaaataagaaaattacacacaaaattactagtaacactcataaaagcagcaaagacaaatgcatgtcaatagagtaattgatcaatagcaaaaaagcacctcaaaaagagagaccaataggtaaaaccattaaatcaaacactaaaatgatcataagaatccccaaacataattttcagaaccaaaaattgtacatatatcaatgttattatttttttttatgaaagaatcattgtattgttcaaacaaatctttacaccttacatcacatttccatcatacatcttttagctatcaatgttattgttagtactagtaaaaacaaaataacattaatttgccaaatttaatggcaatgagcaggatcaaagattatatgccaacaaa

SEQ ID NO: 260515 - DNA, 560 bp, Cannabis indica
ctcgttcttctttcttctattttgaaatctccttcattattctgtattaaattttgagcttatagtgagtgagtgcatgcccacccatagcaagtctagtactcaatcatagtgtgtaagactgtgagtaatccaacaacctgaaggagaatcgggctcagatcttgataatactctgcgatagaaaggaacaagagttagagatctgagtgggatgagtcatattattttgttgcagtcagtgtaagatttctcaactttatatgtgtttaaatttgattattttagaaattcatacttaggatgttaatcaacatacttgttagtaaatctagatcttggtaaaatatattccagcacttcgaccctgccaccttcttctcaatcaatacattctcgatttgcagtaaccttttcgaatccaacttccctgccaacaataccacaacatatgtcttccacactcctttcctctacaacaagccattacattaccacctttagccaaaatagaaccaacttccatgacaacagcctcacaccagccaccaatctttttg

SEQ ID NO: 260516 - DNA, 791 bp, Cannabis indica
atttttatttaattttaaaatgattttttaaaaaattaatcatgtagtaatcaaacttaagcaagttaattaacaattaaaaataattatttaatcaaaacactttgtttttcattttattttattagattttttttaaaaaaataattttcaaataaaaaataaataataaataatataaacctatcagcggctggcatgtataggtatatcgacctgacaattaacgaagtacttacggaagattcatactatagtaacgaaatatatttttaccattaaaaatacgatttaattacttgctactcgacataaaatttagatatttatacaccataaattactatatatatattaaatatattaattaagaatatgaaaatatgtgtgaaatagtgaaaatccaagaaagagagaagaaaatctcaagagctagtacgaacagctaccaatagcacattgttgaccctcaaattaatataccatcatgtgctatatacacatatatatatatatataaatatatatattattaatatatataattagaagaagtaagagatattaattgcacaataaaaattgagttagatcgatgtttgtgcatgtctgctatatttttcttttctccaaatttatttttcttgtcttcgagatcacttaggattattcaaacaacgtacgccatatatattgttttgtgtggcttaatttaattatatgaaaaatcataaagtgatcactacgtaacaatatgatggtttcaatattaattagggttaattaagctt

SEQ ID NO: 260517 - DNA, 675 bp, Cannabis indica
tattctagataatgaattctatagtaactaatatatattttctaatatttaattaagtagaaaaatatatttaagttgaaaattaattttttatttaattttaggccaacttaaattcggatatttttcttagaacttagaattagaattaataattaagttgattttattcaagatacttaattatttgtttctatttcatgaaatttaattaaatatgaaaatatatttaagttgaaaattaatttgttaattaattttggaccaacttaaataagaatattttcttagatattaaattagaattaataattaagttgaatttattctagatacttaattattttcattttaataaatttaattaagtagaaaattatatttaattggaaatttttcaatttctaatcaacctcaattagaataattttcagaatacattttattttattttattaatcattcccttaaaaatttcgaaatacattttcttaatgtagatatttcaaaaaatttcaattttgaaaattagattaaagttgaaaattaatttttcattaattttagatcaacttaatgttggtctttgtgccctaaataaaatactatttaatgtaatcttttcttttcaattatcaataacgaaacaaatttaatttcattacttgtttaatg

SEQ ID NO: 260518 - DNA, 2020 bp, Cannabis indica
attactttaaaatcgaacaaatttcgagagaacgaaactctaacaccaatgcattagcaaagctggcctcgcagaatgacttggatgaactaaatttggttccggtagagatgctgagcgagccaagtatatgtgaaactgaagacgtcgagatgatagataggtctccaacatggatgacgcctattaccaattatttactcaacgagcaacttccaaatggcaaaaacaaggtgcaaaagctattgtatttagtgcctcgctacacaatgatcgaaggtaaactatatagaagagggtattcaatgcccctactttggtgtgttctacccgcagaagcaaacgaaatcattagagaaattcatgaaggcttctgtggggatcatgccagttggcaaagtctgtgtaaaaagatcattagacaaggatattactagccaacgatcaataaggacacacatgagtttgtcaagaaatgtgataagtgtcagaggttttcacatatacctcgcatactgccaacagaacttagaatgctgatatcgccctacccctttgctatatgggggatcgatctaattggggcattacccactgggcgaggtggaactaagtatgcggtagtagcagtcgacttcttcactaaatggacggaggacgagcccctcgtctccataacctgcaagaaagtccttgaatttgtcgtcaacaacattatctgtaggtttggaattcccatgaagatagtattcgataatggaacccaatttcatggcgacttgttcactgaattctacgagaggaatagaattatcaaaagtttttcatcagtatccaggtctcaggcaaatggacaagtagaagccgtcaataaaaccctaaaggatactatcaagaggaagttagacactgccaaaggcaaatgggttgatgagctacctcaggtactctgggcccacagaactaccgagaatacagccacgagagacactcctttgtcgctaacatttggctcgaaagcaatgctgcctgttgaagtgaacgtatcgactcatagaagagagttttataattaagaagaaaaccattaacttttaaaattgcccttggatctacttgaggaaaaacgagctgagtcgtgaatcaccaacaccgcataccaacactgagtcacaagatacttcaacaaaaaagtccagaaaagactactcaatattggagacttggtgttaagacgagtctttacaaatacgagagatgcatcagcaggagtgttcaacccgaactaggagggtccatatgtcatcgaagcagtagttggagtcagagtctataaattaacttgacttgatggtcgctaataaagaactactagaacgtaaaacatttgtgaccctactatcaataaataaatgatgtaactcgcattactaatgtgaactttaaacttcagctatgaataaagagaaacatttatattaagtaattgcaaagttttattttttaaaattacttaaggggcatttatgtatgattaaccagaattcatctggaaatacattgtataatgccaacccatcatttcaattttttttaaaattcaaaggttcttgactaaacctctttgacgaatgtggagtcgaaccgttacaactccctgaccaaaccttttttacgagagaggggtcgaatcgttataacaccttgatcaaacctttttgacaaagaagggatcaaacaaatataattttttatttataacctatctgactagacatcacgacaccttggtagaagtacttaaacctcgaaaatggatagataatataactattcatacgagcaaattaaaaatatacaaagtgataaaatccttagagtatatttaagtttgcttaaggcagattataattgcaattgcgaggcagaattgtcaaccgctcaaaaatcataaagtttggtagattactaactacttaaacaggaagattatgagcaatgaaaaaacccaaaagtactg

SEQ ID NO: 260519 - DNA, 1185 bp, Cannabis indica
aatttttgatcaataagtattttggcccttacattttgtcactaataagattgtgccccttgaattgttagctcttgaattgttagcgatattaaatatttcctcctaattttaaacattagtgaaatatgaaatttctattagacttcatatttagaaattttaccccttgaagtatgatcactatcctattttgcttgctgaacttttaccactaacaattactactaacaaatttatttgttttaataaaagggacacgattgacagtagtaaaagttcgaaaggtaaaatataatagttattataatttggggatataaaattattaattatttaacgaaagtctcatatttcactaacagtaatagttcaaagaaaataattaacattgataatagttgaggaacgtgatttttttttcggtccaaaattcaagaggcaaaatacctatttttattcttaattttgttaacatatagtcttttttatgtaaaattgtctaagaaattaaacaactttagtaatttggttacaccaaaatggtggtgtctcagatttttaattttggtttatattagattaaattatttttaattaaattcgtttttgcttttctaactatgatatagactataaaaactaatattacactaacgtgataatcaaaaatagagtttgcttacacttgaataagtggaacgactttttcaagatattaataaagtaaactaatatcgaatatatcagttatacattagactggactaatattaacagtggaaaaaatttataaatttaccgtaatatttttttactttaatatcatttagttaattatagatcatttaatctcaatcattaaactctatcttaaatatattgcactattgagttccaaagtcactttggcaatttggttacaccaaaatggtggtgccttaactgatctttatttaagaaagaaaagaatataatgtattttattaggagcttggtttagagtgacttcaacatagataatgacattgagggactataatataataacaagagagtggcactaagaaaacttagagcatcccttcattatttttaaatattttcaattatttattttatttattgtttcaaagatttggaagtgactattactgataaatgggatattaatagcaaaattta

SEQ ID NO: 260520 - DNA, 559 bp, Cannabis indica
atattttgagttgttggaaacacatgtaattttttcgatataaaaacagatgaacaagataaaagtaacttttctatttcttttataaattattaacaaagaggtaactaaataatatctttgaataaaataagtatactatctaattttatgagttaccacaataaatattgtaatattttatatttaaaaatttgctagtatctaaataaatttactttaaataagtaacaccaacagatcctatacagcagagaagagatcatgtttaaaaatttcgtttcttataagttattttagaaattagttgatatttaaaaattcaattttctagtaaagaaattaaaaggttattttttattttaattattttttccgacaataataataaaatatatgttttccatatgttaaaataatctttttaaaaaataaatcgtggtgacataatttttaagctcaaataaatttacgtaataaataagataatattttttaaaaaaccaataaaattggttggtctattttagtttgtctcaaattttgatttttttttttt

SEQ ID NO: 260521 - DNA, 619 bp, Cannabis indica
cttttattctatcaatggagatatgtcccaatctccggtgccacaatgtacaggaatcctctttcataacacatcttttagtgccagcgtgaacatgcataacattattagtggtattattttgtaaattaaggcagtaaagaccatcagacaaaataccatttccaacacattcagatttataatataaattaaaatatttgtctgaaaatgtaaaggaaaaaccaaagggtataagtcttgaaactgaaatcaagtttctagagaaacttggtacataaaaggtcttttctaactttaaaataaaaccattacttaaaactaaattgcatgttccaatagcttccacatgtgagcccatcttgtttccagataagatgctttgctcacttgccactggcttccttagattttgaatatcctgcaaggaatttgttatgtgaattgttgaaccggaatcaatccaccatgtgttaagattaacattagccatattagattcataacatactaaggaaattggattacctttgtcatccatccatttcttgaactggctgcactcccttttagcatgtcccttttgtttacaaaagaaacatttgatggaatctttctt

SEQ ID NO: 260522 - DNA, 595 bp, Cannabis indica
gaactggtgtttgatgatagatggtgtcttataggcagatttttaacaggcagatcgatcgactttgatgcaatgaggcatttgatggcatctctttggcaaccgggaaaaggagtgtatgtcaaagaattggaaactaatctgtacttatttcaattctaccatgaattggatatacaaagtgttattgatggcagcccatggacttttaataagtttcctctggtgtttcataggctgaaaagtggtgagaacccaagagcgattcatattcataaactggatatgtgggtgcaaattcatgatctcagatctggcttcatgatggataaagttgttaggagcgctggaggctatattggaacatatgtcaaatctgatccaaagaatttcaatggcatatggcgtgattatttacgtgttcatgctactatagatattgagaagtcgctgaagcgacgaatgaagatttgcaaagagaatggagattagatatgggcgactttcaagtatgaacatttaccaacgttctgcttcatctgagggattattggccatgcggacaggttctgtccgaagcgatttgagcaagatt

SEQ ID NO: 260523 - DNA, 911 bp, Cannabis indica
agtgtatgtacatgttaagtgtatatgcatgcttatatgtttgttacacaaccaacactagtacggttatggtacagagtgcattggtataatgtatattgttaaagagtatattacagtgatactagcacaagtgcaggaaagtacaaagtgtgtgtggtatatcactcagtggtactcggggtacaaaaaaaccctaccaacactcgtacaatgaggtatgtacgtagtgtatgtggtatagtggttgtaccctagtatggagcgttcttactcatctgttaagccttgtaaataggtgtatgggcgcctaaatacaagtcggtattatatgatatgttatatgcttttctttctgagtctatcgactcacagttctgcttccatgtataggtaaaggaaaggcgaaagctgaacaggagtgagcctgggctgagatgaggttgtacatgtggtggcggggcgacctagagtgttcagtctcgggacatctggggttatattttgtagtcactctgcacctggatattgtattttgtatatcttgtataaagtttagaaacgggatcccgaagtttataaatgactatgtaaattataaagtttaatattaatataaagttttaatttgactgttttttgagaagattctttcattagcaaagaaagcactgtagcgtgccttagcattagggtgttacaaaagctctatgtgatatgggagcaagcattaacttaatgcccttgtctgtttttaaaagactaagattggaagaagctaatcctgcagtaatgacattgcaactgacagatcattctttaactcatcctttgggtataattgaagatattttggtgaaagttggtaagtttatcttctctgctgatttcttaatacttgacatggagga

SEQ ID NO: 260524 - DNA, 1105 bp, Cannabis indica
taaatctgattatattaaaaaaacttttatttagggtataaaatcccaacaaatactattttaattgtgaatgaggtgtcaacaactattttagaaataaatagtatcaagcaaccaagtagtatgtctcatactgatcaagctcttgtgacaagatcaaaatcaagtcagtgtaggagtacatcgagaggaagatatgatgataaaagagacaatcgtgctcattcatgctcttggagggaagtgctactattgtcaaaaaaagggacatgataggcaaaattgtgaagagttgatcaagcatcttaaagcaatgaggaatcaagaatgcaaagacacatcatgttccacaaatgttgttggtgaaggctttgcaagtgactctaatgttctctctgtcatagctaatgaaaattttttgactctttgattctggattctaattgttcgttctacatgtgctcatataaggaatgctttgacacttataaggaatatgatggttgtactattttggtgggcaatgattctagctctaaagttgttggaataggaactattaaggtgaagatgtttgatggtgttatgagaacattgactgatgtgagacatgttccaacattaaggaggagcttagtctctttgggagctttagatacttgtggttgtgactattttgcaaaagatggtgaaataactataaagaaaagtggcttggtagttgtgaagggtaagaaagagcgaaatttgtatagattatttgggaagactattttaggtgaagttgtgaaggttgagtcaagtcacaaaagacatttagttagagtaatttcagttagaagttgtttgaagaaagatgacatcagtaaaagattgaagaatgtgaagacaagtgataactctaagaaaatagagttatttatatctttttggcattaaattagctttgttctgaagaatgtttagtttaatctaggacttttatttggttttacttaattttgcataaatattagttttagtatttatagattagttttagttcatttttgtaatattttattaattttatttagttgtctatttaaaaaatattattctcaat

SEQ ID NO: 260525 - DNA, 635 bp, Cannabis indica
aaaatgaaagggcatttatgctattttttttatattaaaaaaaaagtaggtgagatttccagatgggtaatatgggtgagatttttattatattttattacaatatttttgatgagtggttgcaattgcaaatgcaatagtacactatagtatattatattattattattggtaccagttattgagtcagtgataaaagtttctgaagcaaaaacaatgataatgggtaattatggaatttagtatttttgtgatgtttaatattgttattagtgtaatttaatattaagactcacatattttatttaataaagattatagaaaattactaattaattataaagtgtcactttatagtggtactaggcaatttaagagtattgctataagctactaaggcgtctagtattactatgagatgacgttttatatttggttagcggttctctataatttttattaaattaaaataagtgggactcgatattacgttacactaatataatattacattttataagagtcttaaatactataagtgccctttaacatttttcggtatcttaggtgacatttggttggggggaataaaaacataagaataagaataggaaaaggaataggaatggaataaa

SEQ ID NO: 260526 - DNA, 800 bp, Cannabis indica
tttaaagaaccaaatagggttttaattaaaaaaataaaaggtgaaaaatcaaacaggaatattcaaaccaagtataagttttagaaatgactcatctcttatgattaaccgataaatattaatgcaagaaagaaaatatacaaacattttaataaaagaattaatgtctctaaccaatatagatattatatatatcatgttctttgacatatagtaaaatataaaacgtgagttgcacgttacaactaaatatattattgcatgcattcaaaaccaaacataattaatatgttgaaatattcatatatataattacgtcgtacgtgtaatttatatgacatgacttagatactatctagctagtttactgtggaatttaattaatttattttaactataagcttagccactctctagtactacacaaaccatgcaaccaaagcctttttggcatataatattgagctcttatgtctctctttcatgattttctaatcaaggagatggcgaagattgcggggttagagccgacgacggtgttgcaaatggaaatatcagaatccccggaactgatggaatagtgaccggaataggcatcgccggcaagttaattggattttcttgaagaagatgacgagctgctatggcaacatccaagcttagaataatgctaagaacaacaacaagtaaggctaaaattattatgcaatttggagaacccatgatgaaatgatgagaaattgtgtattaataataacaagtgttttatgtataaaccaagagctcaaattaatggaaca

SEQ ID NO: 260527 - DNA, 733 bp, Cannabis indica
  modified_base (702)..(702): a, c, t, g, unknown or other
aattcctgacatctggttttttttgttcaccggcagttttgtatataacaattttgctttgtcctggtattgttattttatcttattgatgcattttcactatgcatctatgctatatctgagtgtaaaattatttggtgtcaggtcgagaagaactttgtaaatggcaagatgaaggccattacagcttacttcagtgatacaacaattacaagatgataaatcagtttgactcacctttattgctgaaatagaaggtgttgttgatttttggggatgtggagcagctctagaagtagaaatatggtaaaggaatgtaaaagcttggtaagtctttatattatttatacctaccagagttttgggttagaaatcttgtccttgtctcgcctgaaacatgtatgaattagttacattttttttttttcttatttttttgagtataacatgaatagttacttgtgtatggtagaaatttgtctcttttttgcagctagattggttggttctcctggtccctttagtatctaaaggctacattgatagtagtattaaattttcaaatgtggttttcattccaaataggcatcaaatatcattcatcaaaccatttatgtttctcaatggctagatattaagggagatgcaaggatttttcctcgagaaaatgaatgagtagggaatttgtgataatggctgttnttagagaaagagaagaaagatgactgaaatc

SEQ ID NO: 260528 - DNA, 8010 bp, Cannabis indica
gagggaacgtctgagagagggatttaatttagggggtattttaggaaacttttaaaattataggaataaatttgtacaaattataaaggggtataaattttgatatagattgtattattagggtcaaaaattgaaatttccctaaataaacatatcaattattatggtgtttaattaacaaaaacatagactaatgcaaagcagatttatttattattatatgcatatacattacaaatacaggtgtataatgcacagagagaggtaggtcgattctttttttaaaaggaagaaaaaacttttctaacatctatttttataaatgctaaaaaattgtatgagaataagagaaactcctgatcaactttgcattttacttacaaaaattaatgtttagtttccttctaaccaaaagaaatttttgtatcttgaattgaatacaaacagaacaagaaactggattgccatttggtgtattttctcatgttgatcttcaaaagtagacaaagtggcacccatcatagcctaattataaaaattaaacaaaaaccacaaataagtaatctcataccaaagatatagaaatccataaaatctaatataatatatatacttagtttttttagggaatattatatagtacttcatggaaaagaaagttacaatatttgatagcctacgtaaatgtgtaaacaaaacatatcttaaatgaaaatgacattagctaagttagttagtgtttacttttcttttcttgcaaatcgttaaaagtggacaagaataagataccaccttatatataaatatgaaacaaatcttttagatgattaaataaataaagaaaacccaataatgaaaaagaaaaaattaaccataagttatattctattataaatgcatgctatttttggttgtgtatatgatatagagatattttaaatggtactaatgttacttagcaccttcttacgtgttaatatcgtgcaattaattaagtatatagtttaatataataatttttagagagtactcactaaccaatcgtatgataataggtctagacggtggtaagaactactatgtccaagcaatattaatatgatatatatatatatatggtgtggaatatattttctttacttacttggatcaacagtgattaacatgccagtgcctccaaagtcgcaggtgccaccagcagctttggatctttgccagtaactattgaaagcataggaagcatgggcaatcaatgaatcgggttgaaagcatgagccacttggctgaatggaatcacaatcagctcctgagccacaagcatagttcattgcttcttgaatgattgggtcaggcacagaaggcttagcaacgcaccacaaggctacacttggggctgtgttcctaggtggtcgaccaattggtggagggtacacaataggaggcagaaacactggtgggcctggagaaaacccaaatggagatgggactgtagttgaaggtgggtttgggtttggagtagcaaaccctggtgggctgggctccacatatggtgggctcagaattggttcatttgggcttggtagaatttgtggtggagttaagcttactgggctagggacatcaccacctattgggctgggctcaacatatggtgggcttagaatgggttcatttgggcttggtaggatttgtggtggagttaagcccaatgggctaggcacttcacctattgggcttgggttttctcctcctcctcctcctgctggtggtgctggtgggaaataaaaaggtggagatggtgaagtgggtgtggagccaattggagtattgggaggatttacacaaaatggaggagaattttcaggtaaagaaactggtggtaatgaatcataaggtggtaaagtgaagggtgaactcacaccgtaggatcctgagttggtgggatctgacggtgaatcattgtttaagtattttactaaatttagttttgctgcagtcattaggaacaaactcttttgatgtgtaattggaactttattcgttattagttttctcctaccttctgctgtttaaaataacaatacaaaaattaaacaaacataaatatatatatgataatattaaggcaaaaagaaaatgtgtatagaaacaaataagcattagagaagaaggccttaccacaatgagagaaggaaatggctaccactatgaaatagagaaatagaatattacaagtccttagacactgataattgtttcttctcatcatgatgatttccttacaagtcccaacaatgccaaaactccaattaagtaatttggagaactctttcaaaacccacaaatgaaatgatcacttaatgaaatcagaaccaacacacactaaggaagagtacctttctatacaaatatttatatatgtatatatgtatacaaataagggtatatttgtatgttgtttgaaagactaagtttagagacaagtgggtggtatcgaccataaagattgattctttgggagtgaaactttgctatacagtcactttgcttggataagtgcatttgaaggaatacataaaagagacagaaaggacaagtgtagagagtgtattttataataacaagttgttcaattaacgccttctcaatcatgcattctttttttttttaaggaaaattaataattaagacatattaatgcaaatgaggcatatatgcttgcttcgtatttgggaaaaaaaaaaacaaataagtaaatgaaaagtgtggttttttctataagctctctcctttttgtgttgcttgctttctactcaaacccctttctttcactactttctctatttaatctaactatatatatcttttacagaggttgaaggttaatttgtttcacatatatatctaattaatttgtcagaaactaatgacaatcttgtttgttgaatatgtcataccaatgaatttgactataaaggcaaatgatatgctttgttataccataatatgtaagccttcgtgccttaccacgtgctatactaccgcatcaaaggaagtcggtttcttcaaaatatatacgctagaatatctcaaaatacacaacctatgtctatatatttaataaaaaattgataattgcacacataattaaattataagtgttttattttttaaattatacaagagtttcatcttttgtttcatctttatactaatctattccatataaagggtgactatgtaacgaaatttttagcttagcggaattttttaattttctatattaattttaatagaatattctttattaactatctaacgttaaacgttaaaaacataaataaaaataaataaatattaaaaattacgattaatattccttccaaccctctccattcttcattgttgggtagtttttgctttgtctctgtaatgtggctctgttgttgagctctccctcggtagcagaactggtaacgtgctccggcaaagtaccaataagataccgaaatgataagatttcgattgcaaactttaggggtgttggtgatggacgaaatgaatacaaaaagcatttcgtgaggcaatatacactaattttcaacaacattcaataaactaattattgagaaaagagagaaagagttttattatcaatgaatggaaaatacagtacatacaaaatgaagagaaagagagccttaaatagtaatggttcagcttaggacggttacaaccaaaaaagaaagaaaggaccaacggtttctaacaaccttcctattcttggaaagaattccaagaagctaactaactagataaaagaagaaaagaatacaatgacactggctaagtacaaagaaatacaaagtaagtggttgtggtatgtgaaaatcatgtagaagatattgtagccatgttatttcactagtggttacagccaaggcacaatattcagctttggctgagcttttggagatggtaggctgcttcttcgtgagccaagaaatgagacaatctcctagaatgatgcagaaaccagtggtagattgccttgtaatggggcatgatgcccagtctgaatcagagaacccgcagaagtgtaatgttgatgacttcgaatagaggagtccttgtccagggctgcctttgaggtagcgaagtagatggtgcacaacttgtaaatgtgtggtgcgaggattagccataaattgaatgagggaattcacgacaaaggtaatgttaggtcttaacaaagttaggtacaaaagtttcccaacaagttgtgcaatagtgagaggggttgtccaacacttctccatgttcattgtcaagtttgagcttggggtccttaggtgtccaagtcagtacaaggatattttcgttcagacgaaatggaggctaaaacactttttcatagtgttgcaattaccattacaaattactcatattgacacagatgctttaagagtctctccaacttttaactctccatctaagaatttatctagtcttaatgatttaattttggatgttagttgtcttttatcatttttcttaagagtcactgtttctcatgttaggaaaaatgttaactaagcagcgcatgatttagttaaatatggtcttgagttggatgaagatgtttgttagatgggtgaaatctcaagtcttattttcccgtaaacgattatcatttataataacattgaaatttctcaccaaaaaaaaaaaaaaaaataaaaaaaaaaaaaaaaaaaaaaacttaataattgggaggggatccgagtattgaccccgattgttccgggctctgacttccgatccgaccctttccgttaaccgttttttctgactggttgaagatgcgggttcaacccttacccgcccgatgattgttctacgaaatcccctggatttgtatgtagattcgctcactccatttcttcttgatctcactcttcgtctctcccgatctcactcctcatgactgttaaattcccgattctctctttcattcaacaatcaacaactttggtcttgctcagactcagtacctcacactctcgcccatgtatattcttaaatccttattctcgtttcttgctctacaatggctgcttacttacttactattttgttcaatttcttattgtgtgtgttcttacattgatgggatttacctagatttttggattgtttcaattctcttttcagaataatatcaacttaatcatttcagcggcttgattggtaaccaattctctctctctctctcgacgtttccctctcgctcagctgcagccccaaccgccgccggctcccacccaagacccaagaacagggtagttaaggagagcctcaacaattggttagtttatttctttttgtttttttttcaacaatttgcttgatatgtttgaatataatagcattgattttttggtttttcatatattttccatttaattttttgtaaatacaaggatgaaaaatgtaattgttgctcactcttagattgaaactaggaaaaagtaacgttttttccactctttttttgttcagaaaaatgggttcttcttcatatctgtacctcgtgcttcactggttctgtatggccctaacaattgtcttttgagtgcttaagcatcgtttgaaaacaaaagcttgattttttttttatgagtttttacaatttgcaatccagctcacaaagacttcttggggtagtgatggagtctttattgtggtcttttttcttcttcttcttcttcttctccttttctgctttcatgtcatctcgctctcactatgttctgatttttgtttttcttggctatgtagtgcttaactagcaagcatattgagctaacaagagtgaccttggtggatgttcgaggccaggtatcttttgattaaatctatatccttttcccccaactttttagttagaaagctttcttttgatgtgcactttaaaaggaaaatattttggtatatgttgccgttaaaccgctaaattttgtgtgctaagactattgtcaatgttaatgagttttattagttctgaatatgaaagctaattttgggtacaatttctaattttgtaatttattcagaacttttgtgaggatgagagtttcttccttaacttatgtacttaaaaactttcaggatcattagcaagattaacatttcttgtaaaaaatagtataaagacgaaggcgatgcagtggtactatgtagctgcgctactcactgttcttaccagttctcaggtcagtgaaatcctctacctcacaagactttttacatttttctatcaccaacttcaaaacccaccttcgtaaatctatcatttgtacatgttaagagtttacaattttactgatctcttccatttttggctccttgactctgatttaaagatttttgagactatttaatctctaaaatacgtggggaaatgtgtggtttaatgcaaacccaattcacattggttcactttttatacacatgatcatgtattttcaacaatgtaataatgacagattatgattgacaaaaaggctttattataattattagcaattcatgcttatgttttccatgtcatataatccataaatattcattctaattagtttaattgtttcttaaaatatatacatatgtcgtactgttatgacaagcttttctggtttgttgcaatgacattgtaaagattatagaaaaacggggtaactttgtaaaagagaatttgatactgctttatatgttttacaagagtttgaagatcaaggagcacatattgcaacatcatgttaaaattaaactgaatttattgtagatttgtacatgaaactatggaagtagtggtagtggctatatttaaatttaacaactggatcagaatgacaccaagaatttaccatcaaactgccatttgcactttatagattaatacataagtttgtttccttatctcatgtttcggtaaagtggactgaaaaatgggggatacatgatgaggttttggcggctattttgttgcttaagtgagattgacattattttattagaagcaagcattttttatttcgatttttgtagcatttaaatttgctatttctaagcactttatatatgttctatttctataaataattcagggaatactgactactctttcccaaagccatggcaagtatgtatatgactatgcaactattccatttcttgctgaagtgttcaaggtacttctcttaatttaacaattaaaaaaatcattttcacttttcctcttaattcatggctaaaaagtagttttggttttccagctatttagtaatattaatctttttctttccagcctgaaatcaaatttactgatttctcgtgatgattttgtcctttaaactgcagctattagtctctagtttactactatggaaagaatgccgagcatcaccttctacacgaatgactacagattggaaaagtgtgcgcttatatcctattccttcagtcatatatctaattcacaataatgtgcagtttgctactctggtttatgttgacacatcgacatatcagataatgggaaatttgaagattgtcactactggcatcttgttcaggtgcttgttttattaacattcaaggcgataaaaaaattggacggcctttatttatgttagtttttccacttcagcataattgtttttaattgtgttttttggttttgaattttatgcattaggctattcctaaagagaaagctctctaatctgcagtggatggccatcattctattagctgttggaacaaccacaagtcaggtgatttacttaactatccttttttaaatcaggggctgtttgccttgtttctgggctggactggactgccatgggttgcccatgagtcatgatgaatgactttaattgtagttatattgcatatagaagagctctagtatagggtgactaaatgagtttttccttttgttag

SEQ ID NO: 260529 - DNA, 503 bp, Cannabis indica
ctccaaatggcaagttatttccaagaagctcagaatcatggagctgttatggatcagacaactcaagtgagtctaatcttgaacaatctgactccagcctttctgccttacacttcaaattatgtcatgaataagaaggaacaagactttcacgagttggttaacgaccttcagacatttgaaaatttgattggaggaccacagaaaaagggatctaaagctcataattctgggaatgctaatggggcggctaaggctgaggcaaactttgcctctacttccaaacccaagaacaagaagaagtggaagaatagcaagaagcctgttcaagctgtgaaaacagttaaaaagaaaaaggctgctactactggtgataaaccaaaaggaaaatgcttctattgcaatgaaaagggccactggaaaccccaatgccctaaatttctagcaaagaaacaaggtatttcttttatgctataaactcatagtgttttagagaattatta

SEQ ID NO: 260530 - DNA, 1241 bp, Cannabis indica
ttgtactccaaaaaggaaaaacaaatagtttgcaaatcatttgcaaatatgaaagtacctgatgattactcgtctaacatcaaaaacatagtaaatgggactgaattgaaactaatgggtctgaaatcacgtgattgcgcgtgttaatgcaacatctacttccaattgtcattagaccaatcttaccgaaaaatataattgcactaattttacaatatttgtgtaatatgtaattgtaatttatttaattgcttctatgaaataaaattaggtatattggctaatcataaaattaatttaaataatatttaatttaccatttaaaaaataaatatttaatctaaatttaaattaaataatataatatataaattaataaatataatttaaataaattaaattaaattaactgaaaaaaataataattattatagtttggcgtcggttgttaggggtatatggcgtcggttatgggggcattttgtgtcggttattcactatgaaccgacgctatagggtacatatgacgccggttaatatacaataactgacgccatatagggtatcctttagcgtcagttttttcaatcctacaacgtggcctcgatcagcgtggatagcaaattttgctaaaaccgatgctaaaaggccttaaaaaccgtctctaaattaagggtatttttgtagtagtgacataacattattttaattgaatacttctatagttttaatggtaacattattttagttagaaatatttaagttattttgaattgtatgccctatctttcagtgttaggaaattggcatagcaaatatcaaaattaattaatgagaaagggagtccaattcttaagcagcccaagcccatcaaaaatatgtaggcatttcggacttcatatgactttgtgtttaactaaatagattgatggtcatctagtgccatgtagcaaatcaagactcctcataagtatggttgaagaagacatctctgcatgactatgggatatcatgtttcccactctcccctcaaagctgaccagtcttcaaccccacaacttgatgcaacatgcaatatggccatgttattgtcattttctcaaccaactaaatgatacatgatgaaaatactattttggagactaaagttttactataaatagcattctttggcattgtgaattttatcagattttagagtagaaaaaagacactttttcattttattttctctcttatta

SEQ ID NO: 260531 - DNA, 519 bp, Cannabis indica
attatacgtcagccacaaggccaccctcatccctgtctcgtccttattcgccttcacactcctcgtcatcctcttctactttctacaaaaacatacatattattcatacatattgatatctttataattgggtaactgtatcattaacatcttatcttgatatggtttttgtgtttcaatggagttagtacttagtattatgtattgtaagctctagatgtggtattttatgcatatactataatgtgtgatacacttggtttttcttaagcaaaatgagatttatatatctttttccgttatgtaaactttccatctaaaactgaaaattgtagaatatgggttgaagaggggcaaacttctcttgagaaagccagtatatgtctgcttaatattgcggccccgtaggctcttaaacactaaagtcgtaacatcactgtaatcatggagttcaattgtattcaaataatgaggtatattttcacatttaaagtatcatatatttatatttatatttat

SEQ ID NO: 260532 - DNA, 612 bp, Cannabis indica
tttatttaaaaaaaaatgtgtcaaacgtgtcaattcgtattaagcgaattacgtcgtatttaacttattttattttatttcaagtcaggtgaacctgttatcgattcacatctaattttctcgaccctaacctgttaaaatttatgtcgtgctcgtgttcatgtgccgtatcaaaactcgttttaccattcttagcgaaaaattgtagaaaaaaatttaaaataatttacagtataaatagctaaatttagttcttacagtataattttttacgacaataataaaaaataattagaatttggtatataattttaccaaatattcattaactttcctcatatatttatatggagaaaaatgagtctttatgaaaggggagatagtgggcttatatatattacaaaagatgctctttgtatgactatcatatttggtgtgtgagagaatttcaatatgttgtggtcagtaaaataagcccatgataaatgggctaaaatgcccaaactcattttccactactatggatattttttttgggaaatttagatggtatattaacttttgttatttttttacaaaaaatactgccagacggtattttttacttttata

SEQ ID NO: 260533 - DNA, 623 bp, Cannabis indica
aatgctggacctagatctggaccgagatcctgacccagaccgaaacttggatccgcactcgggacccaaacttggacctggacccgaacctagaccaagatcggtgtcaagacctagagacaaacccggacacctagaatcagacccaaagctagacccggaccctaactcgaagccagactaggatcagaaccaagtactaaggcccaaaactgaatcaagactctgatcgggattggaacttaggactcgcacccaacctagaccaagacccaggacgcgaacccacactcggaacctgattttgacctagactgaaacacggacccaaacccaaactcagaccaggactcaaactccggctcgaaatcaaacctaaactcgaactcagaatcgcaaatggaactaaaaccgaattaggactaggaccaggaccaggacctaaacccaaacccgaaccagatgaaaaccatgacagagacctaaaccaaaacccgaacccagatcaaaacccagacagagacctaaacccaaaccgagactagtactcgaacccgaacctagaccaggaccctaacccacacaataacggggaacttgatctagaattaggatagggacct

SEQ ID NO: 260534 - DNA, 521 bp, Cannabis indica
tttgaggcataaaacgaagtgagatttaattccttggcattgtcggatctgatagcctttatggatttggaaaattgagtgcaaaccatgttaaaaaaatctggtatgatagtcttaacatcagattttgcttttagcatgtaagtccatgtaaaacgggaatgatcatcaacaatggtcaaaaaatacctataaccttctatacttattatttgaaatggtccccatatatccatatgaactaagtctaaagttgtcatcgcaaaattattattggagacaaaagggagtctcttttgtttagctaaatgacatatatgacagtaggtattagaattgggaatgaaagaattatcaatctttttattgaaagaattcgaaatatacaatgatggatgaccaaggcgattgtgccattggtttacatttgatgtatgtaaatcgaaatgagattgactggaggcagcagcaagtggtttatcttgagagatgaggtacaatttgtcatatctcttagctat

SEQ ID NO: 260535 - DNA, 1340 bp, Cannabis indica
ctccataacgaactggcagcttcctcagaagcgaaaaagaagaccccatcactccttcgccacattttttcattctccatgagccgaccgttggcgccagaccccacactgagaatacttttttcaccactgatgcagccatctctttatttcccataacctttccagcacaagcttgttaatcactacatcctcaagggttatgtcttcaaacagttcgagcatctccatttccatgttgctatctctttccaagagtttagtactagctacatcaatgtagtcaacagacacttccttcgcatgcatttcctccatttgagaaaaagaaagatcactcaaaaccacaaggaaagaaagacgaattgcacgtagggagtaataaaatgggttactgtagtaaaaaactaaaagtcatagagactagactcaacatggagccatagttgtatattatgaacccaaatactctcgagcaagaaagcttttgaccaaagtcattgcattgacctcaatcactgatgatgcttatgatgcatatggtactattgatgagcttgagcttcttaccaaagcaattcaaaggtttgtcaattttgtactttctcttatcaatattcacttaactttcttctttttttttttttgaaagaaacttaactttctctttactaacatcctctcgcaccccaatttctctatactttttctcttctagccaaaattaaaaataaaaattgacaaatgtttttttttttgtcgaaaacaaaaacaaaaatacttaccacacatatttttaattttaaaaaaataaaaaataataaatatgtatttcaatttacatgtttgatttatttttttttcaaaaaaaagatccacgtttttaccaaactttttacaaacacattcttaatatttcgtattaatttcgttttcacatacatagcacaaatattccggatgaatttaaagtgaattgactaaatcttaaatttacaattttgacatgcttaaataattaattgtgtttgttccgacaaaacatgtcaatttatatgattctcttttgaatccaattatataaattaatgggttgagatgcaaaataacgttaaatttagaaaataacgttaaattaattgttgactaaactgctagaaaaataaaagaggaacgatattaccgaatgaaaaattctgggttgagtcgcggactaagttgctctttttaagacgttcgcggcactgttcaggagtgtgcaagcagtcagaatttgccggtcgtccccaggataaaacagcccagtcgtactgtatcagaaccccactgcactgtagagc

SEQ ID NO: 260536 - DNA, 745 bp, Cannabis indica
tggctgattattttagataaaacgaaccattttaattcattttatgaaaaattaaaattgagacaaaaatcacattttttcccacaagctctctctctctttcgaaccctcttcgaacccagctagggtttgatttttctttagcaattcaaggtgttttacagctagtttcaagtgaatccaagtcaaggtaaagcctctagcaacttcctccttagtttcttggatttcaagttaatagtttttgcatgaatttaggttttcgaactccatagttgttgcagttgtttgatgttgtttctgaagttaaaatattgttagaaataatgtttagagcaggtttgggggctgtttatgaggttttttcaaggtttgagcttaagggctcaaactttactctcacatggtggatttggtttctctgcatgttaaggtgttttattgatttagatatgttctgtgtggtctataaaacaggtttggaaggtttgatatgttttacagttcatttgagggagttatgaaaagttggaaatttcctgcactgaaccaaaatttcagttcagggggacctgtaggaaccgaaattccggttggtccccaggaaaccccatagaaccagaattctggtagggaaccggtgtaccagttggggcagttttgggaaccctagtttttcccatttttgtgatgtttagggtatttccatgttgtttatcgatagggaaacttttagttccaagtt

SEQ ID NO: 260537 - DNA, 3608 bp, Cannabis indica
atagagaaagagatggagttacacagagaaaaacagaaaaagaaagaaaagaaaaaaaaaagaaaaagaaaaagaaagaaaaaaaaagaaaaattattattttttatttatatagatatgtttaattttaaattaattttattttaattttttaatttttttaaaataattttttacgtggaccaataaaatggtgccacgtgtatattgtgtccacgtggacaagccaacatggcacttaacagctaaatttggacggaaagggtaaattgctaacagtttcctggttttgggggtttacccgcagaaatttaggttttgggggtttaatgaaactaaaacgaaagtattgggggttttgccgccatttatcctattaaaaataaaaagtaattacattagtgttaatatgtgtaagttaaattttacaaagatctttaaaaatatttttggtgatttagtgagtcaaaggtaatatattggactatttataactagtaaacatctcgtattttgcggcggatatataaaatattttaaattatatataaaaaataaattttgtattttaattaataataattacttaacaaaattatattaaaatttcaactattctattaaaaaattttcaacataagcacttaaaatattaaattttttgctaataaataccgaaattcgaaaaatggtaacataaatcctcatttatggtttaatttttattctgatgtgtgtgttaagttctgggttcgaattttattgtgtgtgtttttaatatttgagttttagtattttactaggattttaatgtttgagtttatatttatgagatctgtttttatttatttatttatttttatagattttgagaacttgaatttttttttttttttgtataagtacaagattttattgaaagaaacagaaaactagtagccacagaagggggctacttcccttaacaaaccagtgttcttagtcttggtaactctagcctaactagctaaagaatccgcaataacattttccgttctaggaataaacatgacctgaacatccaaaaaggacttacaaagagttaaacagaaagaaaacagagggtaagtatgccagccgaatgggagttcatgggactcaaaggcaacagtagctgtcttcgaatccatctcaatgcgcaccttagtgatcttctttgacagagccagttgaatagcacaggaaattccacaaagctccccttcaaggatatccttaacctaagaaaacccaattgagatacacgagtcagggatgcaatcctgcagatggattgtagcaaatcccacttcagtgccaaccatcgaggcatcaactttgacacaccagtaatcgacactctccgttgaaggatgtagcataggacaaacagcaggggactcctccagatcataccaggccttgttcattgagaactcatccattctacagagacaatcgaggaccactgcatccatagagcattgtctatccgtaaacagaacagtggtgcaccatttcacaaatacacgcagtgaacaattgcatctcagggtcctgtaaagtactccacaacagaccaaaatccagaaggttgttccaatggaggctgtttagacgaatccctttcttaaaccataatcctctggtgaaagagcattgacagaacagatggaaagtcaattaactctacttccatgtttcagaagccacagttgtagatagcaccttggataaaactagttctggaactagatgggagaatatcagagaacaatttctagatgaacaagttcagtctatgatgaagtttaatcttccacagtttttcccagatcgacattgaatctttgaatcttcgtctttggctaatccaatgcgcactctttacagagtgcttgcctaactttgctgcattttaaaaaaggatatcagatcctcttgaaatggccttatcttcagaatatcacttgcaatctcttcatcaaaacactccttgatcaaggcagcattccaaactcgggttccatcaagaaacaggtcttttaccttccatagagcttgattgtgtctgaactgaaatttatctttaatctcttcaaggttgcgccaagggatccacggcctatcccaaatgtcacacaaaccatcagcgatcaagataccggcaccttccacgcaaattctcctagcttcaagtaaactttcccagcatctagaattagtgccatgcttttctatttgccaaaaatctaccttggagcagtacttatctagaagcattttcacccaaaccttgtgatgtccctgcagaaccatccaactcagtttagagaggagagccatgttcatatctataaatctctgaaaaccgaggcctccacatctcttgggttgaccaatctcatcccagcatattaacgtgcagtcgtgtcatttatcagcatttcccacccaccaaaaacgagctagaatatgatcaagttgatcacacagagtactaggcacttgagcagttaacatgaagtaattgggtatgctttggaggacagacccgattaaagttgttctccctgcttgagataggagtttagctttccaaccctctaatcttgtcataattttctcctttaaaaatagatagtcgtctctctttttaacagtgaagaagaaacgattgcccatacacttttcagtagccttaaaggaattcataccaacaatagccttgatttcgtcccaagttctttgatttgtatttggagagaacaccaccccacttttcgatttgctcatacattggcctgaccatttctcatatttttgaatgcattgcataaggttttccacgttttttgtcatagcatgacaaaagaaaatcgaatcatctgcgtaaaataagtgggatatagggctagcagtacgagaaacccgaactcccatgatctctttattctcttcagccctgagaacaagttttgacaacacttcactgcataagatgaataagaatggggatagcaagtcaccttgccttagaccacgattaggattgaagggagccagtggggcgccattgagaagaatggagtaactgattgtggtgacacattgcttaataaggttacaaactttactgttgaatccattagcttttagcactcggagaagaaagttccattcgagacgatcgtaggctttgttcatatcaattttgatggcgattacaccaattttccccttcttatttttcatagactgaagaactgcttgagctatcagagagcattcagcaatccaatgacccgggatgaaggctgattgaaaaggagacaccaatctatccataacttctttgagtcggtccgttagaatacgagagattattttatagctgaaattgcacaagctgataggtctaaagaggtctacacggtcagtgttggaaactttagggataagacaaataaaggtgtgattgagtttcttatttaaaactccagtcaagaaaaagtcctttatctatgttaatttcaaatttattaattatttaatttgtcatataagataattttaatataatattttaa

SEQ ID NO: 260538 - DNA, 639 bp, Cannabis indica
ttctaaaatgatgaaaataaacaaacaaaaggtatgtgaaaccttacagtggtagcaacggaattaaatgactcatcccactcagatctctaacccttgtatccttttagtagcagagtatcaccaagatctgagcccgattctccttcttgttgattggactcttcacagtcttacatactatgattgaggactcacttgatgtgtgtgggcatgcactcaatcactaatggttgaatttggtttctgaagaatggatctggtatttcgaaaattcaagagaagaaaggaagaggttgttggaattattttacctggatcttagatctaatcacaagtatgttgatttaacaagctaaatatgaacttttaaaatgataataaattaaacacataaaagtatgagaaaccttacattgggtacagcggaataatatgtctcctcccactcagatctctaacccttgattcctttctgtcgcagagtataatcaagatctgagcctgaatgtccttctttgttgactctgaattctacacagccttcctcactatgattgaggtattacttgatgtgtgtgggcactactctataacttagagggttttgaaaaacaaagaaggtagagagagagagag

SEQ ID NO: 260539 - DNA, 585 bp, Cannabis indica
caaagtggtttcggttggaactgaaatatgaaaatctcccggacatctgctttttttgtggccgaatgggccatagctacaacaaagggtgtatggattacatgaaagcttgcgatgaagccccgttccctccggaactaaggtacgatatcaaaactatcatgggtaaagttaaggttacaactaacgctttgttatgcaatgaacagcttaacttcacaaaccccccggtggcatctttcatgacctccaatccggctagtgctgtttgtgttgccccccggagaactcccctccatttcccacctatggcactcttgagcaagggccctcccacggccaatcccaacaagtgggcctatacaaatccggccccacaccctacacccaagaccctcctcccatggcccaacccgatgcttatgcaagctcaaatactgctatccaaaccatcggcatccaaacagagaccatcaacccctcatacaccgctctcctcaatgccacaatgagtaactctagcgtccaaaaagcttctcctatctctaacccgagccacaccatcacaccccaaaactctagcag

SEQ ID NO: 260540 - DNA, 1113 bp, Cannabis indica
actctcacctagtaaaaagaaaatatcacaagcctatacagaattggacctctaacaagctgggatactgggactttttaccaaaggagaatgggagttttaggccaaggaacatgttcccgagagataggatggaacaggaacacttccatgaatatttacaagcagaaaaatgtgacaaggattggaaccgggctttgataatgttcagagataatagtaaggtggggtggagtgtcattttctacaatctctctcgggaaattgatagaaaattggtggttagccaaatgtacgatgatcgaaccataatctggtgtaagaatgaagaagagatggaaagcttgttgaagcttcacaagactgcaatatcgggtactggaggcacgattgtttctcttatcagatggtctatggaagagcaaaacagagacataaaaatagagtgtagaagttcatggatgggtgtggaagggctgcctttgaatttatggaacataaagtttatggggaaaattggagaactgtgtggaggtttgcttgatgtggagaaggacacagcagaaaaaacttttctgcaccatttgagactcaagttgggaggagatgaagacggttttgtacccaagtcaattcggttacactaccaaggctctgaattggtcctaaagcttttcaaactcaacgattggggatatagatttaatggtttcttcaataccatatggcatcaggattctgaattttataagaatgaagaagtaattaagaggagaagatcagaaggaactgaaataggagatggcctggtgcaacataccgacgttaatgggaccagaaaagatcagaggaataatgctgaacctgcaacgactttcttcgaccaaacggtggaactagcgtcggcggttgcagacgactatgatgacacgcggatcgaggaacatccgaggaagattttatgtttcagcagagagcgtacgatgatcgagaacgattctttttccacaattgatggttcggcggcaattgggagttccaaggaaggactacgagaatcaagggggtcggttactattcattgcatattcaaaaggctgtggagtgatctga

SEQ ID NO: 260541 - DNA, 501 bp, Cannabis indica
caattaaaaattatttacatataattagtagataatagttatataactaaaaaatttacaatatccaatttaatatatccttttgaaaactattactcttttagataaaaaaaattctctaaaatctatttgagtttaggataattgtatagtatttaatacaatttcaaataatttaaattttctacaaagttctagcatacaaaataacaaagtactagagattttttcaactaagtaagaatagtaactagtaactacttaaaataatattcttgaagctctaagaaatcaaaaaaaattcaccagaaaatcacttaatatatctacatgacaagcacaaataaaattatttatataattagtagactatagttactaagactttctcaatatcaatatattagagcgattgaaactaatcactcttttaaacaatttttttttaaaaaaatatattttagtttctaatttacctacacattatttaactacaacatt

SEQ ID NO: 260542 - DNA, 657 bp, Cannabis indica
tgtgtttgttttgtattttcacatgtctttgttacatgttaaattcttgataatttctaaatgtgtatgaatttatatagaaccgtgttattttctgttattaatttttgtagtacaaatttcgaatcttcattgttggtctaacttagtttgttgttttaatgggacaaatcccaaaggattgtcactcgttagataaacaaaatattgttagatctcaatagataagtatttgtaaatgcaacatctagttgtacatccaaagatgacaacttaagagatttataaaataagaataactttgactctcgcctaaatgggacatcgttggattcctattttattggagattatcctttagtttttcctcttagctttttcatttaagaaattgcttacatagtatatgaatggattaatggtttataaatcatttgcttatgatgtcattctatttttttctataaaattaaatggcatagatgactacataaatctctatattctattgtgaaatgatataaatcctcgatcttatataaatctcctacttgtatatgcttatttgaggcaacttaaacttgtagttagattagtagtggtggtccaagatagaataattactcaaggacttttttttggataaatttgagtctt

SEQ ID NO: 260543 - DNA, 712 bp, Cannabis indica
gtaactagacctaagccatcaaaagacacaaccacattcttatatatctatggaatttgcatcttgttcatagtagctttgacaagaacattctatgcaaagagaaaatatgcctatatccacgtggatgtaagataatctatattcgaatatggatgtacatttaggggtggatatgagttatcattaaattcttaagacaatcactctagattttatcttgtgcaaagaaatttgaaaatgtttgagaattttcatgaatttttggcaatgttgaaaaacattaaggtaagtggttaaagatcttgcgaaatgataagggtggagaaatatttggtggatatgcagttcaaagatcattaaattgaactttgaattgtatccaaacttacttccctagaaattcggattgcatatttatgaaaatgaaaggttatgattagttactagcaattttattaagtccttttagggaaatatcctagtgataaaaaaaatttcagaatgatgcaatggttgtgtacttagtgtaaatgattactagattcaggatatcctaatcgtgaacttaagaaaagctagaactgttaactaaggttgtcatgtttgatagctatctttaggggtgaaccatcctatggccattaagataacaaagtgttcgttttaacaaatactagttttctcaaaatatgactaaatctgaaaaaca

SEQ ID NO: 260544 - DNA, 1228 bp, Cannabis indica
aaaacttatacttggtttgaataatattcctgtttgatcattttcacctttttattttgttaatttaaaaaccctatttggttcttttaaaatggatttcttttattacgtataatatatatattttatttaagcttaaacgaaaatttttgtaaatcagacatagttgatcacatcaaaatattgctcttaatcaacaaaattagactagacaagccctttacaaataaaaggaagataacccaataacatgattcaactaaagcactaataagccaccaatattaagtataatatttttttttttatttaaatgtttatataatacaatatataatttaagattcaaattcaaaatctctaacacatagcctcaagtgattaataatgttcgtatgtaccaccgcgggtgcataacaattttattgtcaaagtttgttgtgtaattcataaggaattttttgtacagttgaaccagtcaaaatatatgaaaactatattttcgtttcaattctttaaaagtaaaattaacaaaaattattatgtttctactcataaattgggaaagccattaaaaaagccaaacatgttacgtgaactgttatacattaagttgaatcttcttatagtgtggttccttgtataattttcaagtttcgttgtaacaaaaccagttcaacaatatatatacaacaaattaagttccatccccatctctaactctttaaagttccttattatatcaatatatcgtttttctattaacaaatagaactatattcagttttcatttgtaccaaacctattatttattataatataccaccaattaattagtctctccaaactatatatatacccatcttataattaaccacaactttctcatcaaagcaacatatatacattttttaattgaaaaggctaaaaagggttatcgatcgagcaagctatggctttccgggcctgtttttctttggctctttttgtagctttaacattttcaagctttgaatcaagcttagcaactcgtaaactcctacaaacaacatcaacaattagtagtattccatttctaccattcttgtcgccataccttccccgattgccaccaattccttatctatccaatgcacaacagtctgtggaaaagcccatggccttgtctaaggatatgttcactattccgagggcgacgttcgggtctcctcccttgccggcggcgatt

SEQ ID NO: 260545 - DNA, 1199 bp, Cannabis indica
tatagaaaatgtttttgaaaaatatttttacttttttaattttaaaaacagaaaattaattaaaaaaatattagcaaaggacctatgtaagttaaacctcttatcgatcattattttctcaaatgtcttgtcaataaacactcatgtcaaaactttgagagcctactttgacatcaattttgtaaatactagaaattttagcatccgattggttgaatgtgagagtgtaatacttttcttaagtttgataaacaactttcaaaaatccacacttcctaaattgtgtattggtcggtaatttaatgagtgtacgtacatatatatttatatatatccaccaatcatcttctataactaattaaattataatcaattaattaattaattaatctcaatgcacggttgccattaatggtgaaaacgaccattactcgtctagtaatctctagctaacaagaatattattagctatctttggtaatttacttaagtgtgtcaaatttctaaattcccagagctttgggtaaccatgcagtatgcatatactatatataaatattacgttctatatatttgatggttggatcatactgatcatgtcaatatgatgtagtccatgaattttcttaggtttagttgaccatattaattgaaatggataatatgaaagattacagggaccaacaaaatcttgaaagcagactcaggaaaaggtcaaaaattgagtgtgaacacattagaagtagagattgaaaataaataaataataatgttattataagctacttgatcatgatgtatatatagtagtaaacatcaattgtcatatcttatttcatcaaagtagaaagcaaagctaaaagaaaaaaaaagaagaagagtagaaagcaaagcagtttttggttttgagcataaacaaacatcttcaaaataatttgccgacatgataaaaatattaacaaattgacctgcgttaaaatcaacgacaaaattagtttttttcttctttttcttttcacaaactccaaaacgacaataatgtagcaccactattcatagcatattcggaaaattaattgacgaaaatttaacttgtactattttagaaagtagtagagggccctattgtcatgtagtaaaataaaaattcaattaataattttttataaaatatagaatttaaaatatagtattttttt

SEQ ID NO: 260546 - DNA, 2022 bp, Cannabis indica
ctgacaatgaaaccaagacccaatactttcatgtctatccacacaaatgaatatacatctaaaaacaagaaaatgaatggtgattcaaatataacttacttcactggtgctaacagtaaaatcaaccacacctctgtgcaggtgagtttattgtcctggctgaacttataagttaaaaaggcaataaacttggacagatatcccttaaatgttatacattgaactttaattcatcattcaaattccatagacttactttcaagaacagccttgctcaagaaaaacatatagcgaaagtaaaatgtaaataaattgaataactaggtcccaaatccatagaaaaagaaatacggaaacagagaaatatctgtaactgataatgaagtacataccacaacaaaagaatatcaatccaacgatataaataaaccagcaaatacttgcaaataagaaaagaaaaggaaagataatcattctatgcacttaatcaaactacactacatcaagaagtaacactaacataaaatcaagataaaatttgtatctaacatccattcctaaacctaactcggaagaaaagaagaaacttatcaagcatgcacttcataaaacccaaaaatgcgaacccgttacatataaagtatacaaaaaattgaaattactgcagcaaatacttacatctgttgggttccgaaaaagtaaacgagtactttcttccaatcagcagggtagccccacttctccggttcacttacctgtcaccagaataaggtgataagcacaactgctgtcaaattgagtgttcatcgcgtacaaaaggtagttcaacgaaacaaagagaatagcataaaaactcaaaattcatagttaaacctcgtatattccccaaaagaaagaaaagcttcaaccagatctacaaaactaactactaacaaaacccacatcaaacccccgggcacaaagaaactaagagcacaaaaaccataagcaacccaaaagagaaactaaaaccccaattcatcacccaactaggtcaatcaatcataatatatagaaacaatcaaattatgtctatttaacttaaagcacataccgtggccggccaagcagggaaacccttgactttagcaagcacaagatcgccgaccttccactgccggcgagcagcggctgctgcggctgctttactgacgccttttcgtcgactgggcgccatcgaagacccacccgattaaaactagagcagtgctattgagtataaattaaataaccgagttccgcgatttttcgaaatcgcccaagaaattgaacaatttcgcactgtttgtaaaaaagaaaagcaggcattgaagctcaaagatcagagagagagagaaagagagataggaagaggatagaaagtaagtgagaccggtggtgtatggaagaaggggagaaaaccctaattgcacaaccgaagagaggggttagagttagagagagaaagtggggaagagtctaatagagcgtttttacgtggaagaacggcattcaaactgagatatgagttggttggattggagtgatgataaaatgcgccgctgcagtataccctaattcactctctaacgtgcgctgcaacggcgtatgcttagtgagttcaactaaacatgcgcatgttggtgaaggggcctgaactgaactatgtgcatttgcacgtgacccaccaactcattcatggccatttgatttgatttcgtagtagtttcgtaatccaaaccaaaccaaaggcccactgtttctcaatttggctcatactgtcgtaatcacccattcatcatttggacttctaactaaaaatatttatgttttgagctaggcccataccacctacactcctttcaggtctagcgttctatttttataatatttttatttaaaccttaaaaatttatgggaattttgattttatatacttaaaaaattaaaaaatttattattaaaccaaaaccttttaaattaaaaaactatgacatttttttc

SEQ ID NO: 260547 - DNA, 1284 bp, Cannabis indica
agttcattaatctacatttcaggaaaaatattaaattaagaaaagtttaacagttattgattacctattatatgggtaaataccattttggaccctgtgttttgcaaaaattatagattggaccctgtgtttttttaaatgacaaaatggatcatgtattttctaaaatagtaaaaataggaccctgagcttaatttttgacaactttttttttttagtacaaccaacttgaagaaaatgcttaatacgaacagatacaaaaaatgtaaacagttttgtcatagcacttttagatcggattataattaaattttattttgacaaaaaatcaatttagggtcctatttgtactattttagaaaatacagggtccattttgtcatttaataaaacacagggtctaattggtaatttttgcaaaacagaaggtccaaaatggtatttaccctaaatctaatagcaaatattgattgtatgttattaataatgagtattatatatatttataaattttgaaaaatgcaacttttgacaaaaagtcattgatcgtaacaatatgcattgcatcaatcacgtacactatgaatccagtcaattacaaaccgaccaaaatcttctctcattatgtaaaattattagactgttgaataattaattgaagttaattaagtaagttcttttttgctcttatgtttctgagcgtagttaatatgtagttatgtacaggcatgcatatacatataatataaacttgaccatttataataattaatgttcccagttggtataataatactcagatattaaatgtgaagatatagtacagtggggtatatttaaatcatgacttgtcatcaacagtgattgaatctgttataaatatatatatatatataaatacacgcgttaaacgcgcggtgcataaacaatgatatgacttaacatagagaagtgaaaacaaaagcttcaatcaaaccatgacaagactcaacatgcaaggcatgcatgaataagtaatatattaatagcgcatgcagtggcacataaatatatttcaacacaaacaaacaactaacaactgatgaaccctaataatttaacgtgggtgctacagatataactaaactgttcacacacacttaggtcttgtttagtaatatttttatttttaaatttaaaaatagaaaataaaaatatgttttgtaaaatttattttttaattttatttaagttatgtctgagtccggagtcgagtccgaatccaagtcggtgttaggttctagc

SEQ ID NO: 260548 - DNA, 925 bp, Cannabis indica
actttgccaatgttctggaaagaacataacacttattcaaggtgtttttatactttatcgctgattatcacatcagtgtaaatatagtgcattgatgaatcagggacattgtcttttgaagcatataatcacaatcacatttcactgtgttgacatcattgtaattgtgagtaactatatgttctgcacttaacagattttgtatatattgaaccataaacatgaaaactacatataaacataactgaattttaatcttttattgataacaaatcatattagattgaaatcagttttattaggacttagggttgaattatatggattaaaatgttgggcaaaaatcacttctaaggccggtcatacaaaggaccactttttagttacaattttgctagttttttcaatgaagtcatacgatctactaagaaaaaattacaaagtatcgagcctagagtttctatgtatctcctatagcaagtcaagaacaattgtattttctacaatgggaacccagaaaattgaagatgcaaaattaaaggagagaaagataagaaacttactgtttgaagctttggtgttgtttggatgaagctgctcgaatctttctgctagaaatcccacgacagacttgagagaaaaactctgtttgctctgaaatgtttcgtgaagaaagtggttaaagtaacttatgaaaattttcagcactatttataagccaacttaagtgtgcaaaagaaggacgtgtcttgaggtactaattaatcagagcattaatttgctgaaaattgaaggaacgcctagtcagactcacatcgaatcatgaacaaatgcattcaacacgtgtcacccattcaaatgtaaagtcagctcggatgaagtctacatgcaacttcggaagtcccgtacagacttggggggcaaa

SEQ ID NO: 260549 - DNA, 1401 bp, Cannabis indica
aggagggatattggagtgattgttggtgttgatagtaatcccgagaatactacagtgctcgaggattgtgactctgaagtttcctttctcttattttttttatatacttattcacttttttgaacatgctcatatgataatattatgatgttgtgtgtgttgcgatattaatgttttttctctttctcttacagattcaggtatgttccaccaactgctcacgagttatgatgagactgaggatgtgagtgagtctgaagaagaggaaagcgctcaaaaccttcatgtagtccctcgagcctgttcccaattgaggaagccttgtccctcagcggtagaaggtgaggagaatgctcaagcctctccttctgtcccaaatactggtggccgcatgaggagaccatccatcgtggttcctagacttcatctcgatgacactacaattcagatgctagagtctgtgcacgacaacattgacctccttgttcgaacatctgcagctgttgaggtagtgcgtgacatgtcccattatgaaggtgataccgtcactaggggagtccaagatatccttcaggtaagtgacagactatttttcaaaatatattgataatggcctatcttctcatgtgcacgctcatgtattttttttatatgatctcacatccttttattgtgctaacaccctttcttcctcttattttttagggtgtaactcaattcatggtctcccaccttaattcttcaaatttacaagagaagttggctaccacagaagcagcccttgaggagcagaagaagttctctgctctttcggacacaaaatataagcgtgacaagggtgaacttgaggacattctccgtaagaggctgacagaacttagtgatgcgcaaacacaactagaggagagaaagggtcaggtgaattattacattgatcagaactttgttcttgcgaagaagatgattcaatggttaaggcattgaaggacattatttagaagcatgaggagagagcagcgaaagaccgtcaaaaatacaagcgtgtctttgatgaccaattttatcagttgtggaaaaataaccaaaatcttgacctttcacacatgtttttccagactagagataaggagcttatgaagctcaaggcaagactccttcgagaagccacgcttcctcccactactaacattcctagtgctgctacttctatggacccgcctaaagatactcttccttgagacttttagcctatgtgctatctatcttgagcgcatgtgctccttagttttattacactttagacaacttgcatgggtaatttgtgtttttctttccttgaatactttacatccaagtacttgacatactctattttcatagttatccttagttaaatagcta

SEQ ID NO: 260550 - DNA, 1767 bp, Cannabis indica
ctaggcaagttcccctgaggacggttgctatatgagttgccaactgccccatctgagtctgtaagtcttttatggatgatctagtctctgtcataaactatagcaataaatctatctgaagagtagaactcccactagagccttgttgcagtgattgttgttgcatctgcgtttggttctaatttccttgctgatagaacccactattccttcgaccgcctccttgattgaacccatagttgttgttttgagagtaattcccaatggctttttcttcatccattggcaaactattcacatctaccgggcattcttcatagggatgagggcctccacagagctcacaatcaacttgagcttgttttgcctgcacaactatcagttttgttagggcctctacctgggctgtcagttttgctatggcatcaacctcatgcataccagccaccttctttgtctgacttctttcagttggccattgctgattatttagggccatctcttctagcagttcataggcttcatttgcacttttcctcataaatgccccaccagctgcggcatctataagtgttctagtattaccaacaagcccattgtagaagttgtggaccagcatccacttctcaataccatgatgaggacacttcctgatgagatccttgaacctctcccaagcctcatggagagcttcattatccagctgacataaattattaatttctcctcccagcttaggagactttgctggaggaaagaacatagacagaaacttcgttgccaaattggtccatgttgctatagaattcggtggcaaggagatcaaccaactcttggctcgctctctcatcgagaatgaaaaaagtctcaagtgaatgacatcatcactaaccccattgactttgaaagtctgacataactccatgaagtttgacaagtgcagattggggtcttcagaggaaagtccaccaaactagactgaagactgcaccatttggagtatggcaggcttaatttcaaagttgttggcatctacggcgtgtggaattatgcaagactgaacccccataagagttgggagaatgtaatctctcagactgcggccatttgcttgatcctcaacggcacctccattattaccgttgttgcctccattgttaccaccattagcattcgtagccatgatttcttcttgctgaaattctttcttgcctcttgtttcttctgtttctcctacacgtcttcttaatttcaggatcgactggcaatatgacaccctatccttgatgtcgcatacaccttcaattcctaaaatagacaaagacaatattgaaagaaacaggttagcaattagcaagaaagataaaccaaagtacaatttaatataatcttatgcaatatcaatctttaaacaattccctggtaacggcgccaaaaacttgtcacgaaaattatgaacaatacgcaagtgcacgtaatcaagtagtaaactcacacatgtgaggttgaaccacagggaattggattgaataccactagactaaatttatgattctatttggcaaaccaatatttttcaagattaaaaatagaataaaaattcaagaagcttaagtagacagatagaaattaatcaaaatgagaagacagggaagagaatcctattgatatgtttacccaattgttaatacctaattactatcccatttcctgttgtgaatgacagattatacaaattaacctagctcttttcagatcttctaggtt

SEQ ID NO: 260551 - DNA, 1374 bp, Cannabis indica
caacatgatcaatcagtgtatctccattgctactcttaatgcgtgtctcaatggaggccaagttgggagaattgtttttcgtgtggcatccgtcaaggtgatcatctttctctttatctcttcatttgggttgaagaaattctttcaagattcttagagatttctcttacaaaaggaaaacattaaaggtgtcaaactgagcaggagaggccctgccctctctcatatactctttgctggtgatattatccttgttgggtgatccaatttggcagaagctaaaggttattggaaatgtgtggagaacttctgtttttggtcaggacaacaagtcaacaagattaaaactttcatttttttcaataacaatactctgaatgagatgaaaagaagcaatagagagctcttgggcattaatgagttggatggtaatattaaatatttgggcttggcctctctttagatcgagacaaaaagagatcaatttaaatattattatggataatattacttcaaaactccaaggttgataggtgaaaactcactcaaaggtcgatcgtgctactcttatgaagtctgtgggccttgccatgcctatgtatgctatgcaaaccaccaagcttaccaataggctggtgactaaaattgatggcatggttagagatttttggtggagttttgagaaaggggatcatgggctccactaaggcttgggacaagttgtgtctcccaaattctcatggtggtttgggctttcgtaaaactagagaaatgaatcaggccttcttaactaagcggggttggaatttgtaatctggaggcaactctccttgttgcaagattttgaaagccaagtactttcggggaaaatttttccttcattgtagttacaaggactcttattcatggttttgaaagattgtggtaaaagctaaatcgacgatttggaaaggatcatgtaaattggttgctgatgggaaggatactaaaatttgtgaggatccttcgattactcatggtatcaatttctaccctaaatcttgcaaaccacttaacagaaaatggggattgggatctctaaaaacttaactacttgtttaatcatgataccattgtgaccatcttgaaagggggtaaaccttctagtaggggaagcgactcttgggttcggactaaggaaagtagtggtagtttctcttagaagttcgcttatttaatccaggcccttaatcgagctcctcattgcgtgatattgccttacctctagaataagctcaggaactaataaaattctagagcgtcacaagatcatgtggtgaagtattctctcaaatgcacttcctgatcgctctattctgagcgatagatttcata

SEQ ID NO: 260552 - DNA, 695 bp, Cannabis indica
aataaagaaaagaactgttggtggatgaatttcagatcgtcacttgaatctccgctcttcctgccgctctctgctgtattttaggctttctgatcgctctctgctgtattttagggtttctgatcgctctcccagacttccaatcgcagttttctatttataactaaaatttagggttcgatggacgaaattgcccctggtccgtacgggatctcgccgcggccaagcttcctctcgccgcggcgagataattgcaaaaatcaggtctttctgtatctcttaaatggccgcggcgagactccccatcgccgcggcgactgtagcattccaaagtttcgagatctagccgcggccaagttgtgtctagccgcggccatatatacacaattcctcaaaaattgtgttttcttcggctcagctcgtcttttattgaatttctgcacccgagacctcttttattccaaagaacctgaaaacatagaaaacaagcgtaattccgtcccaacacagcgaaaaacgcacataaattagatccaaaacataggctaaaaatagcctaacaaactcccccaaactgactctttactcgtccccgagtaaactaagactcgaactaaaaacaaacaaacaatgataactaaactttccgacgattgaactgctaccaccacctgcacaacttcaatccatcaata

SEQ ID NO: 260553 - DNA, 840 bp, Cannabis indica
ctcgtattcggcctcgttgtttgaagctgagaagtcataccgtagggctgcctagagtcgcggtcctgtcggggatatcattgccaccccagctccggatccgttttcattggaggctccgtccacaaacactctccatgtggggaccgatggtgttggcgcatttgcggtcgcctcggcttcattgcattcggtaatgaagtctgccaaggcttggccttttatggagattcggggaacgtagtgtaagtcgaactgacttaactccattgcccacttgaggagcgtaccggatgcttcttgtttttggaggacttgccagagtgggtggttggtcagtaccttgatcggatgtgcctggaaatatggccttaattttcttgaggccatcaggaggcagaaaaccagtttctcgatgatggggtaccttgtctccgctcctatcatgcgcttgctaacatagtacacgggatgttgagttttctcttcttcccggactagggcagcgctgaccgcgtgctcggagacggccaaatataggaataggtcctctccgagaatgggttttgataggataggaggcttggccatatgttctttcagctttttgaatgcctcctcgcactcgtccgaccactcaaacttttggcacttcttcagtatgttgaagaaggggatgcacttgtctgtagaccgggagatgaaacggctcagggcagcaacctttccggttaggctctgcacgtctttatgctttttgggggatggcatgctcaggagagcttggattttttttgggtttgcctcaatccccctctggctgacgatgaagcctaggaa

SEQ ID NO: 260554 - DNA, 2328 bp, Cannabis indica
actgttgcttatgattgcttgtaacaaacgtaatcgaaacaaaaaaaactcatgatttgttgtcttctcagtattcctatgagcttcttctgcaatttctgcacaagtctcaatctaccactgtacttggcattatcaatgaacatatcaactttcaaggtatacttctcttcttttgcttcttatgtaacagtgcttgttttacttgtatgcaatgttttatgtatgaatgtgtatggtttgcagtttctcctggacagcccagctcaatctctgatgatgcagatgctgttacactgactggaaacggccaagatgctgtcagtcagattaatcagaaggaaatacattggggggtgagtgaacaaagttatctctttcaatcgggtttgtttttgctttttttgtttgttgctttgtgtgctgagtattgcacttgtgattcatagaggcatgttggtatgttgaatttaaaatggaatctgaatgccttttatatgttttccctatatgactgttttccatatatgtttgcaatactttgatcaaatgaattcaaataatttaaaatgtgtaaagatgaataagcatgtttatataaaaagggtgctataagaattcccaacaaagctatactaactgaaagtgtagcattttttagaaatgcatatcaattccaatccatcaaattttctttcttttgatgtaaactgtttatatatggagttaacaattttgataatatttctaattacgttcttttttgattgaattgagtgaataaaggaattaggaattcctattaactccaatgaataaagtaagtaataggaaatttaagtagttgccgtattttttatagttgctggaagattctttggaagaacgtttggaaaagactgggggtttgctttctgattctgaaaagccagaaggagaaactaaagagtccgagtgggaggaaaataaggtgctagaaatgctctttttttcttttactatccatatctatgtaacctcagtttagttgtaggatattaatttggcaatccactcttgtgatgcttaaaattaactcatgtgttcagaaaagatcagcagatggaggaaagcagggttcaatagttaaaaaggtgaaaaaagataaggcaacgggagcaacagggaaagccactcgccctgagacaaacattgtaactatggcaccaagagtcaaaccagagcttcctttgcctacaatgtattctctcatcttttccttctttctcttatgtaatatatacatctttctatctatttatctatgacctaggatgtgcttattattagaaattctgcatatttaatggggtaaagtgacattccatgtgggacttcaattttttaatttgatgagttaatgtatggagaagctaccactgtttccgtaatcttttattttgttgcttcagtccagttgaggttgagcagtctatacttgatgacttaagaaatcgtgtacagctgagtggtgttgctcttccatctgttagtttttatacattcatcaatgcacataacgggtattgtcttcaatttttgttttcttttcagttcaacattgtctttttctttacccctcactttcttatcttcctgtctttctttttctagtttaaactgttctactatatcccatgacggttcattggttgctgctggattttcagattcttcgctaaaggtttatttttcttcttatttttgttctttttaatgaaaagctaaaggtttgttctttattacgcgggcaagtggcgtgtcaattgtttctgtcctttctactaaatttggtacgtattctgcagatttgggatatggaaaagcttgggcaacagtctgttggttgtaagtcaatcctctgtttctaatgcgttgaatattcctgtttcataaattaaagttaaaaaaaagacacgtgcttgtgttattattattattttagtttacattatgaatgctcacagtttaagtgctacatttcgttaaaaaatttctggcagcggtgtatagtatggtaatatctctttaggtttattactgatttgcactgtttctgtgttttgttcaaagcataatttcaaatactgctccgctatcagctgttttgcagggtgatgataatgcaactccagttgagtttggttcaaatggagtaaaaagaccatataccttatttcaggggcattcaggaccagtttattcagcttcttttagtcctatgggagattttatactttcctcttcagctgattcaacaagtacagtcatctactctctctctctctc

SEQ ID NO: 260555 - DNA, 728 bp, Cannabis indica
aagtttcatgagagatgtggagagctcaggctgaaccatctaagttttgctgatgatgttctacttttctgtaatggggattacaagagcatttattttatgcttcaggggctgaatctgttctctcaaacatcaggtttatttcctaacccttcaaagacatctgtgtattgcaataacatgtgtgacactgatattcagagaatccttgatgcttctggattcaaacggcatgaagttccttttaggtacttgggagtgccaatatgtgcaaagaggatttcctcttcagagtgctcactgctggtggagaaaatggtagccagaattagaacctggagtactagacacttgacttttgcaggaagggtggttcttatcaactcagtattgatggctattcactcttactggagccaaataatggtgttgccaaaaaaaagttatctcagaaatagaggctatttgcaggagcttcctttggagtggcagccaccaacttaagggagttgctgctgtagcttggaggaatgtttgcaaggaaaaatcagcaggaggtttgggtctcaaacaggtaactgaatggaatattgctgctatgtttaaatatgtttgggcaattgcaaaaaaggaagataatatgtgggtaaaatgggtacattgtgtgcatataaaagatcaatctggtgggaatcaaagcaaaactaatgatagttggtattggagaa

SEQ ID NO: 260556 - DNA, 723 bp, Cannabis indica
ccatcggtggtctcaaatttaatctcaaattaacgatcaaattatactatatacctcatttgatgtgtttaatttttatctaatttcggtacaatattcataaaataaaaagaaatatatttaaattaaattttatttaaaggtatatttaattaatgtataaaaaaagaaatattcttcaactttctctccaaattaactatgaccactacagacttatccaacactatttgtcaaatttaaaactcaactattcacctttgattaaaattgaaaaaataacccctgaaacattcatgaccttattaaaaaaagagaaaaaaaaaaactgaaaaagtattgactaaatgactattgagtcttgacgtagcatctggtagaaaaaagagctaaaacaacaaagggtggttgatttgggcggtaagcacgtgaaaagcaatttctcatctactttcaattataacaaacacatgagaaaattaaacaaaatttctaacattgttacccctgaataatcattagcttgatacttaataaatacgtaataaaccaattatcagctaatggaggtaataattacaatcaaagtctaaagtttcgtcagtaattaagttagaataataaagagaaagcttaaaaaagaattagaggaagagtactgtcttagcaaaaaataattagaagaagagacagtcaaggggtatgttaatgtcaaaagaaatc

SEQ ID NO: 260557 - DNA, 900 bp, Cannabis indica
ttactacattatttttttttatgaattttgcttttttgaattgttaatgtgcggttcaaaccgcaccgcaccgcacattataaaaataccaatttttatatttagttaggtccaatatgtgaatgtccaacccaaaacccactaattattgtattattaaaacttaatttttattcatatttattttcaagccttatggtaattttgacaagtgttacttaaactttgttgtatttctgatagtccaaaccacaaaaatcgcaccgcaccgcaccgcaccacaccatttaatgtggtgcgattttcgcaaatttttagttttgcggtgcgggtgcggtttggaaaattgaaaaagctgcatgtgcgagttgatttgaaaaaatggtcaaaaaccgcaccacccgcaccgcgaacacctctaatgtattgtatttaattattacggccaacatttttaatacagtgtaagctgtattatttaatatattgcaaatggtctgtattagcttgtattataatagttacaaaagatttggggtcaaccacaatctccgacccggaccctgatccagacctgaacccaaactcgggacttggacttagacccatacccgaattctgaccccaaaccccacacttaggctagggacccgagactcggacccggacacgaacctagacttgagacccgaacttggaccccagaccacgaaccccgacctgaacctgaactcaggacctagacttagatccgggacccgaacccaaattcgattcgggacctggacatagattcgaacccaaactcgagacccgggacctgggactcaaacttgactcgtagtcagtgtttgggttgagtttattaaaaatatattataactttacacaatatattaa

SEQ ID NO: 260558 - DNA, 1258 bp, Cannabis indica
tttgacatttatgtggttgaaagagagaattggcaattttgagaaaatgggaaacttgaaatgatgaaataggaaagttggaaaagtggaaggcttgttttcacaatgctatggccggccacctctgcttcttttttcacatttatttttcatttcttaatgagaagtaattcaaccctaaccctatgtggtcttctataaatagaaggtaaaggcttcaggttttacagactttacagcattattttccttcactcaaaaacactcttgaagccgccactctctctctctcactttcttctctgttttttgaaatccctctaagtgatagagtagtgcccacacacatcaagtaatacctcaatcatagtgaggaaggctatgtagaattcagagtcaacaaagaaggacattcgggctcagatcttgattatattctgcgacagaaaggaatcaagggttagagatctgagtgggaggagacatattattccgctgcacccaatgtaaggtttcttaactttatatgtgtttaatttattatcgttttagaagttcatatttaggttgttaaatcaacatacttgtgagtagatcttagatcctggtaaaataattccaacactttagacactggatccactcccggagccaattcaataacaaattcaatttcccgaacaggtggcaatcccggcaaatcttctggaaagacatcaaggaacttgcataccaatctcgtatcctcaggccctgatgccacaggttgggtggtgtccactgcattaactatgaaccccagtcaacctctatccatcaggtctttagctttcaatagtgatattctcggtatgcgtgtcgcctgaaccttacccacgaacaccgctgggttagtactgtcgagctcaaacaccaccgtcttccgtttacagtcaatcatcgctctatacttagacagaaaatccattccctggattatgtcaaaatcagataattgcaattcaattaggttggcggtcaactcacaaccgtcaatccaaaaagataaggactgaatccaccttgtggatactattaggtctcccgagggtaacagggttccaaaccccgaagcataaatatcacatggcttatgaaaactctccatcactctactcgatacatatgaatgagtagctcccgaatcaaataacacagtatgtgcacaaccattaatatataactgacctgtcacaactgacggactagcatcagcatc

SEQ ID NO: 260559 - DNA, 614 bp, Cannabis indica
tccagtgaactgacaaatcagagaataaactttcgaacatgtaattaagattatattccactgtgttgacaatactataatcattaacaaattcatatgttctggacttgaatagaattcatacattatatatatataattgatgtcgccaaattagttacactgcggtcgcggtagtaaacggactatatgtcgtatccacagggaggaaaaatacactcaaaaggaccgttagtaattttacgagaataaaatatgaaccttgaatgtgatgtgagaatattgagaaaatgattttttaaaagttaattaagtaattaaaatgagaagtgatcagaaaatgattatggaagacacaagcttcgtacatgcaattatattttcctaataaaattgattctttaacctcaactataattctacaccattaattatagttggaaaatgtgtatgattaagctcactagaaaaatatgttctctaattaaattaatactacttctaaaaatactatcatattatataatttaaatcgacaaaataccaccggcagaatgcagtaaaaatcatataatataataaacactctaataattaatagcctaacttacata

SEQ ID NO: 260560 - DNA, 931 bp, Cannabis indica
ctaaattgagctaaaaggagacaacaagatttatcctggttccggtcctagagatcaattcgatccctggccatactccagcagagaaaacatcaccaattctttcattaacatggagaacaagagagtagaaatacaagtaccaattcaagagcaacacagctttgcaacactcgagaaacacaccaaagaaacagtctcagtttctcaactcctacccgagtatagcctctgttattgaccccttcaagaacattgtttcacagcttagaaaactaagcactcactctctaaactctctcttaattctcaccttacagaagtgaaaagagtagcctatttataggtacaactcacagctagaaaataggtgcaaaactggcaccaactaactaactaacataaccaaaagttagttaagtgtaagtgagttagtttttaggttggtttagaggatcaacttccacaaaaatttccaccttgattctctaaaacaatcttctagctatcttttcacagaagccttgatgatgttgatatctcaatatgttcagcaagtaccaatgttcagcaaactgagacaatgcatcagtttgctgaaagtgagaaccttagttcccatgtcagtagggttgtcacttgtgtgcaccttttccaattccggaaccatatcgttgtaacgtccccgcttcaagcctccattgggtccttacacccacggaatgaatggctcttatacacgagtacgtcactctggctgcttcatggactgatgactgaccctacagaccaacacgagtgtttccagcgtgctttgtcctcactcgcacgcttcctgggaaaacttcccaggaggtcacccatcctaaaattgctccaggtcaagcacgcttaactgtggagttctttcgtgatgggctaccgaaaaaga

SEQ ID NO: 260561 - DNA, 629 bp, Cannabis indica
agacccaaactgaggctggaagtcgggcccagacacggccctgtacccagaccagaactgaaacccggacctggacctaaatctgggaccgatcccaaaaacagacttggacctagatagggatccggatacgaaactggactcagaccaagacccagactgggatcgaaatgcttaacctagatcttgaccgagatcctaacccagacccaaacttggcccgcactcaggacccaaacttggacctcgaaacgaacctagacttagataagggtccagacctggacacaaacccagacacagactcggacccgaactcaaacacccacacctagaatcagaccgaaaggtagacctggacccggacccaactcgaacatagaccaggatcagaaccaaggacttacacccacaactgaatccaacctctgatcgggattggaacttgggactcggacccaacctagaccaagacccaggacgcgaacccacattcacccgaaccagaatcaagatagcgacctgggaaaaagaactaggaccgggacctcgtacccgacctagacccgaacttgaacctaggacccagctcgtgacctgacaccagaaatggaaccagactgggaccc

SEQ ID NO: 260562 - DNA, 1429 bp, Cannabis indica
ttaacgttgatgaaaaaatcaccttcagtaaaatttttgagcctcctttcctatagcatagccgaaccatattctcttcttattctcttcatattttcataacttgagtgatagagtgagtgcccacacacatcaagtggtatctcaatcatagtgtgtaagattgtgaaaaatacgatcaacaagaaggggagaaagatatccaggttcagatcttgataatgctctgctacagaaaggaatcaaaggctagagatctgaacgaaatgagtcattatatttcgctgcaatctatgtaaggtttcttaaactttatatgtgtttatttcattgttttaaaaattcatattaggatattaatgaaacatacttgttagtaaatctagatcctgataaaatattccaacaagaggatctaggccacgtctcgtgcaagcggcataccggcaagccaagggaaacgtactagtgaacctttggcggcattcttggacgcactaccgggtcggcccgataatgtccatgagtactccaactcatggagacatatgagtcccctcgtggtcctcatatgcccgccctactagccccactaactagtagtagctcacttagcaccaaggtgcaagggatggtggagagctgacaccagggtacccccttaaagagcattctgaacttttagccttctactaggaacatacatgattttggctctgtagacatacggccaaactgcatagaaaatcacatagattcgccaaacggattgcaccattctatttgtagacctaaataaatggcgaataccaagtctcgtcccgttccagacaatattgaagatatttacgaaaatgccactgcatacaaactaagcatcaacatgccaccagcatgcaccacaacatgcgccaccacttgaccaccacttggccaacttgtgggcatcacttagcttgtaacgtaccatcttagcacgcacgtaacactcagctacaggccctctcaatgagaagggacttcattttcttcgcttgctttaattggctgcatatagtagaatctcattaactttatatattctcagtcttttgaaaaaattgaacgagtaaatagccaaataggtcactgaccaaagtgagcttactataattttttattttctttaaatacaataagtgttagataattaaaagaatcaccaacagtattctcatagtaatatatattttgagaaccaaacagattttaagacaagggagaagcaagagagaatcagaggaggaagatgtgatctcaattccaacttcaaaatgggcataccaaataaaaacaatccacaattttaccacatttgtcgtagacaaatctaagaggaccacccatttgaagtagagctcaaaatggcatatgggtttttttttttttt

SEQ ID NO: 260563 - DNA, 558 bp, Cannabis indica
cgatttctgatctcttaggaatttctaaaaactataaaactcgaaaatcccaatttttgctttcaccgaaacactacaaaaacttatccaaatcactccaaacatcacaaagcgcatatataccataaatattaccatccttatgtaatagaaataaaaatcggccccttaaatgaaaaacgccattaactttcagactaagctttaagtagttccaaactcaatttaaaattcaaaatcacctcaaattcaataagaaaatatcggaactagtcccagattacccgagaacaattctataatgtcggaaccttcataactgttctaattcacaaaaaccctatacgaaacaaattagttttaaacttaaaacgaaattaaatcataccttaagctttccctcttcaaggatttgctatcctgctactaccggagcttagatcgctaagttttgaatttaaaatcgaataaaataaatataaggggagaaggttttatcgaaggagggagaacgaggttttcgttcgttctgttcgctgataacttaatatatatata

SEQ ID NO: 260564 - DNA, 576 bp, Cannabis indica
ttttttaaaaaaatattataagaaaaaaaattattgtaatttgtaataaaataaaaaataattataaatatatattaatatgtatgaatttatttaaataaattagataacaaatatcatacttatttttacttattttggtaattgtatatttaatagttattcaatcatctagcttattaaatacttatatacaattttttcaacttacatctattttaaaattatatttactaaacactcagcagctttttttctacaacaactttttctcacagcacagctacagctgctttttctcacagcacagctgtgccaaactggccctatgtccattttgttaagttttattttttttaacgttaaaaattactatttttacctttgaactttgatcaatacaaaatttgcttccttttattaaaaaaataattttgataaaaagttagaaattaaactaaaacaatattatgtttatttaaataaaatttaaatttttgaagaaaaaagagagactcaaacttgttctcgtaaaatttagtttttacaaaaattgaatttttaatattttttttt

SEQ ID NO: 260565 - DNA, 567 bp, Cannabis indica
tctctctctctctctctctctctctctctctctttaaggatgaaaggtgatataggattaataatataattgatgagcgtggaggaagagtgatatacatatacttgtacccacttagttgacataccatgttatttccaactcctctacaattggctctattaggtatatgtctttggaaatatatatatacacacgtatatatgatttgaaacctagctatatatatccatgtatacaaatataaatatatatatatataaatacatcagagtactgctgtatataccaatttgaatctttgatggtgagtcacgtactcactttacgtacaggccagcttcaagaatattattacttgttgcttggaaagaatatatttttttttcttgaaataactcgtggggttcgtcatactctacacactgtcactacattaatttgttatttagtgggaccaattgtcaaataaaaactaggacgttaatacaattggaatccatgtatacttgcaaatctttttaattaaccaattcaaaaaaattaaactatttttaagaacagact

SEQ ID NO: 260566 - DNA, 510 bp, Cannabis indica
aaaaaaaatgtgtaacttaatgtcacgaaagaaaaaaaaaaagaaattccacaaaacacaatagaaagtgagttgtgtttgaaaataaatcattcaaagaaaaaaaaagttatgtcagtgacgttaggaaaaaaaaaatatatatatatatacatcttttctcaatcttggtgaatgtgggaacactatggggttatttgaaaaagcaagaagctcgtgggttctgtttgtgtgcttatgatatcttgagccaaaactgtttttttttcgatttctgaatatctaagccatatgttctaaacctcgaaaagcctatttattcctaaaggatgttgtcaacattagtggagagagttaagtatgcaagcttatgagctatcaggctgtggaacaattggagagagtaaaacttttatgactgttaacttcgcttttagcaaacgacaatgagtcttttttataagcgataaacgatatgtcgtaataagaatatgtaaataaagcaataat

SEQ ID NO: 260567 - DNA, 3876 bp, Cannabis indica
tttaattgaaacatacctctttttatatgtaatgtaaccaaaataccctgatataagagactcatatggagagtatcttgaagtgacaggggcaaaattagtacaatatttgaaaaaaaggtaaaagtgatagactttaaaaaacggggtaaaaataaaaaaaaagacaatataaaaagagtatagagtgtaatttttttttttatttgtgaatggtgggtgttaagattttgtgtgtgtgtgatggataattaattataacagttctaagcaattattggtgacgtagtttgaacaatatgtgtatgcataatttatcaaaaacagaaaacatgtacatgcataaatttggatttgtattacatttacatgcaacgtgatttgacatcatatatattattttacgaataatcttacttttaatgtcatttttctcttcttttgttcttttcctacacaattatacgcttctctttctatgatatcctatcacaacacacacacaatgaactaaaattatttttatatttcaaataaattgtcatttcattagctgtaatgctttgtcaacgcaagttttgagctaattaacataaagaacaaaagtgcaaaacattatttttagctttgctattttctgaaggggaaatttcactatttgtccataataaaataccttatatcaaattttatattatttttaaatttatacaaaataattctactattttaaaattctacccaaaatactcctcacatttaattttccctctctctctttccctctttctctgtctttccctcttcctcgcctacgatcacacacccacccacgacacccacggccatacacccacccacgacccactaatatattaaaatacaaatacatattataaaatataaaatattaatgaaaagatagataatatacaaacacttaggtagcgtttagttgagaggaatgaaaacataagaataatgaaaatgagaatgagaataaaaataagaatggaatgtaataaaatttaaaatcattaaatattttctcgtgatacattggaatgatctttccttccattttaaaatggaatagtcattccactgaaatagtggaagtggaatggacattctattagaatgacattctagctaatactttaaaatgcaatcaaacaaaagaatgaaataaaaattatttccttttcattctattacatttcattactttcaaccaaatgccaacagtgtaaatagtgtaaatgaatagttattttactttttaatttagtttttatatacttaatttaaatatattaaatataaaatattgtacatatgaagaaaaattacattttaaataaaaattaaaaaaattatgttattacacaaaattctaaagttgaaaacaaaattataagaagcccgtataacgttggttatttaataataatcgtagccatatgatccttaaggcatcgattattttatattaaccgacggttatttcataataactgatttcatatataggatcactacaaaaaactgctacctttaatgacaattttttagacacagtataatttttttgtgactaaatgtgacttttagtcacaagaaaactaatgttacttgtgattaaacatagtattagatataaattgtcattaatttacttttagtcacaatataggaattatgatttataattagtcacaattttttcacttttagtcacaaattttgttgtgaccaaagtaggacttttgtagtgggtgctcatgtcgttggttatttcttcctcctatagcgtcgcttgaaacaagtcagtaacaaattttatcaaaactaccactctaagcccaaaaaaccaccactaaatcccctaagacctatcatgtactatggctcattgtgtaattcctataaatgagcactactacaaaattgtgttggacatttattattttgttctacattattgttggctatattcaattttggtgcttttacaaaaataataaatcaatcatcactctttattcatattaattatgattttttttttttcagtttatcatgattctgtgtgatcattattactatatcgtgatcttttcacttctagctataactgccattaaacttaaattagttaaagcttggaaatgatatatatttacacaacaattagtagggcgcttatcatggtttgaatgaaacacaatgaacagggagaattgctgcttttaaaaggaagaaacactaattaacaccaatattcaaacgtgagatttgagggcctatatgtatatatataaatatataatacactccattaaaattttgaatctaaatggtgccaaatatgatcgatatacatataatatacatatataattgagcgtgtaaaataactacttaaaaagttgtgttacgttttgaaaatggaacaaaaactttactgaagaatctttaaagagctcatcactttttgcaggccattcccttacggctgtagatatgtcatttatgtatagtcgtggggacagtgaaagacaatgcccaaaggcatcccataaattaaaagatatatatgggatatatgtaaatagtctttcatttaagagccctagctaactagctaactaaaaagaaaaaggagagaaaaaaaaaatacataaaagcattatcattaatttagtcaagggtgcaccccaccaagttgggcaagaagatatattaccacattcgatctatgtatttcattatccataaagaaaaatcatattgacttgtacaatcaattcattctaataatgctatatatatttttaataaaaatacaattcattaagataaattcgatattagagaagaatttaaaaatcgtagacaagtatctgtccatacacattcttctatatttgtagcagaagttgttagtgtgtgtacaataccattcacagatcgtggaatagtattactagaaccaccaccaacaacaattattaaaacattaatatctacttaaatagattgaaaaataaaaattgagtgagaattattaatccaaccaataaccacagtagaatcactattaataatggaaatactgaacctgaattgatgcgcaagagtcaaccctagtctaattggaagtagttctgccatattaatagaaaaatcacctaatacaccatatgaccaaaccagccaaaccacacccgcatcactctacccaactggacaaagctcctcccaggaaccactaaagcattatgcgcaagagcaaaggactcgggaggtggtggcatccaccgaataggttgctagccaacttggttttgaatgtacagtcccaactgaagactctgtcgaacatgctcattgaattccaacaggtgattgggctaaatatggaacaatatctaatcttaacttcaattaccaaacatcactgggtttcgatcatactaaaggcaccataaagtaaccatcattaattcaaaatcctcctgagataacttttcaaatataaaaaaggagaattcctagaattggtccatggacacaccaacgaaggactaaccataccctcaattggtgccatattagaatcaagccaaagcaggaaaataaagcatgtttcagaattgcagattcttctccgcttcctgaacaacaaactgtaatgaccgatatacttagacatgagattagtgagacacttagccttaagtaatctgattatgtgattatatgtattttatgcattataaaccctatttttatgaaaatacgtgttataattattttttttcaatttcagaaattttattgaattagaggtgtgatatgcatgctatatgt

SEQ ID NO: 260568 - DNA, 503 bp, Cannabis indica
tagaaccgaacacagacctagcctcaaacccaaactgagactggaactcgggcctggacacggtcgtctacctggattggaactgagacctggacctagacctaaatctgggaccctatcccaaacacagacttggacctagatagggatccggatacgaacctggactcggactaagacccagactgggatcgaactgctgaacctagatctggacaaagatcctgctttagacacaaacttggacccacccccggtatcccaactaggacctagaccccgaaccttgacccagattggggtctagacctggacacaaactcggacccgaactcgaacccacacctagaatcaaacccaaagctagacctggacccggaccaaaactcgaacccaaacaaggatcagaaccaaggacttagacccagaactgaatctagactcagattgggattggaacttggaactcacacccaacctagacaaagacccttgacgcgaac

SEQ ID NO: 260569 - DNA, 881 bp, Cannabis indica
ataattttattactacggtatattaattttctgtactacgatatatctaatactgctgtatatatttaaatgatctaatatatttatttatttttgttacaatataataatatgcaatactaaaaaaaattatgtaacttaattttgttattatatatatatttttttaaaaaaaaaatatgtgataaatctatttttataatttttattagctaatttattagatttggccattttcttaatttttttaaaaagtggacatttactaacttagttaccaaatttagggtcattttgcatctcaacccttaactcattatctaatccaaggcccatcctagccaccttatgtgctaaaagattaaaatccctaccaacatgagaaatagttaggcccggactgaacgataataatttcttaatactacaaattacatcatcaaatacactattattccaattttttagttttattactttatttttattttttttgccctaaaagttttattatttaattgttcatccggatttagtatgatattttattttatttagtttttgacaaaagttttagtttcatatttgtattgtttaatattttagtttaacactcaaagttttagtttaatattttatttgtattgttgggtgcaagcaaatttttccttttaaattttgtctccatttgcctaagaatatcattggcattggcttttagtataatgtaagaatatactttttttcctttcattttgtctaacacgtgcacacttgcacaaaacatatcttcctataatatctatgggtaatattatggtaggacttaacaaaatttttttatgggtagggaattttttttttaaccgttgattttagat

SEQ ID NO: 260570 - DNA, 2699 bp, Cannabis indica
ctattcgcagacatttaacaaaaagaaccgaaactccaattaactcctctaaaagagttttacaatcagaaataacacttccaaaataaggcaccatttcaagaggactctgaattgcttgcacaacagtgaggctatcagtttcaacaattatattctgccaagatttcttctttatccaacttaacgcctctctaacccccatcacctcagccatttctggtgcaactaacccaggccgacaacaagaaacagtctccaccgaagcccccgacgaatcacgagccacacagacaaagctgtgcacacctggagctgcaaagagggctgcatcgacatttattttcaaagtacctgttgctggtttgtgccatatttcagccgcatcaacatcagtcaaaaatgcagcccaaggaacatgttgtttatcttgtgccttctcccattgctctaaacaatattgagctaagattaaaacccctgccaccgtaggagcttttttattccaaactacatcatttcttattctccacaatgcccaacatgtcagaaccaacactttcttttggtccccatccaatttttgtagcatactgtcgagccaaccaggaaaagtaaccatctacctattatcgacatcaatgccagtttgcaaccaacacgatttggaaaacaaacaatcaattaacaaatgaaatgtagtctccttgtctaatttgcacaacggacaacagtcattcacatttacatgtttcgtccttaattgaactgtagtaggcaaacaattggctgctgtacgccaaataaaatctttcactttcggaggtactcgaattttccacattttgtcccataacccagtagaaagaacctgcatttcaccctctcgatcttgttgcagaagcctataagagctcttaacagaatgaaatcctaagctttccaatctccaataccacgcatcattttgtctccttgagtttaatggaatactaagaataagtgcagcatctcgagcattcatcacatcatttattaactcaacatcccattcactttgttctggcaccattaaagcttgaaccctttgatcaacaagagcatgatgtgtggaaattattctcggattgtcctcatcaggcagccacgtatcagctaagatcctagtcattgaaccatttccgattcgaactcgtgccccttcctttactagatctttagcctcgaagatactacgccatacgaagctcgggttattacccaattctgcagataagaaatcacctctagaatagtatcgtgccttaaacaaacgggccacaagggaatcaggccgagagagaagtctccatccttgtttactaagtaaactaacattgaaatctcgaaggtttctaaaccccatgcctccttttgatttatgtaaagtcagacggtcccatctcttccagtgaatacctttgctatctttcgacgaagacttccatcagaaattacacatcatctgctccatttcgttacaaatttccttagttagcaagaacacattcattacataacttggaagtgattgagcaaccgttttgataagtagctccttgcccgctttggacaagtaacgaccttcccatccttgaatcttctttctcaatctttccttaagaaagcccaacaaagctgtcttatttctccccacaatattaggcagacccaagtaagtgctattatcttctgcctcagaaattcccatccttaagcatactcttgttcgttcatcagctcttgtattagaactaaagaaaatggtagatttattcacattaatctactgccctgaagcctgctaaaaccaactcaataattccataacattacaagccgtctcctcatttgccttacaaaagacataggtgtcatccgcaaaaaacatgtgtgatataacaggggctcccctcgctaccttacaacctcgaatcttccccaatctctcataatctttaatcaaaagtgagagcccttccgcacacaaaataaaaagataaggggataaagggtcaccttgtctcaaacctctcgaagggataatgggaccaatatcttgaccacttgcaataattttatacgagaccgaagagacacacctcataaccaacataatccagtgatcactaaacctcaacttcctcaacatggattgaaggaaaccacattcaacgcggtcatatgccttacgcatatccattttcactgccataaagccatcctttcccgacccctttctattcaaataatgcataagctcaaaggaaatgaagatattatccgttattaagagcccaggcagaaaagcactttgagtctctgatataacattcgggagtaccccctttaacctattggccataactttggaaacaattttataaatgacattacataaagctataggccttaagtcactcatagtttctggagaagacttcttagggatcaaaacaatattcgtatcttttaaaaaatcaagggaattcaccaaacataaaaaaatgttggactaaccaaaccacatccgtttcgaccacctcccaaaatttttgatagaatcccggattaagaccatctggcactggcgacttgttaagatgcatttggaacaccgcttttcacacctcatccgcctccactggagctgtcaaccc

SEQ ID NO: 260571 - DNA, 685 bp, Cannabis indica
ttaatgagatctatactctatgtggagtggagtaccgagctacaggagtactcttgatagactcacctatgtgaatgtgggagtggggccgcttcctatgaaatttggggcaaaatttctagagcgttcactatactgggatagacgtgcatggccattaacgcacaggcttatttgaatacacccttgaaagattggtgcgtggtacgatgttagagatagagttcaagacttcgagtcactctagtaaaatctaaatcgtattcactacgcaagattcaaatcgaaagatatctttgctgaagcactgtcttatagttgtctgatattgctcgagaaaatatttttaaaaatttcaagtgggggattgttggaacttttgtgaaattgtataaaaataaaaagtgaagtgtgtgagtaataagagtcccacatgggatagaaacacttcattagaagtgtatatctagtgcaagtttgagatatgggtttgggccccaaggggtaccaagttttgcgcgcatgggtgaggactcacacactggaccaccacacgagcacaccattgccgtcccaccgagccaggccggtgggtgaagtgtcaaaaaaattatttaattaaataaatattaatttttatttattaattaattaattttaaagttaaatgaagtagtaaaaagcg

SEQ ID NO: 260572 - DNA, 1949 bp, Cannabis indica
acgccgttagcgaataaaacaaacattatctattttaatgataaatctttttccgagtaattgttttattctttttataaggtacgtattgctttgacgtcaagtactttatctatttatttatttttttcaattaaattgatttattccaaattaatgtcatgtgctggctttcaattgtattaaatctaatactaatatttcacatgcaacctcttacttcatcacttacgtgtaagtcatacgggatataaaatatatatataaactgattaatgagccttcagtatagctctccatctttttcaaaagaaaaaagtatagctctccatgcatgtttagtaattaatcgaataagtatattttataccagttcgtcgctttcggtggcacaacttaaggcaacaagctgtaaacattttccgaattagatgtcacctcaccatcagctttctctggcctttaatttgtctatttgttcaaaagtatatccaagctaatatggaagaagtataaatatgatctttggataatttgtacatttatataaaatattttgtataataccttattttagagttcacctattatatttttcaatatggacacgccttgtttattctctttttattatttcaaacatatgcaattgacaccagattttcaagaaaataatatatactaaaaaagcagaagaaatcatcaagtcaacaaaagtcggtgtatatatattccaatttgtaggtaaccagagttattgcatagtaaatttctatacgaaaacaaacttggtattcaatgtctatcacatcaattaattaactggaccaacgtcagtctcaagcagacctgcattcacaatataattatgtaattaatgtgtgtatctctctccataaaaataatgtgtagatcaccactaactcatcagtatatgatgatcatacagatataaacacaacattcatcgacggcctgacagcgggggtggggctcagtgcattatttactttgtgaggtgatttcaatagtttataccaaagccacaagtttgctcattcatgaattgatataataaactttaaaatacactactcttaaatgattatttcccgtcggttggtcaacacctaatcggggcaattacaacctcaattaattagcgttctgaatcgaagctcgtacccgtattatatcgtattgtattattttagattgtgttgtgttgtattgtattgtattagtattatataatataatacaatatttggtattgacttgtactaattgatcgtgtaaagttataatatacttttaatacactcaactccaacaccacctacaagtctgagtcccgagtcctgggtccgagtttgagtcggggtcagggtttaggtccgggttcgagtcgggggcccagtcagggtcagtgtccgagtttgggttcggcttcgggtcagggtttgtgttcgggtcggggtcggggtccgaattcgggtttgtgtcccgatccaggtctcgggtagcggttcgggttcaggtctcgggtcccaggttcgggtctaggtctgggtccgggtttaggtctcagtccaggtgcgagtccgcgtctcggtccgggtccaagtccaggtctcagtccgggtcccggtccgagttcgggtctagtctcggtcccgcactacaagaaagctccttttgccgacgcataagctcgccggcaaaagtacatgtaactcgtcggcaaaagctgccggcaatggtttgtcggcgaatgaccttttgccgacgaaatacagacttgcgccggtaaaagcatttacaccggcgtatttgttcgccggtacaacgtaatcgccggcaataagtccgccagctcatgtgtctttgacgacgttttgccggcgatgtaatggcgagaaattttttatttttttatttaattttat

SEQ ID NO: 260573 - DNA, 586 bp, Cannabis indica
acaataggcaataagtaaataaaataatattgtacgaacctcctcttgcaattaaatttctaagtagtgatctttactaatgctttaatccataacctgaaaataattgtatcacacaaaaaaagaacaaaaattgatcaatatgttaaatatgtataattctattgttcacaaacttcatcaccacctacatgttcttccagtaagagaactttgcttatttcattaagaaaagaaaaaagaaaataagaaaaaatagatctatttaagtaataataatatataattagtaaattaagtctcataaaaatattgtcccttttttatttatgaaataatcgattaagtcccaaaaataaattatttaaattgtttggcaaattgtattactcaatttagaagttaaaaaattaatggattaagtcccataaaatatatatcattcaatagaattttttctttgcaacaagaaaaaaaacagttgagcaaaaaaaatcactaatatagatgtgttattttaaaagctgatgaataatgtgagtgagtagtggaactatatttggaaaatgcaaagtcacaacaaaat

SEQ ID NO: 260574 - DNA, 953 bp, Cannabis indica
tcttaagaaaaatatcaaatattcaagtgtctagaataaaatcaacttaaatattgttgtgtaccgaaatggtacgttttacatttatcaactcgcaagcgcacgaatctttattgtagtatggagattgtgaagaacgaggtcgaacccatgggaattgcgtgagatcgaagaaaatactaatttaatctaagctattacaactctaacctagtttcgaaaatggtgaggtttttggtaataaaataaaataaaatatttaaaagataaaaatgacagtaacagatattttcagtaatatttggggatattattaagggttcagaatccacttaagtgtatataaaaatatttatgtttatattgattctcataatttaaccagtaatcaaaccaattattttctaataaaaaatagattttccttcgctttaaaattataacttctaagcattaaatgtgaaacaatttaatgtaaatacaaaaaatcaaagaatattatttttaataaaatatggaaccaagcataaataatttctaactatcaaaaatacttgatattaaagatgaaagaaattattttaagaagcgaaaatcataagcatatattgtactgagaatcaaaataaaaataaatacttaattaaatacactaggtttcatcgtcctccttaataataagggaacttagaaacccataagaaaattaactaacaaaagcggtaaactaacactgagcgctttgagcgttttctctagattttctgtctgaaactctgaaactgtaactgaattctaaaaacctaagcttctatttatagaagggtaaaaaaaataacaagaaaaaaaaactattacaaattgtatgtgggtattttttgtcaaatacactaaagttaatttctagagtgccacgtggcaagcttctgttggctgaaaaaatagcaaattgg

SEQ ID NO: 260575 - DNA, 2914 bp, Cannabis indica
tatagagtgtaatttccccaatcatcagagaggacctaatatcgccacctacgtgggcttgttggaagccctaaagaaaagccttatatacagttcttctccactccaactccattcgccgttcctgcaaaaccaaaactaaaaccaaaaccctctcttcttttctatctctctcactcccttgaatacaattcccatggctcccaggcggcttaaggaagcaccacctcctgctgattcttcttctgatgagtcagattctgaaagcgaagccggcattgaagaagagaatggtgtcgcagccgaggccgataatggagaacgatctagtcaacacgaagaagaggacgatgatgatgatgagaagaagaagaaaaagaaaaactttcattgactaacaccaaagaggaatctgactctggttccgactcggagacggattcggactctgtctcggacgacaccgccccaccttcgccgaccactgctgacttcactatcaagccttcaaagtctatcgatgactccgtccagtctaaggtgaaaaagcccacgaaggccaatgtatcgactcctgccccagcatccactcccccgccgaagcgtgcggctgagaaagaccttgatggaaataactcaaagaagaagaagggcacagctgaagaggacctgaaacaggtatcctcgcatcagcgattgtggagtgacgacgatgaaattgagatcttgaagggattgattgattatcagtcgaagaaagggaaagaccccaccgctgatatgagcgcttttcttgattttatcaagaaaaatctccacgtcgatgtggaaaagaggcagttgtcgaccaagatatccaggttgaagaagaagtattttagtaatgctgagaaacttgaaaaaggcgagattctttcgaagcctcatgatcgcaagtcgtttgagttgtccaagaagatttggggtagtattaatggtcatggtagtgatgatagtggtaaaagcactaagaataagtcgaagcagattgtgagtaatgacagtgaagtaaagaccaaccctaatgaagcagatgacttctcgtctaaatatccatgcctgacggactctctgaaacttgtaagttccatctctgaaaacttattgaaccaagcacttcctttgatggcaagttccaagttgaaggaattggagaataagtggaggaagctgcacatggaaggaatggagcttcaaaacaagaggaatgaattgacttatgaacagagtaaacttatattgaagttattgtagtcattcaagctagggtttttcttgtttatctgttgcagtcttttcttttctgtttatttttcaaatgttttggatattttgatcacaaggttgagattttaagatgttttaggatttaccaaattttgttgaggaggatcatctttttcaaatatcttgtcaaactatatgaatttgttaatatatatatataggccattttaactctaattactgagccaaggccatttatttgttcactgcttttaatgtggggctcaaaccatccagttcttctctgccggctactttcttttgccttctcttttttgattacaatcttggttgtatttcatagccaatagagatatgtaatttcatttgtttaagattattgctacatgtttatctgtttaaatgttggcaaaagaaccaagaaatagaaattggctttgcaaaaaatgtcaatggcgggtttttggtttttcattgtgtgtggctttcggtgtttttttagatctttatatgcatatgcagcaggaccatattagtattgccttgttatacatggtctctagaacccataaaagagtagattgaatatggacataaattagtacatggttaaggcaggaaactctggtgcttctgtttctgacttcaaaagaggcagtagcattgtataacttgcattcatatcatgacacccctaaagcataggcaaataaccaagggatatgtaatttctttcttctgccttctctttttcattacaattttggttgtatatcatagccaatagagatattgttatttcatttgcttaagattatttctatatgtttatccatttacatattgagaaaagagcgaaggcatagaattggctttgcgaattgtcaatggcggttggcgggttttcaattattggttttacattgtgtgtggtttttggtgtttttttttatctttatctgcatatgcagcaggaccattagtattgccttctgctgctgggagtcttaccatcatcatttgctgctcccgccatctgttatatccatttttcttgagagaaacattggtaagtaagcagaggcgctgaaccaaaaataaatttgattcttcctaaattcacttttgttgcagttgcatattccttctacttctagtgataattataagtcagttccaacatttagggagatggcttgtgcttatagttgttagagcatgtgtgaaaattttatgaggataagctattacagttatagagtagattgattgatcatgtgcgcaagtgttcaaatctatgtgataatataccactttgcattttttgtttcccctacacccaagaaccagaactgtttttttgaagaggcatctcaaagtctttgtacagaaaaaaaaaaggaccacttggattgctacgtgcctccaaccatcacaaagacaattataggtacaaaaacatcgccatgcataagggcaagggttatttacaaaaatatgaaaaaaaaaacatgtaagatttaataaatatggcataaaaacttaattatactaaatatggtattcttgtacaaaaactttaaaatataagaaaaaataaggatgaatgccatataaaaactttaaa

SEQ ID NO: 260576 - DNA, 924 bp, Cannabis indica
cagtgatcataatagcgagttggacccattttcccttctgaggtcgacgatgcaaatctaatgatgatcgcagtttttattaacaagagttcttcgaggctcgttagaatgttgacttctgactcgccaggattgtgagcctcactgagaagatgtctgaggttgactgggtgaagttacaagaagccttcccatagtgagataggtacctcacttattaggtctcgagcccacccgactgttatacttagttagtacattatacactaagtgtttccgcagtcgatatgtgtcactttcgtcttcctaaatgtaacgtacttgatccttccctattcgcattcaacgacatatggtttctcattaatatactaagcaatagtttgtttattgactcctcgcataagacctacaatcaacagattacaaatatactctgatacttacgtaactggctattccataaaagagtggttacatcaattcatattccttttatcttgacacctgtcccccactgagatggtagccgaattttgggtataacaatttccccttaaaaagttcatttttttagtaaaaagtgctttttaataattacagagggcattttaatcataatccctttttggaaagacgtgtcctttgattctggcagttgtatgattttgagggtaattatgaatcgtctcttcatattctgccctactcccaaccgttagatttcccaatctttggccttcttatcactggactttgggtataaaagggcgacttaagcttgccatatttcacaaacttctagttttttggtgagatccatcttgagaatggatgtctctttcttgctaaaatgccatctgagttcagaagttcaccccccaaattcgtaacaccaggatgcaccaacaatttttcttctcc

SEQ ID NO: 260577 - DNA, 4144 bp, Cannabis indica
aaaaggcttattgctgactggcattcctatagcaatcatcacgtagcaattgccagcccagtaggtgtaatttggcagaaattccagctagcgttaatgaaggaaaaaaggtgctgaagtggcaaaaatgtggacaatgactcaactaatatgtggaaaatgaagggcaagtggaccatgagttggatttccaattagggtaaactttagtaccttaattggggagcaaaagagaggaaggacattagaaaatgatggcttcattttagagaggagggagtacgaaatttcagatctaagtatagaaaaaaaaaagaaaggaatggaagagagtacaaagaatagaagaagaaggagaagaaggcaacctctaaagaaaagatttgagctcacaaactcatttctcttgctctcctctaccattttgtatcattttttactctttagtattctcttaaacaccaggaacatgtcattttgtatcatttgcgtttagggtttaggattttcagttaagggttaaggatttagtttgtatggtttagggtttagagtttacggtttagggtttaagatttagtctttagtgtttaggtttttggttaagggcttagggtgtacagtttagggtttaaagtttaggatttaggctttagggtttagggaataaggcctagggtttagggtttcgagtttaggatttaggggttagggtttcagttttagggggtttagggtttagggttttacggattaagggtttactgtttagggtataaggtttaagggtttagtgtttaggatttaggggtttagggtttaggattaagcatttagggtttgggatttagcatttggggtttagagtttcgggttatgggtttagagtttaggattaacggttttgggtttacggtttatggtttaggatttttttatggttaagggtttagtggtttaggatttatggtttagggtatagggtttagagtttagggttttaggtttagggtttcagagttttttgggtgtagggtttaggggtttagtttttagggtttagggttaatggttttgggtttaggattacgggtgttaagatttagagggtattggatttagaatttatggtttagggtattgtgtttatggtttagggtttagggcttagggtttagggtttagggtttaggatttaaggcttgagttttaaggttttgagtttaggggtttagcctttagggtttagggtttaggatatagggattatgacttagtgtttggggtttagggtttacagtttagcttttagggtttgggttttgcatttgtggtttagtgtttagggattagggtttaggctttaggctctaggggtttgggtttagggtttaggctttacagtttagagtttaggatctagggtttaggggttggctttaatgtatcgagtttattgtttagcctttagggtttagggattaggatatagggtttatggcatagggtttagggtttatgattttgctttttgggttttgggttttgcatttagggtttagtgtttaggggttagggtttaggctttaaggttttgggtttaggggttaaggtttagggtttagtgtttatggtttagggtttagggtttagtgttagggtatatgtttttggtttagggattagggtttagagtttaggattttgggtttatggtttaggatttaggctttaaggtttggggtttagggtttacaatttaggatttaggatttacagtttagggtttagggtttagtgtttgggtacaggtttcagatttagggtttacaatttcaggtttaggattttgggtttagggtttaggatttaggctttagggtttagggtttatggttaaaggttttgggtttaaggtttatagtttaggatttaggatttacagtttaggatttagggtttatggtgtccagttataggttttttgggtttaggatttaaggtatagggattaggggattagtgtttagggtttagggtttacggtttagggtataaggtttcatggtttgatgtttaaggtttagggtttatggtttagggtatagagtttagggtctatggtttaggatttagggttgtcagttcaggatttaggatttagggttttcagtttaggatctagggtctaggatttagggtatatggtttaggggttagagtttagggtataaggtttagggttttgtatttagtgtttagggtttaggttttgggtttaagaattagggtttagggtttacagttttgggtttagggtttaggatttaggatttaggggttagggtgtaaggtataaggtttaagatatccagttcatgatttagggtttagggttaagggttaagggttttagactttaggattaagcatttagggtttggggtttaggatttaggtttatcgatttagagtttaggatttatggtttagggctttgggtttacggtttatcgtttaggaatttttttgggttaagagttcagtggtttaggatttatgatttagggtatgggttttagagtttagggtttcgggtttagggattcaggcttctttgggtgtagggtttaggtgtttagtttttagggtttagggtttatggtgttgggtttaggattacgggttttatgatttagatttagggtaatgtatttaggatttatggtttaggatattgggtttatggtttacggtttagggtttagggcttagggtttatggttcagggtttagggggtttaaggtttagggtttaggatttaagtcttgagaattaaggttttgagtttaggggtcttgcctttagagtttagggtttagggtttaggtgtagggattatggcataggtttagggtttatggtttagcttttagggtttcgggttttgcattttgggttagtgtttagggcttagggtttctgctttagggttttgggttttggatttagggtttacaatttagggtttagggtttagggtatcgagtgtatggtttagggtttagggtttaggatttagggcttagggtttagagtttaggggttaggagtttagcctttagggtttagggattaggatataaggtttatggcatagggtttagggtttagggtttatggcttagcttttagggttttgggttttgcatttagggtttagtgtttaggggttagggtttaaagtttaagctttaggattttgggtttaggggttagggtctaaggtttagtgtttatggtttagggtttagaatttagggtttagggtttagtgttagggtataggtttaggaattagggattaggttttagagtttacagtttagggttaagggtttgggggctttagggtttagggtttaggatttaaggcttagggtttagggtttagagtttacgggtttagcctttagggtttcgggattatgatatagggtttatggcatagggtttagggtttattgtttagcttttaggattttaggttttgcaattagggtttattgtttaggggttagggtttatggtttaatctttaatgttttgggtttaggggttagggtctagggtttagtgtttatggtttacggttcagagtttagggttgagggtttagtgttatggtaggttttgggtttagggattaggttttagggtttatagtttcgagtttatggttttggggttagagtttatggttttggggttagagtttagtgtttagggtttagggtttaaggggattagggtttaagggtttacggataatgggtttacggtttaggttatagggcttaggggtttagtgtttacggtttagggtttaggggttttgagtttaaggtttaggattaagcatttagggtttggggtttaaggttatgggtttagagtttaggatttacggtttacagtttattgtttaggattttttagggtttagtggtttaggatttatggtttagggtaaagggtttagagtttaaggtttcgggtttaggatacagggtttagcgctttatgttagaaatattttaccaggatctacatttactaccaaatatgtttcattaacatcct

SEQ ID NO: 260578 - DNA, 775 bp, Cannabis indica
ttcatcgttggatcttcgtccgtctcgcccacggggatgccactttgaggttgcagacctacaatttggtaggcttttcgtatcagcacagtagcttgccgactacgactttcaatctctatatgatgagcccttaacgcttcaatctttttgtctctccactcggtaaacatacgcctttgttcctcgaatgcgagatgtaccgcagcgcggagttcttcctgatcatgatgtagggtattagcatgaccctacacgagtctaagagcagcacggagattttgtaactcagtatcatctccaacggtcgtttgagtgttggtaactggcggaacgactgtgttatgaatgccctggttgggtgctgaactgttattcccagtctcttgcacaccaggcgcgatttcatctataggagtcgttacaccgtgacccacgtttgccggctgttcaggattaacagctggcagaacccttgcgtttcttgggttctgcaatgcaggatctaccgtctgtgaattggctggatcaaccaggcccctacgagtctgcaccaccatcgtacttgtggttagattttgaatgaagagtgattcttgattctgctctcaatgaaagcaccaaaatgttgacctcgcttttagccaacgacagtgagtcttatttagtaagcgataagtaatttatagcaattgatatatagtaaagaaatgtaaatacacaagaattttatagaggttcggcccgagcagttcggtaatagcataatcctcgt

SEQ ID NO: 260579 - DNA, 655 bp, Cannabis indica
accaaaaaaaaaaataaagaacaaaaaaatcaaaaatcaccaaaatgaagctccaatcaattctcaagatccttttatgttgtatgaagcttacccaaacatatttcaatctaaaacattcaaatacaagctaacattttattattttactaactttttagactaaaataaattaacaaggataagaatataaaataaataaatcaatagtttatatttaagctcactttttttttttttttgaagtggttgtgatgaaatagaagaagagaacattagtttttgcttgaatttttggattagaaaaaaatggctgcccttttcgaattggggaagaaaatagggttggttagaaaatgtaatggaaagaagatgaaagggagaggttaaagggcgggctgggctgtttttgaccaatctcagtaggccaatataggcctaccattattggtaaccacgacagaaatgggctgaaccaataacgacgggcttatattggttcatcgagattggtcaaattttaagttttacagattttttttttaaaaacatcaggcttatctcgacatgcacacgcgagcccgtcgagattgctcaaattttaagttttaaaaaatatcaatatcagcaggcgttattgctatgctcagaattt

SEQ ID NO: 260580 - DNA, 611 bp, Cannabis indica
cagttcatggtatccacatccttcgtttgctccaccacctcccaccagatataagcatctttcctcagaatgtatgatgcacacttcactcggtcattcccatcaacccttagcatctgcaaaatactttctatgcgactcatccattcttcagccaccactgggtctacgcctccctcaaactcaggtgggtgttgttttcaaaatctctctactaacatctcatgtctagcctctgtagcaggatataccaccgtagctggcgggtctctattttctggctctggcggccttatttgaactagcggctccggttgatgtctcagttgacaaattaagttcttcatttggcctacaaatggttccttccagtgcagcaaggcactcttcccatcgttgtggtgcttgaggtggttcattgatccctccatcatcttggcctctatctcggccttggccttggcctcaatctcaacctcgacctcgacccaatctgattgaccttctaggaggcatttctaaactcctgaaccacacagaccaaaacacatcaagaaagatcattttgatcatcaattttacatagaaagaatattacactcccgcgtgca

SEQ ID NO: 260581 - DNA, 440 bp, Cannabis indica
agagaaaatatgccaatatccacttgaaagtaagatcatctatattcgaaaatatggatgtacattcaggggtagatatgagttatcgttaaattctttagacaatcacattttttttaccttatgcaatgaaatttgaaatatttgagaaattttatgaatttctagcaatggtgaaaaaccattaaggtaagtagttaaagatcttgtgaactgatagaggtggagaaatgtttggtggatatgcagttcaaagatcattaagttgaatttaaaattgtattcaaacttaccttcctagaaattcggattgcatattgatgaaattgaaaggtttgtgactagttactagtagctgcctaagcccttctagggaaataccttagtgataaaaaaatttcaaaatgatggaatggttgtgtacttagtgtaaaccatta

SEQ ID NO: 260582 - DNA, 549 bp, Cannabis indica
accatttccttccctaaactagaaaaccttgagcttcaggatcttggaaacctcaaaaggttcagcagcagaaagcctctggcagtggaatgtgaaggattaatgaagagaagttgtaggaatgaatttgaagaagctaaattacaacctttcttcaatcaaaaggtacgctttacattttatttagtttcaatatgtcagtggtcaatagatcaagattcccaaacaataagtgacaaaataaatattcttctaagtttttatgatgcatgattgtggttaataatttgaaagggaaacgaatcatcactaaacataaataaatctttatataatatcattattaatttttatatactgagtaaagtttgatattgatttttttttttcaatacttcagggtatgtatcctctacttaatttaaaatataatattgtttgctgaatatatatgcaaaaatttcatgtatatattttttctcttttgtaggtatcatttcctatgttggagaaattagaattgagttcacttgattctgtagagatgat

SEQ ID NO: 260583 - DNA, 655 bp, Cannabis indica
aaattatatgtcatgtcaacaaaagtataatatataatagaacctaaatattattttaaagaaatgatataccgtacaacaaaaaatacatatatcatttaccaaaatttatatactaataataataaaaaaaaaataatatatcacaattaaaatatatatatcatgataacaaaattatataccaccattgtatataataaaataaaaactaattaaatattacttaaaataaacaatatatcatacaattaaaatatataaaaataataatttaatatatgtagcatgccaataaaattatatacatacattaacgctgtattaggtcgtattgtattgtattgtattatattgaattgcattttatgcaatatttttatgtaaaactatatgtggtattaaatttaatggacacctaaatatataatattttggtatgaattaaagtttaacatagtattatataaaaatatgatatataatcccatttaatataatacaatacaatacaatacgacctaatacgacgttccaaacgagccctaaaatatttgtattatgctaacaaaattatatactactattatacatagcaacataaaaaataaatagcatctaagaatgataacataccatcaacaaaatagaaaaa

SEQ ID NO: 260584 - DNA, 612 bp, Cannabis indica
ttagtgttagattaattatggttttatgtaaactgtttttatttaaagtgtttatgtgtaaacttttttgattatttttgataatatttgtaatctaaagttaaactttttttaggttgaaaaagttgaagatgaaatgttggtagataataaggtaacttttttaaattttaatattgatgtaaattattatgtaacttattaggattatttttattattttgtagtgtaatgtgaaattatatacaggttgaggaagttttagatgatacgattgtagagaataaggtaactttttttttattgtttttattgtagttttagttttgtagtttacttgttatatttaaacatcagtaacaatttggtttatgatttattttttattgcagaatgagtggtagtcagcctacttttgatataatgtgttttattacatcacaacctagtgatgataatgggaacgatgataagaaagaagtggttgatgatgatcatgagatgttcaaaaacggatctaacaagttaagggaagatgataatgatggcgatgacaaggttatagtttgtgttttatttatatattttgttatgtgagttatatatatatat

SEQ ID NO: 260585 - DNA, 503 bp, Cannabis indica
aattacatgaaagcatggtagtaaagagcgagcacaaacccagctacatgaaaattctaaagagtcgtacaatctcttgccaagatacctgtacatgctccagaaaacaaatccaggtaaaacataaaaaaaaatcaaaattatttgttaaactgaaaacattgtatttgcgttgctaaatagttgagtaacagttgcttgaaaatactgttggatttaattcaggaacaataattgacatagagaaagaagatgatgatagtttcaaatatgcatttgttgcattgaatgctgctataaaaggttggccaaactgcaaaccaatcatcgttgtagacggtacattcctaaaggccgcgtatggaggcacgttgctcactgccaacacacaagatgcagaatcgaaaatttttccacttgcatactgcatagttgattctgagaacgataaatcatgggagtggttcttaaaaaaaataaaagaagcattcggggttcgagaa

SEQ ID NO: 260586 - DNA, 2752 bp, Cannabis indica
cagtatttttgaaaaaatttccgtgtgacagtatttttgtaaaagttaaccaaaatttcagtatttttgtaagtttcccattatagaagagggggtgtgtagagaaagagcatgcagaagcccattaggcccaattaaaagcccagagttttctacttattttggcccgctcttcgtcgtcttccttattccgactccgagctcatggaactcccgtcgccgtcgtcatctacataccggacatcatcgtcgaaatccggtcgttgcgaaaagtttatcaacagagttatttggcctgcgattcgaggaaagtcttgccccatatgcttggaaagccttcatatccaaacctcggcggttctgactctgtgcacccacgctttctgcgaggtatgtatacgcagatggagctatctgaaacggaaatgccctctttgcatagctgattttgattcttggttctcacgtatcgatctctcctctcaaaacttccgtaaacaccgtttaccagctctaaatacaactagttctacacagctccgcttacaagaacaacattcgaattttaggttagaacacttaatccttttcctgtcgtaaaattgcattcttttccatgatttaagtttgtgattgaagattacaagaaaaaataatcatgattttgctgttcaggacagtgataagttctctacgacggcgatcatcgcctttgccgtggcggcggtcgtttggacggccgggcttagtgggttctgatgttattgctcagagaaaacttcgatggcgatcaaggtgagtaatgaattgataagctaattttattttacttttcatcccaatttggcaattgggtattgaaattcttgttctacttttccttttagcatatatgagaagcaattgaaagcggttcctataacaccaatggagaatgttgaacaggtatttcatactgaaattttataaattcacataaacgtaaatattgaatttttcttactttttttttctttctttctatatataatttaatcttgacatggtctgtaaaaccacagaatatgtcattgaataatggtgtaaaagaaagaatactaggaagaatagaaccatggataaggagagaactacaagcagtccttggagacccagatccatctgtgattgttcatgtggtttcctcactttacattgctacccttgaaaagaagattcagttttcttcaacacagcttgatttgggagacaattttttggatgaattgcggccatttctgctcgataaaactgacatgttttggcatgaagtaaggtaactaatggctataaacttgttttgtcggcattaatagttgtttcatttcatcattgagaggactgcagttgcaatgactttggctttaaatacacagttcctaaagtaactaatttctgggttttgtggcatcaatcccttctctctgagttgggtattacttttgattgcctgaaattgaaatactaataaaggtttgcatgtcatataggctcatagtagaggcaccatgtataattctagtttgatttctttatgctaaaacatatttatcaaatatttaggtttctccttttaattcaagtttcttttgatttcgtcaggtgttttgcagagagttcatttacaattgaaacatacgatgctgtgattgaatatacagagtagtgattgcaatgcattcatccatgagatccattcaaatagagatgcatcatttgggctagttggcatctcgaaattttatggcaacagcaaagaacatactgagaaactggaaattctttaaaagagaagctcagcatgttctagttaaatgtggaattagattttatagatttcattttggagtgttcctttcctgtaatataaacttaagcataaacaaaaagtagacagcttctttgtgcaaatttctttgaaatcttatcattcagtcagaattacaatcacttgctaaacgtaactaattaattatatatatttagtaaaaaaagaaaaagaaaattgtccaaaaacgttatcctatattacaaatccacatcaataacatacacacatattcaataaagatggcagtgaaaactgagattcttcacttgaattgcagtcccacacaattagtgatgttagtttcagtaagaagttttaacagggtaatgatgttgttgatcaaaccatcactcttcttctggctcttcctcctcttgaagaagattttctctgttgtcatgtgcccaaaaaccacgcacatctataagcatgctagccactgtcccaccctgtttgcaagataataagtctgccaatgttatcttcagcggatcagctggcttcaccatatcccatatttcgtctcttacatcctcgatgcacaactcgtagttaccaccctcgatccatttctgatgcacgtctctgtttcaagagggaaggaagatacaagctttcagcacatgggaattataatagcaacaaagttcattttgactgcaacctataattctaagatctgatcaagataatgattaaatatttttgagttgtaagaatagttgttgtgtccctgcataattgagacttgaagatcttgctcaagcactacaagtaggaaagatgcagagattctctttaggaaggttgtatcaggtaacatctcaacttttggatgttccccttctttgcttccatatatggttttaactcactctattt

SEQ ID NO: 260587 - DNA, 786 bp, Cannabis indica
ctgaacaagagtgataatgtcgttaccgacagtgttccaacatttttgataaaatcccggtgtcatgccatcaggacccagagatttatccgggtgcatttgaaagagcgcacgacgaatttccacatccgtaaccggctccagcagtttttaattctgaacagccgtgactgaggctgaaaagtgctggaaaatatcattgtttcctgctgttgctgatgaagaaaaaagctgagaaaaataatcttccacaaccgatgataatcccccctgccagtccacccaatttccagcagaatctttaagcttctggatcgaatttcttcttcttcttgccgtggcagtagcatggaaatatttagagttgctatctccctcttgcaaccaaagttgcttacttctttgcttccaatatatttccttttgcagaaaaatatcattcagtttagcactagccgatttatagttttgtatggaaatatcatcttggcctctcttccacttctttatttcttccttacaatctttgattctctttgaaaaattcccagaataatcctttccccaactcaataacacttccccacaatgttttactttgtcaataacacccaccgaattccctggctcccaacagcttttaacaatttcaaaaaataatggttctttaagccatgaatttcaaaacggaaaaaactatttttagccaccacaacttgattgacagtatttaaaagtaaaggagtgtggtcagatgtagaactttccaaattaaaaagcttagct

SEQ ID NO: 260588 - DNA, 4130 bp, Cannabis indica
gtatatacaatttggttaattattgttaaatcttaaaaaagagagagaagaaaatgaattctattattgcattgaatgagaatgaattagttacaactttatatataaaagtaaagtaatagtagaaaactaatggaaagagttagttacagaactaacaaccactaacactagctcctaacaacattgacaacccccttcaaactaatgtatgtagtttgagaaacaatattgagtttgcatggttctaagatcacgaaatcaagagctagaaattggtttggcgagacaatctgtaatttgagcacttgcaggaacatgattgactcgaatttgttgttgaagaactttgtcacgaacaaaatacaaatcaatctcaatgtgtttggttcttcgagaacaaagttagcactatactgtgattatcacaccagatagagggaattcttggctgaggaatgtgaagttcattcagtagagattgaatccaggacacctctgaaactgtggtagccaagcttttggactcagctttagttgatgatctgaatagagtgacctatttttgagatttctaagctactaggttacccccaagatagatacaataccttgtagtggaccttctatcatccaagttaaaggcccaatcagcatcacaaaatgcctttatggtgaaatcttggacaggttttaagtaatccatggtctaaagttcctacaatgtatcgaagaattcttttaatactatccaatactattgaagaggagtttgcataaattgacaaactttattaacacagaatgctagctcaggtcaagttattgttgcatatagaagtcctccaactatatacttctataaaatgggatcctttataggttcacttccatagctcaataacttgaggccactgttcaagggattacattgagtgttgacattctacatttcaactttgtagagtaaatcttgaagatattttgtttgactgagcagaactcctttagatgtctgggtagcttgaatcccaagaaagtaatcgagcactccaagatctttgagagcaaaagttttgcttagattagcaataagattggacaccatggtgtcattacttcccaggacaagaatgttgtctacatagacaagaacatatatgcaagcagtagaagtgagcttgataaacatagaggtatcaggatgagaagattgaaagcctagactgattaacaatgtggagagtttatcaaaccatgctcgaggagcctacttcaatccatagatggcctagttgatttacacacataatctgggtgtgtttcattaacaaaaccaggaggcttctgcaaataaatctcttctttgagatctccattaagaaacacatttttgacatccaattgtctaataagccaacctttagtgatggcaatggtaagaaaaacacaaattgtgatagggttgactactggactaaatgtttcttgactactggactaaatgtttcgacgtaatcaaaaccaacttgttgatgaaatcattagcagcaagcattgctttgaacctgtcaacagagccatcaccattatgcttcactctgagaacccatttgcagccaataggttttctattaggtgaaagtttaaccaaaatctaggtgttgtttctaattagagcatgaaactcatgattcataatagcattccattgagaaattttaagagtagactgaactgttcttggctcacaggaaactaagaaagcctttgattttctaattctaactttaagtcttgtagtcatttgatgagtagagatgtcatgactagtggaagttgctggtagttatgatgcagcaatagaatcacctgtaacaacattagtagtaactagagcaacaattataggaacagaggattttttttgtatgatttggtaaattggttatgtactcaaggggaatgttgaccaaattagatggtggagagagactaccactagagttggaagagttgtttgatagggattgtgactcaagagcagtagggtcagttggaggaaaatgggtgtaggaggttgaggcacaagtggggtgcagttaactgaaagcatagaagaaaaaggtggcacacctgaagagggaaaagaaaaagtagtagagaatttatgatgaagagactcggcatatggaatattgagttcatgaaacacaacatccctagaaatatacaaccttttatccttagacatgcatttgaaacccttatgacacatactatagcaagaaaaacacagagagtagactcgtattgaagtttatttctattgtaggttgttagattagggtagcataggtagccaaaaactttaagagtggtgtaatctgttgtggtgtcaaacaacttctccagatgagaaatgttttgtagtgttgctgtaggcattctattgataagatacactacagttctataggttttatcctaaaaggacaagggtagggatgcttgggctaagagggtaaggcctatttcaactatatgcctatgtttcctttcaaccaccctattttgctgatcatgtgtgtgaggacaagctaacttgtgaacaataccatattgttctagtaagttggtaaaggctctaaatttccctccccaatcaaattgtaaggttttgattttgaaacataattgcagctcaatttgagttttgaactttgtaaaagttggcaatgcttcatctctggctcttaacatgtaaatccaagtatacccagagtatgcatccataaaatatataatatccatagccatttgtacagttaatgggtgcaggtccccatagatcaaaatgtaaaagttaaactggctcatgataagttgttgtaaaaaaaagaaaaggtaacttgtgatatttgctaacaagctgaataaaaatttgaattagttttattttaaattggtatattacaagaagtaagagctaattttacaattctggaaatagggtggccaagcctgctgtgccacaaaaaaaaagttgaattggatgaaaacacctgatgattgagatagtgagaaccagtgaaattgttcaacttggaagagatattgggggagcgaagagagatctgtgggagagaatttgtataacccatggtcaagcctcccagctaataagatcttcttagtaccctgttctttaatcaaactattaatggataaactaaaaaagacatgttgtctaatgcaaattgagagacactacgtaagtttttagtgatcaaaaggaatatgaagtaaattgttaattgacaaggtttgagaggttaagggagagattagagaagagttaccaatgctattaatgttgaggtcagagtcattgcccatgaaggcctattcttgactagtgtaagagtttttgttacaagattggacccatctggtgttagatgatgagtggctccaatgtcgagataccaagtatcatcagtgacagtatctggtgtatcaagacaagcttgcatttcagtaagattagatgtagcaggcatctaatggaaagatttaagtcctgtgaaagttttatcgaacctatagaaacactgtttaattgtgtgactcaatttgtggcagcgttcacctcggccttcattgacattgttgttaccacgtcctgtgttgaacgtacctcaactagccacaaattgaatcaaaagatcataaggacaaaaatgaggaccttgattgaattcgtaaggtatttgagctccaaagtgttgattttgaaggggaaaaccagactaagatggtctaatatgagcaagattagcctcactctttctgatatccagtaatttagcattcttatctatacgaacagattgagtcattagtaaaactttcatttttggtatagtgtaggcatcctttttggttgtaacagaggtcacaaatacatcacattcaataggaagagaaaatggcttctatatgatcttgatgtgattgtttatgaccaatcgtggcaagaagattggcaatgcccttgatcttcagtaggtgatcattcaaagaacctatcattttggtgtttctcaactgagccttgtacagactaa

SEQ ID NO: 260589 - DNA, 549 bp, Cannabis indica
aacgatatgtcgtaataagaatttgtaataaagcaataataagacacataaattttaaagaggttcatccccgagcagttcggtaatagcctaatcctcgttagttgtattgacttaagaataaggaagaagattccttttcttatagctcttacaataatatctctgaatatataattcttagatagccttagcttatagcgtttcggcgtacaatctctcggattacagtttttcgatcgatcccttgcccagtgaacattcctcactatttatagggctggaaacttgaggaggaagagtttcctctctcgttacaatgcgcataaacagaaagatcgtgtgatcaatgctgaatgcaaggatcgtgggattgaggctgaatacaccgatagtgggatcatgtgtatgccacatccacgcaagttgatccctgagttatagggattgagctggagactcatgatacgttaaggtgaattcgctaagtgttgctcattctgcacggctcgtcgagtattccattttggatatgccagcgaggcatcc

SEQ ID NO: 260590 - DNA, 673 bp, Cannabis indica
ctccaggtcagtcaattacgaaatcaatttctcatagtggcagcaatcccggcaattcctcgggaaacacgtcaagaaagtcttttaccactctgactacctcaggcccaaatgtttcgggtctactggagtcaatcaccactgctaaaaatcctacacatccactgtattagatctctagccctcaatacagagataaccgggactcgagacccctgaactgatccaacatatacaaatggatcttcaccttttggctgaaaagtcaccattttccgcttacaatctatactggccgaatacttggacaaaaaatccatcccaagtatgatgtcaaacttagttgatttcaactctataaggtcagcactcaactcaatttcctcgatcctaactggcatagacctaatgtgcctattagagataaccaattccccgctaggcattagggttccgaaccctctttctaaaatatcacaaggcctacccaaaagatcaattattctcatagccacatatgagcgtgtagctcccgaatcaaattatactgtaaacaagaagtttttgacggaaatctgacctgtcacaacagaaggactggctgcggtgtcagcttgggtgatatcgaatactcgagcaggtaccggttttacctcagctttcggctcttctt

SEQ ID NO: 260591 - DNA, 650 bp, Cannabis indica
tttgaagcaattttagtctgtaaaggaaagattgtgtaaattcttaaaaaataccataatatatcaagcaaataatatcgagtaaaaaaatattagactaaaaaaatgggtatatttattctaacaaaataattaagaaaagtccaatttacacacatataaatatataattatatgaaaaaagtttcaatagaagattattgttagttttgattaatttagaaattaattaataaaaaaaaaaacaaaggtaacacttcaataaaaaaaaagtttaattagttaaatgactcttgataacataaaatgtatacaaaatatggtattattagaaagaatatttctatatctaaatgttattaattatatttggcaaaagatttagtagtaacttgtttgtggtctccataaaaaacaactctaagtaattaataataaaccaagaaaaagagaaaaaatagtaaagtatcatacctataaagcttgaataaaataatcaataaacaaaagtttggagaattatgaagccattgattcgagtattagctattgaatattgatgttggagaaagaagctaattgcctctcgtgtgttaaaagaaagagatataaatataatatattaggattaatagatatatatatatata

SEQ ID NO: 260592 - DNA, 995 bp, Cannabis indica
aacatttcatcacaactattgagctagagattacttaatcattgcaaaatcgaaatactagtccatgcaagggttcataaccacccaaatctcaaagagtttagttcgtagctaaaattaaaaactcaaaaccagaaaatgaaatgttcatggagttaaagagaaaactagagagtagaaaatgatacaaaatgaagaggagagcaagagaaatgagtttgaagctcaaatcctctctttgtaggttgccttgttctccttcttctttgtactctcttctttttctttctttctctgtacttagatttctttttttctgaaattttcgtaccagcctttcaaagtgcagccaccactttctaattatcctcctcttctttttttgctccccaattagggtactaaagtttaccctaattggaaatccaagtcatcgtccacttgtccttcattttccacctattagttgagtcattggtcacattttcgccacctcagctcctttctttcttcgttaatgccagctggacgttctgccaaaatacacttactgggctgacaaattgctacgcgatgattgctatagcaatgccagtcagcaataagcatttttctgctccttttcttccttgtcccaaacatttccaaatacctattcttgcattttttctgcttaatacacataaaaacaacaacataagtctatttaacacttactaacacacacacacttccatttattaccaagacacaacaaactaaacacaattacataatatagacattaattgctccacaattcaacttaaaattcaagcttaaagatataaaaataactctaaatcttagagttatcaacaatgcataccgactcgatttacctggagagtataatgttaatgctactttaatgttctgatttgagcccttttgatgcaggagatgatttgaggacaaatacttctcaagagggggggggaatgatgaggacacta

SEQ ID NO: 260593 - DNA, 673 bp, Cannabis indica
acaaattgtctccgaaagttggtttgtagcttattccagtagtccacggatcctggttccaatttcttgaaccactcttctgcggacacgcttagagtaagcgggaagcacaaacacttagcgtcattgctgactctcatgaccgtcatgactcggttgaaccgtgacaggtgatcgcttggatcggagttcccggtataagctgccatttcgggcatcttaaagtttttggagagctctgcttccaggatgtgttttgcacatagttctcggtcctcaaagtctgagtcggagtcgttgcctttctgtctccgggagactcgggcgatgtctttttgaagtatggggagttccgccatgattccttcgtttaacgttcccgcggagaccgcgggtccgtatttcttttggtcaaggtgatcccggaggtcacctttgtttctgttaatttgattcctcagatcaacgggaggacatttctgtcccctttttcctctccctccgggctcttgatgcacggaaacgctttttcggtcctctcgatcctgagggccaagactccctttttggagtttgcccctgtcggacctctcgtttttcttcgatttttcatgctatttcatggatttaacttctgattttttgtgtagttttgtatttagacatttactat

SEQ ID NO: 260594 - DNA, 922 bp, Cannabis indica
tctacccatctcccttttgcagtgtccaactactttttgatagtatccttcaaggtttcattaacaatttctacttgcccattcgcttgaggccgtgagactgtcgagatgctcttaataattttgttcctctcgcagaactcagtgaataatccaccttcgaactgagttccattatcaaatactatcttaatgggtattccaaatctgcaaattatgttttttacgacgaagtcgagaactttcttgcagattatggaaactagaggttcagtcttagtccactttgtaaagaaatcgacaaccactactgcaaactttcctcctccttgccctgtgtcgagtgcccaatcaaatcaatcccccatatttgaaatgggtatggcgaggtcatcattcttagttccgttggtggtacgtgatgtatatgtgaaaatctttgacacttatcgcatatttttaacaaatttgggtgtatatttatagttggctagtaatatcctcgtcgaattattttcttagacaagctctgccaacctgcatgatctccacaaaagcctacgtggatttctttgataatctcacttgcttctgttgggagaacacaccgtaagagaggcattgaaaagccctttcgatacaattttccttctactattgtggagcgaggtattgaatacaaaagtttttgtgcctcatttttatcttttgaaagttgcccgttgagaagatagttgactatcgatgtcatccaactaggggggctgtcaatcacctcaacttgttccttttcacatatactcggttcgtttaatacttccaccagaaccaaattcaattcatcatgttcgttctgcgaggctagttttgccaaggcgtcgccattagagttttgtgctcttggaatttgttcgatttaaaa

SEQ ID NO: 260595 - DNA, 2242 bp, Cannabis indica
atatttataaaaatggacatttactcacttagttttcatatttagggtcattttgcatctcatcccttttaaaaaccaaaatgtaatagtataacaatttgaagatgcaaaaatattaattattctaaatcttatagatagtcatactccaaacgctgttcacttgatataccattgtatttgtacataaggttgaaagtgaacaactaataaaaaggtccatttagataggcgctataattagtagtataaataatgaattggatgttgatttaaggcataaaaattatcgccatttactagcaaaatgaagtccgaatgccacccttcagttgactcttgtatttttcttttcattctcttccttttttcgttatctttggtcgatactcataatgactttcttcaatgcttttctcaacaatctccaaattcgatttcaattattttcacacaaaatcatacatcgtatctttcagtcctaaatttatccatacaaaatccaaggttctcttctccatccacacccaaaccctttgttatcataactccattgaatgcctctcatgtccagaccaccatatactgcacaaaaaagtctggtttgcagatcagagtacggagcggtggccatgattacgagggactttcctacgtctctgatgtcccatttgttgtgctcgatctcacaaaccttagatcggtcagcgttgacttagatgacaaaactgcatttgttgaagccggagcatctattggtgaagtttattacacaatcgctgagaacagtcaatgtctaggatttccttctgctactgccaacagtgtaggtgttggaggactttttagcggtggtggctatggcgccatgcttagaaaacatggtctctctgttgatcatatcatcgatgcccaattagtcaaccatgaagggagaattcttgatagaatgtccatgggagaagatctcttttgggccatccgaggaggcggcggcgctagctttggagtcattatttcgtggaaaattaggcttgtttctgtcccacaaactgtaactgtgttcacagtcaataggaatttggaacaaaaagctacaaatcttgttcatagatggcaatttgtggcagacagattagacaatgatttatttattattgtgagattacaagctgtgaatagtcccaataaaactattcaagcttcatttatatctttgttccttggtggagttgatcgactcattccaattttgaaaaagggcttccctgaattaggtattgtaagagaagattgcaaggaaatgagttggattgaatctgtcgtctatttcgcgggattcccaagtggatcttctaaggaagttttgcttgatagaacaactccatttaaagtgcctataaaaggaaaatctgactatgtcaaagtgccaatacctgttgatgggttggaaggaatatgggaaaggttgtttgaagaagaggtaggaatggctttcattcaaatgactccttatggtggtagaatgaaagagattcatgaatgggaaacaccattccctcacagagctggaaacatatacaagattttatatgttgtagctgttactgatgaaggtgaagggattaataatgttacggaatcgattcatgtaaattggattagaaggatttataaatacatgactccttatgtgtccaagaatccaagagaagcttatctcaattatagggaccttgatttagggagaaacaataacaatggcactacatgttatgcacaagcaagcatttggggtttcaagtatttcaaaaataacttcgataggttgcttcgtgtaaagaacatggttgatccaactaatttctttaggaatgaacaaagcattcctccatattcataaaaagcagtataatccaatttacatgtgaacggattcctttacattgatcaaactacttttcagtcagtaatcgtttgtcctatattataagtatttatttttaaaaagaatttgtatggaggaaagatgggatgatcagcaacagcaaacaagtttgccttttcaggaagtcttgttacacgatgaatgaaaattcaaaagtgattattaaaattttacaaagcttagtaaggaatcttgtacaagagaacagagtttacaaacactttaacacagaaaataaagaaccaactccacagagaagaatgaaaacgattaagaattaacagcgatttaaac

SEQ ID NO: 260596 - DNA, 678 bp, Cannabis indica
atttgagtaaccttcaagtttattttcgaaaataatgagttatcattcagtaagttgccattttaataaactatattttaaaaaaaatatgtatcatgaatatttaagtcacccatattttttaaatataaattaatatatacatttttaatagttaaataaagaatcaagttgcaaataacttttaaattattacaaataagacacatttttttggacaaattagttataatttcgataagataccaattggttacttttgataaaacaatcaattttaaaataaaaagatgatgatcagactaaatatcctataatcagatatgcatgtacttatatatgccaaataaacttattagtgtattttggtatattatttattattgcatattgaaacaaattttcattctttgtttacattttttgtatagcctaccatcatatatgttaataaatctattgatttattttggcatattgaaacaaatttttatttttatttttgtatatttgaacaataattcatttcatttcatatagcctaccattatatatatcaataaatcagtttttatttgttggaattatattttattcttttcaatacagattatactataaccaaacataatgatacacgccaataaacctattcgtctatttttcgtatattggaac

SEQ ID NO: 260597 - DNA, 1117 bp, Cannabis indica
ttgcacaagaaatttggaaacttctggagttacatttctacatgaggtgagagaggtaattgattttaaaaatgtgatattatatgctgctgaggtggtagaaaaggatttgtttgagaaaattattattagtgcttgggccatatggacggagagaaacaaaattactcatggtcaacatttaggacaaccacaacagattgttaattggattgacagttattatggaactgttgtatctgctcgtgagccaaggttagtagccttcctattcaaagaaatagaaataattcagaagttctacatagggatcctcaagaagaacagagacatacaatacttatggttgatgcagcagtactgaataatacaagttcagttggtttaggggctattatcctttcagaagatagaagggtgagggcagcagtttgcaagcctctcaaaggtagacagatctttatctttaaggaaatttatcttaggggctattatcctttcggaagatagaaggaagttcagttggattacttcaagggaccttgaattcaaaatctaaggagacttagattgtgatcttgattgagttatcaagatctaaggtaaatttgttgtaagaatcatttttgtattgatttacaaactaaaatttgtaacttgattgtgattcttatatgatatcatttatcctggttccgaaaactcaagcattacttatctagaatctatttctatattatagcttttaataatccttgcaaaatgattagtaaaacaactaaaatttactctttcaaccacatttaaagttggtgttaaaaaaagttttcaaaaaaaaacaaaaaatcaaaaacaaataataataataataaaataaaataaaataaaaaacaatgtaaatccacaaaaagaagtgggcttctcttctcgaatggcttcttttccatctctagattctctccatttctgatgggtaaggtgaagagtcatggctgcttttagcacttcaacgatgaatggagctatttccttatcttcttctccaccctttcactatctcactatcctctcttcttcttctcctctcgtctctcttcatcatcatatgctccgatcg

SEQ ID NO: 260598 - DNA, 2425 bp, Cannabis indica
ttttagggtgtgggaaatgaagaagaaataggtgagaagaaataggtgggcatatgggaaatagaaaaagaaagtaggtgggcacgtgagaaatatggcgagaagtaggtgacgattttttaatggacccttataggcgacggttgacggttaaactgtcacctataagggtccattaaaaaatcgcattttattaaaaaaaatatctcctattttgtttactacaattttaaaccgttgggaatactaaattttttctgacggttttaaatagttacttaatttttttagcgacagtccccaaaaaaattatttttaggaccgtcgctaattttgatatttgtattagtgataggttttggattaatggtgctcattccatatgacaccaaacaaaggcatgttgaactcattctcagaagatcataatggaacattcttactaagaaatgataaagcttgtgatatcaaggtaataagctagcattattatgttcaggactcatgatggcaacattaagaccttgcgacaagacaagttttttgctgaacttaagagaaacttactatccattggaatgtttgacaaagcatgatatccagtcaaaatagatgataagatcatgaaaatttctcagggatcacaagttgcaatcgaaggtcatttgaacaatgatttttatttcttggatggtgagactgtaacaggaaatgctacaacagactactgaacctcaggcttggaaatgctagtcagagaggctttgaagaattggacagacaagggttattcatagagaaattgaaagagaaactcgagttttgtgatgaacgtgtgcttgggatgccccgcagggtgaaatttaataaaggagagtacaccaccatagagagacttgcctatgttcactttgacttatgggaaccagctagaatacctaccgttggaggggcatatatgcttccttatgagcttaatatatgattttagtaggaaagtatgggtctagttgcagaagaacaagagccaggcccttgatactttcgttgagtggaaaataattatggagaaccaaataggtaataaacttaaggtgctcatagcatataattttctagaatattgctcaaataaattcaaagaattttgagcaaaagaggaaattttgaagcataaaatagtggtaaaaataccacagaaaatggtacaaatgaaaggatgaatatgatatcgttggaaaaggtgagatgtctactgttaggtgatgaatttgaaagactattttggggagaatatctcaagataccatgctaactaatcaacagatgtcccttagttgctaacgattttaaggcacatcaagatatgtggacagagaatccaaacaaatttgaacacttgagagtatttgattgtaaaacttatgttcatatcaaagaagataagttacagccaataacattgaagtatatgtttttgggctatccagataaggtaaagggctacaaactatggtgccttgaatcaggacacaagaagtgcttgataagtagggaagttgtgtctaaggaagatcggagatgtccatgaaagataaggttattcctaccaatgttcaaactgtccaacaagagggtatgcacattaaggtgggccattcacatggctaccctacaaaccaagatgaaccagaagagatgactgaatgtaagactagtcatggtgaccttagcagttgccaactagcaagagatagagaaaggatagagagcagaccaccaaacagatttggctatgctgactttattgcttatgccactattataaaaatactatttccgttagtccccaaatctatttttggactgtcactaataaaaattcttgactggttaaaattattgactatagtggagtattcttaacagttttaaacaattgtttaccattcctaatagtttaaaatggttacgagagcaaataacaaaatcgtgaaccaactaaatagacccacaataataaaatattattgaaaaaaaaataacaaaacaaaaagaaaaattcatggcaataaattgagaaaagacttattcaacgccgccaaccttccaacacgcatcatataccacatgatcccttagccgaaccctagctctcgctccacactagcctacaaaaaccaaatgcacccaagctaaccaccctctatgtcgaaagaacctaaagagaaaggtcgacgaccactccaaccttcaaatctcgaaccaaagccccctagatctggtcatcccgcttgataattaatgaaattaaaatataaatattaaaaatcatatgagattcatatagcaatcaaataagatattttaattttttggatacataacctaatttatttttatttcttttaatgctcgtccaaaa

SEQ ID NO: 260599 - DNA, 1453 bp, Cannabis indica
attattttacttttttttttaaatattttaccaattttgtttctatcacttcaagctactcttcatatgattctcttatatcaaagtattttaggtacaatacatatatatatatataaaaaaagatttgttttaattaaatataaaattagagataaatttaattaattgattaataaaaggtattttcaatttactctaatattgagtgagtgagtcactggtcagaactctacaaactccttccaatgaaaataaatcacctcgtggctcgtgtacgtgtagcttttcttccttcgtgctaaatccccaatatacccttggctctggctcaaattttcaactcttaacaacgaccgaaacgaacgattccaacaactccctcaatgttaatagcatgaagcaatggactcggttgtcccaactctgcctccaccctccaatctctcttcctatatcgtatccttcttaaacgacaatcttcacaccagagaaactctgactttagctcccaatctcctttcacagctccaatctaactgctccgatttggatcaaagcataattgacctcaatcggagcctcggagccaccttggttgcttacgcttccttctccgatcaaattcatggcctcttgagtgacattaatggccaattgatcgatcttggatctttcactcgctctcatggatatgtcgagccaggtattgctgaattgttgtgattttgatgaaattcggtaggttatcatggctgttttgtgggattgtactgctgatgtatataattacatacaatatatttatatttatacaattacagatggggagagtggagagggaaaagggagaacggagaagatattgggggaggagttgccggcattggcgaaggaagtggcgagagtcgagactgttcggctgtatgctggtgagtttctttttagttttagagtatgagaaatgactataattgataatgggaacagctatggttcccatgtttagaaatgggaatggagaagccctgtgctttacttctggtttttgatctttgtatgccctcttttgtgcttgttcgaatgcatttttttgccctttaatctcgggaaattgatgttgctctcttgtttcaaaacggaggacaaaaactttgttttgttgcaatatctacaacatatacaaatttgatattttgtttgggtttcaatcgaatgctctgttgctgaaataaaattgccttactttcccttattgcttcattttttatagtattattactagagtttctacatacactgtaatgtgagctctgtgtgtgtgtctttcttgccttgtttttcttcccgtcttacatcttgcaattaattgaatgttagatgaacgctaggatcgtttaactttcttacttgtagtagttttatctctattggagtagttgcgtgtactgtg

SEQ ID NO: 260600 - DNA, 783 bp, Cannabis indica
aaatcatgtatttggcaaatacgaggctcaaagagaaaaaaagatagcatatctgagcaaaatacatgatttgctcgcacaattcaaaagctacagtctcaagaagattccaagagaggaaaatacaactgcagatgcgctggcccgtttggcgagcagcaatataagtgacaaggcaaacctggtcccgatccaatttcttgaagagcctagcatcactggcacggaagaaatcgaaatgatagacacgtgtccaaactggatgacgccaaatagcagcctatctcaactctggggaactcccagataaccgaaatgaagctcggaaaatgagaagagaggcagcacggtacatcatcatagacgggatcatgtacagaagaggattctcaatgccattactcaggtgcgtcacgccaaatgaaactagacggcttctatatgaagttcacgatggattctgccgaaatcatgcagccggacagagcttatcaaagaaaattctaaggcaaggctatttctggccaacgatgatcgaagattcgaaagcttatgtcaacaagtgcgacaaatgcccgagattttcaaagataccaagagctctgcccaacgagctgacacaatgcaaagtccgtggccctttgccatctggggaattgacctaattggacaattacttaaaggtaaaggcggagtgcagtacgcggtggtagcagtcgactactttacaaagtggactgaagccgaaccacactcaactatcacatcaaagaaggttcaaga

SEQ ID NO: 260601 - DNA, 818 bp, Cannabis indica
atatatatacttgagacatttaaattcagttaaaagtataagattaaagtattaaatttctcataaaccaagaattttagttatataggcacactttatatagaatagatatatagaagaaaataattctgttatagttgtgatcatgtgttatatactaattatgtacgtaccggccgataagagataaaggcaacaacaaaatacgatcagaacaccatctcgagtagtggccatttttcttatttctcaatgcttacttagttttttcttgattaaagcatgtaattatatatataagcaagtgttaattacggttattatactaatttttatatatatcgataaaaatacataggtgtcaaatcaaatccatgtgtatatctatataaatttgtatgtttcggttaattggtcgccaaggatatatactatatataaataagcgaccaaagactttatatgtgtgctatctatattttgatccgtttgtcaaaaaatttataattaacctttccttagtgagatttttagatgaatataaaaaacaatttatgtttgtgtcttcctcaaactggctatatacgtggcggtttattattttattatatatttgtagggagcctatatatgtatatctctatagattatataatatctttatctttttatatatattaaaagtgtctatctaaccgcaattcttgatttaacgatttattagtttaaaagtgtctatctaacagcaattcttagtttaacgatttattagtttaacaattttttttatttagtcttacacgattaacttaacagac

SEQ ID NO: 260602 - DNA, 3880 bp, Cannabis indica
cgtacagaagcagcagccgccagagatatttccggtgatagtctccggccatcgagcttcgataaaagtactggaatttaccattcggttcaccaactaggtaaacatcacaaaattcccacaacgcctaatctcgacacagccacatttgtgttatcacaattcccaccccatcacaaggccgagttacgagtcgcactaatcgactcggccacgaatcagcgactcacctacgctcaactcaaccgctctgttctctccctagcctcgggattgtaccacgcgttgggaatcagaaaaggcgaggtcattttcgtcctttcccccaattcgttactttacccaattatttgcctagctgtgttatccatcggagcagttctgaccacagcgaatccactcaacaccgactcagaaatcgccaagcaagtgagcgactcgggcgccaaactcgctatcgcagcccccgatttgttaaacaagctaatcccaaccggggtccatacaatccaaaccacacggtcaccagagggcaatgatgatgatgatgatgtttatgaactctccatcgaagagctgatctcgagttgcgatccggtcgagttgactcggtcagacacagacgaaactgagttaaatcgcccgactcagtccgacactgcggccatcctctactcatcgggaactacaggaaccagcaaaggagtagtgctcacacattccaacctcatctccatcatggcgctgctcaggtggagcgtggacgtcacgcgagcggagaacgacgtgtacttatgcttcatcccaatgttccacatctacggcttggccttcttcggactcggactcttctgctgcggaaccacaaccgttctaatggagcgatacgacctcaacgcaatgctcaaagccattcaaacccaccacgtcaccaacatcccggccgtaccgcccgtgatcctcgggctcgttaagtacgccgggagattctccgccggcggagtcggggacctttcttcgttgaggagggtgagttcgggagcggcgccgctgggtaaagagttgatagaagggtttcggaagaagttcccgtgggtggagctgaggcctgggtatgggttgacggagagttcaggggcggcgactttgttcgtttcggagaaagaggcgaaggtgaggcctggatcttgtggtggccttatacccggattttgtggaaggatagttgatgttgataatgggatgagtttgggtccgtataaggtgggtgagctatggttgaagagtccaacggtgatgaaggaatatttggggaagagggaagcgacggttgagacggttagtggggatgggtggttgaaaactggagatctttgttattttgatgaggatggttttctttacgtggttgatcggattaaggagcttattaagcataatggctatcaagtacgtacctctttcaatcctcatgcatgcatatataaaaattatgcattgatatggggcgtctagcactagcactagcactaagtagtaattaattaattataattagttagtgatttttttattaaagaaaaataagtaatatttgatattaaattgcactaatgaccatattacatctctgaagagtacgagctggcctaaaaatgtatggtctaagataattttagagccctataacacatgaaatttatttttacctatattaaaaaaaaaaaaaaaactcaaagcgtgtactgaagactatctttaagatttaaatttaactaaagtttcgaatctaatcaaataatatttaccaaaatataatatatatatatatatatatattattatgaacatatttgatgattaaattaatgaattttttcccacaataatgttaatatatgagtgattcatgtggaccactgaaaaaaaaaaattaaacagagcttactattaaagaaagaaataaaatgaaaagttgctaaaaaatagaatttaaattagtaaaaaactttttcataagaaaaaaaagtagaatgcgaaattaatttaaataaatcttttaagtaaataattggactgacaaacaaattcgaaggaatgctatatacgcctcatgaaccaacccaattgtagacaatcattaatattattcataatttcatgtaatgggaccttttaattttaatttatttttggactctcaaaaaatgttagagtactcttgtcacggaaagcctgtttatatctaagacttatcctggtgctagaaaccatgaactctttaacatttatcataaaaaatttgtaattaataatgaatccgcctattaatatttattaaaaattattatacaaaattatacaattcaatattacacctaattaacactactagtactttttagtaattttcttttaatagttatatataataaatgcaggttgctccggcagagctggaagctatacttttggcccatcctaatgttctggacacagccgttgtaccgtgagtactgttcatatatgatatccattgattgaatacatgtgttattatatgtattaatgtgtatacatatatatatatattgcagggtagaagatgaagaagtaggacaaataccaatggcttatgtggtgagagcgggcggagctgatcagctttcagaagcacaagtgatacaatatgtagctcgccaggtagtacgtacaaaataattataatgttaattttattgattatgattagtgattattgaaatagtggaattgatgatgtaattacgtacacacaggtggccccttacaagaaagtaaggaaagtagactttatcaatgccattccaaggtcagcagcaggcaaaattctaaggaaggaacttgtattacaagctaataataagcaccaaaatattaactctagattgtaaacgaaacttaattaatttactccctgcttcaagcaaaatacacatacattcttctgtatatatgtctctgccctcaatattcaattcattagtttcctatctgccttttatacatataagagcattatgatttaaagaaatggtaaagggtacccacatagtttgctagctccactatgaatacatcatcatatggttaatttaataacagattttacttatttatgttaataataattagaagaaatagctaattatttgtaattacctcattgtgatattaagcaccataatatttattaatatagcctttcataattagttaagaatttatcgtatcatttgttaaattaagattcgtagtaatagtaataatatgtaaattttgtttactaaataaagaacacaaaacaataccctggttttccaacaccatgcgagaacaactttagaaaatgtgataacatttgcaccacttccaccaacaagagatgagacataacttgaccgaacattttaacactcaccattaatatgcaccaacaataatttctcatctcttgtaaaatgccacttaaatatatggaaaatatatatgtagaagtaggagtgttcgcagtgcgggtggtgcggttttttgagtattttttcaaactaaccgcacatgcggtttttctaatttctcaaactgcacccgcactgcgaaattaaaaaatcgcaaaaactgtactgcaaaaaatggtacggtgctgtgcgatttttgcaatttatgcggtttggactatcactaataaattaactatcacaaatacaataaaattaagcaacacttgtcaaaaataccgtaagacttgaaaataaatatgaaaaaaaattaagtttcaataatataataattagtgggctttggattggacaattcacatggacctaaataaatataaaaa

SEQ ID NO: 260603 - DNA, 763 bp, Cannabis indica
ttaaaccttaaaaaccaaacctaaactcagtcccggacttggactcgcccccgatctcgacctcggattcagccccgaacctgacttgataaaatcaacaaataaaaataaaaattataaaatatatttttattttttgtttttaaaattcaaaaacaaaattagttatagaatacatttttgtttttcaaaaataaaattttacttttacttttgtaattaaaaaattttaaaaataaaaatgttactaaatgccatctaaatatcacaacaaatattctaccaagtaaatatattttacttaaaatatctcgcattttatattatttacattaataataaaaaataactaatttattaaataattagtaagaattatatcaattcaaagctattagtgaaaacttaaaatcttaaaataatttaataaaatataatatttattaaatcaattcaacactacattttcttttaaaaaaaatcttattaaagttctataatgatcctattgtattatacgcgaccattttcaaaataagcaaaaaaatgattatgtaaaaaagagttctccaacaatatcaaacatctcaagaatgtaaatattttcaaaatacttaaagttttcatagtcaatattttaatattcttcaacatcaatgtgatgtcagtagtcccgtgatccgtaaggggaaataccaggtaagctgtgcaatctcacactgcctggggaaggtcaagtgggatgattctgagactgtgtagg

SEQ ID NO: 260604 - DNA, 761 bp, Cannabis indica
aggtgatgcgattttcctggcgacgtactgggcgtaagtacgggcgtcagtgacatgataagtaccgggcgtaggtacgagctcgtctaattagacgatgcgatatattggtgccagattgtggcacgggctcacctgattaggtgatgcaattatatgatatatgggtgcaggtttttggcataggctcacctgattaggtgatgcagttatgcgacatatgggtgccaggctatggcacgggcttgcctgattaggcgatacaatacaagatcatcagattaaagcatcgacttgcctaattaggcaacatgatgtcatgaagatggttgctttatgaggtaacatatatattatttatatgattaaatgaatatgaattccattattggtataatggttttgtattaccaaatatctgtatactaatgtttattcgtggcagatgccagtagtgatttggatttcatcttatgaacaaagtgtgatggtttgattcttattgtgtataaatgacaatattcgaataataagctatatgattgttattattacttttcttgctgagtccttgtgactcacgggtgctatgtggtgcaggtaaaggcaaagaaaagctagatcaaccatgaggtggcagtcttctccagcaatgtacatattgacctcgccggcctgcggccgagttgccaggagttgttttgggttgtatttattgtgtatttaggttttatgtttttgaggcatcatcgtatatagtt

SEQ ID NO: 260605 - DNA, 1160 bp, Cannabis indica
ttcttatatacaactgacatttgcaaaaacacggtttttcaaatatcaataaaataataatatattattattgttatatattatgagtatctacaatacataaagtaaaaaaacttaataaattaatatatgtataacggtcggttttaatttttttggtctgtttattacacaaaaaaactgaccgttcaatgacagttttaaccgttagcaatttttttggtttttggttctgtcagtttttgttccaatgatgtttggtaggttggtttgaatgattttttttgttttctagatttcatgctcagccctagaggtcgtggaaggttttagggtggtagaaatgaaagcccacctcaaggtcctctagattgggagcagagatttgcagaaatgcaagctcaaattctccaacaagatgaagagattcagagattcagagattcagaggctgagatagcaaggtcctcctgcagtgcctccaccacaagttcaggtcgttatggttccagcagttacagcagaacaacctgttgctggcaaccatacggagccactgtatgaaaggttttgcaagcaggcgcctctagttttttatgggagtctcagatgttatgaaggtcgagcagtgtctaactatgattgaaagaatcttgaacttcatgggagttgttgggaatgaccaagtgatttgtgtcatttttttaattccaagaagatgcggttgtaaggtgggagttagtgtccttcacccgagatgtcaccaccatgaactgggaagagttttgggatttatttaatgccaaatattataatgagacaatctgcagtgtaaagcgtaaagaattcactgatctggttcaatgtgatggcatgtcagtaatggagtacacaatgaagtttgattgtctagccaagcttgctctgggtatagtgcccacggacttagtaagaaagaaaagtatctggcgtgtttaaatgcaaagattagacacaatttggtaattactacaagtgaagcaaggacttatgctgaaatgtttgataaggctctgcgagctgaaggtttggtgacatttcttcaagagccccgagagactccaagtgttggtggaacccccgctcttcctactcctagatatggtaggaatagtggtgat

SEQ ID NO: 260606 - DNA, 548 bp, Cannabis indica
tacgccccccctcactttaaattctgggtccgccactgtgtatacactctatatatatgtgacatgtttatatattggtacacttaatattattatttcaaaattataaaaaattatttcaaatttataatatttttatttttaaatattttattttatttttataattttaaaataaatttagaaataaaaatattaggtataccaatataaatgtgtcatgtgtataatagtatacacataagcagtctatggtagcagttaactggatatgtcaccttaaatttgctaactatttagtaatttggaaaaatttaccgccaaaatttaagctagaaaagttaagtgtaagtgaaaatagtagccgagagaacttaactgtcaaaaactctataaaaaaattatatgtaactaattttaaaaaatttgaaataattcacttaaatagagtttaattaatgagttagccattaatttaattgaatgactcaaattaattcttaaaaattacaacataattaatattttttttatttataactaactaa

SEQ ID NO: 260607 - DNA, 908 bp, Cannabis indica
ctctctctctctcttcatctcacgtgcatacaccattacaggtgtggtgagaatgaacaatcctaactcattacaatatctcatgagttgagtacacattgtaatattttaaattaattcatccaaataaaatctaatagctcactttatttctgagtgttgagactggtttggaaaatcaaggtgtggattcttgaacaaaagtttttagattaagtgatcgttaattgtactaaaagaatcaaggataccctgataggcttcaagaggtatagttttcttttcagtagtctacatttaatctatacatatacatcatgtcgagatccttgggcttatggtttattttagataaaaactattttatcaaattttacttccacttttataactttgatatgaaccataaaaacccacaacatttagattattatttaatataaattatatgttgttatatcttagagatgcagtagttatcatataatttaggacttttatgatctgaaaagagtttagattatattataatctgtcatcattaaaaggaagaagaatatttaaatagcattaacaattgggtaattgaaacaactaattcgtatccttaatctcacagttaaacaactttaatcactttctttaattttctgtcaatatatattgttctttctaaattattcttttctaccaaatagaaacataagtctaatttagttcttaatcgattttaattcctgtgggtttgacctcacctatgtgagtactatcacttgcttagttttatatttttcgtaataatggtcaattgtttattggagtttcgaaatataggtccatggtctctagatcacctttatacaacatggtacaaagtgacagacttaggatttttactttgtgggggc

SEQ ID NO: 260608 - DNA, 730 bp, Cannabis indica
tacggtagtccgaaccggcatatgatgttcttcactataaagccttgaaatttttttgatgtaatggttgcaagtggtttggcttctgtccacttagtaaagtagtcaattgctacaacttcgtactgcactccgcctttacctttaggtaatttcccgatcaagtcaattccccaaatggcaaagggccatagactttgcatttgtgtcagctcgttggcggagctcttggtaatctttgaaaatctctagcatttgtcgcacttcttaacataggctctctaatcttcaataatcattggccagaagtaaccttgccttagaattttcttggataaactctgtccggcggtgtgatttccatagaatctatcctgaactatagatagaagtcgtgcagcttcgtcttgagtgacacatcttagtaatggcatcgagaatcctcttctgtacatgaccccttctactatgatatatcgtgttgccttccttctcattttccgagcttcatttcggttatctgggagttccccagagttgaggtaggctgctattagcgtcatccagtttggggatgtgtcaaccattttgatttcttccgtgccagtgatggtaggctcttcaaagaactggatagggaccaagtttgccttgtcacttacattgctgcttgccaatcgagctaacgcgtctgcagttgtattttcctctcttggaatttgtctgagac

SEQ ID NO: 260609 - DNA, 825 bp, Cannabis indica
ctaaaagcacaactcgacaaaacctctagacggagttagaactttggaatatactttagcttgtcacggagcatgctgttagtgccgtgctaatgagagaagagaacaacatacaacacccgttctattacatcaataaaagactcattgaggtcgaaggctgatacccattgatagagaaactcgcttactgccttattctagcaacaagaaagttaaggccttctttttcaagctcatcctgtttggatgtacactgaccaaccattacaccaaatattgcaaaagttggacgcctcttgatggctactcaagttggcggtggagttgggccaatacgagattactttccaaccccaaacaacaatcaaaggccatgccttaacagattttgtagtaaaatgcacaagcaaagaaaaaagcgtactggaaagcaactccgagctgatacaaacacctcaaccaagtaacagtgaagataaggtgacctggaaactacacgtagacgggtcggctacagatcagctatctggtgcaggaattgcccttgtcacacctgggggaaacacctacacgctgcagtcaagttttgattcaaagcatctaataacgaagccgagtatgaagctctaatcgttggcctaaagttggcccaggagatgagagccgagcataatgaaatttgcaatgattcacaactggtggtaaatcacgtatccagagaatacgaggcttggggagaaaagatgatagcatatctaagcaaattacatgacttgctcgcacaatttaaaagctacgctctcagagaaattccaagggaag

SEQ ID NO: 260610 - DNA, 1883 bp, Cannabis indica
agatcctggtaaaataaattccaacaatattgtcatcaagagaagaaatttcagacattgtttcctcttattttgaacaaatctttattgctatggaggaagatcattgggctattatcacatgtgctatccatcattccatctacaattacagctgagcataatgactttttgttgaaggaattcacatcggctgaggttcttattgcattgaacaatatgggttcatataaaagtccaggtatcgatggcatgtcagcaatattttatcaacataattggcatattattggtaaattagtttctaaagttattcttcatgtgctaaatgatagtggtaatcatgttgcttttagtaagaccttgatcaccttgattcccaaagttaaaaggcctcaaaccatgaaatatttttttgtctaataagtctctgtagcgtcatttacaagttgatcttcaaaatgttggttattcatttaaaagatgttctccctcatgtcatctctgagactcaaagtgccttcctccctactagaccgataatagataatatgctggtggcttttgaaatggtccatagtttgaagcattgaaagagaggttccaaaggatatgttgcactcaaactagatatgagtaatgtttttgatcgggtggaatggtcttttttagcagctgttatggggaaaataggcttcaatatcagatggatctctctcatcatgacgtgtttacacacaaataccttttcttttctcattaatagttcagtttcaggttctgtaatgccgcatagaggattacgtcaaggggatccactctctccatatcttttcctaatttttctgaaggtctttctagactattaaaatttgaggaaaaaataggaaggcttaaagggttggttgtttctcgtagatctccatctatatctcatctattctttgcagatgataatcttcttttttgccaagcagataatcgttcttgtggggcaatcaagcgtgcattatatatttatcatcctgcttcaagccaagagcttaactcagataaatatgtcatgtctttctcgccaaacacttcaaaagctggaaaaattccttccagcaaatccttgggattcatattagtgagtgccatgagaaatatctaggcttacctgcttattcagagaaggataaaaaacaattatttggtgatattaaggaaagaaaatagaaattagtgcatgcttggaatgataagctctttttcaataggagggaaataagttcttttgaaagcagttgtttaatctattccaacatatgtcatgagttgctttagacttccttctacttttgtcgataacttgagcaaataatggctaatttgggtaaagttcggtcacatataagaagaagactcattggaaaaaatagaaatttctctgtaaaactaaaatagatggtggaatggggtttagatcattttttttttcactttaaccaagctttgctagcaaaacaagcttaaagaaatattcaatatcccaattctcttcttagtcgtttattaaaagggatgtatttttctaacaatgatttcttggctgctaagagtggaggcatgtcttcactaacttggcaaggaatttgttggggttgtgatttattaatgcagggaatgcggttaaaagtgggtgatggtgatcatatttggagtggaatcgatccatggattccatgaaacgatctttactcaagtttccacatatataactattagtaaagaatggaatctgagtcttttgcagcaagatttatctccagcagaacaacattatattttaagttgctattacaggaaagtaacgtaaaaataatatttttttttctgaa

SEQ ID NO: 260611 - DNA, 527 bp, Cannabis indica
caccaaatgcatcattagttgaccatagtaaatttcacatttaagagtaatcatatcaagtttgatattcccttagacatatgccaatacataaagtgttattccatccctatacaggtattcaacagattatggcatgtttcacttctgtatagctgatagtgagcatgattggagagagggatcagagcaatacaggttcatagagaaatgccttgcatctgtagatagacagaaacaaccatggttgatctttgctgctcatcgcgtactcgggtattcctctgattactggtacggtcaggagggctcgtttgaagagcccatgggaagagaaagtttgcagaaactttggcagaaatcaaagttgacattgctttctatggccatgtccataactatgaaaggacatgtcccatctaccaggtccatataatcatttgggttttccattattgcaaaaaaactcaccacaccatattcatcatctgggatttttttcgtacaacaacttaccatacatgtaa

SEQ ID NO: 260612 - DNA, 2068 bp, Cannabis indica
atatcctcctcttgaatcctcaacaggtgatcaccaaatcaaacatcgatcgtagagaatacagtcgttccctgaagttgatcaaataaatcgtctatccttggcaaaggatacttattcttcactattaatttattcaactcttggtagtcaatgcacatccttagtgtcccatcgttctttgttacaaacaaaattggtgcacctcaagataagatactcaccctagtaaactacaaatccaacatatcttgcagttgaaccttcaattcgtttaattatgtcggtgccatccaatatgaggccttggaaacaggctcttccttggtatcaattcaatctcaaaatcaatttctcgctttggtggtaatccaggtaactattctacaaatacatcccaatattctcgtaccactagaatatgttcaagtcctactactacctctctcatggtatccaccacgctagctaaatagccgatatatccatcccataaaaaatctcttaccttaagtgtcgacataattagaatttgagatcctttaacctttcccacaaacataaatgggttctcaccctcaggtttcaatgtcaccatctttctcttacagtcgatggttgcattatactttgctagccaatctagtcccagtattacatcaaaatcttctaagtagaacttgattaaatccactggcatttctctaccctccacgtgcaatggaagagacctaacccacctgttggagataaccaactccctactaggcaacaaagtaccaaaattgtttggtaatacatcactgggcttattcgaactattgattcctctactcgatacataagaatgtgtagcaccaggatcatttaaagtagacaacataataacatcaatataaatctgacctatcatggtagaaggacaagtatcagcctctgcttgactcaaagcaaacacccaagcaggaactagaacatcttttttctttgttctagtctctgtaactacgaacaatttctcttcaagtggcctactactcaacattggaagcaagctcgatcttgaaatttgccttgatgtcatcttttgcatctaagacactgaagataggttctctagttttagctcccacctcagtggaaacattgattaccttgaaaatttttattgggacccgtaactttccttgtaatcatcaaggtcaacacccctaccgggaccaacattgggggatgacctccaaggatctcttcttatgttacttttctttcgaatcttatcttcaacaccctcagaagtaagggctaactcaaccacttgagcataagttcgaacaaaccctagttgtttagtagctaaaactacacccggagtaaaatgttcttccagcccctggataaacttgtcctttctatcagcctcagtggccacttcatcataagaaaacatagacaaccaatcaagttttgtggcatactcaaccatcatcatattgccccgagtcagccatatgaactattctaacttagcagcacatatagaatcattgtagtacttttcatagaataaggtccaaaatgcatcccatgtaatgttctttagatcatgagcttgggacacgatttccaaccaaatatgggcatcctcccgtaacatgaatatggcacaacaaactcgatcattacccttgactcacataaagtcaaagatagatgttttcatgctcatccactattctgccataagtgggtcagtaccacccttgaacactggtagattacgctttataaattgttcatacaacaactccaaaagatttcccacatcctgcagcacaaccagaggtgccaaaggaatagggatcggagcatgccaaacttgctgttctctcagttctttgatctgatccccttactgaagtatggtcttttgcattgcaccatacatttgttcccaattttatggtagtagaggattcacatctttactgccagcctcgagcccaaaaagctcatggttaaccctattggatcgcctcaggtgcataatctgttggaaattatttta

SEQ ID NO: 260613 - DNA, 1345 bp, Cannabis indica
aattcatacattatatatatataatcatgaaataaatcatgtgaaccatgcaacataaaatgttatttatgatctttattaataagtaaatctgattatattgaaatgagagcctttcgcctgcctctctctcatagtttccctcacgacatagttgtcaatcgcaaaactaggggcatgtgttatattgtgaattttttacctagaaactcgagaccatgctctcataaagatgacacgtggactcaatctcctcgaggagtgctgagctgtcagaaggagaccacttgagtataaacctcgcctgatccaaactcggcgagatgatgtgaccctgacagagtctagttgtagtattgtgcctcgcatggtacaggaccaaattgccgcgtttaaggctcgcatataccaagatatatgcgatgtctataaagctttctcctgtaaatcagtaaagatcgattctttacttagcgagctggtccagataacctaatgcgctcgatgaaccgataagggctcgcacatcctaagtcattgacttttacaagatatccatatacgcggctcggataggatgcagatatcttaacacatagactcattagtcctttacacatcctaggccctcgagcttatgcaagaatatgaaaagacaacttacaccattaaggtcgcatacgttgctatatttagtgaattgagtcgaaactgttcttcatttgttccatttgtgtttttattgattgaatgttgatattcaatgtaaaacagtttcataattaattaagttttgtataatcaaaggacacttgctatgtatgtaaaggagtgatccaatatgaaatggatggacagaatatctttgcaacattggactaagaagaccgtgatctgactgaactactataattcccttgtgttcattatattgctctttgaatacacaccattctaggttgagtactcgcactttttcaataaataattatattttcatttttatttggtgttgtcaaaattcatccaacaacagttatgttattattgttttcatgttgtttgttaaattattttagagttgtttttagttgttttgagtttgtttttatttttcttaaacgcaatattttattttataatttaaaattttaaacaataatattttataaagttagtatagtgaaaatataaaaaaaaaactaccctattataatattttataaatttacttcattttttgtaacttcccatttaaaaaaaaattactggtgggattagttggcaatttcacactatcgagacccatttaattgggattcgtaggcctacagtatacagtatt

SEQ ID NO: 260614 - DNA, 822 bp, Cannabis indica
caaaaataatactgccaccttctaaagtaccagtgcaaaggcaacattgcccttgcttagtatgagcgcccgaccaagcacacatccctttctgtgggttaccgtggctcggtgatttgaagaagggatgtaacactctagtccactcaggtctccagccttgtccaaggccctcatgtgtgcctcgctgatcttggacggagggctcacccatctggcacctaaggcaccttacctattgtaaggaactgcttcagtgagctcctcagtgacatagtctcccctttgaccaagacttcaccctccgcagacaccgaccccgagctcattataccctccaaagtttggaggttcaaccactccttcctccttggcctcgaaatggctgccaagacggacgtcgtcctgctcctcaatctcctggacctcaatgtccccctcatgatcttcctcctccatggcgggcagatcttgttcggcgcttggcaatgtggcaagcagggccacatgaggatcagatgcgttgaccttgaacattgtctactttgtgtgtgccatcatcctcctcctagatggatattgatgtgaatgtcgtgcaaccgtaacagcaggaacaacaattgggatgccaaagttacccgaacttggacatgttggaaatattttacaaggatctagatttactaccatgtatgtttcattaacatcctaatatgaattctaaaacaatgaaataaacacataagggttcaagaaaaccttacattgggtgcagcggaatataatgactcctaagtgtggattcaataaggaattaataag

SEQ ID NO: 260615 - DNA, 538 bp, Cannabis indica
aaaagtacgatcagcctcaagaagagaggaccgcgccaaacaatgcgcaaccctattagcagaccgcttaacaaaactcaaagagatgttttcaatctcggcacaaagagccttacaatctaaaatgatatggccataaggagagaccatacttttattactttgaacatcagaaatcactcgcaaacaatccgattccaaaatgaccccctcccaactgttggactttatccaactcaacgcttccttaatcccaaaagcctccacctcatgcggctgcagcaaaccagttttaagcagagtcttggcttgaagaactaaacccgccgcacttctagccaccattcccacaccaaaccgcccttcggaagcaaatatagcaccatcaacgtttactttaatgcttggaaaagaaggagggcaccatttctcacttacaaccattgaatgaccatgaagagcatctttttcgaactgttgtgctttacaccagtccgaataattcatcttagcaacatgaattacctcttcactcgac

SEQ ID NO: 260616 - DNA, 681 bp, Cannabis indica
ctaaattgataactaaccagattgtaatggattttatttagggcacaaaacccaacacacctaacaccaaacaaggtacgaggtgcaaaaccacctcctgcaccagcgacgtgtagcatgaaagtgacactttgtccccttgggaccaccatgtatctcaggccataagacataagagcctataaatacccctttctaacgatgtgagtaggagttggaaaattattttttgtaacttagatcttgaatgcaatagagagaacattttcagatatcttttcatcttcatcttcaccttaatcatcatcttatttctgggttacttttatattttttggccactagattagtagatgagttctcaccgttaacagtttggcattgtctgtgggaacgataagctttggccaagtcatttctttacatacaaccattttgaaatgtcctgacgctcatgcctattcctaaaattgttcgtgaagcaatgtctcatcctggtcggcttgatgcaatgatagaatagatgaatgctttagttgcaaatggtacttaggtcttggttaatttaccttcaggaaaacaggccatagggtgcaaataggtgtttacggttaaattcaatcaagatggaacaattgctacacttaaaggcttgtcttgttgccaagggttatgctcaaa

SEQ ID NO: 260617 - DNA, 1571 bp, Cannabis indica
ttttttactaaaattgaataaaagtccttaaattcaacaattttaataattcaataaacatttttaacaaccttcaaaattcaaagaacataatttaatacatgtcaaatttaaaaggtaaaattcttaattagcctatttatttttatcaattgccttaattctcttgatctatcatataaatgttgttgactttttaagttaatatgcttaatttgctggataccctttatgaaatgcatttttattggctggcagctccctataggaatatatcatggttggggtcagcacatggctggacttagttggatgattgtgatttttattttttattttttttttattttaataataataataataataataataaaggaatgatgtagtaatcatcattaatctacagatatttttttatccaaatattaaaatctaaaatacacaatccacctattcagctatttttatcttagctagccataattgggtactgttaaatctaaaatagatcccataaacagatcatgatgcaaagtttataactgtttttttttttcaaaattcaacacattaaccacaaaaaaagcatatataaattaatctatgtactattatattctacgtaattaagtggtttaataataaattttaataatttgtaaaaaataaaaattaaactaaatatggtgatataatcaattaatatatatatgtatacttacatatcgtccatgaatttggcagcaaccatgacacttgtgatgagcaaacggtgaacattgaatgagttaatgggcaaagaagtttgtttctgagcaaaacggtccaaataaacataagcaactatgtagcaagatgggctgcaattggcatacttgaaaatcctctctaaatagctttgtatagtaattgtgggtcgactcaatccatggaagattgaaattttctgagcttggaattggcagtttatgtcgtttgattcagataccctttggagcaaagaagacagaaatgtgattagacttgtcattacctttgggttttcaagttcagccattgatgatgaaattaaagctatgaacttttttttatctatatatctctttggttaattttgggctagctagtagagaagtgtggtgagagtttttgaatgtttggtttgtggatgtgttgggatatataagaggttttttctttctctttttaacagaggatagagagaatacaattaaggtaataagtggtcgttaaagggtgttggggttgatattttttgtgaccaaaatacccttgagagatagtttgaattgtgaattgtgaattgtatatgtatatgtatataagatagagcattgctattaggtaacagtagtgcctagcactttttcgacatgtcgtgttgtgattggctagcgatactccctaaaagctattatattaaattatatgagacttgatacttaattagaccaatagcgatattaacacataaaaaggtactaggtaccacagtaccctttaacatttctgatataagatacctcattgtttagtggggctttgga

SEQ ID NO: 260618 - DNA, 1928 bp, Cannabis indica
aaaaaagagctcctctagctcattttttatattcagaaaagtagttataaggtcagagcatctctctctagtttctctctttaaaaattagagattaaatacttagccatttttctgtaattccatctcgtgagaataaaaagactcgaagtagacgtaactccactaccatcgcgatatgaggagtgaactactataaattttatgtgtctctctaaattatagacttacttttattgttcatctcgtcaatctagcgagctgttctcggtcactttttcagcgttaacagttttatttaaagttttaattatgaggggtagtatggtaatttttttttataattaggaagatagactttatttcttttgttataagaagttagtagaattgtactaaaaagatatggtaaccattatcaatgtcatcctctcttctttgtctctcttggccgagcatctcaaaaataaaaaaccttggattttatattcgagtattagaaattgtttcaaatacacaattactactacaactaatgtgacttaggatctttgatcatcactaaacagaatttcacttagattggccgacacgcacttgaattagattttaggtacgtattaactcaaattttcgttaacaataaatgaagccttatttataaagaattattacttacacttaaattttttgaataaataattatttgattattttaaacatttatgatcaattatatgcaatatttattttaaaaatattatttttatgttttatttataattttacggtctaaactttttaattataaaatattcttgtaaggttttaaaattacaaaaatacactttgtttagacaaaaagtaaaaaaaaaaataactaaaacatatataatgtgaaatcaaccccatgacaactataaataaactacaaaacaaaagaaatctcatgacaataataatacaactataaataataaattataacacaactaaaaaaataatttattatttttactgaagaaatatttttgtaaataaaaatgttcaaagaataaaaatgaaacaatttccatgttgataaattatttcaattttttggtcgtaaatttttcaagaatctacctatagagctgaaaaaagctaagataaagcattaattaaagtgaaaatcacaatacatgttttttttttttttttaaaaaaacttcatatatggaaaaatctatttttcttaaataatattttccaaattcaatcgatgacgatattaataatatagggggatatgtcacgcgtaataaattttaatggaaaaaatgttaatgtaaatcaagaaatgtcagagtaattttctaaaagaaaaaaaaaaaagaaagaaagaaattaaatgaaaaaaaaaatgtaatttcatttatttattgtggtaaggtattaataactctcgttaaaagatgtttctggatcacaacttgtacggaaaaaataataagacatgaaacataatttaaagaaggtacgtatagtagagcttaagtaaatatataaacctatattttctcttttatataaattcgtaggaagcttcttcattaagaataatatttttgtccctaaagagtgtggacataatataatttcagtacctttaagtataacattgtatatttatatatattgtactgataaaaattataaattaaagtttcaaaaataaagttgaaagtacgtatagttcgttataattgaattaaaaaccgaaacattgataaattttatattaagtgtgatatatatatatatattattttttttttgaatttctcaaattaaaaacgtccactaataatatacatactattattagataggggttaatactattttgactatggtttttcttataaaattattaattgaacttttta

SEQ ID NO: 260619 - DNA, 1225 bp, Cannabis indica
aaaattacaaagtggggcccaatacctatccatggtcggaaacttcactaggatttgccactttatttttctattattttaataataattaaatttaacctaaccctaagtggtttcctataaataggtagtgatggcttaagggaaaaagatgatgcatctcattccttcagtaaaaatttcaatacactccttcactaccctagccgaaaccctatctctctcttcctctcttcaaaaccgaagcctcatagtgaaaatagtaagtgcccacacacatcttgtggtactcaatcatagtgtgtaaggttctgaagaatccagtttcaagagaaggagacattatatttcgctgcaaccactataaggttcctcatactttatatgtctttatttcatatcgttttagaagttcatatttaggatattaataacatacttgttagtaaatctagatcctggtaaaataattccaacagatacacgatttgggattagagtaggttgagtagttgtagcagcaggataaaacagaagagtttgtgtagaagaattagagtgatcatcagggcatagaaactcagttgtgtacatgtgtgttgatttaggaatagtagtagatggcaaaggttcactattcagaataggtgcagatgaggaattagaggtagtagtcttgtagggaaactttgactcatcaaaaatgacatccctaaagatgtacattctaccaaatgcatctaagcatttgtatcctttgtgattcaagctatatccaataaaggcacatgtagaagacctaaaatctagcttatgtttgttgtagggcctaatgttgggatagcatagacatccaacggttcttaagttggtatactcatgtttgatattgaacaacaactcaattggaaactgttgttgtagaataggtgttggtaatatattgtggagatacacttcgaatctgaatgcctcatcctaaaatttcaagggcattgaggcatgagcaaggagacttaggccatgttcaacaattttcttatgttttctctcaacaagacaattttgttaatgagtggtgggggagggatgtctatggagtatgcctacttgtttcaatggttcagtgaaggatctaaactccccccttctgtctgtagggtttttatcttttttcctatttgaagtttagtttctatttaaaaattttgaaaggttcttaggg

SEQ ID NO: 260620 - DNA, 2262 bp, Cannabis indica
attctgcttattttgttttcaaatgttgtgcatatgcagtttcatgattttttattttttatttttttgtttgcttaatggcgttgtgtagacatgttgcctggattacagcaaggacaggagaagatgtccaaaagtgatccatcatcctccgtctatatggaagacgacgaggtgtgttatagatacaaagttgttaggattatacatatttgacaacgagtggctgctattagttgtaccggaagtttttgaactgaggatgttacaatttcattttttgcaaatttgaattaatatttttgttctgttgaatttttgaagtgggaagatgttacaatttcattttatccaaatttgaattaatttcttttgttctgttatgttaggctgaggtgaatttgaagataaagaaagcttactgtcccccaaagattgtggaagggaatccatgtctagagtacattaaatatcttgttttggcctggtttaatgagttcactgttgagcgaagtgaacagaatggtggaaataagtaagtatcacaaacatgagatcaaatattgtactgcttgttaatggaacacgagatcttctcgatctcctcggatgctctcttatctaaacatgatatggtttcaccctttttattaaattcagaacctacaaaaactatgaagatataattgctgactacgagagtggggatcttcatccagccgatctcaaacccgccttatcaaaggcgttgaataagatacttctggtagttgttctctcctacacgatgagtctcttccactgaataaaattagttgttttcgcttttcagctttgctaaatccaatgtttgtttttattcccagccggttcgagaacattttaagaacgacagtactgcaaaagaacttctgaaaagggtcaaggtaactctactaaaattttccataaaattaaccgctattcggtattttctacctatggctaacaatttttcgcattgatcataattttgtttctgtaggcttacagagtaacaaagtgataatgatcaatggagctttaaagattttgcctccttccttttacttggaaaaaaagacaaaaaggtttgatatttgagattgtagtcaatttaaaaagatttgtagtaatatgctcagctatttattattagactaacaagtatttatttagcaaggctaagtagtaaatatcaagtagactgagttagctttttactacaaaatgttattgtacttcatttcatttttcactcaaagaatttcaccagtttgattttgtgtttcatgcaccatgtttatgaattttagcacaaatatgtaatatatatttacatattatttgaataacatatataattttcagtttaagttgcaatgaagtattttctattactaaatgggttattagttttataccaagtgattcatattatcatgtagcaattaggttttcaaaggttgagagagttggattttgggatcattcaaaaacatataaagttgagttgttaatatattaattataactagtttaatgctaaatccaccaaattaacatgttaaatagaatgtctctttactttcaagcaagtctaatggaaaatccctagcatgagactactatgggattggctttaaattcaatcaagaaaatgttacttgagctttttttgggacatgcttgaagattgaggatttgcactatgtttggtaaggtggaaagaagagtggaaggagaggggtggaaggaaagagatggagggatatgtataatcatttgtttggcaaaagggaaagaggaaaggaaaggtagaaggagaattaaaaaatttcaatccttcctaaaatggagggatttaagaaaaagacaatatataatatatacaatatcatatttgtcctaaataaataataaataattatatatatatatatatttttataaggtaaaatgaataattatattaagaagaatagtgttgtaaaggaaaattactttcttctctattcttcatattttttattctttttgtcctttcctcctatcctaccaaacatagcctaagaattttagatgaagaggtgccttgtcggattgtgttattgttcatcttcaagacaaatgacaaattaagttgaatttaagttgatcttaggtttcgaacactttcattaataaacttacaaaaatactgtttttttaccaaatgttttcaaaaatactgggacacggcaa

SEQ ID NO: 260621 - DNA, 978 bp, Cannabis indica
atttataccctaaggcctaacagatacatatatgatggtcatgttttgtacaaccaagctttgtaaagagtccaaagaccaagataaattatatgtcatcctttctcatatgaaaagagcatggaacttgcatcaagactttggcattaactatttgctatgctttgcctactgtaccctaaattaccattataattttttcatttaggtagaaggtgtcaagggcatttgcccttatatttcccaaattatctattatgacttgtactaattactgttctgaatcagttgttcttgtgctgctacccgattgtttgtagctgtcgacaattccttttttaaatgataatagacaaaagtatggatggggcttatttgttaaatagtataaagcaatatagagaaaaaatgcagctttttaaattgatggaaaattcggttcaagtatattattgttggtagtgactaatgtcaagttcactcatgctattttgaattgtaaaactttactttgctagtaatatggtggctttagactttttgatatttactatcttatctagctccacctgttttagctgattatctgtttttctttggaattcattaatctttgttgagaaaactagaatttgatgtttctgttgaaaccttctagttctttttctgtttttgtttgtcttttgaacaacaaatcttctagtttttggttcagatagaatgcaaagaaaagaaggtaagtctagtgaggactaaggcactgacatgatatgaacaacgggtgcgtctgaatatgtattttagttgcatgaaaatcacattaaagaaaatgattcttagtttctcaataggtatgatctattttgtttgaaccgtcttttaagggattgagtagttgttttgaatgaagtgacgctttatgttatccattaactgtattaggctgaagttatgtgtaattgcatatgattagttata

SEQ ID NO: 260622 - DNA, 1500 bp, Cannabis indica
aaagtaaatgaaaatcaatgcccccaaacatagactttaccaaaaaattcagagttctcatcaagcaaatcattagacaaattggcataaaattctttgacaataccttctatatacccttcaaaaccagtaagggtattttcccattgatgatattgaacaaacttaacaataccatacacctgatgagcatgcaaatcatagtttctttcactttcaaacttttgagtagcataaatattttaatgacactaattttcatggtaataaaatctggaattgataacttgagagggagaaatattaccaggagtggaactctgcataggctgcttgcctttggcagcaacaatggctttagctgcacaagaagcacaaggaggtgctggagtagatttggtcaatcgaggttcgggttcgagttcagtttcctcactgtcagaggagacaccaaaatcttctggaagctctttttcagaaggaatagacacagatttgatcttggagtcatcagaggagacctctataggttcttcttcttcagaacttgaagaagccgatgggggatttaactttagcttcttggcagtaggattcagtctgtcatggcttcgtttggtgcgaagttaattctcgagtgaagcatgctgggcacgggtgcgagaggatggtcctgttagagttgatgcagcaacacccttaccagttacagcaggaggcgatgcagtagcacgaggaggagaacccttcgaagataaagacgatgaagtgcagaatttcatgggtctcacggttttcctagccacttgtttgggaattcatttaggcttgaccttcacattctgagattcacgatgaggaagcaataaatctccttggagagaagcagttgctggagcagggagcaagattagagcagcaggaggagcatttgagggggcaggttcggattccaccaccttttttggttgccctaaattatttgtcttagccatggatgtttgaaagagagaatgaaaaacaaagaagcagagaacaaggaagatgaatcgggtatatggtgaaattaaatgataataaaagttggtttaaataaacatgtgagagtggaaaagaaaaaaaggaaaccaacttaaaatttaaaagaaaaaaacttaccagcccatgaacccaagaaaaccgccccattctttttccaaaattattttttataaaaaataaaaggaaacaagaataaacaagatattttccaaaaataggcaatttaagaaaatccttcaagatcaataataaaatacaatgaatatgaaatcaaactttaaaaagtaacttatcaaaataaatcaatttagattaaatgttgatacttaccaaactaagtacaaaatttcttagcccacaagtcaagtcacaaatgcctcgctccttgaatttttatttttatttatgaaaatctgaaaaaaatataaaatatgtgcaataaatataaggtgttctaga

SEQ ID NO: 260623 - DNA, 1662 bp, Cannabis indica
agtcctcaatcatagtgtgtaagactgtgaagaatccaaacaacaagaaggagtttcgggctcagatctgagcgaaaggagtcaattaatttcgctacaaccaatgtaaggtttctcaaaccttttatgtgtttattttatatcgtttaagaagttcatgtttaggatgttaaaaacatacttgttagtaaatctaggtcctggtaaaatatattccaacacatgattctgccaggaacttattgaattcgtttgctaaagagaagaacaagtcgagtgatgctaaactgatctatacagagccattactaaaaaatggccaaaagattgtccaagttgatattgaggaagacaaggaacaatctgagagctagaacactgccataatttgtatgattcttggagctaatcctcatatgacagtctttgaaaggttcatcaagagaatgtgggggcaccttggtgttgtgcagatagcaagattgtcaaggggattggtcatggttaaattcaatgatgaggctactaggaatgagattttggaggcaggagtcattcagttcgatagaaaccagttattgttcgaccttggacaacagacttgaactcgatcaaattggtaaggtttgtgcctctatggattcatctttttgatttagggctgcaatattggggtaataagagtctaagtgagtacgaatggctcctagtcaagtgttcaaaatgctctggttttggccacactgttgttgattgtcgaagggatgaattaaagaaaaagaatgttggttcagcaaaagaaaaaccagcacaggttcagggcaactctgtaaaactaggcactattaatgaagaaaaggctaatgaggaaaaaccagaaaaaggtctcaatagttatgaaacctgttatagtgagatttctctctcacctagatactcgagaccagactcctctttaaaggacacgtgtattcagatttccaatgaaggctgaatgtctgcgagagacgtctcgaagttttgacctcgctcaagataaaacgagcgagatactgcaagtgcgatttaagtcgcaccgcataaccttctcatcatgcagggtagatccaactcgcatgtgtcagaacatgtgcgagtgtcccctctatatttccgcgacaagtatagagaccaattccctatgatgcagtctgatacaccacatcgaaggatgggtattgagattaccacatcctctgtagggatgatcgcagggttggtgaatggaaggtgcgctctctgagatggtttaggacgttgaaacgcaagtcgcaacaaattcaacctcacaaaggtggtgaagtctgatttggcaaccctcgagactaaatcctcgcacgcgaagggctcgttcaattgggagtcgtcgaccgaatctgtcccactcccttccgcttcctcctcttccccacctgactcgcggactggagtcgtccattcctcctccatctcctcgacctcgatgtcgggagcatgcctcgtatgtatgaggtagtcgcgtgctgacactgtggactcgctgtcccggatatcgattgtcccaggttcagcgagctcctgtaccatcctctcgatgtctacagaagacatcggacctaactctatttgcgcagcctccatttc

SEQ ID NO: 260624 - DNA, 561 bp, Cannabis indica
  modified_base (133)..(133): a, c, t, g, unknown or other
ctgagctggtataggggctcggtgttttgggatgaagctcgggtcgagtagctgtgtttatggtggtgttgaggggtgaatcgaatgcggatcgacggtgcgcttcaggtggaacggttcagctcgattgggnttggggtgttcgaagagcttggagttggtgcgagtggtcatgcggctgggtcgagcttgggcgtgatggaggctatggtgaggtgcgaggtgggtgaagaaggattcggctggtgcttggctagttcggctggcaaagagaaatgaagaagggtatgttgaatgtggtagggttgagggtgggctgaccaaagaattgggctggtcaaactagctggggcccagttgaccaaagaatttggcccaaaactgatttaaataatgtgaagtggggtctttgtatctccaaaaattacttgggctcactcaattcaacactaaagtacaacctcaaataatttgtctgaacaataatagacctatccaatgattgaatcatgaacaacatgacaatcacatgttttttttttctgacagaccattcacttt

SEQ ID NO: 260625 - DNA, 567 bp, Cannabis indica
taaacaaagatgaaattaagaatcaagaagaaaatatattaacacatgtaatccacaatgatcatcagttcactatcgtcattagatcttcataatttaagcatatgatatataattttgattatcaatcatatatatactatatatatgttaagaataaaaaggaaattatatatatctatatcggggtcggatatggtgtagataatattatccccgccccgccccatccccgcttcgggtattgaaattgtccccgaccaccgccccattaaccaccaagatggggaatccccaccccattaggggcgggtcaccgcagtataaattttcatctttactaataggtgacttttgcaaaacacagagtctaaaataatatttaaccttaataatattttttattttattttaaaaattgtgtcaaacctgtcaaatttgtgataaactgatcgtgtcatgtttagtctttttttttttgtgaaggtcaaagaaactttaattagccagcaaattcagctaccaataaggtagcagatcagttgagacatttttcaactctttgaa

SEQ ID NO: 260626 - DNA, 517 bp, Cannabis indica
taaggttttctaactttatatatgtttattttcattgttttagaatttatattaggttgttaatccaacatacatgatataaaatagatcctggtaaaataattttcaacacatgttgttgctgctttagccatgccaatcatcgacaatttcaaatcacatgaaatggaagccaaagcacttttccacagtctcaattgggctcttcaacaacaattacaagtcaaccaaattgagacggatgcacttatggttgtgaatgctttgcaagctcccttcaatccaaactcttctttttcatatttaatattagatgttgttagtctattatcctttttccctaacgttgttgtatcacatgtcaaacgttctgcaaatgaagcgacccatggcctaactaaatttgctttaggggtgaatgaggcttgtacttggttggatattatccctctgccgatttactctgttattgtaaacgaatctttatttgtttaaagtattttccctcaaaaaaaaa

SEQ ID NO: 260627 - DNA, 1988 bp, Cannabis indica
cgttaaaccaagaatcgttaaattaattgtataaagatatactctgatgctccacatcaatacttttttttttgttggaactcttggatcaataatctgcctaactacaatgaacagaacagtctatgatatgaatgttgcaattaaattttttctttcaaaaagtatatcacctaacaaatgttcaaaataaactaaaactctataataacacatatatgttatcagttattttgataaaaattcaatgtgtttatatatttcttttcaagaatgaaaaacagaaaaaagtatttccgttaaaaatatctcaaaacataaagacaagaattgaaaagttggcctaatgggtggatccttcctagaccatcctccataattcgtacaattttttcttaaattcagttcttcagtcccatcagccaactcagcaatttgaccacccctaaaaataagattacaccaaagctttctcaatcctcagagaccagagccaatccccagccagtcagtcatctcatgatgttagggtgccagagtgagtgtaatccattaacaggtcactgaggtcatcatatactttacaatttacaagattcattattcactaatcacatatatacaatttacgaaaatgcagtaaaatgcctagcagttaagttgaaattaggggcaatgtgattctaccccacaaaacatcaaatccaagttgcttgttcgatatacatacaaattaaacatagtaaatatggctcgcaatgttaataaattccagaccatatcagaccctagtaatgtgatcacaactcacatgcaagtcaatcaaccacactaaattgtagacccaatagtgagttatgacaagtcaattcgaattcatgtaatatgatatatgatatatcgacctagtaatgtgatcaaaactcatgtaagtcaatcgacctgttgactaagtaatgtggtcataatttgcaggaaagtgtattcaaagcccaaataataagatataaattgaagcagaactgccattagccgagagcaattgaaagaaaacgtgtcctgaaaggcaagaaatgatcggaaaggtgcagcatcaatagtaggctagtggtcaaaaagtgggtcataaacgtacgtattcaactttctaagcacattagaacatccttattacggaacatcacttaataaaggtcaggtcaggattaatgatgaacacaaacaaagaatttgagacagcaatcagatgcttaaacaagcatttaagctaacataaacttaagctaagtatcagttcttattaatatgcaataaaaacatgaaaaggaaaaaagattaaatttcttccctcactgcaacgcaaagtaacttctcaatactttacaacaacaaagaaccaatcttcaaaacaataattagtatgaatcaaaataaagtacacacctttacggaacataatgcgaaaaaagcttaatcaattgcaattctttccatgatatctgacattgttacaaactcgaactagaaaaaggttagcaaggaagaaacaaaaagaaagcataaaccttttctttttttctcttcatttcagatcgtaggacgtattctaagtaagttaatgaatcaaagggaaaaggaaaatcaacatacaaactagatgaagaaaaagccaattaacaattacccatttacagaacaaacccgaggaacaagaaggcttcaacatcaccaatgatatatcagtcgcttgataattcacaacactcattcccttcgttaaagaatcggaatccaatcacatccgccacaataacgctctccattcaaagaataatctcaacccaacaacaagattaggcccaactataaagaattgatgagaaatctgatacacacaaaaacagaataaaaacaaaaaaaaaaatcaagtttcatgaacaagcttcgtatctgtcattgacctttaaaagctgtcgcctcttgaatac

SEQ ID NO: 260628 - DNA, 601 bp, Cannabis indica
atttcgtgactcaaacttctctaagattgatctttacactacttagttgcaaaatcaaaagaaaggttccttgtctataaatgaatatctgctgcgtatttaaactatcgttgatcgattattatctgttggccatcttgtcactgtaaaagagcatgttgctgctatattcaaaggtttgcctcctgcttatgacacctgttattagtgtcaactcaagaaattctccctactctgtggctgaaattgaaactttacttttgtctcaagaacatcgtatggagaatcacagtagagaacttgattctgtgaatttagctactaatcgtggttctcgtttcaaaccacaatattcccccaatctctctaacaatgcagattcaagatctcaaaatcctcccaacacaaacaccaatcagggacgtggtgtttggaatccgtatgctatttccacaagaaataccacatctggccaatctttctcaaatcctgctgcaggtcgtggatttaccaatttatctgctgtttccaactctcaagctccttcagggtctaaacttgtatgtcaattatgttcgagaactggtcatgttgcttctcg

SEQ ID NO: 260629 - DNA, 583 bp, Cannabis indica
ctagaaaaagttgtgttttttcatcatacttaacaagtttgtacgcttttgattcttagacttcgaccacctgatatggcccttcccagtttggtccgagcacacctgtcgtacagtctctggtgtgcaaaaatactattcttaggaccatgtctcccacaaagaaatttcgtgctcttacttattttttgaaataccgagctacgttttgctgatgagctatcaatttcaagtttgctgcaattcgtttttcttcaacttcatctagtgattctggaaggagtgcatgattaacctcttggttgtgtgtcaatcttttgtgggatgtggtgttctacgggcagcatagcttcataaccatatgccatggcaaatggggtctgtctggttgctattttctcagttgtgtggtatgatcatagtactttaggaagttcttctagccagtttcctttagcatcttcaagtcgtttctttacggtatctttgagtgtcttgttgactgcttcgacttgaccatttgctttgggatgtgccattctagaaaaagttgtgttttttcatcatacttaacaagtttgta

SEQ ID NO: 260630 - DNA, 777 bp, Cannabis indica
aataattgctaacatccattatcatatattgtttttaagcttataagtttgaatatgttgccttttatcttcattgtgatatgtatgtgtcgtcacaataatcttgcttcaaaagaactctattgaaaagagcttttcaaaagatctcaccattcgtatttctcattccacacatcatctagaacaaaaagaatgaaacccagctaaagcaaagtgtcccttaaaagtatgggtgattgtatccgacaattttgttgttattaagataacaaaaactattttggagaaaatcgttggaaaaagatgtgaaactagcgagaagaaattttttttcgttctcgatgatttgtggaaggaaaaatatgaacgggattttttttgaaaatttctttttaatctgatgcaaaagaaagtaagattattatgacaatcacattgaagattaagacaaatgttcaaacttatgagcttaaaaacatgtcttatgatggatgttggcttctatttgaagaacatacttttgataatgtaagttttgataagtttcatgaaattgttaagaagtgcaaggtttcctttagctgtaaaatcgatggctggtcttttacgatacctgcggagacatatactacaaagtgatgtatgggagttaccaaattgtcgcgatattgttctagctttgtggttgagctatcgatttcttccccctttgaagccttgttttcgttgtctatcaatatttaccaaagattatgaatttggtgatgttgatagaaa

SEQ ID NO: 260631 - DNA, 521 bp, Cannabis indica
tttttttttttgaaagaacaccaattcgaataaaacacaaaacaaaaagtggggatcacagggggatcaccctctccacaatacaaaccaggatcaatacttgcaagtctaatacttctagccagaccatctgcgacagaattctggcttctactaatataaaagaaactacaatcattaactattagttttgatacatcttattcattctattttttctattacacatagagctaaaacaaaaaatctaatgagtatccaattcaaaaaaccactaaattcaaaaatagttagaaaaaataaagccaaaagaaccacatgtaattcaaaaatagtgaactaaaataaaatgatttttgatcaagttgtgcagaatacgatattgacaatatatgagaacctaatatcacatataagatacatgaatcactcatctaacaccgtactaatgtaataggttgagagtagttagtgaattcctatattactttataattaactcatgcataagcatataatta

SEQ ID NO: 260632 - DNA, 639 bp, Cannabis indica
taaatttattttaattgaaaaattttaatttattttgattttatgtcatttttcagcttttgagcatgctgtaaaatgaagcccaatagaaagttgaaagagagcttcaagatggtctcaattattttttaagcaaatattggtccaactcatcccataaaacatgaccatgcaaagcaatatatatttgatgggaatgattctccattttgctcaccaaagttacggcccaaaacaactattcaactctatttaaatcttttgatgggcctatttgattgttcaatacaaatcaattaagcataaattaattgcgataagttgaaaaattccccttttttgtgttcattaattaaaaatacccttatattatatttcattgaaatatatccacttttttgagtgagttgccaaatatacccccaccttccacttaaatctagcatattatttatattaacttaaggggtataatagggacatcatctataaaagtgggtatatcttaaagaaaatgaaaatggaggtaaaaatcaaaataaataaaataaaatgggtatacagtgtaatttcctctaaattaatttgggtgcttttgaccgaaaacagcatagcaagcagtgttggaaattattttac

SEQ ID NO: 260633 - DNA, 734 bp, Cannabis indica
ctatcacactccatgcctgttttattaatatatttgtttacttaaaatattaattaagaataattttattttaaaactaaatttaactagagttacttatatttatatatacttgctatatcactccatctcttatcatctcttttctataattatatattgctttattttttggaattattttaccaggatcttagattaactaacaagtatgttatttaacatcctaaatatgaacttctaaaacgataatgaaataaacacacataaagtataagaaaccttacagtggttgcagcggaatataatgtctccttccactcagatgtctaacccttgtatcctttctgttgcagagtatcaccaaaatctgagcccgaatgtccttctcttgaatctggattcttcacaatcttccacactatgattgaggtaccacttgatgtgtgtgggcactcactcattcactatagggttcggtttttagaagagaggaagagagagagaaggtggcagctaggtttaggaagaaggctttgagatttctctgaaggaatgagatgcatcatctttttcctaaagtcatcactacctatttatagcaatccacctacggttaggttacatttatttggcattaaaatatgaaaaaataaatgataaataccctacataagtggtcgaccatggtttaggataatgggccccacttttgcaaatttgccattttatca

SEQ ID NO: 260634 - DNA, 1464 bp, Cannabis indica
ttgaagttgacaaggaagttacagtagtccacgcccactctaacatgtcaaagccaagaaacccaaatattcctatgttgtatgagctcatgatagaacccaatctagaaatttgggatgacttgtatgatagtgaagaggattcaaaatgtacatggcaaacatgtactcagaaaaacttacaaaaattccatcttggaaaccatcttagagtcaaattttagagtacaccagaaataaagaattaaaagaataagaaaatgattcgaaaacaaaaggctgttttaaaaagaaatgatctcgaacagccaaaacgaaatctagtaactctggaggagtttttaccaaaagagttacaagacaagatagttgttggtgacgatagtgtgtgagattgttgcatgactttattgacaaaagaagattctgaatctacctcacttgaaagtgaaaaagagttagatgaaattaccttgcaatatatgcaacaaaaaattttgcaaagaagaaaaaagaggcaaaagagcttgaaaaagctaaacaagactttcaaaagccttcatcttcgcccaaccaagaatttttgataatgacaatcaaagagacaaaagcagcagtgaaaatgaaatgacgcaagcaaaatatgatatattggctcatctaaagcgtatccctgctctttaagcgtttatgatgcactgcaaatgtagaaatgcacttgttgttgcattgactagtcctaaattttatacggacaaaatagagccagtgaaacctacatcactcgagatccatacctttcgtatggcatgcataacctttgatgataagaaccgtcagttggggactgccttgcataattgacctctttacgtgatgggtatggttgctcatatttgagtgcgccgcatcatgttagattgtggatcggctgagaatgtactccccttaaagaccttgagagatgttggtttacgcccacatcaattatctctgtcatcattgacaattcaagattttaaccaagttaaagaaaaagtaaagggatgtatcacactaaattgaaataggcaaattaaattctgaagccttatttcatgtcatcgattcagatacatcctacaatgtgttgttagggcagctgtggcttcatgaatatggggtcgttgcttcaacacttcaccaatgctttaagctttgtaaagaggaaaagtcaaaagtgtcaatgcatacccaaatccattttatgggaaacaaatgaattatgctgatgctaaattttacaagtcagctaacgtcaccattctaaaagggaaatctgaggagggcaaatgtcatgaaagctcaacctcataatactctctgcaaattaagcaaatatcccttataaaatctcctcagcctaaagaggaggacttgaaggtatctaaccaaaaatgaaccttcaagtacatccctaaaagt

SEQ ID NO: 260635 - DNA, 583 bp, Cannabis indica
ttttttttacattcccgacagtttaacaccgtcgcctatacccgttataggcgacggttttaaacagtcgggaagtccacattagcgacctattttgcccattttgcatggtcgtattagcgacggttataaaaactgacgggaatactttaaactatttaaaaaaatcagaaaaaatcatttttatagtagtgagttgttttgttttattcaaacatttatttatatatagatgttatagatatatctttatatatatccaatggcggagcccaaccaaatttgtatatatctttagattgtaattgtgtttaaattaatattagtattttttttatttttcttcattttggccaatcttagactatgtttggtaggaattaggagcatatggagagttaatgaaggatctagaataataagaaaggagagaagagagtaacaatctttttaagttgtttggtggaagaaataaagtggtagaataatggaatattaaaatatttatttataaaattattttattgtctttataagtaatttttttataacatattaagagaatatatttataatttccaac

SEQ ID NO: 260636 - DNA, 548 bp, Cannabis indica
caaggttttttttttcttttttattttttacatttttacgaaaatttacgtagtaacttatatagcaattaccagagtaacataactactgaataaatcttacttttagttacaacaaaatttgtaaactaaaagtaaaaaaattgtgactaattataaatcatgatttctatgttgtgactaaaaatattcgtcacaaaaattacaatttgttgtgacttataatgtagtaacaacttataactaaatactatattttagtcacaagtaatatttcgttgtgactaaaagtcacatttagtcacaaaaaaataatgttgtgattaaaaagttgtcactaaaagtactagccgtgttttgtagtgtaaattgcaactcaaattcaaataacaactcaccggactcaaaccgtaaaaataaaaaaaaaatttaaaaataatatataaagtaattcctcttttataaattaatgttttctattttgagaatattaaataatatatattagcatttaaaaaataaaagaaatgacttagataattttgttt

SEQ ID NO: 260637 - DNA, 1301 bp, Cannabis indica
gtttagttaaaaaaaaaaagttttgaataaacaattaaacataaacaaacaatgtccatgtaacaaatgtgaaataagatttatttcttatataattaaattattatttaactaaccaactattttgaaaatttaaggttgttaaaaacaacctaaatatcttttcaaaattgaaaatttaaactaatttaaaaatatataggtttatttaaattagtttatcaaattaaattaaatatctaataagataaatgatttaaaaataaccaaataaatattttcaatatcattttctaatcttataatttaataaaaataaaataacaaaataaaccaattttaaaaaatagatatgtttaggcaattattattttaagaataaaataataaataaataataattatcttaattatatgtcaaaatatctcaaattaagcctttttcaaatttttacaaaaatatctaggttatttaaatatttacaatactatttataaatttctcataagtaaaatgatataaaatagcataaatatcatttttctaacttataatttataaagaattaaatatttcacaaaataacctatttttaaatttgaaaatattatggttagaatatccatgaaaatatctaagttaatttcaaatttattaattacttaattcaacttataagataattttaatataatatttcaaattaaaagataaggctatcatttaatttaaaatatgtccaatattaaaatatctaaccttataattaaataatatataaatattaacaatttaataaattttttaaaatctgacgataattaaaaaaaataaaataattaatttttaaatttaaacctcaaaatatcagaaattaaaaaaaatatattaaaattaaatattattaatttgtaattgatatttaagtttaaatatattaaaaataatattttattttgagttttagggtttgaaattgggaaaattgaaaaaatcccacaaaattcaagtttggtggctagctgcccaggagggctgcacgtccatccaaattaggctatagccagcctagatgcgcacacgtaggagagttgcagggtccttgtgcgggaaacgtaggcggggtgcagggtccgtgcctgtctgaacgggcgtgtgactgagcaatcagacaattcgtgtttgagatctgtgcgcgcataaggggtgttgtccgagtgcctggtgcgattgagcaccatctcgacacccatggcatccgattttcaaacaacgataactttttcaatttttatcggaa

SEQ ID NO: 260638 - DNA, 574 bp, Cannabis indica
tattaaataaaaatgcgacattacgatttttttttttccgcgttttaacgcttgtaaataaaattaatatttttataaaagtacgggcgttacaccctcaagattggctgaagctgaactgtgacatcagagtcgggttggatagcatgtgtgcagctgtagttgcaagggaccatgttggcaaggttatctggatttctacttctaagctggagtttgctgatgctctctgtggggaagcggtggcgtgctgtttagccctggaggcggccaggtctcttggtatccaatttataattgttgagagtgattcgagggtagtgatcaataccctcaatgggaaggagtcccgttaggagcttgagaactatgtctctttttgtaaaagcatctctcctttttttatcggttgtgttgaacgaataaaaaaaaaaaaaaaagaaggaataaataaatttattattatttcattattggttttttaaaataataataataaaaaaaatatatcagtcaaatagagagaaaataggatctcaactccccactcccctatttttactcatcctttacg

SEQ ID NO: 260639 - DNA, 602 bp, Cannabis indica
tctaaagcaacaaaaccacccagaactcacagaatcaaaaatcaccattaaagcatcaagctttgagttttaaactcaaacttgatcaaacactaccaacatgcaatcaaaccagtccaaacctacttaaacatgcataaaatagcctctgaaaactactacaaacatcaacaaaatcacagcaacagattttaaccatttctctttgaaaaccatagttttgagctaaaaacttccaagcttgaaatcaaagcaattatcatgcattacactaactctaatctacttaaaacaacaagattaatccactgtaaatcacaacaaaatcacagccacaacaacaaccaattcaagcatgcatacatcatctttttcctcaaaattcaagaaattaaaagaacaaggtataaagatcttaccaaacacttgaagaacactaagattgaaaggaaaagagcttgaaaatcaaagaaatctcagccctaaagcaccataccagccgagagagagagagaggaaaagagagagcttttgagagttttttgaattttttttgtaagtttttttctaagttttgaaaaaatagaaatgaaatgccactt

SEQ ID NO: 260640 - DNA, 657 bp, Cannabis indica
aaaatgtggctatataacagaatacttggtttatcagaaaaaattgggtgactttttttttaaaggtcagcatccatgtatttagttaaacctgaatataattaatccacctaaagtgttacaattaataataaatttgtttttaaattttaaattaaatttgaatgttttgatagtttaaccagatgagcattttcattaattgccaagataaatttaagacgaataataattttttttaattactattacaaagtataatagtaatttttatttttatttaaatcactattatgctttcagattttaatgattatcactacattgaatattattaattttaaaattatgatattaaaataaactaaaaactaaaataaaaattaacatacgtgacttgacacctaacatctatctagtatataaaaataaattaaaataagtaataaaattaaacgtgaagaaaaaaatttaaaaaaatattaaaagtaatatttaaaaattatttatttatttatttttaataataatagtgtacttatcattaatggagtatggagtatgtacaataagtgtccaattatttataaatcaaccatgtattgctctaaagattataatctgaggtcaaaactcaaaagtggagtgcagccaaat

SEQ ID NO: 260641 - DNA, 2693 bp, Cannabis indica
aaacacaaagaaaaaaaaccagaaaatgtagaatcactgaagttcgttttaggaacaaaacaaccaaatcaaaataatgatatgtgtagatctattcatatcaaactaaatacaactaaatctaacaacaattactaaataaattacatactcattatttttggaagggattggtttctaaaagttgtagtttcaaggtggtccaactaactccaccgtcatgtaaggtggccgaacgacggtagctctggcaacgggtggtccaactggtagagtgtgggtgtggtgtgactttcctagagagagacgagagagaaggagggggagagatagaaaaaaagtttatggttgaataaattgatgggttttaattttttgaggtattaaattgaaactttccatgaataaaaaaaaaaagaaatagtataatttgaatccctaaacacaattaaagcatagattgttaaatttctcttttcaatagcctattgtgagtcctctaatactgtttaataatacatggttaataatttcttattaaagatatgtaaaattaaaaattgggtaaatactattttagaacttatattttgcaaaagttaccaattaattggaccttttattttgttaaatgataaaatagaccttgtattttctaaaattgtacaaataggaccctgaactgattttttgtcaaaataaaacttaataataatatgatctagagatgttatgacaaaattagttatattttctgtatttgttcgtgttaaaaattgtattaaagttagttatatgaagaaaaaaaaaatattaaaaattgaactcagtgtcctacttttactatttataaaaaatataagatctattttatcatttaacaaaacaaaaagtctaattaataacttttgtaaatcacagggtccaaaatagtatatatttacccttaaaaatttcaggaaaacttaaaaaaaaatactggaatttgggttaacttttacaaaaatatctgtcacatggaaatttttttaaaatactgtgtttttataaaacaccagtagaacacaaaacagaacaactcaaaacaacagtagaacaactacaaaataccagtataacaatagtgaaaacttaacacagtatattgtagtatgaaacttataaaaaatacacagtaaaaaaataaaaaaataccgcctaataatatttttgtaaaaaaataacaaaaatcagtatactatataaatttcctaaaatttaatactatatattaatattatgatatatatatattaatattatgatactttgtaataatatttaatgctacaaatacatttaacatttttctataatttggtgataactctcaactccatggaggacacttgcacaccaacttcatgggggacgcttccacttacagatggcattatattacttacccggaagttatcacttttaatccatatttgtagtgtcttatccaatagaattattaattagctcaatatatggtatacattattcattaatttgaattttagtattaaagagatatattggtaagacggcgcttatatactatctgaaatgttaaatgcctacctcttaattaaaatatcatatatcaacactatattaaatcaaccatttatttatcagtgttgatcacctaagaatggctgggatggaataaatcatctgtaagattccaatgatatttttttgtcctatttgttagagacaaaatggcataggggaaacaatcttaacttttatacatgagagtttcgtttgactactatttcttagttccttatgaagctcattctctaaacatcggctaaaaataaaacttgttgagaacacaaatcagagtacttttggaagcttttgatacttctaaaaacgaagataactatcctgatcttaatgtcattatcctttagttttggataaatgcggacagaccacatgtgtaagtgcatgcaagtgtcctttacaaataatctaacgtgtaaaaccaaactgcatctcagttcttcacttcccaggtgttagccctagcctcatcacacgtatttataaactcaatcaaggacaaaaaaaaaaaaaagaaaaactatgcatataataacgagcgaaaaatatttaaaagagaccggtagaatattgttattagtaaatatcagatctcggtgaattattataattgattaacgaatttttatattatttattaaaataaaatatataaaacttaatattaaattaagttaatatcacacttatcttgttcatataaatttaacaattcaggggaaaaagaaaaacctttaaatttaacaagctatatatatcgctgcctcgtagtattttgacaaaagccacaactaataaactgaattaacccaaattgaaagaaagaagaaaatgagccaagaacagccacgtaggtctcaaggcgaccaagaacaggtcaaatacgacgacatttccatggaaacttccatgaagatacaatcgaccatacagagccaggcccagtggaacggtttagacgtctccaacttggctagaggggaaggtgtcgagattatggagagcaccactgacgtcactgacaacaaatcagtcggtgggcaggtgcaatccattttaattatatagatgtttagtttgaaattatt

SEQ ID NO: 260642 - DNA, 771 bp, Cannabis indica
ataaaagttgttgtatttagctagctactaataatctaggtgagaaatatgcaaaaatacaaggggatcctaatgtttttcaagtacacatttaaatacaaagcatattgcaatttgatatctttgggtggttatggcaaatatttggttaggtgttttcaaatatttaaagatttaatatgaaattgcattgtactgttatttgtggttcccacatatttgtctacaggggatctagtgagaagtccccgcaaggtcctatttattttcttaaaaaaagggacgcaattatagagttatgttacgtacttgatactctaatctactgcataaaaataaagtttcttctttaagaaaaaaaagatttaatattataaattaaaggagacccctagaatagaggtagagagtaaaatagacatggacaaaattagtttcgaagcccatcccagggagaatattgccaagtctggtattgagtagggaaatagcaagagcttcctcaccaaactcacgtacctgccatgctacatgtttaatgctacttggcattagctaagtaggccaccaaagtcctactccaaaagttaacactttgcaagagataaaagtgtttaaagtgtcaaaacactttacatgaggtcattggtaaaatttaaatttagtattaaatcaacataaaaatatttggtactattttatttttttattattttattaatatactaagaatattttaatacttttaaatactaaatatttattaattat

SEQ ID NO: 260643 - DNA, 1072 bp, Cannabis indica
aggcaccagtggtgtatgtcgcgttgcgattggctagcgatactccctaaaaactattatattaaattatatgggacccgatacttagttgtaccaatagcgatattgacacataggaaggtactaggcaccactggtgccctttagtagtatccaaattttctagagtggttctcctactcctactcctacgtgaaaaattactttattattattattaaatcgcgtgcttcatactgcatcccaatatttattattacatattatattgcgtcatatttgtcttcaattcatttcatgtcagggataacaacaatgaaaacaaagatataagttgttcttaatttattaatattttctaaggctggttcttgacagtatacgcaaagataaacaaaaccaattattagaaaatatgtaaataaaacgtaagttgggaatttagatggtcgccttttgcttgcttgcaaaatcagagattgatcacaatctagaacgtgtaaattcatgtaaagggctcgtgattctaggaattaaactacataaaactaactaaatattccacttaggtactgtggcagttaatatagcatctacttagtgagtaaacgttgacttacactattacaaggacctaaaatagaaaagcaggcgacccctccttaccatactaatgatcacaaatcgccaaatttgaaacttaagtaagtgggaaatgcatatgcagctgtggttttaggctctgtgttctcatactgcctactatagctagttagtcttcattttccacttgcagatgcagtctaaaataaaaaccacattcacatgagttgaaatcatacagagagattaattttcatattgacaaactctcaacctgatgagtttcttcaaaatgactaatgtaaattcaatcccattatgcagttttttcttccttctttttcttagccaaggtggagtactctcccagtcattgcagaagcaagaacagtcagtgcttctgaggctaaaacagcagtggggagaccttccttatatgagtcaatggattccatcatcaacaaactct

SEQ ID NO: 260644 - DNA, 305 bp, Cannabis indica
aatgtaaggtttcttaaattttatatgtgtttaaattcctttttttagaaattcatagttaggatgttaaacaacatacatggtagtaaatctagattctgataaaaccataatccaacagatggtaccgttgaggaagaaagtcgttattagtttagtcttattctactctttaatcttctaatgaaactgattttgtatttaagcttaaatggatggtctagatgacttaaattagctatgtactagttagaaatgatgaataatggatgctaggtattattttggttattttattgtactta

SEQ ID NO: 260645 - DNA, 537 bp, Cannabis indica
tggaacaatctcaactcatatgacataaaatgagatattttttttaattagatagaaaaattaagtataaaaactcaaaattttctaattttacccattcatgggtaataccttatacaaatatatatttctatcaaaaagaaatataatatatatttttaatgaaacgtattgtaaaagatacataggttgatgttacgtgcaatggacgtataattagtttatttttttaatttggttcaattaggtgattttaagtacaatacatgtatgtttaattttttttaattaggtaatgtatttttttaaaaaaatttaaatggggtttgagattttgatctttaagaaaaaaaaaattagctattgttacattagagtgtcatttggatatgattatatatacgtatttttaaaattttcttaattcagtaacgtatctaataattcatatattgtaatgtactatattgttaacaaaaactcacataatcaaatttgagtgtgtttatatatagattggattcgtaaatttgatat

SEQ ID NO: 260646 - DNA, 1490 bp, Cannabis indica
agagaaggttgctagggtttatcgattgagaatggtgaccgtagtgattataaaaaggagttgggttttgagggtttagctttgttaatgggctttttgaggccaatattgggtcggcctgttattctttaagcccaattgtttaaagacctacttgcttctttagcatcaatatttacatgaatataaatatacaaaattgataaaaaaagtttacattttagagaaatattaaaaggtaccactgctacctataccctccttgatgccatattaaaactaaagaaaatagcttttagggaatatcattaataaatcgtaaggtgtcacttataaaatatgttgggcactactggtacccaatagcaatgttctttttacatatctattatttgggcactattgtttttctattatttcaaaacaacatttctacaagaaagtaaagtgaaagtaacatttctctctagaaaaaataagtgaaaatctataaagaaaaaaaaactatgaaaaatgtaaataaaaaagaagacggtaaacatataagaaaaatttatttttaggtgtattgtgtaaattttcttgaggatcgactttcttagtgggctcctctaaattataaatattgggcttgttattctctaagcccaattatttaatgggaatttttaaacaattacccaaagaaaaatagaaaattttcatttccaaacgtttttttttttacattttcaccgattagaattttgggctaatttcacaaatgcacaaaaacaataaaaatacggttttatggaactttaaacatttttacgattttttttattttatttacataaaatacggtcttttatgttaaaattttgttcattcgttttaattttttgttatatgtatattattttttgttattattttgatgttattttgatcttacttttatgttgttttcttgttattttatgttgttttcgtgttattttttggaaaaccgtaaaaatataaaaaaaaaaccattctttgaacatgaaaatataaatattttacaaaaaattagtttctttatgtaattattccaagaattttttatattaaggaatttgagggtttagttttgttaatgggctttttgatgccaatattatattgggcctgtaattcttttggaccaatcatttaaagaccaacttgcgggtcggctttgttaatgggcttttgaggcccagtatccttgtaattgtctatattgggcttgctaggcccaattacataaggcactacatgatcaagataacaactttttttcaatttttataaccctgaagtatttcatcgaagtcgttagaaatatcaaaaaaatcagattaaaatatttctaagattttttttttaaaaaaaactatcaacggtagaaaatcgcaactaaaattaagaaatatatattattcataaattgaggttattattttctctatatctatctatatcta

SEQ ID NO: 260647 - DNA, 841 bp, Cannabis indica
atcgataggtcacctcctccatcgattgcatgcgagtcgcacttgtatcaccattcggacctttcttctttagtttcttggtagctggtttggtttttcccatcgttttggacattgttttcgccatggcttcaacaggagctgcaagacctaaaacgagagacaagaacgatgatctatccaaatttcaccgagatctagatttacttatatgtgtataaatattaattgaacaataaaattgtataattttaaaaagtatatatttatttaaaataaataaataaatttatatagaaaactcagaagaatttttttaaaaaaatttgtacaatttttcatataaaaaataaagcacataaaatatatcttcaaatatacattaaaaaaagaataaataatactcactcaaaatataaatgtaaaataataataataaaaagaatcaaacaattaaagtgttatcatcgtatctataattgcaatcatcactacatctaaagttgatgacatcaatgtatatcacttgtagtcattattaatatcattcctattactaaaagaacttaaacaatagtcggtaagtaatcacttttatacataaaaaaatcatattctgctataaattaattaattacgtattttcaagtgttttagcatatgtgaaggaaaagagactaataagaaattaagaataatcaaatttagggctttgatatatttggtatattaattaatattaactctatattttctctctctaaaaaaattatatatggaactaaatatttttttaggcttttttattagttcatatatacaaagtttttttatttattct

SEQ ID NO: 260648 - DNA, 532 bp, Cannabis indica
agtggggttggacattcccactttaggatgtggtaaagagattttaagcaggtgaggatcctgtaggaatttcgtgtcaattgaaacgcaaaaatgtcgaggtagttatagaaatccttgaaatattccttgagaggaagaacggctccaagccttatgtgctcaaggctccaagtacatattctggaaggctcactggtgctacaaccctcatctcagaccaggcattcaaggggataacagttgaattccccctaggcaacagacctaatgcgacaacctttcttaattttgatgccacatgatctcaggacatccccgacataagggtcgatggatctgtccttggatcctatcagttcagccttgaaagtgacagtagggttctgaggggtctttaatttgtgaacttttgagccattatttcaaaatttaagtcacctggtgaaaatgcaacactgattggtggtaaaaacatgggcctcactaaggggatatcaactaaatttgaaggttcaggccaagctgcttc

SEQ ID NO: 260649 - DNA, 729 bp, Cannabis indica
ggttaggatttaattatatggagtaaaaaatgataaaatgataaccaaaaataagacttgtagtcggccatgtatgtgggccccactagtatagttttgcaattttttttaactatttatctattatttcacaaataccatattttttaatttcaatcatttaaatgctaaaaatatttatttaataattaaaattaattatcaaataaaatttctatttaatttatttattaattatactgaataaagtctcttaattaataaataaaccctaaaacttatttttcttcacaattaagcccttgcttagtgaaaattcataaataagagatagtctaattttataattataattgattaattaaaaccaattaactgagtcttacaaacagtattgtctcaactagtatggggaccatgggcccatataaccgagcttccaataagtagatttagaatttaccaagtaaattccctaacttattaattaccttgcaccactatagatttggaattacactctgaattgtatagagcgctctatatattccacgatatagatgcgctataaaattagctattgttctaattctaaaaattaaagatcctctatagacgatttacattaagtagagagaaatttactgtttcacccctaaatgtattttatccttaaaacacttagcttgctataaatgatatttcaaaaaactaatataatcactgaaa

SEQ ID NO: 260650 - DNA, 990 bp, Cannabis indica
cttgtgtggaaataaagaaatcattcatccaacacaattacaccaccaattaacaaaaatgatcaccaaatacttcactcacctcaccacttaaacacttaacaaatttcccaaactaacaacatcaaaatattcaattagcaaactaacaacattattttatgttatagtgagatttctctcacctagaaactcgagaccagacccccactaaaaggacacgtatactcagtttttccacagaaagctgagatgtccctgagggactcctcgaagttttaaacctcgcttaaggtataaccagcgagaggtggcgagcatgaccgaagtctaatcgcatccaagacaagagagtagatcgcatatatcgaatatatgcgatcatcctccccttgtcctcgtatcaaccaggagaacgattctctgtaagtacagttgatcttaggaaccctacagcctttataaagcgatatagactcgcatgtctaggttctatcagctcaacacacgatgtctagaagaagcgactacctaaagacgcagacataatgataaccctgcgagttgtacatcggaatatgaacagtcaactcgcaggtacggaagacgcatgcgttgatgaacttagtaactgccattcatttattaatgttaacgttgcttagtttaattattgcaattcaatatgtaaataatggattaacaatgaatgtaatccttgtgtaaccgattggacacctgctttgtatataaagaggtgatccaccatgaaatggcacctacgaatcctttgctacagtggactaagcagatcacaatctgactgaaccactataattctctgtcttactgatattttccagttttgttgattgttttcccgattcccagtcgagtactcgccattctaggttgaatactcgcacttgtcatttctcttaaaattctctttcgtattaacaaaataatataatttggtgttgcgaaatt

SEQ ID NO: 260651 - DNA, 1201 bp, Cannabis indica
gagtatatggaaaatggtaccctcaaggatcatctatatggttctgatgttgaaagcttaagttggaaacaaaggcttcagatatgcattggatctgctagaggacttcactaccttcacactggctctacaaaggcaatcattcatagggatgttaagtctgcaaacatacttcttgatgaaaatttcatggctaaggttgcagatttcggactttcgaagataggtcctgatattgacaagacacatgttagtacagcagttaagggaagttttggatatttggatccagagtacttgacaatgcaacaactgactgacaaatcagatgtctactcctttggagtggtaatgctagaagttctttgtgggagacctgttattgatccttcccttccaagggataaagtaaatttaattgaatgggcaatgaaatcttataaaagaggccaacttgaagaagtcattgaccctcgtcttgcaggccaaataaagccagaagcagcattgaagtttggagaattagttgaaaaatgcttagcagaaagaggtgtttttagaccaacaatgggagatgttttatggaatttggaatatgtgtttcaactcgaaggacctgataacattaatactggttacttgtcatcttctcaagtgaatcatgtcaatgagttggaaactaccactattctgtccactgcagaaatcagctcagataatttgggtgaccttgctgatgtttcaatgagtaaggtgtttgctcaaatggtgaatgatgaaatgaggtaaagaagagaaaacaaaaaaaaagctgttaaagggtttaatagatttttcattcaaggcttcttagattgttgctagaatacatgtaaagtaaacgaatataataactatatatatatatggcaaggggtttggtggagctagttgcttgtgtttcatgtgttagtgtgagagctttcatcatagcaaaaaaaaatgagagaatacaaaagaaactcaactattacatttaatttatttttggctagaatttattatgtttatttagtagtaatcttttgtaacttggatttactttgaattacaaatacaattgaaagattatagaataggccatagggtaagcaataagcattaagcatatcttttttaacaagaactaaatatggttcctttagaaatactttgaatttag

SEQ ID NO: 260652 - DNA, 780 bp, Cannabis indica
tggtaaaaacccgagatagggtttcagctaggaaggctagtgatttctcagtggatgtaacgggaatgttatgattcaggaatcgtgtttgtctacctatggataatggtattaaaagggagatcatggatgagtctcatacgactccttactcagttcatccagggtcatcaaagatgtatcaagacctgaaagccatgttttggtggtcaggcatgaggaatgacattgctgagtatgttgctaagtgttttatctgtcagcaagtgaaggctgagcatcagaggcctgcagggttattgcagccattgaaaataatagagtggaaatgggaagatattgctatggacttcgtggtaggtttgcctagaaccatgggacagattgactctgtgtgggtcatagtggacaggtttacaaagtcagtgcactttttacctgtttggacgaatttctccattgaccagaatgctgagttatatgtcagagaaattgctcgtcttcatggtgtcccaaagtccattgtttcggatagagatccgaagtttacatcgagattctgggaaagtctccatcgagctatgggtactcagttaaagttcagcacaacatttcatccttagacggatgggcaatccgagaggactattcagattttagaagacatgttatgggcatgtgtgcttgactttgaaggatcatgggtaaattaccctcccgtgatcgagttctcttataataagagctatcaggcaacaatcgggatgaccccttatgagc

SEQ ID NO: 260653 - DNA, 673 bp, Cannabis indica
atacaacgtaaattgttcgtcacattacttgctcgcattattgtattaaagttaatcaaatgcgcgaccggatcagtggttccgtcatacgatgggacatgggggtttttaaatcccaaaggaaaaggggtattcatgatatcagggtgatacgactcaagctcctcgtctgagtcgtattcagattgtctccctagttctcccacttgatatttcctgaacttgtcctctaactcatctatttgcaattggatgggattctcttgctttggactgagttgttggcgaaggttaggtttctttcgattcaaatgctctcgcagattcggttgggagtagttactgacagaccttattttactcgcatattatgtcctactcacggaccttgtccagctcatggatttcgtccttgagtggcttgtgaatttactggttcccatactttctcgatcattagcccgtcgagtattttctcctcttcaagttgattgagtgtaggtccttgaccgccctgaggtcacacttgcttcttcatgctctgttctttcccccgggtgtggtttgtcgtatttcccccattagggtttgtacgagccttctctctatgggttcgggaagaatgttggtcagttctcgcaggtgacctgcgttctccaggttgagtcccaag

SEQ ID NO: 260654 - DNA, 805 bp, Cannabis indica
tgaatctaatctgatactggttatcagtttgacgttttggaaacagttctaggccaaagatctgactatcaaagaggcgtgggtaaaaggctcaagggcaaaggaaagaaaccaatccctcaaactcaatcgacggtgcctcccccaccaactactgaaatgatgagcactgtggcagaaatattctcagctatgcgtgccacttggggggggggggtaatttgacgcctgaacaacgtgctcatatatttaacccacgatttgagaattttattcaaacgtatagtcagtcgcagtcgcctggtggttcgtcttctcagagttatgccgctcctccgaaacagcaacaacaacctcctcaaccacaacagccgtcttcgcaacaacaattccaaagtttgtcacagcagaaatttgaaaattttttgcagcagcaaccccaatcttttcctcagcagcaaccccaatcttttcctcagcagcaacaacagtttggcccgccattgggaaatcagttcttataccgaacaccatcagagtctcctccgctcggctcaaactttgctgattttggattatttgggagttcatcgcaggagaaccaattctattcaactcccattttcaaccaagcagagctcggtaatttaacactgggtttatcatcagaccaagcatatgtgccttctccgccacgggcttcggggactcgtaacgaaaataatccggatcaagactatataattggagaccttaatgaagatgttaatgaataatttatttatgttttttaataatttagttt

SEQ ID NO: 260655 - DNA, 584 bp, Cannabis indica
tctgggcacaaggtgactggaagcctcacttttcccattgggataagtgttgttccattaaaccctgtgagctgggaaccgcttggtgaaagatcccggtccgtgaggcctattgccatgaaggcttctttgaataataaatttacagaactcccgttgtcaattaagattctagccacaatcttgttggcgatgggagtctctatgaccagagggtcatgatgaggaaaacacactgtcttagcgtcttcttctatgaatgtaatgggctaatctattagctggggcctttgagctgggagctgagtaacctcccaaacctcatcgtgcttcacggcccctacgtaacgcttcagttccttttgggtagttcctccgatatggggtcctccggagatcatggctagtcttccattgggtctcggcggcaggccaggaatttgctggatttttcttgggggagcgactggtgccaaatgctccggctacaccccctagtgctctttggggcaaaggtcctactgcctgaaccggattgaggtgaggcaaccggttcttgatccactcgtaaagatgtcccaatc

SEQ ID NO: 260656 - DNA, 1978 bp, Cannabis indica
ttcacaagaaaatcctacatatcactctgtatatatatacataaaatccaatttttataagtttggaaaattttgtggtgcacctacatagaccctaattatatatagaataattttgtggtgcacctaaaaataaaaattacattaatgttttaattagtgatagttatttttctttaatattataaatatataaaattaatttatatttttagtataagaaattattcaatatttattaaaagattgtatagcattgtaaatgtgtatcttcatttttttaaaaaataatttgttgatataatttatgattaagaatgtatagttgtcttacaagtatttatttaattaactaaaattaatcaaattttatacatatgttttttgcaagaactttcaaattgtaccaaattagttatacattattagaaaactatataaaacataatgaaatacaactaaggaagccattagaaatatttactataatttgaatagtttttcaaaaaaaaaaaaagataaatttgaagaaagaaactccacaaaaatattcaaaagaaaaatatgtatcctactttataattatgttataattttttcttactattttatattagataatgaaaatttaaataatttaattgtaagtttgtattatcttagttcaattaatattaaaaaacacttattttcaaatatatataaatataaaaaaatattttgtatacattataatatgtatataaaaaattgagctctttaaattataatttcttttaatattatgtctacctaaaatgataggatatttataaaattattttttaatattatttctaataatttattataaaataattaattactctatcatgcatacttgtgttctagatattttgtgagaaaaattgctttaaaaaaataattttacaaaaaactattaaaaaatatatattttactaataatttttttaaaaaaccctttttttactaataacttactatagtattagtttggatttaatagtaattaataataataaaaaaaaaaataaggacatttttgtaatttatcataaaaaacccaaaacaacattctcttttttatatagttatagatatctatttaaaatttagttctaattacatatatatatttttaattttgaatttacataaaaatattttatttaaatttattttaaaataataattatacttatagaaaattataacatattcaacttataataattttataataatcactcttaaaataattaaaatatcatgagttcaatactttaataaagacatttttcttttttactcatatttaatttaaaatttcaaaattctatcatattatactaattaattctattttcatatttttggattcaattcaatctccataataacttaaatccaatccattccgtaaaagtacagattaaatcggttattttagattggtcactttctaatattgaattacttaaaaaatttaattcttttttcacataactaacaataaaataaattattattattttatgtctctgttatactcatattttgagcacaatatgatattgacacatgtaaagaaactagctcgtgttataaagcaattcgccttagaaaatacatgtggtagaaatattcaaactcatcattttaaagataagggtgagctatgaataataactgtcgattgataagattggtgagatgaacaatcaatttagaaggttcatctcgagacatacagaatacataacagaatgataatgcttggaaagggcagataatgaattatttatagaggttgcaactcattgactcacatacttacgagtatgctaaaagactaagggtcacattttcagcatgattcatctcgaaattatcatactgtgatggtgtcttgcatttactttgcccaacacttatgaaagggcgcgagaattattac

SEQ ID NO: 260657 - DNA, 642 bp, Cannabis indica
ggtttagtgcaggaaatacgaaaaacttccccataccctcaaaatgaccccaaacttcctacaaactttcagatcgcctaatagcatcataatagagagaattcaagtaataaaatttagaaacaaccttttaagctaaaaatactatttaagaccaatgtttgagttccaaactcaaacgttgtcttacaaccaagccaagctcctaactaacttcaaaccatctcaaacaaccataataaatcctcaaaacacagaatccaataattcttaaatgacagaaccctatttcacataatcacgcaaaggaaagtaacttaaaactaaagaaaccataacaagatgttctaggaagcttaccaaggcttgaaacctcaacaatgatgtaacttaatgtaaagactgcttagtttaatttggaaattagcagttaattatgtttaattatgaatattatttatagatattttaataaatatttaagttgttattattgaattctgaaatgcattttatgtcatatagtgaatttcataattttgcattttcggtgcccggcaacatggaactcggtgtttggctcagtaaaatcacaacttagtatgttagtatattgggacggtttattagacattgggaatg

SEQ ID NO: 260658 - DNA, 1173 bp, Cannabis indica
ttgtaacatttttcttgtctttagaagatgaaaaaactagcttagactaaaaattggaagtttttagagtggaacacacaacccttgttgtctctttcaatattcaactgatgtaatcactatgttaaaaaaccttggagcatttagtgtaagaatataaggtaaattgttgcaccaaagacaggattgtttagaaaggaggttgcacataataaaagataaaatctcaagtactaaaatttaaatcagactcattacaaatagtaaatataatcaaaaacatccaacaaaaaattgtataattgaaactccaaaatgtgtcagtcagtggaatttgaccaccactctagaacttgacctgcaattttgagcaattttgatccaaaatttaaattattgagtttgatgggaacaacacttccctcaaaaagtaaattattgactgaaaattttgccgaaacaagtttctcagaactcaacaaaagatttcatcaccatctatcctccacctcctcaaactgaatagcagtaactcaaaaattaaccgccaccagatccgtacttctttccgaacacaaccagctgcaatttgtcgtaaccagatagcacaccagcaccagcaatggcacgaaggatgttagcaccagcacccttgaacagagacttggcaccctcgttcttcaagatttgggtgaaagcgtcaaaggagctcttgtacttgacggcttcaccagatgtcatcatcattcttctacgaacagtgtcaattgggtaggaagcaagaccagcaccattggtgataagccaaccaagggcaaagctagcaaagaactatcctgttaacatcgaaaacacaaaatacaataatgtcaattggtatggaacaggaactcaatgcccagcaaaatagaaatgcttttggctagtgcaaatggagacaaacagatttagtgtctaaagccattaacagggatcataaatgttagctgaaataattatgaacaaaaagagcaatgttgaaatacctgcaagtctccagtaaggaggactggcttcaaagaatcgtacaatccaaagtaaagaccgcggtacacaatgataccaacacaagagatgttgaatccacggtagagaccagcaataccatcactcttcaaagtcttcttgtagaca

SEQ ID NO: 260659 - DNA, 675 bp, Cannabis indica
tattttcaattaaagttcattgtcaaaaaaaaaaaaaaaacttatataaaattagtaactagttctattaactaattacataatactaaaattatttctagaaacgaccataaaactcaataaactagttttaagtgaccacaaaaaataaactagtttggtgtctacataatataaatctactttcttatcattattttcttgaaatacttactttattcctcatactaatatgattgaaaaattctcacacatgtgaatgaaataggaaaatgcttcataactaattcatgtattattccaattctaaagtttaaactgaaaaaagggattttatctattccactcaagtatatattatatctactagatggaactaaagttatgtaattgtgcatttattaaaatctagccaaatctctctgtgtgtgcatgtgcgtgtcagtcacatttagagatagaaattggacggttaatgtacggggaatgcaattcccgcccccatccccgctacctatttatacccccatccccgtctaataaccaacgaattcgggataggggaatacccatcggttatggagaacccatcaggtatccattaagttaaaatgaaaaaaaaaattaaaaataattaaaaaaaaataaattgaactaatattctcacaaatattt

SEQ ID NO: 260660 - DNA, 830 bp, Cannabis indica
atttttaatttgatggtaataatttgttgtagttatttgattatcatgaggtatcacacatagaaattttattatttattttttattctcctatattttaggcatgatctgattttttttttcctttctaaaaaataagtacgttagtttttttattattattattattataaccaatttcaatgatggtttggtgatggtgcaaaaagaaaaaatgagaaatgtgattggggtttgatggtggtcgaggtagtcgtggttcaggtgagagaaagaggtggctatggtggttaggatggaaaaggaagaagatgggaaatagggttttcagagaaaatatgggtattgtttttgaaataagagaaaatagggaaagaagttgggatattatttgagaaattaggttttttttttattttttttaattccttcacaactcgcaaacaattcccactttcgcttgctgtagcaatatttttgcaaaagtccagcaaaagtattgctgattactcatttaacttgtatcatttttgctaatattttgctagaaaattgctgcagtaggcgaacttctccaaattaacgacaaaagcattttgttcatgcctagttttgctgcagcaaaattcaataaaaaatctagcaaaaattttaaacctccaaatcacattcaaaactccaattatgctccaaaaacacctgaaacaccaatcgaagtatacaatccacctaaaaaaaactaaaaatagcaatgaaaacaaaacaaaaaaataaaaaaaaataaaagaaaaataactctaatataattatgtataattttaactttaata

SEQ ID NO: 260661 - DNA, 513 bp, Cannabis indica
aaaaccatggcctatggagacgtaccacgcgtgtcaaaaaacgtgtttccccacgttttctgagcgtcgctaaagccacgtggctttagtgacgcgtaaaaaacgtggggaaacacgtttgctcacaccctttgggcgtcaccatatacaattttatctaaaaaaaaatacatatcagccctaatattatttcatcatatcatcccaatcccttctcccctaaaaacacagctccaccatacccactgacccaaacaactctcacacgataccaggccactcagaccaaaaaaaaaaattgttcctgctaccggtcgataccctccaagatcgaagactatcttcgaaaggtcaaaggaggtaagtgtgatggttttttattttgtttagtttctttttataaatatttagtttttttttcttcttcatctcaggccagcacagagctcctccctctcaagcggagaccagtgctcctccatcttaggcgcagcgtgctcctccatctcaggt

SEQ ID NO: 260662 - DNA, 2005 bp, Cannabis indica
ttttaaactggatattacagtcgacttgagtggaataaacttgtggggtatatctttactctgtcgcacagcccagccagtcaaccacccgtcaatccgtcaccttctgcttattactctccttctccttaaattaatttttgctacagcttatgctttgtgtgatcctgacttttacacccgtaaattgctcgagaaattgtccgagtggagaagctgttttgattaagaacgaaggtgctatctacgtggtatagagagttttcactcaggtgttttggtttgttattccaaattggtttttaaacaaaaaaaaaatctggtatacattctttctttctgggattttctggaaggagaaaaggcaaatcttacatctatgctatttcgaattttcgatatgcctgggaatgttatattttttaattggagaagatagttatgatttcccatttctttttacatttgactttctgttacttttctactatttagtctacgcattctatctgtagatggattgatatcataaactatttatagaaaaagtcctaatctgacttgctttgctacctcatattatctctaacagaatcatggctttagtttttttgtttctttgttggttttcaccttcatttcctcacaattaaattcagtatggtactattagctcaattgtcaaatcaaattgttaattttggtacttggggatggaattttagttttgttctcgtctatttagcgccctattttgcttaaagcttgattctgtcgataaagtgtttttagttgttgtctttgaaattttataatgtatatcccatgttaataaatttggcactaaagagaacatgttcatttttaaattatctagactcatcacctcagacattgaatactctcataagctcacggtacgaccttacatttagaatttggaataaccttagttgctcgagatatccttttacgataataacgcgataatgccctgcgccagcatgtttgtcaaaacaaattaagagcctatttaactataaattactaatacatgcgactatggaattttttcatcaaactctagagttgccgaattctgaaataattgggtatgccttcatattcaataagggaaaggaaggaacccttcagtaatattttttttagctaatcaacgcagaatcgtaataaataaaatttaaaccaaaatcgtaacaatacatgtaaataatgataccggaattcgcaataaatgtaaagaaagaaactagaatttaaagaggtcccgcctcagatgttggtaatagtccacttcccttgtgttttattaatcagagttacaaaagtcaagaacaggctcttgaatggaaagaataaaagagtgttttttctctaaatgctcaaaattgtggatccttttcccaggtcttggatgaccccttatatagggaaaaatgtcggtgcttctcgcttcaggagacgtgaccaacgcggagctatctcaaccgtctccttgatttttcggaggtagttgaagtctgatttttgtgataatatcctgctatttttgtaggtttataactgtctttgagcttcttttgggatttgaatatttgaactagtcactacgatgagggtctcctaagggtgtgacacggttgttgagaccttcagagataaaagctaacacttgggagtgacaaccccgagacccaacctaaggagggtgtcaattgtcatctcgggatgaccccgcgagaccccttctacgttgtgggtagtcatagtgtcgtgaggatgtccttatctacctttgataatgtcattatgtttatgatggaggtagcatcatctactccttaaacaaatttagcatgtatgtgtgtggtgattgtatatcccacttatgaaggtgctagtctgtcatttttttctttttggagacactcacctcactcaagttaggggtaaaggtgaccatcagactgttgggttttatgcc

SEQ ID NO: 260663 - DNA, 1564 bp, Cannabis indica
aactaaaaaaaaaaaaaagtaataaaatcaacaactatttttaaaaatatttctctggtagaatgaaaacattacagatcaatcacaaatcatatctattgtttttttttaatagaaatttagtgatattggggtagatgaatatatgaatagtatatgtaaaatcttttttttttcactttgggaaaaatgaaaattataaaataataaaaacaaagaaactaaaagagatttttttttaattaataagttcatgcaacttctttaatcaaccaatcaaaatgtagaaaaaaaatgataaacatgaaaattctttttaaatatatatgcatttaaggcataagttttatattaaattacatgaaaaataaactgaaaagaataaaaaccttacaagaaaaattgcataaaaatagagataaacgtaaacacacaagcgataaatagacaaaaatatatatccataattttcttatccattaacgtaacaatatatggtttctctcattagaaaaaagaaaaaacaatatacatatagtttctttaatttggctagtaattaaattaactatatgcattaatatgctgtcttattcatatcagtttaaacaatccctatccctagctaatattagtatactcaattcatatataaacacacaaacatacatgtgtgtacataataaataaactaacaacacctataatacaaaaattagtagagcaaaagaaagaagaacaaaaaggaaaatggggaatatgtatttgtcgaaaggagtgattgttgttttttgcataataagcttaattgcatgcatgagtgttgagatgattgatggaagatacattagctatggagcaattagaatagatgatattcctggatgtagcgtcaagcatccagagaattgcatgaaaaaacgtcatcccgacaacccttatgaaagagattgtttggaagaagatcattgtcgagttcgtgatccatctaaacctaaacctgaacccggacctatataaaacaacaacaaaagaaaagtgataatacaagaatattattacatatattactttcacttgtatatactatatatatatttaaatttaatatatattatgtatttcataaatattgtaaatatataaaaagggtctatttgatccattatataatatgttataatccgtgtataaaaattaagatatacgtacttattatgttttttctctttccaataattatgtgtataaaactcatctaaactgagtacacaattctcaaagtatttgggtgtgtttgcaatcctaatttgagtgagaccttttcaaccctccacttttattggatacggtctaccacacaagggttacaaatgcctagctaaagatgggagagtttatatttctagggatgtaatttacctaaaccaccacatgattctactacatctcagcaatatgctgttatcattacattagcctccccacctgttatttctccacaagcatctcaacatgttgcgtcctcatccctaccctacttccccatattaaatccccataa

SEQ ID NO: 260664 - DNA, 1049 bp, Cannabis indica
tcttcatatgcatgctccgacaaatgagcatatgcgtgctttcaagtgtatcatacggtaccttcagggtactttatcccattgtttgtacttgtacaactccaccattgatagactactctcatatacagatgctaattggggtgggtgtcctaacacatgtcgttctacttccgggtattgtgttttccttggggataatctagtctcttggtcttccaaacgacagtctactctctcccgcagcagtgccgaggcggaatacatgggtgtggctaatgttgtttgtgattcctgctggatcagaaacctacttctcgagttgcattgtccaattcaaaaggctactatagtttactgtgacaatgtaagtgcattatacttatctggcaatcatgttcaacatcaacgcactaaacacattgagatggatattcacttcattcgtgagaaagtggctcgtggagaagtccgtgtgcttcatgtaccgtcccgttaccaaattgttgatatttttacgaaaggtcttccacgcgttctatttaatgatttcaaggacaatctaagcatacgagaacctcccgcttcgactgagggggtgtgttagaatatatttagtatatattttcttatttctataaatatatatatctttatttgaattggtcaatatctgttacatatttttagtaattagttagctaatttatagcataacattactcttgtatattgtatttataactttgattgataataagaaaaggcacggaatcaatttcattcaaaaatacttatacatcatcatcatctttagtgttcaaagagcatctttaacccatgcattaaatttagtgtcacactatcatcaaatttagtatcaaaaactattttttctctaatcataacatcaaaattacactaaaaaatattcctcattattatattaattttttaaaaggtgcttctacaatgcactcttccaaataaaggtcctaataaaataatccaaaaaaaaaaatgtagaaaaatttatttaggctattttg

SEQ ID NO: 260665 - DNA, 223 bp, Cannabis indica
tgtttgatctgaagtcaagcctcaagcaaaacaggttggagtacttctacttctctaagattgagaagtcgtggttgacgggcaccatggatgtaaagaccgcttagcttaatttggaaattatcagttaaccatgtttaattctgaaattattattttatttcattttacttttcaaagcttcaaaaactctctctctctctcttttcctctctttttcggc

SEQ ID NO: 260666 - DNA, 681 bp, Cannabis indica
gatagagttcttgtataataacaattatcaaagtacagtagggatggctccctatgagttgttatatggcagaaagtgtagatctcccattcattgggatgagacaggggagaagaaatacttaggtccagaatcagtacaacagactaatgaagcaattaagaagattaaagccagaatgcttgcctctcagattaggcaaaagagttatgcagatctgaaatgcaggaatgtagagtttcaagtaggggatcatgtgttccaccgggtgtctccgatgaaggggatcaaacgtttcgggaaaagaggcaaattatgccctagatttacaagacctttcgagattctctagaaggtcagacaagtggcatatcgtttagctttgcctccagctctttcatcagttcacaacgtattcgatgtttctatgctacgaaaatatgttgcagaccctactcatgtactaagttatgaaaatcttgagctacaaccagacttatcatacgaagaacagccagttaagatcctagagagaatggataaggtccttcaaaacaagaccatagctttagtcaaagtactctagaaaaatagaaaggtggaggaagccacctgggagttaaagtccgtaatgaaagctcaatatccaaagttgttcaggttagatttcgatgacgaaat

SEQ ID NO: 260667 - DNA, 1520 bp, Cannabis indica
aaagcttagattcctattgtataacatgttcccaaccattcatgttattaagctcctaaaacataagtttaagaatcattttctctgaaaaattttatgatacggatcaactctttcttcttgtgccaaagagaattgcaattacaattgaaacgaccgaaaaggatatgtgaagtaatatatgctcaaaaattgaaaattatggccaataccgggtacgaatgaatcaaagaatataatgaacacaaacacgagttcatgaatactcaagaattagattgatttactaatgattattactaatgattattactgtgatataataaacaatacgttaataaaagatgttaactcacatcagtcttgtcatacataatcaaattatatacaatacctttactaaatgtccatccacaaatataattcaaatcaacattacatgctactgaagtatagtgcttagtaaaccatacttggtaattctatattaaagattccataactttaatacactattgacttgttctattcatatagtatgatcctaactctcttatacttccttacaagatcatagtttctccatatgaatataaaattttctcatatttattagttatatttctataattaacatattcattcattaataatatatttgtatttcatatattgtttaatatattatccattaaataattatttttaagacataaaccctaacaactagttgcatagctcgactccaaaaaacataattatcttgaccagttaagagttgaaaaaccaagatgttacttggattatcccttgatgaagatagtatggatctggaggatcttcaagcgaatttctcaaattagcaacttgaagattttgattattttgaattataggcatctgcaaattttcaacgatggtaggattcaaaactctgatttcagtttgcaaggtttgatcattattccacattgttgattgagagaggaatcaccgaacttgaatcagaaagaacaagataaggtttgaggcacaatgatcagagaagaatagggaagaaactcagaagaagaagagaaacaccaccttttgtcggagaagagaaaatgacaaaaaaaattggaaggaagaattaagattggttaagggaaaacataattttcctgctctcatatcatattgcggaatgaagaatagagagaaaagaaaatgaaattgtatcattgagaaatcgagtgaatgaataagagcactaggggtgttattataccgctcaaacttcccacaccgtaaaaaaatacggtttgaaattcttcgcggtgcggtcacagtttgaatttttcctaaaccgcgcggtacggtgcagtttgcagttttgaattgttaatatgcggttcaaaccgcaccgcaccgcatattataaaagtactattttttatatttatttaggtccaatatgtgaaggcccagcccaaatccactaattattgtattgttgaaacttaaaacttttttttcat

SEQ ID NO: 260668 - DNA, 659 bp, Cannabis indica
ttgagcttgggcagagattgtatggaatttctaggttggattttcatgttaaaatggtgttatgttgctggatttttattaggtttgtgttgggttaagttcatgttcttgaacttgagattttgatgagttgagcatgatttttgagtcatttatgcaatctgaatttttggcttttgctatgggattttgatgcatgaaatgcattatttgagcatctattatttgctaatgatcctataggttatattgtgagtttagctgtgaatttgttgttattgtgggctgagaattttggtgaagcttttaagctcttgaggttgggttcttggagaatcttgctcttgtttggagcttatgttgtttgttgtttgaatcttaatttagatgcatttgagttgtgatttttgagccttaatatgcgtttttaccctctgtttggttggggttcaaaatctaggaaaagttggcatgtttaggccttaaaaatggagtttttgggtgttctgaacccagtcgtcgcgacaggatttttggccgtcgcgactgggtttggcagtgagaaaatatgtttttcctgattttgttttggccataacttttgactcgggactccgtttgggacgttctttataccgttggaaagctcttttcgagct

SEQ ID NO: 260669 - DNA, 524 bp, Cannabis indica
gttgctttttatagtgtaaattttctcctcaaatatggtattttcttgtaccatttaatgtgatgaatagtacaaaaagttgatgaaagtggtgccatatgcatcaggtagtgggtctgctcacgtcagctgaagaggagaggggaatgtgttgccacatgacgctcacccatttattctcgtcggcgtcatgctgatcgagtggaggatatgaccaccaaaatgctgagacaaacggagaatgtgacaataatatgggtttattttagttggattgcattgtctctctttttataaaatgaaatggaacatatgtttaatatttcttgggcttgggccatgtgaaactatcattggagagacttggccttcactttgtgatgaatgtgagtgacgaatgaagtatgccatagagtcatgttttcatacatatataaatatatatatgtaggaatcatttgattttgcttattgggcttgagacctccttcaaataaaaataataaaaactaatataaattaaa

SEQ ID NO: 260670 - DNA, 966 bp, Cannabis indica
tcggcagagagcaataagatgtccaaagatgctggcagaatccgataatgaattcaaagcatcaattatattcttacagtccatttctgtgaaatggattggaaattcttcactgaggaaccacttcagagaaagaataagagcctttgcttcttggatttggggttgtccagtgcgagggtaggggattcctagtgcagtgattgtatccccgttgctgttgcgaaggattcttggaagacctgacttgttgttcgaaagataaattgctgcatctgtggaaagtttggccaaacccggagggggaagggtccagatttcaggagcctttaagccaacagactgagattcatggagggcccgatcattctcttttgcttgggagtaatcaatgagcatcgatcttgccttgtccaggagggggagatggccatctgtaacaccctactagtttaggcgtgttaacgttatttttaacttaattgttcagctcgttgttaatcaacgagtttatcgaaaatcgtgaatatttaaaactttaataaactaattacaaatactaaaataacatacttggattaaactgggatcccatttacagaaatatttaccaaaagttttactgtacatattacaaaagtttaccgcccagcgactatacaaaagtagcccagttgtcccaaagaccgtatgctccaggcctaaccacctcgacatgtacaatctccatctgctcactctcacagctgctcaaccttggtcttgcccttacctacacatgcaaacaatatctgtgattcgccagacttagtaagaaaagcataaacaataacatagcattaacctggattataatcaggcgctcataagcccaatcataaccctaaccccatgtccaacacggtgttgagtcaagaacgatcgtacgacagtactactgaccataatatcagcctatactcggca

SEQ ID NO: 260671 - DNA, 1953 bp, Cannabis indica
gtagaaataattacacatatattttgttgatatttgtaaaatataatgtcgaatttatgtaattaaatttaaaataaattatgtgaatttgtttcttgattatatgtaagttacctaattacaccaaactcattataagttatggctatgctcttatcatcaagaaccacatctcatcaatttgctaaagactaccttttttaccaatctacattcggacagaccaacttaaattgttttttattattaacaaataaacacataccaacaaaactcagcaaacccaatgctcctaactccccaactaatttctattctgaaaattcgccacataaagatatttccataccaaaaacgaataaccatcatagtacaagcagcctatattcagggggaaatggtgatagacaactcaccaaatcaaaaacccattatcagatatcttcaacaaccacagtcccagcaggcacatgaatctccttgtagagacaatgatagggtgcatcgcagcccacgcaagtcccagtccagctccctttcgcaatgtagctagcatcccaaatcgaggcatatagaaacattggtctatgaggaaaccctaggccttctttcctctcctccgtcctgataattttcccatcgatcagccactcgatcgaatcgggaccccaattgatgacgtacaagtggaatttatccgagcaatcgaaacccagatggtggatcttttctcggttaccggtgccggcgttgtaaaagttggtctgcacaatggtacggtcttttcccaaaaactcgaaatcgatctcgtcttgagatttgtccccttcgagtgacgagagatagaggttgaagttgaggccactagtgttgcctccggggcagcggatttgggcgctgaatgtgccgtagcggaaacgagtggtggtgcgccaccgagatccggcgctgatcgtaggtgagtgtgatggagttagaatcggcacagtgagcgcaggcttctgggttgtagtctatggcgatctctttgaggggttgggattggtgaagtgatggagtctctgagtcgagagctgggtccgccattgcggttgtgctaagaaaaaagatgaatcttgatcggatgaatgtggaccgcttgatctgattacttttaaaaacactagtctctgaaattttgggtttctaatcatcttctttaagcaaaaattaataacaaaacaaattagtgacaacatgtcgtgactgataattcgtcactatcataataaacatcaacgacgatattgataatatcgattttttttaatttgttgggctgaggacttccaaaatagtacaaaatagacattaatttttatttttgtcaaaaattaaaattcaataataatttaagttaatatattgtttataaattatttttaagttatagtattataccatttaataataaacaggtctgatttatcataataaaataaataatttaattgataatttttacaaaaatataaagtttaaaataatatttactcattttactcaatttattagttaaaaaaattacattttataaagttcaaataatatattgtacacgtaattatatatagacgtggaaaataattatttagacgttgatttgagcacaataaattatctaaaaagaaaatttatacaaaaaaaaaaattatagaaataatactgtaactataattatattgtcataaaaataaagaaagacctcaatttgatcatgctccaccgtatgaaatatattgtgtgccacgctccttattttgagcattcttatttggcactaagtaatattttatcaattaattttttataataatatagtgttcactacaccaaaataattataataataatattaataatttttataataattatacttaattaaaacaataataatatagtgttaactag

SEQ ID NO: 260672 - DNA, 607 bp, Cannabis indica
acccaaaggtaaaggaggagtgccatatgcagtggtagcagttgattactctactaagtgggtggaagccaaaccacttgcaaccattacatcaaagaaagttcaagactttattgtgaagataatctgccggttcggactgccgtacaaaatagtttcagataatggcaagcagttcgacaaccaatccttcactgacttttgtgcgaaccatggtatcatcaaaagtttccttgctgtgtcgcatcctcaagtgaatgatcaagttaaagcagtcaacaagaccttgaaggatacactaaagaaaaaactcaaagatgccaaaggaaattggcaagaagagcttcctgaagcagtcaactgagaaaacagcaactggatagacaccattcgctatggcgtacggatatggagctatgctaatggtagaactcgagccaccttcccacaaaagattgatgtataatcaagataccaataacgtactcctagcagaatcacttgatgaaatcgaagaaagaagagccattgcaaacatgaagttgatggcccatcaacaaaagttaggtcgatatttcaaggtcccgaccctggttctgtgtcccta

SEQ ID NO: 260673 - DNA, 744 bp, Cannabis indica
ttagttattgtatagttgtatgtggagaattaaaattttattagtgaaaaaacattgaattacattagtactataaaaagctaataaaaaatgaattacattactactataaaaagctaataaaaaaatatatgtttcttccacttgtagttttaattttattttattaaaaaaatataaatattaaatatatatttgtcagcaaaatataattaaaaaaacaaaagaaattatacattgtgggttccaatataatatgtcagcgtaataaataaattttaaaaattttgtttaagtgctaagagcatctccaatggtagtgttaaccaaaatttttggcaactaaataaatgatataatgaggagagccttggaataattaatgcaggggattttaacgtggttcgaacattaatgagctgtagtccacgagtttttgttattaatgagagttcttatacagagaatgtttttggtgaattctctctttttttctcttcgattgatcgatcccctttttttctttggttcatgggtatttatagagttttgtaaggatcacttgtcttttagtgtcagtcccctaggtaagagatatgaaataagacatacatgacttatgtcgtaagtatcataggaattaggtgagagcaatttttatcctcccttcaccgtaaacgaggctgacgtcgtctgtcatatcctttcatgggtgttctaatacgtttcccccatgccgcatta

SEQ ID NO: 260674 - DNA, 1392 bp, Cannabis indica
ttcaaattaaaggccacctaacatcattacactttaagccaaagatggaaaacatgtaaaaagtaaagattcccctaaaccgaagaccttataaaaaaggccatagacaaggtcacatggatcttagctaaaggttgggcacagaaaactatacatgtatatatatagctcattattttcaatttttatattactttttcttattctcttcttctctcttaattaatgtcaaaataattagtcacaattattaattatttatcatcacattattacattattactatttgtgctgtcttggcctctcccatggtcccatatatgtacatatattaggctatagcactacaacctttgtttgtgtacgtattagtggctaattaagagtattaatactcactactctctactaaccaacttttatatatagtagaatattggatatatcatatataacatgggggagttttatgttttcagtgtatagttataattataattttatttttaatatgagaatatacatcataaatatttaggatatatattctacatatttttgaggatttttttttttattttttttataaagttgcctcaaatatgccaaatatagtatttattaaatcattaaaattttattaagaaataaagacttattaagtgtaatataaatactacaaattactcacacataaataatatgggacaaacacctacatacacaagtttttcttggtagctattaaatgtaatataaagttcaaataatatgttccattttgaggattttataataatttatagtactttcaaaatattgttgtaataaataatttatagtaccaaaaccctattatgagattaaggcttagtagctatttttgagaatttcgtaataatttatagtactgaaaataaagttaaataattttattgcatttttgtatacttattttattttatacgcttgtaaaatagattattttaaatctacgttatgtcctataaattttttgtttttatttttttattttttgaatcagatcaaacttttatagctcaaataatcaatcatttacaacatatacatcatctcaacaagatgatattacaaagctctatataatcttgtaataactataatatatatacttttgttatattaaaataattagatttagaacaatatccaaatgttaaaaatacataaaagaaaagtgtatacgttcatttttaagagtgcgcattataataaatagaagcatatcctataatatatatgtattttatatatatatatatcaaatttacacaataatagaaaatttattaaagtactagctagatagatatatgtgggatttgtgaaatatatatatatttatatat

SEQ ID NO: 260675 - DNA, 185 bp, Cannabis indica
tggtaaactttgccaatgacctggaaaggacatagcacttatccaaggtgtaagtataccttatcgcagattatcatgccagtctaaatccactgaactgacaaatgatgaaaattaaatttttgaacatatagtcatgattatattccactgtgctgacgacactattgttggaaattatttta

SEQ ID NO: 260676 - DNA, 1024 bp, Cannabis indica
aagtacacttcatcgctgattatcacatctgtgtaaatccaatacactgatgaaacagggactttgtctttcgaatcatataatcacaatcacattccactgtgttgacatcactgtaattgtaaatgactatgtgttctggacttaacagagtttctatatatattaaaccataaacatgaaaataacatgtaaacataaatgacttctaatcttttattgataacaaatcatattagattgtaatgagttttatttagggcataaaatcccaacacgtttagccaatttggcttcaggtatagtacccatggacttcaataaaaaagagaaatatcttacgagtttaaatgccaagatgaaacatgatttagtgattactacaaatgatacaataacctatgctgaaatggttgagaacggttttaagctgagggtgccgtgaaatttcttcaagagtcccgagagactccaactttttgtggaaccaccactcttcctacttctggatatggtagggacagtagagattccactgctgatcagaagaggaagaatttcctgacatctggtggtttagagcaccacaaaaggttccgagggaactaaggtagaggttgatgccagggttattcttaccctgagtgccctcgttgtaagaaacaccatcctggagagtgtaatcaaaagacatgcttctattgtggcatggttgggcaatttaaggaagattgccctcaaacaaagaaagaaaaatagatcaaaaggcaaagcccgtacctacttgggtgtttactattactcaagctgatgttgcacacagtctttctatggtaattggttagcttcttgtgaacaacacttattttagtgtattttttgactctggggaaacacattcatatgtggcgtcaagagtagtaattaatcaattgggtaggccttatgatttcattgagatagggtttggaatcttactgcttagcagagaattagttatctccaaaaggtggattaggtctat

SEQ ID NO: 260677 - DNA, 1014 bp, Cannabis indica
tttagggataagaacaatgagagaatagttgatcgtggcaaagtccgcaccattattaagacaatccaagatagccttagtaaaatcggttcccaaaactgaccagtttttctggtaaaaataagcattaaggccatcaagacccactgctttatcaccagagatttgaaaaacagctctcctaacctcatccggagtgaagtcttgatcaagaaaactaacatcagactcctctaacccagaattaagataggaaaatatagtagaagcagcatccacatcactgccttgggtagagaagaggttttgaaagtaatcagtgataagatttacaatcccctcatgagtattcacaagagagccatcctcagctttaagaaatttgattgtattcattttcttcctaaaagaggcatgtttatgaaaaaaatttgtatttctgtccccagcattcaaccatttaaccctcgctcgttgcctccaatagatctcctctttatacagcaaagagtcaagagcagacttcagatgactaagcctacgggactcctgaagggtaagggccatcttattttggagttgatcaatttccaagttaagctgggaaattctggtcttaaagagagaattatgttttttaccccaagacttgagatgattgacacaatgatcttgcttattaaagaaagactgaaaccccgaagtagacattggaatagagtgatcagaccaggcatctttaacagtagaataaaaatcagggtcttccaaccaaatattttcaaacctaaaccttttattgacaaaactaggtacagtatacgaattattatctaaaactagtttaagagctctatgatccgagccataaaaaccaagatgatgtaaagaattattaggaaaaaggtcacaccaagactcagagacaacaacccaatctaacctttctttaacacttgagttataccaggtgaatttattaccaataaaaggaagaggaataagagaaaattt

SEQ ID NO: 260678 - DNA, 521 bp, Cannabis indica
ttttgtgagaacctagttgttcagctaagttttagtatttagtgtattgttcttagacttttaataggataagttgaataacttgattgaacaagagagttcaagtcttactttgagaggaagtaagcactcacacattaaagacagagggagttcgctgtttggtggtgtttcaaaatcagattcgtgaagttaattacaaatgattacgacaatgatttagagaagtctaaacttgtttaagtcagttgtatttgaaattatttgagactttactaatggatttcattctctaggcgtgaccccgtggactaaaattgtttgaaaaaatattaatatcacgtataattctttggtgtcaagttattttaaattctgcatttatttattcctagttctggtttgattttgccaatctgtattctatagtgacagaattgcaatctattgctggagactgttacagctgtatttttactataattaagtaatattataggcatttgtaacaacatgatttt

SEQ ID NO: 260679 - DNA, 656 bp, Cannabis indica
aattgacactatgtatactaagctttatgaaacttggcaaaacattttcctcaccaatgagcacagggttgcattttgtaagcctgagcccatgagacatgcgagacacaaaagggatgcaacgaaattctatcggtttcataaggacataaggcatacaatggaagaatgtcgttagttgaaagacgagatagagagccttatctcgcgtggttatttccaacagtatgtaagacgatagggtaatggacaaaaccagccaaatctgtccaataatccaggcaaccaaagattaaaacctcctcctatagaaggagaggacattttggtcatctcgggagggccgcatctcgctggagaaaacaataatgcccaaaaaagatatgtcaaggaaataaaaaacgagcggtcaatttttgctccagaatcatctaagaagatcaagattgaagaacctctaattgtatttttggaggaagacacaaagcacgtgaggtatccacaggtcgaccttctcgtcattacaattcggcttgtcaacaaaagaataaaaagggtgttggtggataatgggagctcgatgaatatcctatacaaggatacactgaagaaaatgggattgcaaaatgcaatgttaaaaccttgcatggtgaatt

SEQ ID NO: 260680 - DNA, 544 bp, Cannabis indica
ttcctcggtccatattgctcctcatgggtacctggacttatctgctttattcataatatatcatcagaaaggatggggaaggccttctcctcatgaaattcactacctcctttccttccggacttgcccatctatgaaccattcagaatgtttctacttcatgaaccgagaacaggatcagccgtatgtttctagtatttgtagcacaaaccgcggagacaagcatcggtcatcctacttttttataaccccatggacactacccactatactttcaaccatatgggtacatattccagaccagtcccgaccgaggagatgatacaacacgcgacaactttgacagccatgccagcagctgaaaatcatgcctcaacgattgtaactgcggagatgctcaagttagtgggattgtaccctcctaagcatagctcaactgccacaagtacgatcgatggacctgatgctcctgttgttcccattgaccgaggaaatccttctcatgggaactttactacatcctatagccgactcttctatccac

SEQ ID NO: 260681 - DNA, 678 bp, Cannabis indica
tggtcattcgactgagtactttttctcttttgtcgaaacctttgagcgtagtccgcctagcaggcaattcacttaaaagtaaatgttctttcagtacttagtgtggtcgtctgacctggtactttattggtagtattttcttaaatgttccccattccaatatcgtggtactagaacaagttgcattttttcatcatacttacctaatttgtatgttgcggattcgagaacttcgacaacttgatatggtccctcctaattaggtccgagtacacctgccgtagtgtcttttgtgtttagaaatacccttcttaggaccatatctcccacaaagaatttctgagtcttcacttgtttgttgaaataccgagctactttttgttgatgggctatcaactttaagtttgctgtggttcgcttctcttcgatttcatcaagtgattcggctaggagtacgtgattggtatcttggttgtacgtcaatctcctgtgggatggtggctcgagttctacaggcagcatggcttcatatcaatatgccatagcaaatggactctgttcggttgccgttttctcagttgtccgatatgaccatagaacttcaggaagttcttccagccaatttcctttggcagcttgaagttttttctttagtgtatccttcaaggtcttgttgac

SEQ ID NO: 260682 - DNA, 619 bp, Cannabis indica
agcaaatgaaggacatgaggactaagcgtgacaatttacgcggggagattaaggagctcaagggctgcaagaaagagcttgaccgtgtgaaagaagagttacgaactcaactcgatgctaaggagcaagattctaatcgtttgaagtctgccttggctgatcttgctactgcctaagatcgtgtggacatgttggaaggtgggttaatcgaaattggactggaggccgagatccagtgtcgtggaaaaatggcaatggaatatcgagacaacaaggccaagtcttgggacatatgccagtacattgctgatttatgaagaatttctgcggatgagggccgaggaagacgctcgaactagccaactggctaactcatttgaagagatgactacgaacgatctctcggtggatgactcacatctctcttgagttaactatatgtaaggtgttttatgtttttaatgttgtaatatgaacttttgtctggttggcttacttgcatgggtctggtaccccattttccccttagtctaaatgtaggtcagccaaattgatgtcgagaacaaagagagagacaaaatttcaattgggagcatcggtggtgtgtcagccaaaggga

SEQ ID NO: 260683 - DNA, 619 bp, Cannabis indica
ttttcttatagctcttacaacagtatctttgaatatataattctagataatatatttagggtatagtcttagctcaactgcttttcgactaatcctttgcccagtgaatatgcatcactatttatagggctagtaagcttggggaggaagagtttcccctctcgttataatgcgtataaacagaaagatcgtgggatcaatgctgaatacaaggatcgtgggattgaggctaaatacactgatagtgggatcgtgtgtatgccatatccacgtaaattgatccctgagttatagggattgtgctgatgactcatgatgcgaaagctgcattcgctaagtgttggtcgctctgcacggattgctgagtaccttgctctgggcgttccagcgaggcatcctgctcggactatgcttcccgagcagatgtatcaagtggattccacgtgtcaccattcatgtgatgccatgttagagtgcaaaaaattgggataacaatattaaaaaaaaatatgtcaaaaaaaaactaaatatatgtatatacgtctataaagcaacacacatataacaaaaaaattaccagaagtaaatcaaaaatatatacaccataaaaattacacat

SEQ ID NO: 260684 - DNA, 574 bp, Cannabis indica
atttttgacaagtgttgctcaagctttgttgtatttgtgatagtttaattgttacaacaccattttttgcggtgcagtttttgcggttttttagtttcacggtgcgggtgcggtttagaaaattagaaaaattgcatgtgcgggttggttcgaaaaaatggtcaaaaatcgtaccacccgcactactgcaacaatctatgcatattagaaaatagaaattatatggtaaaattataagagtttacattcttatggcctaaataaataatatcataaagttatgggttttttattttttacatttacatggaattttttataccatatttttgtaaaaaaagatgaaaataaaatatttttaaaacaataataagtttcgtcagaaaagtcactgaaaaaattagtgttgccgaaaaactcaccggaaaagttaccgttaccgaaataattaccgaaaaattcattgtcgccgaaaaaaattccaaaaaagtcactgaaaaaatcaccataagtagatgtctcagatataaacaaaaataaaatcggttctgtaatataatgattaaaaataaat

SEQ ID NO: 260685 - DNA, 2588 bp, Cannabis indica
ttttatactaaactaaataaaaaaaattgattacaatgttcattacaaaataaaccaaatgtaatcccattactattaccattacattccattactattcctattaccattacaattacattacactaaaccaaacaccaccttaatgtatagaaatggttaaaaattaaatttaaatatttatttataatacttaaatataaatatttaaatattaaattattaaacaaagacactttcgagtttagtgtccactacctgacaaacctcgaaatatagatatttatattaatattattaatataattctctctgaaaaaaattattaaaataatttagatagatataaaactggacaaaattaataaacctaaatctaagactctctcttgctttccctaaatcacaacgttaccgtcagcccatttctccggcgcaacctgctgcaccaacttctaattctgcggccacaggtaactctcttatatgtgttcatgtgcgatttagattaagtagaggcttcgattttaatggggttctgggagaaagagaacttagttaagaagcaaagagagacatatcccttgtaaatattatttatttcccattgatttgagatttgaatgaatactgaagactcttaagactgctatatgagatttttatgcaattcagtcattttttataaattgattaacaatgcatttgagctttattgttcttctgaacacaaaggtctaaattactaatcacactaaggaatgtttgatggtagttttccatctctataataatatttagggttatttaaattcttttcttctcatccagcccataaaaccgtgtcgtaatcactcactcgccccacttggttgactagttgcattgctgttttggatcttacaaatatttcaacatgaattattaaagtaatcaaagcataactttttgtagttcttacatagacataactactatataatagttcattgtctggaaatattaagtgtcttgttaaatttacatttgggtttgtgtggtaacagaagaagcagcaaaccccatcatctaagtatggacgttttccacaatgctaaggcagtgcgcctccgcagccaccacgataagtttctactcgctgatgaagatgaggaatcggtgatccaagatcgaaacggatcgtccaagaacgcccgatggaccgtcgagtttgtttctggatctgactccattatccgacttaagagcaactacggcaagtacctcaccgcttccaaccatcctttcttgcttggtatgaccggtcggaaagtggtccagacccttccaagacggcttgattcgtcgcttgagtgggaacccattaaggaagggagccacgtcaagttcaaaacacggtatggacacttcctccgagccaatggaggtttgccaccctggagaaactcggtgacccacgatattcctcatcgaacctccacacaggactggattttgtggcatgttgagattgttgagattgaggttcagtctccggctgggagaccctcggctcctgcacttcctcattccgattccttggatttcgaatcgggttcgccttcctcgccttcaaataaatctgggaattactcgagacaagaggtaattatagttaatttcatgtactgcgtttctcctcatttttcttttctaacctttgtggcttagattattgggattttgatttgggattaacttaacttctgttttttttttggcagtcaactgattcttatgttggttcgccaccaaaattggatgggagaactatttattaccatatagctgatgaaaatggtgaagtggacgatgaatcagtggagggttactctttcacttttaggggtaatggggttgaagaattgactcgtagatttgaggaagaaactggtattgagggtatcataatgtgtactcggagccctttgaatggaaagctatatccacttcgtttgcagcttcctcctaataatgttactatgcatcttgttgttcttctttcacagtcaaaaggtgagctttcttaggctttttaatgttgttgtgagtttatcattattgcttttgtgatgttgaagctttaaattttttattatttttatttttggtatctgcatctaagctatttgattgtgaatatatttaacatttgtattgaatatactgaaatctttatcaatgcttttcttgataaaggatattctaaaggaagtttttggtctatagtttgtcaagtttgtctaacgtttttcactttttgttgccttttgttgtatgtatcagcggccaaagaattagaaagcaaaggtttattataggatatgcacttgttggagaactagagatgtgaatgaaagctctggtagaatgatatgggccaactatctattaatgtaaattctcatctatgtcctctgtttatatggtatctgaattctgaaagtgtctgaatcagttataaactagaatctgtcgtccccatcatgatctcaatatttataaggttcgactttattacgttggtagtggaggaactgtgttagtgg

SEQ ID NO: 260686 - DNA, 913 bp, Cannabis indica
taggaaacaaattgcgcttcgcgtgcggttgtattttgtttagtaatcattaagtcttaacagtatatcaaatttcaaattttaatatttttgatataatttcttttaataataagaaaaactttttttactttgaaaaatacattaatattgtagaaaaattcattatacaattttttatttaaaaatgaaagtaaataaagagatatcaaatgttataattaaaatacaaaaaaaaaaaaagatcaaacattgaagaatccttgtataaaatagagatctaaagtataattgataaatttatatataactcatcatatgatttaaaaatcgttgttctcaccactacattcaaaattaatgtcatcatcatatctcactcatagttgtcactatcattgtaattaagtttgctctccacataaaataaatcaaacaatgaattaactactatagaagaaaactattatgtcaatcacctcatgtctcaatcattttgagttaattactaatgagtcaaggagaaaatatatgttttttttttatcataattgagtaactaaaatgtaataagaaaacactaatggagtcttgtcgtatgacatgttagtgagtttgtgagtctgcgtttgtgtgttatcgttttgtctggttgataagatccttgtttctggtgcaatggcgtctagtagtcatgctgtcaatgagttgggagtgcagtgggccgacctacaggttgaagacgaagaaggagggggcttactgtttgatcaagaggaggtcttggttgatgatttcgatggaagatggtgcttagtgggcaagttattgtcggatagacctgcagattttgattctttaaaaatgttatggcattgtaacaccctaactaacataggcgtattacgtgatt

SEQ ID NO: 260687 - DNA, 508 bp, Cannabis indica
ttatgaagcaagtagagaatgtgttgaagtgagatcattgacataacatattcaaaaaatatatggattacactcaataaagaagtatcaacacaagcagtactctatgaagataatattacttgcatcgctcaactaaaaggagggtacattgaaggagatagaattaaaatacatcaccaaattcttctttatacatttgaagagaatgcatattggtgttcaataaattcaatcaagtgtcactcttgcagacttattcacaaccaacatcaacatttgagaagatagttcacaagattagaattcttcgattaaaagatcttcacgaattcttaaatgagggggagttagtttacactccactctttttctgttgaccaagtttttcaggaagattttaatgagacggtttttatggacatctaagggggattattatgaaatattatttatagatgtccaaatcaccagattaattatcaccattaatgtttggttgtatttt

SEQ ID NO: 260688 - DNA, 3405 bp, Cannabis indica
attgcagagttgcatactccctactggatcagaaatatggttatctgaattattggaaggtgtgttccgaacagaagatttagaaagtttaagctgatgaaaattctgaaaaagtgccccgggtatccgcaaagattgtgctaaatgccaagcctccatttgaaacagagcgtgtttgcctgaaattcttatcagtacctcaacacacataagaataactgctcctggatctggattagtatcacctatcaatctctcagagaatattaaaggactttgcaaatgtagaattatgttgaacacactagcaagtaagctctgaatatgtcttttaacaagatttaggcgcttgcgtcctgaacagaaaaaccatttgtcaggaagaatgaaaagaaaaccatcaaattacaataattacaacacaaatccaaaatcttaaataaaaaactgaaaatgatgcagcaaaaacatgctacactacaggtacagccccttttttcctttcacatcctctatttctttcggttatttaattttatgtttaacgtttcaatgtttgtattggcagggggcaggagattttgagcttttcaatattacaggaaagttgaaacaaataatactgatggcaatggtaaaacataactggttcagacaactcattcttataacccagagagaaagacagcaaagttaaaataaatatcaaactcaaccaatatgttgaaatgttgatacctgaaacaaactcgagaactaaatccaagcaatcgacgccagcagcaacaattgaggaaacttttcccccatttgcacttccagtctgtatgtcataaatcattgtggatctttcctgcacaccaactaaggctctctcgatagcttgtattgcagatagcaggtgcaactctgatggcttctgtatgaacactgtaaatgacgatcgcaaccttgatttaaattcatcgaaaccacatggcttgcgaggaagagaagcttcggaaagtcttgaataatcataaagtaatttggtgttcgactctgtttcgtgagatgcaagggtagctcttttcccttggtaagttatgcactttcctatggcccttaactgcagctctaccatcttgacataaagacttcttgacaaggtgggatcagtcataggaaaatgatttcctatttcctctatgtacttcacagtaccatctagccaaacgaaagataagggtcgtggcacatgaattgtgtctactaattctgatagcaagaactgtgaaatgccagtaagaattttcatcaagcttgcagacaagggagcacaatcgatgtgcaaattgagcctcaaaatagctgaagaggcaatcaacaactgcctgagtagatatgctgcttcagtacaatcacctgttaccatgctcctaaggaaagacttgtttagaggtagacgatcaagtgaatcgacctcagtcagaaaactagcagtaaagtttaaagcttttgaccgcaacttcttcttcttgcgtacactgccaattccagaattagcatcaatgtcttgtgattccaagcatgtcattacatcaccagaactttcgcattgcttatcgcaagaaatatcattcttcccaacattagttttagctaaaagctccttttcacccaatagatcggaattgttgttcgctttttcaaaatactgagcatcatttatagccaatatgcctaccagtagactagagaactccacaaaaacagttatacaaaggttaatttcagattcaccattgtctctccctgataatatctctttaagataggcacttctcacgtcagtttgattcataatcgatgccaagccccataaaaacccactaaagcaagtcatgatggtagagtacctactaatatccacaacttcggcattaaaagcccctttttgatcggaaatgagagacttcaaggaggtaagtccatcctgcatctgctctctgaagcttttagcgacacagaacacacttttccaggcttgagtataatcagaggttaagggttgatcgggttctactaaatcactctgctcacagtcaactccggcattttgttgctcttcacaagaattctgagcatttttaattgctttgttgaaatgatatttgttcaatgtcaaaaaaacatataatgtgtgatccaataatgaaaatatcatatcatcaacttgaagagaatcattctttttggaaagtgactcctgaataccaacaacaacatataatgacttgaacagccataaaacaggaagcgacttcccagagtacatgagacaaagtgacgtttggtttgattctgtcttcccctcacaagaagccataacaatacttttcaagaccttccggcaacacaagaacaatcggaaaagctcataaccattttgtgagtttgaagagccctcacgatctaataaggtgccaataacaagcctgtaatatccagtacagatcaaattggtaaaaatagagattactctgccaaattatgctaaaataaataaataaataaaaggaagaaaaaaaaacatgttgattgaaaactttcctaaactaaatagaacttgcattgtaagatttttctaaaaaagaacacagtacacttgtaaatagaaaaactactttgaacaaaaagccgaaggacgatggcaacatatcatacaaatgacatcatctagataggaatggaaaacatacctttcaagattgagaatagatgtcatcaaaattgaaaatgattttgcattgaaatattcttttggaatccagcctatgagattgagcaaactttgagaaactgcaaattccgtactgagcaatggaaaggtactcaggtcattcccgtttcctgaacaaagcttggcagaagaacgagtgtatggttttttggctgagtcctgacggtatgggacatgcttgtttcccagaacaattgccgatgacttctctaggtcgcttaagacatcagaccaattaggagatgacataaaatcaacattcccggatgaaatacaattagatggtaatgcaaatttctccagtgcatggcaaaacctcgatgccaaatgtctgcgaacaaactaagacaagacagaatgaacattcaggaattggaatgaaaatattttcaaataatggttcagtacagattcggataaaaagaactcaagaaatatataacagaatacaacgaacatacaaacaataaaagcaaacatataaacaaagtaaaatgtaagtatgtgttgtgtgcatttaagaagggattataggaaactaactcgttgttcatataggatggagttattgaagagttctagtgagatttgccacacggtcaccctattcagctggttgtttt

SEQ ID NO: 260689 - DNA, 1536 bp, Cannabis indica
ttctataaaaggtcatacacctaggaatgtttctaaacttttaaatagcaaaagattcctgaaagtggtcatctaccggaatccttatatccaaattctaaaataccgtattctgaactacaagtggcttgatccttcacaaagaaggtatgtaggcagctcggttaattaaatggactgagttcagctgcaattccaaatttaccccaaatttcccaaatttattttaattatttaatatcatcgtaattggaatcaaagggtatttcctttaaataaaaggattgtaattaagagattattcttataatcttggatgggtcgaacttaaattaataaactcttatgctataaattcggcataggtgaaattgtgttttgcatttattttaatattttaaatgtgaaatttttgcttaacataatttttggcacgcccggtgggacccattctccttttcatctccaaatatgatgactattatttaactttaactttatggtgctaatcatgtttaccgttttcagggaaaaaatggcaccacaagtcacggtttacttccacaagttaccaacaacctcttctgcccaaggagggaaaaagaaccgctttttggcagcattctctattgatcgagcacccatttcatgcagggtgcccgaaccaataaagaatgtgaagacacctacaccagctaaaaaggctggaagagggaaaggtgtgaagaatatccctaagactgcacaggccttgagaggcaaggcagcaaagggctttaaaaagaggcaagcccgggcaatgaaaaggtctgcggcaaaggttgccaagacagaagggaggccaacgaagattggctcccccgtaatgatccaggaatggggccatgagcgtatcttgattggttccgttcctattttcttgcccactgtcgcctcagtgatggttacctctgcggaggaaactgaggcaacaccgacttctcaacctcggagaggtaggaaggcaacaaaagggaggagggggacaaacacttcaccttcaccaaaccctcttgaaacgagggaattagtaggaggcaccccgattaggcctccgatcgtaatctctgtcaaccgccaaggtcaacagggggcatctgctgagatcaatgaacaccctttattagatgaggggtgtaggacgcctttctccttcccaaagaacggctagaagagacagtgtaaggattcccaaagcaagccctaactcattccgaaaagaacatggtgactggatgtttctccaagggtaccgaccaacaagggtcacctcaactgttaagcctacctcctacacaggccctgtaactcgatcgagagctcgtgccatgcgtacaactcctacttaggaatcagtgaatccctcttttcaaaaagttcaggaagaggggtgttgtacatctgaacactctttagaagacactccctttattgaacacagtgagggggtgtccgcttatctcattaatcagttcgaagcactaaccattggcaatg

SEQ ID NO: 260690 - DNA, 601 bp, Cannabis indica
acataaggaccctcaatttgggttaaatactcctgcacatgtgtccctcgtatttgcaaatacttgccttagcaccaagtcacaaccattgaaaagcctcttcttcactttcttgttgaagtatcttatcacttggtgttggtatgctacattggtgatttgcaactcagtacatttttccttaagtagatccacagacaatttcaatagttcttggtttcttattgattatagaaatctcgtctatgggtcgcaatattgacttctactggcagtattgcctccgagccaaatgcaagcaagaatgaagtatgccattgttgggttttgtgccctaaataaaacccattacaatctgattagttttaagagatttgaagtgatttatgttaacatgtatttttcatgcttatggtttgatatatatatttaatatatgcacaaaatcagttaattctagaacatatatttattcacaattacagtattgtcaacacaatagaatgtgattgtgattatatgattcaaaagacttagtccctgtttcatcagtgttttggatttacactgatgtgataatcagcgatgaagtatacttaca

SEQ ID NO: 260691 - DNA, 620 bp, Cannabis indica
tatccccgatgatctcggccctatgtcacaacaacattaaaacaataagtgtttatcccaaaatactgcttaatattcacataagacaatctagggttttctaccaaaccccgtggtataaatatactaaaataaaacttatattttggttctaaaatatacaacatattgtagagctcgttgcaagcttcgaaacggtatatagaatgtccaaaacggacaatcgagtcaaaagttatgacaaaaatacgatttccgatctcctaagaatttctaaaaactacgaaactcgaaaatcccaatttttgcactcaccgaaaacactaccaaaacttatccaaatcactccaaacttcacagggcgcatatataccataaatattaccattcttgcataacaaaaattaaaatcaagcccttaaatgaaaaacgccattaacgttcggactaagcttttaaaagttcaaaaatcgatttctagctcaaattcaacaagtaaacatcgatactagtcccataggtaccaaaaaataattctatgaattcagaatctcaataactattctaatttacgaaacccctatataaaactaatcgtttttagcttaaaacgtaattaa

SEQ ID NO: 260692 - DNA, 1199 bp, Cannabis indica
tcaatacacaacagtatctctatgacacacagattttagattagacataggatgtaatataatgaataaattagcaaattattagaacttatttcttaatcctgtattttgattccaatttatatgttactattgtaatataaattgataccataaagttcttggacatagtatcgcagtaccttatttgagtgggaattttaaaatctaagcccatcttatttggttgacacttgtgatagtgtactatattatgatcatgatatgaactttagaattaaactgagaaagtaaatctagccattcatctggatagaaataacttattagaattttgaggataagataagagaattttgcaaagtcattcgaatgacttgggcaaaatacctgttatcccaatttttgcactctgacgtggcgtcacgacaatagtgacacgtggagtccacttggaacatctgctcgagaagacaggccgagcaggatgcctcgctggcgttcccagagcaagatatccagcgatccgcgcagagcaaccaacaattagcgaattcagctttcgcatcatgagtcataagctcaatcgctataactcagggatcaatttacgtggatatggcatacacacgatcctactatcagtgtattcaacttcaatcccatgatccttacattcagcattgatgccacgatctttctgtttatacgcattgtaataagagaggaaactcttcctcctcaagcttcctagccctataaatagtgatgtatattcagtgggcaaagggtcggtcgaaaagcagctaagctaagactatactattatctaagaattatatattcagagatactgttgtaagagctataagagaaggaatctttctccttgatcttaagtcaatacaaataacgaggattaggctaataccgaactgctcggggttgaacctctataaaattcttgtgtcttattattgatttatcatatatctgttactacatatcgtttttgcttataaaatagactcattgtcattggctaaaagtgaagtcaatattttggtgctttcattgagagaaggatcacaaattgctctttattcgacatccaaccgccaatacgatggtgcaaacttgtagaggtctatctgatccgacaagttcacagatgctggaccctacatcacagaaccaag

SEQ ID NO: 260693 - DNA, 645 bp, Cannabis indica
gacaaggcacgcctaagcgctcgcgcatttcagacaattcttgtctgaagcgcccatgtcttgagatgcacgcccgcgatgaccctgcatcccgcgcccaggaaccctgcaacccgccgagatttctcggcagatgaggctatgattcctcctgtccgcgcgcgtaatgggcattttgcagcctgtcaaggctgcacgtgcagccttgctaataacaagccccaaaagagcgaaaattgtgggatttttccccaatttcggatctttgcattttcaaaccctaaaattaaaataaaatattattttaatatatttaaacttaaatatcaatatatcaattttaaattaataatattttttttttaatagattattattaattttatgatattttgaggtttagatttcaaaattgattattttattttttaaattatggtagatttaaaaaaaatttgttaattctttaatatttatatattatttaattataagattagatattttaatattgggaatattttaaattaaaatataactttatcttttttaatttgaaatatgatattaaaattatcttatatgataaattaaataattaataaatttgaaattaacctagatattttgatagatattctaacc

SEQ ID NO: 260694 - DNA, 805 bp, Cannabis indica
atatccaaacaaaaaaattaaatactattttaaactggatattacaggggatcacactctttgcctcgacggagacccgtttagtattttattttatatttttagtaatattttacattttataatttatgtttgtatttttttagtatattggtattcttttaatgaattttaagttgtgttttgtataataattagtttattgaataataattaatatgtattattttaatttttatgtagttgaatatttttatatatttaaatctttattacaaactttaattttttattaggggattctctgccccggggatttttcgcctcgtccacgttcccattaggagatttcctgtcgcatccccaatggagaataagcgggcatggggattaaaatccttaacagggatagagacagggagagcactctctgccaatttcccaacctgtgtgcatctctacctatgacactttaagggcatgtttggcacaacttttagatcaagctttgataaaaatatatcaaaaaataactttttaaagaatttataaataagttacagctaaaagctaaagctggtataacctaactttttgaacaagttgttttgattaaaagactaataaatttatttgtacaaaaactatatttatttatttatttattatatattatatattaaaaaattaattacaataaataaataataattaaatctctaatttttattttaaaaatattttatattttattttaatattaacaaaccacatcaacttagagttttcttatatacttgagttt

SEQ ID NO: 260695 - DNA, 773 bp, Cannabis indica
tggggaaaaacctgactagaagggattagatattcaagccactttttaccatattatatttttttcaagaaattttctagcagcagtagcattaattttagcaagtttaattactgtcattttaattttgcatcattgctcaatcattttcatgttatttcctcttactttaagttgtaattagtttgttttacgtaatactttgtttgcaatccctgtggagacgatcttacttatcattttactacttgtttgactgcgtatacttgcgtacataattttcacaacaagttttttgcgccgttgcgggggattgaaactaaaaattgtgtattatcaactatttttcaatttactttctggtttgaggttctaatcccattttagtgcgatatatttatttttcaggtgtaatctagtgcatgaacgagcaagaagaagaccttgaacttgctcctattgaccccgaaattcaacacactttcaaacaaaggagaaaggaacaaaaggctaaaagtgctgcaatatggccgatgggtttgaagttgggggtgctcataatggtgccgatcctactgctttggccgatgatagagctcgagcaataagagaatatgcatcccctatgttcaatgagcttaatctcggtattgtgagacccgaaatccaagcacctcactttgagctcaagcccgtcatgtttcaaatgctccaaacggttggtcaatttagtagtttgccaacgaaagatcctcacctccatattcgctcat

SEQ ID NO: 260696 - DNA, 970 bp, Cannabis indica
aaagtgcttttgattaaaaaataccaaaaaagaaaaaatatatccctcaacttattcttttttttttctcaaaggtccaattatgtatttactataataaaattattagtgcccaatatttaatacttatatacctcagtactcaaagataacacttaagcctgtgaacaatttatatattaaaatatttttcacaatccattacaatcaattgagcatcatataaaaataccacaaaactaatattaaaaagaataagatgttgaacatcgacttttaaggagaaaatattatcatgaatatcattatatgcacattaacatgttaggtcttctcttaaggatatagagttgacattcaataattatatgaaacaatttttctctgataaaaatttttaaagaacaggcaaaagcgtgtttatttaatattattaatacagttcaatcaaagaagaaaaaaatacaaactattaaatattataaatcatatagtaaaactgagtttgaattttgtaatgacaaacctttgaaaatcttatatttgagccaaagcatccaaatatatatagctcctgtatgcacacacatctcaaatttgcaatgggaaatttgattttctatacttattaaacttaattttattttttttaaaccaatacattttacactataaaaaatatgccaattttttgaaaaccccaaaaatactcccctcataactcaaaccctttatctctcctccctcactctcaaccgactctctcaactcaccaacccaccacccacggcacccaccaccctcacccacggcagccaccaccctcacccacgagcaacccacggcagccaccaccctcacccacgaaaaccccaaccccgacgaccctcacccacgccccagcccccttctctctcttcctctctgaaaacgattgaaaaaaagggcatggtccgatggtcggaccatg

SEQ ID NO: 260697 - DNA, 1012 bp, Cannabis indica
ttagaatgttgagaagtaggtttgatcagggaaattagaaatgatcaaaatagccctaggttgtgtttagtttaagtttagtgggaggggtaaaatagtcattttaccaagtattacactagttttgtcttatatgaattttagttttattaatggctgaatgagaattatatttaagtttattaatttttaatttaaggttagaaaattaagataaaaccaaggaaagaaaaaaaaataaataactaaggatacacatatattgctttctcttcctctctctcgacagccctagaaaacccacttggaccagagttttcaactccattttaggcaagatttgattgtggtaatgaggtgtaggagtaacccaagcttggaggtaagtctcttattccattcctttgattttctaggtttagggttaagttttattgggtttttcttaaggtttcgggtctgtacagttgttgaggttcatagtatgattttgaagttagtttgggtttgtttaattgtgaatcggatcatttccatggctgttaatgttggaaatgaaggaattgattttaagaacctaattttgattcaaacatggtgaattgggtattgtgttgaaattttgagaattcattgattatatacactgttttttatgttatcgaactgttttggagtgtttggataaatttggaggagatttggttgggttttggtgcaaaaacccgagtttcccgattctgcagtgataactctatggtatagagttaatttttatgcttttaaactaaagtattgtgagaagagtagtgaaaatgtgtttatttgcttaattttaattagttttagtgttattttctatttattaatctaacttttaagtcttgtagatattgatattgttgggtgtgtttttcaattaactgtgtttattttgttgaaaaaggaagaattaaattgataggaaaaagaaaaggaagcaaggaaagaaaggaacacaagctgaaattgg

SEQ ID NO: 260698 - DNA, 650 bp, Cannabis indica
ccctcaataaatgttatttcaggcatgccgtaatatgttgtaggcatgagtattttgtatgcaagttagggttattaccctaagattctatatcctttgatatctattgaatgcatgcatatatgtcaagagttatgtgcataagacataacttggttagacatagtatattactatgataaactactgaaagaacgtaatgtatggattacgtaaatatatatgaatagggttatgcaagcaaagtataaccaggttagactcggtaattataaccgagataaaccttactaaggccttattgtaaatagacgtgtgagcgtaacacgtaggtctatgccatatagacatatatagacgtgtgggagcaacacgtaggtctatgccatatagacatatatagacgtgtgggagcaacacgtaggtctatgccccatagacatatataggtgtgtgagcgtaacacgcatgtctgtagtaaatagacaaatagtgtagtggcaccattaattatgtgatatatatattgagattaagggttatgcgttcaaggcataatcaggttggactcggtaactagaactgagatgaactattctaagggcttattgtatttagacgtatgagcgcaacacgtaggtctacgccac

SEQ ID NO: 260699 - DNA, 2018 bp, Cannabis indica
taaaaaaataagcaaacacaataaaataaaataaaattaaggaggtgtgattttgtttttcttcaatttattaatatttaaataatggaattattacttggaagagagtcaaattaaaaataactttcattcgatattgacacaagttgtacgtgaaaatgcttttaatgtaacaatttgcaatatgacttttctagttttgttttgtagaaaattcacaaatatatggccccatttgatgaggattcatatcatgattagctaggaaaaaaaaaaaaaaaaaaagaccttttcaaagcctataattatttattttggatgaacacaaaatccttaaactaagaaatgaaaaagaaattagttagttcttgtactgccataattgatcatccgtgttccacaccccagcaaagaaatcattatccggccaattgatgcccgccacgtggcaactctcaacagggtgcccaagacccccttctaaaactgttgattggttcgaattcatgtgattgtcatagccattgctttcaccgctaccaccaccataagagcatgcctccaaaaatgagttatagccattattggtatgcaaattagctggctgaaaaggactactagttgggtattcattgaaatgatcagaaatctgggaaaaattcattgattctgagtccgaactctgttcattcatagccaaaccagcagtcatgttgttaagttcattagtactatgaccagatagtagatgtgttgacgatgaggcatagtattgtaggtgagaaccagtactagcagtagtactagtgtcactaggaatgggaactcctacggctggtgatgaggtttggagaattggtatggctgaagtacatggggaattttcaatcttttcaagcagtcttggcatccaaaagttccggatgatttcttgaaaggccgtgctttctgcgtcgattttgagatgcttagcttgtttctgcacccttgttctccagtagttcttgatttcattgtcagttcttcctggtagatattgtgctattttcgaccacctaataatatatttaatgttgaacttttaatgaaccaatcaaggaatacgtgcttgcgagctagtatcatatttatttgatttttttctttttttcttaatgggaaagctataagtaaaacaattactaacagaaaaatggaaataatagttaaaaataataaaataaattaatgtttatgtagtggacgcttgtggaaattcaatgtaaaatctgtaaggagaccaaagccctgagttcaagggtctgcgctcaattatacatgttaatgttacagatgacaacaaaattgggaataattgaattcatctggagatagtgttgtgagacggaaatattgatggtgacgtcaagataaagataagtatcacgtactactgtttgttttctatatttgcatgcttatcaatttaagcacaattttttcaagatattgattatatataattttaagtcgaatttggattagatagagagctacagtttttaaaatatataactacctgttgccccatttggaatgaagatcaaggatcaggatttgttcctcaggagtaaggttcccacgcttgacgtctggtttcagatagtttagccatctcaatctgcaactcttaccagttctccttaatcctgaattaaaaagattcgatatatatttatatatattacagtaaaatcccacagagattataagatagggtataattaatcaattgtacaaagagaactcctttaattttattaatcaaaggtgtagtattgtttattaagaattatattacctgaacgtttagctagcaaattccatcggccttcaccatggcgagtgatgtagtggatgagaagagtgtcttcttcaacagtccacggacctcttctgagctcattaccgtcatcttcactacaacttgtattatttgatgagcttttacaactgttagtagacatagagaagaaact

SEQ ID NO: 260700 - DNA, 1197 bp, Cannabis indica
gcagatcacaatctgactgaaccactataattctctgtcttactaatattttccagtttttgttgattgttctcccattcccagtcgagtactcgccgttctaggttgaatactcgcacttgtcgtttctcttaaaattctctttcgtattagtaaaatcatataatttggtgttgcgaaattcactcgacaacatttgtcgccgtttgtgggaaacgactaaagattacattcatttcaaagaacaatatcatcatggctggaaatcacgctaacggagctaacaacgggaatgatccagctcaccactgatcaatatgctgcgattcaggatcaactgcgggcactacaggccgaagtggatggacaaaaccgagcccggcgtcctcctcgagttcctgctattcgcactgataaccctcaggtaacaacttctagacgtcatactaaccgtgtacgcagggaacgaagaactaaccctgaaggtctggacctgaaccatccaatgtcgagggatcaatccgcaaggtatccaaaccagagcgcacaaatcgatgaagatcctgagcgccgtaatcctcgcagccgaccatcaagagacaacgacgcagaatcagcctcttcgtcgtcgcatggtcgcactccaagcaggtacacaaggtccggctctgtacagacacaacagggaggacgttatcaggtacaccgaggtgatctgcgtgatcatctcaacgcagttttcagggcacgctctcgcggcccacataatactgagacactccgtgatccccatgcgggcgatcagggtgccaacacttataataacccgcctaccgcgccgatcgcgaccactgggattaatgtcccagcaaatcttgccgcagtagttgcgagccccgcagttgcagcgaccccggctcctgcgacaggagggattgaccaaagcatgcttctgcaggctttgaaaatgctcgagcagcaacgaaagcctatatataagttgcatggcacctcgccttttactacagaagtgcgacaggctcaacttccaaaagggtttcgtctatccgagtccctcaaatataaaggtacttctaacccgatagactatcttgaaaaatttaatactataatggaagtggaccaggtaccgcagctcgcaaagtgccgcattcttgcggcaacactcgaggaaaa

SEQ ID NO: 260701 - DNA, 514 bp, Cannabis indica
gtgcctgccaaaaaaattattaaatattagtgtcttataataatttgactagaatttgatatataaggttaattagattaaagaagagtatacatcattctaaacagcattccctaattaccgatgaagtcacacaatgcaacctgctgcaaaacctctccagataacgtgatctgggtacgcggtgcttcaatcctcggggtacaagaattgtaattatatcacgtttatctttgaggttcagaaattcaacaaccatccattttagcgatttagagatcttgtccatgaccttttgcgagaataattcatcttcttgatcatgaccaccttgtggagaaagcatgggagctttccccttcgacgcatcacatcttgaaggtggttgagcgagtggactctaaataaaacacaacataatatatcaaatttgatccaaattctaccaaagtttcagtagcataacggctgtaattgaatgcccccaaaaattttaaacatgcctgtataatga

SEQ ID NO: 260702 - DNA, 348 bp, Cannabis indica
aaaaacgtttcttataatttgtgtgtttaaactagaggagacgaccatgggaaatgggaatgatataaataaataaaaatgttaattttcaaaaccgagtatgaattgttcaatgtgtaaataaaaccattttatacaaatagtcaagagtcaaactatagaataaactttcctatttttatgttttaataaatatatacataagtagagtactacattatatatatagcttaatagtactgtgtttggctttgtctactatataaacccaaccaacctccacattattaataagttcatctatactataccataacataatattgtatctagagagagagagagaga

SEQ ID NO: 260703 - DNA, 1554 bp, Cannabis indica
cctttgaacccagaaattctcgaccctttatcagtctgtttatggggtatttatagtgcttttctggggtgatccctaggaatggatcacttgtctttcaatgttagctttataggggcacatagtcccaacagatacaaaataagaaatacatgacctatatcgtaggtatcttaggagttaggtggatataatcttttattccctcttgattgatgtgattcctcacaaaatagccgttactagccttattgattatagtgtaatagccgaaaaagggggattacgccatctgtcatgtcatttatggagatttcaatacgtcttcccccatgcgacattaaatgcgaggtgactgttcaatagatctctgtacctcccggagcagccttagcattttttttggcctcccggagaatgatgatactctttatgcctcctccgggagataccctccctgaggcactcttttttcgtctaagagttagttaattttcataagtgctggtccttacagctcacacgtgtcatcttcatccaggtccacgtattttgggcaaaatccagggcaacaatgagcattaataaagcttttttaagaggttcgagaattttaccagttgtaaattagttcatgattgcagtagacaaatctagttcaatttcctttcacatttctttgcaaaatcgagacccaaacccatatggtcccggactttttcatagaaggaatgctaaacaacacattcttgacctctttcatagtgtacgatttaatcatcaatgcttaatgctctagagtgaagtcttcccctcattcatatactggctttggaactacattgtgattgtacttttactccccatgaagctacgaaaatgtgtcaaaaaatgatcaaccaccgatttgtagtcatcaataactttaacctgctcaaaagtgaaagtcgcaatacgattctcctctcttctcttctttaaacaagcatggaagtgcaaactggtacctacatagatggatttagtttgtagcttcaccaattctgttgtgattgttcaagaaatgatgtccctgcttcctcatattccatcgcccaagagtttccctctgccaagcgagtgcgagttcctttcagtaacgaaccaatttcctctagattcagcgaaatatcattgtcgtgagcatcgacaaacaccaattgatcatcaactaaactttcagattctaggtcactgagatccgctgtcatactaggatagacctctttcgtttctaattggataacatgcttcctgcctaattcttctttttcgccatgagagagagtgagagagagagatactgcttcatgcgcttctcttttgggaaatataaatctctttggactcgtttggaacgtcgtattaggtcgtattgtattgtattgtattatattaaattggattatacatcatatttttatataatactatgttaaattttgaattatactaaaatattatatatttaggtgtccataaaaattaacaccacatatagttttacataaaaat

SEQ ID NO: 260704 - DNA, 722 bp, Cannabis indica
tcaggacataagggttctgtagttagtcgctgggcaacaagtattttgtaataaacagtaaactttttgtaaagtattttgtaaatgggatcccaaagtattttgtatgaaatgttataagtatttaattaaataagcaaaaattttaattaatcacgatttccataaacctcgttgattagcaacgagctgcacagtacgtttaaaaatcacgtaacatgcctatgctagttagggtgttacacctacctgacttatgggttcgaggttaagtcttttaatatggacgcccgataaaacataagaagttagggcaatatggttgacaccagagggggtcagggaggttaaaatctcccacatccccgtgaacttaaaagaggtcgatgtagattcaaaagaggtgtttatgaaaatccaccacatgctcctaagatgaagagattcagaggctaaggcaacatggtcttccttctatgcatcctcagtaagtgccaaccactttggttttagtggtgcaagcaaaacaacttgttgctggtaaccgcgtggagcctttatatgaacggttctgtaagcaagcacctccagcctttttgggaggtcatgatgtcatggtatcttttacaagtaatagactcactaagagtaaggtcgatcccacgaggattgtagttaagtatgttaaaattaaacttttttttctatttggttaaataaaa

SEQ ID NO: 260705 - DNA, 870 bp, Cannabis indica
gcctaccccccaaatttattgtaaagcttatgataccattcaaaatgtaatgaagacaaaaacaacagtgtggatacatcttttagttcaatgggtgaagaaacaaacaggtttaggctcaaaagggttcacaaaggatattcattttatggtaggcttgaaaggctcaaactatccaaacaaactgcctaaatcatgttcctagtaaatgttgtcaaggatttcgcctcaaaagaataaaaaatgcaagttctaagctattcaatcaatcttaccacaaaccacagtaaaacaattataacatatttcacagattgtcaaattacattcatacacaggtttcacaagcatccaaactaatccaaagagttaacagaattaagcacacagtttcaaaatttcaggacatatcacaattaatagcaacacacaattatcttcagtttatttaatcgattgaaaaccaaataaaaagactaaactaaagcaaaataactaaaaagaacagaataactaaaacaattaattttttttataagtcccctcccccaaacttagaatacacattgtccccaatgtgtcatgcaaaacaaggaaagggagacttacctgtaccctcatcagaaggggtagaaactcaatactgcttcaaattggatcaagtccaccccttgcatccaatagagccctcgtaccgaatgacagaaattgacctccaatattgttaattttagagttttgcacaagagtaagtttaccttcagaactgccacacatcaatctttttcaacgatgccaaatcgttcaaagtcgctctttaggctttactctcttcttatcagctttaacaaaagaacccttcaccatctc

SEQ ID NO: 260706 - DNA, 567 bp, Cannabis indica
gattatgctctgctacagaaaggaatcaagggctagagatctgaatggaaggagtcataatattccgctgcacccaatgtaaggttttcttaaactcttatgtgtttatttcattgttttagaattcatattaggatgttaataaaacatacttggtagtaaatctagatcctcgtaaaatatttccaacaatagggacttaacatgtgtcactcatctgaccaactaagttgtcgaataagtccacgtgtgagcaaagagttttcacacggacttgggggaaaaatattatcccaaaatttgcaccatgtgacgtagcatctattggagcgacacctgaaaaatatatcatgacttagacaggcagtgtactccatgatgtatcgtctaaagtgatttatcatttgtaaacaattaattaaaagaataagctggaatatccggacgagataaatggcactgcctgaccaacgttgatctcacaacaagctcgcatacaacaacaaagataaatacaagtaaaatatctttagagatacttctctcttttatttatcaattaaatcc

SEQ ID NO: 260707 - DNA, 527 bp, Cannabis indica
ttattactagtgtttcctggttttactttgctgcactacatgaattgatttaaattggtttttcattgatctggtatactctgtttcttgttcttgccgaggtgttgtttcacaacatttttcaaatttagattctttataatgtttgatttgtttatcttcttcatttttagtttttatttttctaaaagtggggatttatacattgtaattggttaccaaaagctcccatggccatcaccttcttcttagctcaaccttgttcttcttcttcttcttcttcttcactcaactccttctcccattcccatttcagtctcatccgaaaaccccattcactcaccattaatccaactcttgaaccctttcaccttcccaaccacaaacctgaatatagaagcgataggcctccgctgaatgatgcaaccaaaggagaaccatttagtccttattatctttctcccactccaattcaagttctgcgtgaaataaaaataaattgattattaatttaaagtatatatata

SEQ ID NO: 260708 - DNA, 633 bp, Cannabis indica
agcaaggccctcaggttgctcctcttcctcaggttggtattactccagtaccaatgttgccagcagaatatcctatagctggcaacaggttagtaccattatatgagcgatttcggaaatagggacctccaatctttttgggaggccctaatgttatgaaagctgagcaatggctaactactatgaatcgaatactaaattttatgggagtcaccggtagcgacagagtggcctgtgccacatttcagttccaggaagatgctctgatatggtggttcttagtatcgctcacacaggatgttgctgttatgcgctgggatgaattccaggatttgtttaactccaagtattataatgaggctgttcgtagtgcaaaacggaaggagtttacacaattggttcaagaagaatcaatgtcagtgacggagtatacgaccaagtttgaacgattggtcagattagcctcaagtatagtacctatagattacactaagaaggaaaactacctaggtgggcttaatgccaagtttcgtcatgatttgacaattacaaccgatgatgctaccccatatgcactgatggtacaaaaggctcttcaagctgaaggtgcggtatagtttttgaatgagcccc

SEQ ID NO: 260709 - DNA, 591 bp, Cannabis indica
aattttcaatccctgtggagacgatactcgatttatcactttattacttgttaacgattgcgtgcacgtgtacaatttttcagaacagaagtataattcaagatcctatcaaatttatgcacaacattccagttctagaattaacacttaaagtgaaccaacatttgatccgttacgaatgtcaagatttcataattgtacatcatgttcccaaaaatccatattattagattcccaaaacaaaagttgtaagaatcatcttctttgagaaactttagcgagtgaatcaaagaaactagtaacatgaacatgagttcatgataactcaatatttaggtcgatctactattgatcatcgttatgatataaattaggtatttataataaacaacatgttcataaagacaactttattcatatcggtacttgtcatatataatctctattatatgccacaccttttcacttagatgtcttaatacattagtaatccaaaccaagatcacttacactgtagaacgggcatcagtgaaccctactagcaaccattgattaaatatttaataaatttaatatgttgctgattgtttt

SEQ ID NO: 260710 - DNA, 1627 bp, Cannabis indica
aaacaaagcttctatgccactcagggggtactaaggcacaccacacagacagacaaaaaacaggccaagtaaaacatcctgacccaaagggcaggtccaaaagaaagatatgtgcatcaaataagatcatatatacataaaaaatcctagccctaagggcaggtcaaaaaaaattataaatatatacaaagggcccggggacaggccttaaccaatgtttccccttagaaaataaaacagctatataaataaaaattgtcttaaatgtaagagaaaaataataaaaaaaaagagataacgaaaatcttggttgaactcataacgacctagtcaattcgaggaggaaggcgaggaccaatgcgcgcctccagcatggcgtcaagcttcttcttcttctcccgaaacttagcaatcatctccgcgggtttggggtagaagtcgaccttgatattctggccatttgttgaccagcccatgtaaacaccatcgtcgaagcgcttgatgcaccgactgcaagagacgagagaaaggagctcatcttttttagcctttttcaaggcttggtctttgaagtccttgagctccttcagctccacggccaagttggccctagactccaagtccgcctggtgcacttcctctagggacttcaccttggcaaccatttcatctaaggcttccctagcctcccggagctcgcgtctggccttggcaacagcctcaccctccgccctcagctcctcctggtgcttggcctccagcttgtccctccgaagggcctcctcccagattatcgcctccgcttgggcttccctccgcctggcctcttcctcgaacttggccttggcaagggcctcccgtcgctcagcatcctcctggtacatccgcctttcagcagtcagatcctccagggtcttcatgacttcgtccatgcccccaaattcggacaagacgaagccatggttgattagattcttggaaaggcggccgacctctgcagcaagctggaaaaggatgcaagagtgagtaaagtccttaagaaaaataatgaggaaaaaagtaaacttcgaaacacttaccacagtcaaggagtggctgagatcctgaacttgaaagatggagttcaaggatgcacaagcagcgaaccgcttgggcgcacaccgggttagctgagacacaaactcgccggtcagctccgcgacaaaggaagccaaggagggcccgaggaaacgattgaaccaatccgacagggggtccaagtttagatcccacgggattcggtagttctgatcgttaagggtattttgcatctcatctcacaaaaccctcctcaaagcctccacatcggtatgccttcgggagtactcgtccatggcgtagttatgcttggctacccggagctcctgcctcgcctcatctccaggaaccagagtcagcactacgttgggaggcactgtatattcctccgcctcggaagggatcccggaatcaggggcaggggccggagtgtccgctctccgctgctgtttgggcatctcctcggctaccatcttgcccttgcgcttgcgaattagagcaacttcgcttcctcaggaagcacctcctcctcatccactaagtcaatagt

SEQ ID NO: 260711 - DNA, 770 bp, Cannabis indica
ttccaatgattatataacttggcatattagtttgagattttggtacttgttgtgtgtatgttaagtgattatattttatggaaagtcaaaaaaatttactctagaaaatggcattctttcataattgattgattacaaaaaaattatttttttttttacccaacattattcatatttgcaaatttaataatagtgatagttgatatactcaactttcattatattggctaagttgggtataatcacatacaatattatattttattgtgaaaatatgtaagagcaaggaaaaagacctatgcatccactagctatttccttgataaaaaaaaagcctttggtttcgattgaaattcacaattcgcgtcacgtgactgtgtaggattaattaggatcttacaaaattaatgttgtacaatcatcgagccacgtagcttaggttgtaagtttcgatcagaattcggggttagtgggaatcctacaaaaattactgctcgacaaattttgactaattttgtgtttccacataattttggagcttggggttagtttggatcttgtaaagattattacttgaaactagcttagttgagatcctataaagattaatgctctataaatctcgactaattttgtgtagccacgtaaagttgtgagtttcaatttaaatctaatgtattactcaatcttttttatttgtaacactctttaataatttgcattttagagaaatccaaaccataatcctaagagaaatgctaaaaggcact

SEQ ID NO: 260712 - DNA, 435 bp, Cannabis indica
gcataaaacccaacagagtgttgtcccggactcggagaaacacttgggtaatccttctattttcggtcggagcaagaggaaagattttaactttctcaaaaccaagttggtggagagatgtgaggggtggaaactaaagtcgctttctaaggcgggtagaatggtgtacatcaactcggtcgctttggccttaccgaattaagctatgtctacttttaaaatccccctctattcttgtcgagagcttgatgcggtggttcgaaggtattggtggaatggctcgctcgacaaccagaatatgtgggctgccaagtcgtggaattctctttgccaacccaagatgagggggggcttatgcttccgccgtttcaaagatattaaccatgccttacttgctaaacttgcttggtttttggcttgcaaagtaaatagacc

SEQ ID NO: 260713 - DNA, 1502 bp, Cannabis indica
cacctagtctaggggcccaaaaataactttcccttttaaaattacacaatttaaattgctgattttgaaaaatactacttttttctaaataagggcccaaaaataattttttctcctatgacccactaaatttcaggaccagctctgagaaggagccactgaggcaacccaaaacaggctgacaaagagcatagaaacgatgccaacttctaataagaatagtctgcactctgaagttattatagaatattattaatcattcataacactttaattatctcatatcctgtaatagtgtttaatttagagcatcattattaggtactggtagtgcctatttagaagtagtgatatataattagttagtaatattttctaaaaattattatcataagctatatgagactcgatacttaattgtgccgataatgatataacaccgagaaatacactaagcactcttagtaccttttaatatttctctataatttattactattaatatttaataacaatgttattttttatatttatgtaaagtatatttaatatataactttatgtgcatgcatgcatgtgtgttttcatgttaatatacataatattgatttattattagtaatgaatataattaatgagaatttggtcatgttgaacaagccaaaaactatatgggaaaccctaatggtcccgtgagacatttaatgccatttaacatttgcattggacctttcaacttctaacattaaatgttatttttgtttctattttatttttgtatcataaattccacgcgtctcataaatgtttacaggtttattttagttgaaatctttcttaattatgatgttgaccaataaatgatattattattattattattattattaataatcaaaaccctattcaatttcaaagtgcttctatcttctctactactactcctatgtacataagtcttaataatataattattgctttaggactttggtagttcgaggctataattaattgactacatcatcatcatcatcatctatatatatatatctatgcttttttcattttctttgtatgtaagtaaaaccttaattaactaatgtataaattacaataaattattatttaataattacttacatagttgatctgtcccattcatctttgatagattaattaaattatattcttaataattattaaaagttggtttatatcattaatgcattaaatatgtataattaattaatgattaagcaaacccaaatcgttttcaatggttatataataatctgataattgttggaggttggttaagtatataaaataaaaagaagtataataaactcaactcctatacattaaggtgatatagtacttacataattaaggaccaatttggcataattttttttaaaaattaaaattactttttgaaaacaattgtgctataaatgtgtttaataaaactaaaattgatacaacttaactttcagaaaaaa

SEQ ID NO: 260714 - DNA, 1838 bp, Cannabis indica
gtaaatttcatgcaaacatcaatcactttaaatttcttatattgataactaattagattgtaaagagttttatttagggcataaaacccaacactaaccccctcaatcctcacccatatcgaataaactggatgccatcttcatatttttttcggattctaatttttataggtcttacctatttttttttagaaaaaaatatttctttcacgtgatttattataaaacaacgaaaaaacaataattcatattttttgtaagaaaaaaaccataaatatatatataaaaaaataataaatccataacaaacgtaaattttttgtcatttttaattagctatgaaataatcttttttattttgttgctaacatattagtggtgtaaattttgttctagcaatggctatttttaaattataatgtaaatctgaaaaagaggagaaaaagttggtatatgctagaaacaaatatgggtataataaagggatattttcaatgtaaaatgacaaaaatggtattagctagttgagagacacactaatatgtgaagaggctccaactctcagtggcaaagcaagggggcaaggggcaacgaggcaagtggacaagtgcggcgtcgggcccatttaagattgttatttgattatttttattttggtcttatgctactattttattttctttttctttttctaaatcccacactttttgtatgtctatgtccatttagttttattttagattcaaaaactataaatctaatatattctttcaagtttcaacgaacatttgaccatttttatccaaaaataaaaaatctatgttaaagaatttttgaaaaatagtaaaaatgattaaaaaaattaaaattatacaaaacagaatattttgataccccaatttatatacattttatacacactaatataaatagtgtttaaaaaatgttataatttatcccccaaccaactttgatatttgaggaaaaataacttacaaaaactataccaaaaataatgtccaaattaatatcattttattttattttttacaaatttattaaacaacaacaattacaaagaattagacacttcaagtacaatagcttgacgagtacaaaagggatcaaacccaatctaaaacatacaaactttgtgaacaaaacttaattggctaatttacgaggtactttagactcacagaataacaaaataccatcaacacaatcaaataataaaagaatttttaatgtgttctattaagccatgcaactatttttctttgtttatattaaacggacagctttaaggcaatcaaattcaatgttgaaacttagtatatattcgcctctgaatttcagcctacaacaccacttgaatggccatcactcagcttgcagcggctgaacttttggctggagccgttgaagaagcaaacaacacctcccctcagcacccccgcatcatacataggagtcaatttacaaaaactactaaaaaataatgtctaaattattaggattttatacgacccaaaaatttattttaaagaaggttttagttggttgagattccgaaattcttatatatagctcatgttgcataaaatacacctattctaagattctttgcttctagattttgtgtcaataatatttatggtatatatcgtatataatgtttttttttttttaagcaataatattgcaattatgtgtattattcaacacaattaattttatccgtggccgtgagcatgcatgctttctcttttaaaatttaataaaaaataatagtcaatggtctagggtggtcgtttgttaaaccttcgagccatacc

SEQ ID NO: 260715 - DNA, 521 bp, Cannabis indica
ttcttggacatgtgaaatgccttgtcttttattgacccaagtgaaggtcggccctttgtaccccaaatcatctaacatacagtcatcaataactttttgaaactcactcatcgctataccatcacgatctgaccctccctttttttttcgtacatagataaaatctcattgaagtccccccccataaatctacggtagattaaagatatgctttatatgccaaagaagtaactaagactctttgcggaggtgagcttttgggttgccatagaataccgtgaatcgccacaactctctccctggacattgtacaagagcatcaatatgtccactagagtagtttttaataataacatcccaatcatcattccatataaataaaagtccaccactactccacacacaatccacatgaaagctattagtaaaattgatatgtcttcgaattctttctgtccagttaccacaaagcttagtctcgggccttttagcataactgggcatttcagcatacgatactc

SEQ ID NO: 260716 - DNA, 453 bp, Cannabis indica
ctaaaatttaacatttataaaactgaagtaacttataatttgaagtttaattattatttgataattcagaattattaaaaatattaattagtgatttattatgtttaatcacaatttgtaacttttaattaaaaaattattgtatggtttaatgattagtaatgaaaacattaagaatataaaataagttgacaaattgtttatctaaattaaatatttgttgactcaaaatttgggctggatttctaagcctcacctgcttgctagattggaaagaataaaaaaagtagtatagtaattaatgagagacataacaatttaaagtagttaaacctctatatcgcgatagtaatggggctacgtgtactttgagttttatttctcatgagatggtaattataacaagtgtttaagtatcaaaatcttcaaattctggagagagagagagagaga

SEQ ID NO: 260717 - DNA, 1182 bp, Cannabis indica
tttagggcacaaatcccaacaggaaaggccattccattgaaatgacattccaatactttaatatgcaaccaaacaaaggaatggaatggagattgtttcctttccttttcattccatttcattacctccaaccaaacgccactgggtttgtatataagctatctttttattaatattttatattttgtaatatgtgtttgtatttttattttagtatcatttttcaaaattttttaagttatgttttgtatgataattagtatattgaataataaataatatgtaatattttaattttaatgtaatttaatatttttatacattttaattttataatatgggtttgaatttttctagtatattagtatcatttttataattctttaaattatattttgtataataattagtattttgaataataaataagtgcaatattttaatttgttgttttacttaaaataaattaatagaattcttatgttaagtattagaatcaatgtttaggatgtatttgttaattcttataaaagtaggataaagatagcatacctaattctaccgaaatttcagcaacataacatctataattgaatgttttcaaaaacatttaaagctattaataacaaaaaaaacacgaataaaataatataaaaaaaatcacaacaatatttagcaatacaaaattttaccatccatccgacagcagtatatgtatttgcagaacctacttcactaaagatgaatatttaagatattcaaactcatctaacatgcatattattccacccattgatccgactgcaatacaatatatcgcagaacctgctaaattactagttagtaactaactatagtatactaaatatcatttgtaactgactagtaattaattttactctaaattactaactatataataactaacgctcctcacgcatccataatttatccataacaaaaattaacaaaaaaatcttgacaacaaagtttaagagaaacttatatcaaataattttatcctaattctactaaaatttcggcaacataacgactacaattgaacattctcaaaaactttaaagttattaataacaacaaaaaataatctaaaacaaggaaaaataagtaatgatgagttagatgatttctaatcatctttgtgtttcccattaatatttg

SEQ ID NO: 260718 - DNA, 645 bp, Cannabis indica
ctatttttttttcttttttattaatatttctagagatatagtatcacaccaaaagtgccactatattacatattattttaaaaaatatatttaattcttttaatttagaatttatatattataaatattaatttaatcaattatatataaatataattaaacataataataataataattttaattaagtacattactacaattaatttcacctaaaataataaaactaaaaaataaaataacaaaatacaaaatatttatatttattaaaattattaacaaaatgtaatacaatttataaacacaatttcaaactgaaattacaaattatatgagccttaatacaaactcatataattttttattaaaaattacaaagacacaaatcatattcaaagtatcacagtgtaaacttataaaataataaacctaaacaacaaaaaaaaatcagattcacacaaccaccgtcaaccaaatgtcgaagaccaagccgtcaaacatgacaccaagcccgtcgaacccaagcccttagaacacgaacgtcgatcttgtacacagtaccacgaacgacattgaaggtgagacccacgatgaccttcaaacgtcgtccagctgcatagatcagagacacatgtagagagaggg

SEQ ID NO: 260719 - DNA, 2589 bp, Cannabis indica
gttttctaatgaagctagattgttcacgggatatcattacttttcgatggttcgatcattggctttgcattttttttttaagtgtttcaatcatattatgtggttaccaacatcaacatacactcaagcataactcttgttgatgaattcattgaccccttctaatttgcacttaacaattttttgctgcagatatcaagtatagcaagaggacagagacaaataattcaccagttagacagtatcagcaatcttctccgcgagaacactggagagaagactcgccaaatccgaactaaaaggaaaaacataacttgtgataccgaaagcttcacagttcctcttgttttcaccgcactggtagttgctggaacaggagtcctattattcaaaggattcttttcccgaaattagtttttatttttttggtttatgattcaaacttgaagctaacttttagagatgttcatccattgtgacccatgaagaccttgcagagccgcccttcttcccgggaaaaaaagtcaagaacaagaaaacattgcagagtttttaggagaatattgaaaggagatttatactaagctttcaaatttctctttgaggatttacgtaagaagggtttcttttctggcctatttttatttttgtggggatcttattaacttgagttgagccatattatttatttgctaatcaatcagtcaaaggctatatataagaatattattaaaaatagaaaagacgtttacagcattgctctttttcttgtgttgcttcactaatttctttcttattgtatgtaataatgtaattaactattaattactgttcacatatttgttttcaattttacccaatggtatggcttacccataattatttaataatgttaaaagagcctttctacatataagtggaaccggttcaaatgatattgtcttatttaggagtggtaatctaggttagacacaataaaataattcaaaatctgcatgaaataaaaaagtttgaattatttttgggttgatatgactaatctgtttatcaagcatgtcattttaggttgatatgtttaatttgaaaataatatgataatgatttatgttagagtatacactaaatttattacatttttagttatataagacttaaatatttttaaattgctcataatgtattataataaaattgtacttattaaacttcttataaacatattaatgagttgataaattaattaaaaattaagcatgattctttatataaatgagttaatttcaagtcggattaactcgtttataaacaggttaggtttgagttttaatttttcacattaatgaacacaaatgccacccacaaatatgaattatcactctattatctaaatctgtcgtaaaagcttgtcacaattttttttatcatagccaataccatgtattttttttttcatatttatactttagcggtcaaatttgagataatttaaaaattgtagatatctagaaaattatctaattatttctcttaaagaaagaatgattaaataatagtgtattaaatatataacgaataatctattatcagttgatttttcttagttttcctattaatattattagtagggttttgtttctacaaattttatcatctaattctcctctctattaaggatgcacataaactctatgggaacgaggatgcgcccctaatggggaggggatcggaggcgagacgggatttaattcatgtcgtcgagtcggaagggggcgggtcaggaatatactatccgctcctattttctccgaatatataattataatttatatatatacaaattaatctaatatactctgtgcatatattgtgtatataaggaatatatcacctttttcattcagcatgtgtattaatgataaaaatttgatttttttcaattttcatacaaatattactattatgtatttaattatattaaaagagatagatattgctccttttggaatttagaaagccacaacatcttaagaggagattgggagactcttagaagtcacaactaatgtgtgtaaatttttcctatacagtctataactctcttttgtttgcaagtctctcttagttttgaaattgaagtgaggtaaatactaaatagtaatggtattttatatcatacactatagatttaattagtacttgtgtgtacattgtatatatttttatatatatatacaaactgaagggagtttcacaccctattcctcccggcggccgccatatttatataacgagaaatttgcggtcaaacccctttatgttttgattgttatacatttaatctccttatctttatttttggtggcaaaaccccttttagtattattctgtttgcaaatctaatacacctgttaaacttggctattaaatgccaactagaattgccactgtgtacacatatgtacacgtggcataatgatattggcccaaatcattttaataattttaatattataaaataatttaaaaaataataaataaatatttttgttctttttaataatcagatttttacttttgtattaataaata

SEQ ID NO: 260720 - DNA, 4388 bp, Cannabis indica
gagagatatattaggttcaatgagttgtaaatgattctgctacacaatgagagatataattgttttgaataacatgtttgagataggagatgttgaagattctgtcactgtgaagaggtgtacttcactttagaatcgggtaagttaagagttatagcatactgcccatcattaatatgcatatcaaaaattgaagagtgggggtgatgatatagaaatgtaagagtgggaaacattctcttaatgctttaattgaaaattatctgtgttcttataagaaccttaaggtggtgccaaatagcaaccactcacctattccattcccgagccaccacagaggcctaaggtaaaggctggcaaatctagagaagagggtgttttctcttttttgctagaggagacatgtttccctagctaaaaaaaatgaaattgaaattcacgtaaattcagaaagaaactgttatcaatttctccttctccttcttcttctcttacaaaaaaaaaaaaaaaaaaacatctctctctccctgaaataaaagcaacatgaacatattgctgttaaaccatttgtaggcgttgcttgctgcaacaatgaatatgactaggaagaaactgggaatgatttcgatggggagtcggatagtgggattcatgaggaataatcaatcataccatttcatctctccctccattatcgtccgattgaaaacaacctcatctcactacgtgtcttccagagctagagaccccactttcgagaaattcatggacaactacaagaacttcctcaaagttatctccatccaagacctcatccttgctaaccctcaaaaccccgttgtttctcttgaattcctctccaagctcgcccagaagctccacctcaaccgcggctccacctccttcctccgcaaataccctcacattttccgcatcttctacgacccaaccaagtcccaacccttgtgcgcattaactaatgatgctcttcgcatttctcaccaagaatccaacgccattgccgcctcgctccccctcgtcgttgatcgccttctccgccttctctccatgtccacctccaaaacggtgccgcttcgagccattttcaaggtctggagggagcttgggttgcctgacgacttcgaggactcggtactatcccaaaaccctcatttgttcaagcttttagatgggtctgaacccggtactcatactctaagcatggttgataatattaggaataaaactagttcttttacttcggctgtggataactggagagttgaggagtgttgtaaagagaattgtggtgttgagaggactgcgattcagttcagttttaagcacggataccctcctgggatgaggttgtctaagaattttaaggctaaggttaacttgtggcagagtttgccatatgtagggccatacgagaaaatgcttccaggggcaatgagatcaaagtcaaaggctactgcgatggctttggagaaaagggcagttgctatagctcatgaatttttgagtttgactgttgagaagatggtggaagtggagaagataagtcatttcaggaaatggtttggaattgatctgaatataagggatttgttcttggaccaccctgggattttctatttgtcaaccaaggggaagagacacactgtttttctgagagaggcttatgataggggatgtttggttcaccccaatccagtttatgatgctaggagaaagcttcttgatcttgttcttttgggtcgccggggtttagttcttgaggaatccaatttgagggatgtaaaggagactcagcttccgggtgaaagcagggacacaaactgattgacttgtggacttttagccgtcgtagtggctgcaaatggttttttgcctcttcaaaatcctagaatcacaatttctctgctcaaccagggttgtattcgccctgagtggaaagttatttccattttatgaggaatgttattctctactttgtgaggatagagcaaatggcggcaaattggtttaagctgatcacattgagcaatcccattaaaggtgaattacctccctttttaaaacttatgtttgtgctcattcatgtcatctctctttttttattcccctttctttctcctaaatgttttaactcatgtttatgtttgtattcgtaggcattgcaaaggttttttcataaatttctattgttaagccattgttaacgtagtaaacaaatccaagcaacttaaatattttaatgaacgagaagggaggaaaatatgtaatgtgccatttttaagctttaagcaacttaaatgagacatgaactcttgaagaataataaaagtcctcaacaaagactacttaatagctttgtctgaagaagggatacaggagaagacccctgtaacaagaagaaatagagcaaattgacaaagtactttttatgtagttcttcttatgtatatttagtctgtcatatgtatgtgtgtggagtagcccataatacttaagagcaaaatgcccacagagctcttaaaatcaatccagtgggaaagtaaataaaaattagtcatatttgacaccgaagatttaaagtgatatatgctattgaattttgcgctttaaactagcatgtaagaagctatgatgattgctgtttcttaagcctatatattgttttaatttagatagatatgttattttgctctaggatgctgctttcattctaaaatatgtgattcaatgctttacttcttttagttattatacttattcttatgatagttttagttttgtaagctctatttcctcttgataaataaggtatttcttaaagaaacttgacttgcttcaaaccagttgaatgcttttatacctcattctagttccctattgattatggcatgcagactataaaatataatccagctgaatcaatttacttatatggaaatttttggggaaatttcacttcatgaatctacccagacatgacaaatatatcttctgtctttgttctggaaatttagttctactttttcttcttgtatgtatgaatcgaaatggaaatttctggctccactgtttgctatgcataatatctcattgtcaggccaataaggaggacacatgtttttgatattttttcagattctgtatgttcacttgtgtggactttgctgtgaggacccggaatacagaatttttaatttttgcggtagcagtagagtctgtggccaggagctttcttgttttagctgatcggtgtgactgatggtggttttggcatcatgaattcatctcagggttgattgtggatcatgttttttgcattgtgtaagctgtctgcaaccatctatatttatgatctccgaaattgtatgccatagttgaatttcgaaagctcatgttctttgtcttttcttagatagttgagaaatttataagtgtaattttgtggatatttcaatttttcacaacccttcagctctgcaagtacatatgcttcattgaatcttttgcaatgcaacattgagcagctgcattaatagcaggtttgatcagtcttgattttatataagatatgtatgtgtttcaagaattcatttcaatcaaaacattcactttgaataatcatcacacctatatcaatgcagaaaattcttgtcactaatttgcacacatgatgttatttactatctttttcatatgagaagccctgaacataccctctttcttatctagtcatttgcaagctggtataataatgattaatgtattaaccacatgttataaagacttgtaggaattagccacattttataaagcaacggtgaatctactagaagggataagctactactcgttataaaccatattatttccacaaaatgagggaaaggtcaatccgatttaataataatgtattagttttatttaactttttttaactatatatatatactaaaagtaattgaaaatatccatcctactcttccaaccaaaggtacctcgaagttataaattttgaagtagccatgttgaacttttaatttctatcttgatggatttacgagagaacgatgtaacaatcacattagtagttatgcagtattgtttctcattcattttatatcccctgagtagactaggaaatagggcatgctaactttgaaggttattttggttttgaaatttgttcaatttttgaccagtgttgacgaatcaacgttgctaaacacaagccttatatttaatacgatggttcttacttttaagatgttatttataaaagatgaaccatctaagctcgacacaaaaacctccaacaagagtgttgcgacagtgcatttgtgaagatacgcgaggcaatgctattttac

SEQ ID NO: 260721 - DNA, 632 bp, Cannabis indica
tatattgagaccaaccaaatgaaaaaatgagaatccccacaagaagaacaacagaaataatttgaactttggccattcttcttattaattattttctctttctttttcttttagttttatgaaaatatgttagctaccaacacactcttatatacagtttgaatatatgatattaattaattaaaatttcctttttttttttatttcttcaatttttgccaaaattagtgatatacctatttaagtagttttgttataatattgttggagaatatatgatatgattttcttaatatatattttttgtaattttaggataatatgtttcttgattagggagaagttttaggaatttaattagtttaggaaacaattaattgtgtgtatatatatataccaaatatagttgatatgaactgattggagaaatcttttaataaataaatttcaaaattgatgatcaacgtaacatatggatttaattatggagatgatatggttaatctcatcatgcatgcattcatcacgtgggaaaagtaaattgttaatattataattataaccataataatgctacaatattatttattatataattacaaaaatatcaaatttatgttataatttttttt

SEQ ID NO: 260722 - DNA, 1099 bp, Cannabis indica
taatttccatggaagtttaagcttttcttacgtacacgcgtgtcaacttaagtcatagctattgggctagctaaaacaaaccagaaatatacatttttaaagcacacatatatacatatccatgcaatgtacatatatataaatttaaggctagctaataaggttcacaaagaattataatagtatctaatactgtaaggtatttgatatgcacaatccaagctaatttaacttaagagaaatgctaatggtgcctataacttttgtgaaatttcatataattgttattgacaatttaatattgagtctaatttattttaatttaataattattataaaaaataacaaactatttataaaatgactaactcataaaagtgtactgacattataatatttaataacaatgctctaaatttagtgatatagtactagacactaatatctaattacaatactgtaaacttatatgtaataaacaattaacaattgaagtcgggataataagttatgatgattgatcatgagtttggtttatttttattctaaggctgcttgcgcaaaactttgtatatcattattaaatataatacttatatataaattataatatatatatatatatgaacaaacgaaaattatgtgttatatgtatatggcaatgcgcatatatttatattaatattcaatactgtataattaaataataaagttgttacgtacttttgatcaatctactcatatatatgaggagaagctgtgaaataactaataatatagaatttggcaaattaaggctttaattaatagaactcatccacataaacttaatataaaatgacagcttaaattctggtatgacaaatgtaagacataatgtattgcaaatgttaaataatcagaaattcttggaagtaatactatatatatatattctctcgtatggtataaattataatttgtaataattagtacctctttcaactttacactaagttgtgcttctagtataaggatttgttaataataatccttaaaacatgattttacaacacatttatttagttttattgtaaaataaatgaagtagtaggtaata

SEQ ID NO: 260723 - DNA, 702 bp, Cannabis indica
tgtttgggtctgagttcaggttcgggtttcgtgtttgggtccctagtccaggtttcgggttggatccgggtctggttgccaattcgggtttcggacttattttgatttcggtcctggtccggttacggttctagatctaggtttaatttcaattatgattccaagtccaagccctagttccagtcccggtaacctttcggttttggttccgattgtgggtcacatggtacgagttcgtgtccagttttggggttgggactgggtttaggtccaggtgtgggttcgggtcattgtcagtggtcgggtccagggctggatcccatagccagacaccgactacgggttttgtccaaaccctgtgtagagctccggatcccaatctcgggtccaagtctggttccagttttggtgctgggtcacgagctgggtcctaggttcaagttcgggtctgggtcatgtactaggtcccggtcctagttctgtttcccaggtccctatcgtgattctgggtcaaggtccttgttattgcgtgggtttgggtcccagtctttgttcctgttcgagtcttagtctcagttcgggtttaggtctctgtctgggttttgatttgggtttgggtttgggtttaggtcttggtcctggtccttgtcctagtttagttctagttccattcgcgattctgagttcaagtttgggtttgag

SEQ ID NO: 260724 - DNA, 5243 bp, Cannabis indica
ccaaaggagattcgacaaggatgaagtctaaagggtttggaagctttgaaggcaacctaaagcttttacgaattgttgattgagtatacatctaattttacgttttgttggagaatttggcattggcaaaatacatttcttcatgatcataaattactttcagatgatatggtgagtcaatggtctatgagctttctttggcactataaggaggctcaatattgttctgatcatgctcatgtggtaagtagtagcggtgttgttaggtcgtctaatggtgtcccctaaggatgagttagctttgggtgatgtgattttgtttgtcaatgttggtatccaatcagagctttggtaagtaagtcttggggcagttgtctcataccagttgggtgtcgcaatgtactcgaccgcaaacccaatcctatcttcgaggctcatgtggctaaggcggctgccttactataaggtttgctcttatgtcttcatttggttatacaaaccttatggtattctctgattatctttgtttattgcaaggcatttcaaataatgaaaagatgccttatgagtttggtacgattgtgagtgatattatatgtgtttggacacttttctctactatttttttgttcagttgaatcaaaccaataattgcattgctcattttttagttaggcgtactctttcattggatgaacctataatttggtggtcgggtcttcctcttgttttctttttttaagtttttgtattaatctttaagtaatatgcgatataaatacttaagtttaatttttgatggtatatttttaaaaattttgtaggtacttaatcgttaagtgtcaaaaaatgaccatatgacaatcctgattggttcatgtcattaaattttttattattcaaaaattcatttaaatatactaataagaaattgatacgtagatattgacttagcacttaacgatcaggtacctacgaaagttcaagaagtataactacagtatttttactatcaaaaaattaagtatatattaagttgcaactataaattaaagttaaatatttacctcacaaattactaatattttgatccacttgccttttgtgcctttttaataaaatatttattttattctaaaaaaaaaagcctaaaagaaaatgcattgactctttcaaaacgatgtcgtaataagtgaaaaagaaacacacaagaagagaagaaggtcaccgcctccgtgatttgagtttctaaaaagatttgagacaactttgatagactctaatatgaccgcgtctgagttgtcattaaagtccccgcaattagcgttaatgtcaaaggctattctcgtaatttcagttttattgaaggttattctcgtaatttcattactcataattaaacgtttaagtattttcttcttaattaagtttaaataaataaaaaatcacttaggacaaagaaaatccttttgacggtgcaagtaagcgaaaatttagaagactcagaaaaaaaataaaaataaaaactaaaataaactcttctcttcaaacaaacaagcaagaacagaaccgaatctgcttagcctcaactctttagagagagagagagaaacaaggaaagaggcttaatcttctttcttcaacaaaaattttgtttgttgaagggtttaagcttctcatttcttcttattattcatcgttaactttttatataattttttgaattttttgggtgtaattttagtcctggaaggagttcggaagcttttggttactgaatttgaaagatcttttgttattggaagtagatccgggaaggcaatccgagaatctgatcggaaaaatctcgtttccttgtggaaaaaattatggtattattttgatttgatattgatatgtattgtaatgtatttttctttttgtttgtagtttcgtttttgaagatttgtgttgtggaaatgcttgcgattggttaataggttgttgttgttgatgtaagttttctgtgttgatgaagcggcagtggattgttgttgtggtagtaatggtgttgctgtaatttgttttattttgtttgtttttatgttctgattcatattcagatttatttgatttgtgaaaaattgtgaactgtggagtagtttgtcttttactatttgactgagaatggagttggaactttagaaatggcattgacaagatagtgaaattgtttagtttgataatgattttgggattttagattttctttttgacgttttgttaatggttgcattatgaattcagctctagtgtcactaatgtgatgtgaccagtgaccacaactgtaaaatattgatgcggtctgcttgtcatactggatagacttagtgatttgattgtacagtagcatagttgatatatgggtgaatttgaagtagagactgaatttcataaatttaattcaggattaaataaaaaacctgaaacttgaataattttgaagacaatactacattcttttttctgggccattttttaagaatttattgttgtatgagaaatttaagtttgtattgttcttaactctttctggttttcctcacttgttgaacaagaaatcttacaacacacggtacattctacgggtacacatactttccccttttctacaacttatgtcattgccagtatagcttaaagtcttttactaggtttgtaacttttttgggtattagggcgtcctacttttctgttgcttgcttacatttttatactagggattttcgataacaactttgaggcttcaggcaatgcattttcttgagtactgccaggatttttttgttgttgttgttgctttctttgattgttctgtgattttggcttcttgttcactctttacatgtttgcatggaaataaactatttgttcactctttgagtactgccactgaatcttcaatttgttttacctgttgccttgaatgtggataaactttgtttactttttaattacattttttaagtaatttttttatttatttaaaaatgaggcaaaaaacaatgttatattttcgcatagtatgttactgaaatttagtggcacatgctggtagaagatttatcttgcacatgaatatattttctaatacaattatacaaatctatttggtgaattcaactatttgcaatgtaattttaggctggtgccttcaaccctgtggttggatctctagtctggatagaagatcccgatttagcttggctagatggtgaagttttggagatcaatggtgaaaatattaaagtcctctgcacatcagggaaaacggtaagatttacttttaagcatttttttgatgttatgtatctctggctcactaagttcttcttaattagccactctttttggtcatatggccgttggtgtagttttgtttttggcaacattggtcctttaacaattctgactactatttttattacttttattggcaagagaatttaaatatgggagatcttattgtgttctgttaatttcttgactacctcctgtctttttcttggaaaattgcaggttgttgttaaggcttccaatgtttatcctaaagatgcagaagctccgccatgtggagtggatgatatgacaaaactcgcttatttgcatgaaccaggagtcttagacaatttaaggtcaagatatgatatcaacgagatatacgtaagtgttcaaatgttttaatggggataggggtggggggaagctgggtgtatcttggattgggtgtggaattttcagaatcttattagtgacattgatctaataagtctaatacaataaattatgtctccagacttacacagggaatattttgattgctgtgaaccctttctgtagactgcctcacctctatgacagccatatgatggcacagtataaaggtgcagcctttggtgagcttagtccgcatccttttgctgttgcagatgcagcttataggtatattttagcttttgggccttgaattctttgtgtttttctttttgtttatcgaaaattggtttttggttgcagactcatgattaacgacaaagtaagtcagtcaatattggtaagcggtgaaagtggtgcgggtaaaacggaaagcacaaaattgcttatgcgttatcttgcttacatgggagggagagctgctgttgagggcagtaggactgttgaacagcaagttctggaggtactgaggtttagattcttatttgtgcagtgagtggcaatgagatttcattgtaattgtaactgtttgtactgtgaatttggaatattttgctcttttatttatttctgtatgttttgcagtctaatcctgttctagaagcatttggtaatgcaaagactgtgagaaataacaactcaaggtttgaaaattgatctatctgttccttttgcatttattacaaattggtattagtttatatgcttgagtacattttgtttctcatttgcatgtcacattgcagtcgatttggtaagtttgtggagattcaatttgatcagaatggaagaatctcaggagccgccataagaacttatttgcttgaaagatcacgtgtttgtcagttgtctgatcctgagagaaactatcattgtttctacatgctttgtgctgcaccaccagaggtaaaggatctttgactgattcatctctcagcttcattataagaaacggttgggcatgataagcatttcatccttatgtgtaaatgtttatttgtttttgagttggaaggaatttggtaattttaacctgccatctaatattgataaactagatttcttctaatttttataggatggttaaacgtatttgtttaactaattttcctgttatttcatatcaaattttacaggaaattgcaaaatacaaattgggacatcctagaacatttcattatttgaatcagtcaaactgctatgaattggatggtcttgatgagtctaaggagtactttgcaacaaggaaggcaatggatgttgttggaattaattctgatcagcaggtaacttgttggagctggcagcagtgatagtaactatttgtaaacacgatgtctacttgaaatcttgtctcaattggctttcttctttttaggatgcaatatttcgagttgtggctgctgttcttcaccttggaaacattgaatttgcaaaagggaaggaaatggactcatctacgccaaaagatgaaaaatctcggttccatc

SEQ ID NO: 260725 - DNA, 909 bp, Cannabis indica
ttgacgagcatttccacgtatacttccatatttcttccgatctgatctttgcacattttgtttaccattctctggtaggtagctccagcgttctttagaccaaatggcatgaccttataacagtacagacctatatctgttcggaaacttgtatgttcttcgtctggtggatgcattttgatttgattataccccgaataggcatccataaagcttaggatctcatgcccggatgttgcatccacaagcttatctattcttggaagtggaaaacagtctttggggcacgccttgttgaggtcggtgagatcaatacacactcgccattttttttgggcttgggtaccagtacgggattagctacctaggccaaatagaaagcttcaatgatgaagttgttattatgtagcttttctacctcttctttcaatgcttgtgcctactccttgtctaataatcttcttttttgctgaactggacggaagttcggatcaatatttagggcgtgggatattatagaaggatcaatatcgaccatgtcttcatgtgaccaagcaaaaatgtctaggtttgctcttagaaattttatcaatgctaattttacttcaagcagcaaacctttgccaattttgagtttcttggtcaggacgtttgggtcgatttctatctcttccaattcttccactatcccaacatttgtatttggttccccaagtcggggatccacatcctcatccccgccttgggcggctccctatttggcaatgcttttccccctatctgaactctggccagatgaatcttccttttcggccttggtaagggcaaggttataacattcccgtgcaacttgttgatttccttttaggcaccctaccccattctttgttgggaacttgatgcacgaat

SEQ ID NO: 260726 - DNA, 943 bp, Cannabis indica
attttgacaaaaaatcaattcagggtcctatttgtactattttagaaaatacagggtccattttttcatttaacaaaacacagggtccaattggtaacttttgtaaaacagagggtccaaaatggtatttaccctattttatatagatttaggttgcgatttaagttatgtgaatttctgtaaaaatatatatataaaaaaaaaacttggaatgtaaaaataaaaaatgaaaccctaaagttaatcactacaaaacaacaaattagttattcttttcatttttagagggaagaacaaactagttttaatttctttatcgggatttttttattattattatgatcagagaaacttattttttgatatcttggtacttatacaagtttttaagttttttagtcactctcgatagtaaattctaaaataatacaagtttacttatttttgttttaattaaattctaaaataatataaatttattaattttttttatgatcattctagatagtaaaaaatgaaaacattctctttataatagtaaattttaaaataatatttttttataattataaaatgacacaagttacctaatttctgtttaatcactttcgataataaagaatgagaacattctcttatattaacatataataagatatgaatgcacaatgcatggagatggagtctaggaatgcccctttgaagtttgaacaatcaaatttaactttttaaatgaataattaattaaagatatttatgcatgttatgatgatatgatgttaggttaagtactaacttagtttgaaagcaaagggtttttaaaagtaaagtacaccattggtttaatttaaggccaatatgcattcccattcttttgtgatcatcatgtactcatgacttattaactacttttcattcttctacttataaaaaaactcaaaat

SEQ ID NO: 260727 - DNA, 1795 bp, Cannabis indica
aaggagcttagttaagttttgatggctaccaaaatcaggcatcaagcacctaaaacccccctttcccgctaaaatcatatggctagaacgttggttattaaatcaaatgacaatcctactttgttttagttcacaaattatctttagtccaacaaaatcaaagattctaatctggacatgagtaaagcatgcaatcctcttctcttgagaagcgcgtaatgcatttaaatggagagagaaacaaaggccaccatcataaattcaggagacattttgataaaatattgcagcattaccagaagagcgaggggttggaacaatgtaagctccgaaagctctgtcaccaccaactggaacatcagacttattaaacttcacagcaaactgaggtttggctttcaaaccaccactcttaattagccgcacaaaactcaaaaggctctcttcagggacattaagtgaccctacattcagctcaactgtgtcaaacccatttgcttgcactcctgaaaacaccagaaattcacaaattaagctgcgaacagtttgcagtgatcaacacgatcattcttaacaaagcctcacctcaagatattgactgaaagctgatggacctttcctaagcaaatgttcagcccagtcaccagtactgacatatatatcatgttgatgggccatatcaatcacttctttcacgaaagactttggcattaagctgtgggaacctccactgaactttaaaccatccacaaactgccccatggactcgaatatatcctgaaagatccaccatttgttggccacatgccacatcgaatagattaataattcagaaagcacagaaattacaaaatttccaaccaagaatgcaaaattgaagcaattaacaacaaagtaaatgaaattagaagagcaaagctgaggtttgatcaagcaagaacattatttatacgcaagagtaatgaatgattacctgaagaaggttttgagaaagaagggtataatgggggcctctcatctccgtgactccgaaccgacgaggtttctcgggtcggtcttcgtcctcgtgaaagttcttccacctgtaggccgacattttaggtacccaggcagaaatttactgaagaagaagaagaaatggagtgtttgtaattgagcttaaaatgagcaattgaaatttgatggaagagtgaagctgcttctagaaattttcattaaacgatcatcatcttctcctatcaaaaaaaaaaaaagctaacagctccacctgtcatgtttcctttcttttaattatttatttatttatttttttaatttccagaaactactacaaatgtctcgcgctctctcgattgagtgaaaaacgacaattctgttaagcttctattagaaagaggacgtgtcgtatcaatactgttgtttaaaagagtttattaagtgagacgacacttctattctttcaccaaggttaaaaaattaatttgcgttacacacttacactataatatttaaattattttagcaaaaatatatatatatttaaattatatttttagaatttcattttaaagtttaaacaacattattcaaatgatatattaacttttaaataaataataaaatttaatgatataaataattggttttaacatcaattgttagtacttacataaactttaaaaatacaacttaagtattattacattaaaaattaactttaattatttatttgtcaatcgaaattaaccttatatatttgaataaaaaaatataatttaaaacttcaaattataag

SEQ ID NO: 260728 - DNA, 1789 bp, Cannabis indica
gtttagaccttgatggtatgaacatttggtggaaaaatttattatgtaatttattttttgaataaacttatatagtacagttttctaaaaagggggtgtttgttttggtgttaatgggtagcttttttaatttaattttttcattttacatgagcttgtacattatagttatttatgattatttatttttaaaaattccaaataatttattgtttaaacatttacttatggaatataaggaaaaaatagttactactgaaataaatatttttgaaccttaaaagatctccaagatattgaaacacataaaagataaaggaaaaatgtatagatacctcctagacgtgtgttgtggttgacattctaatctgttcaggataattttttactttagttttttttttttcttataatcgtgtacattctagttaattaagactatttgtaaattttcaaaaattttaaatttatagtgtcgaatgtaaattcaaataattatttatcatgcgcataaaaaatagtcatacatacaataaaatattagaactttatttttaaatgctatataaactatttgaaaatttacaagttaaccctaaataattacaacatacacgattatataaaaaaaaattaaactaaaaaattatcctattaaactatatagcaggggtattagaacactcatttagagtaatgtcgtatatacttttctaaaaaaatagaaaaaacaactttatttagaaaatgcattgtgttttttttcttaattaataaatattatactttttgtattttttgtgccgtgtcatgctcaaatacatatttttatatcgtatcatatctatatgtagcattgtatcgcattgtatttaaactcatatttttcgatacctgatcgtgcatgctcgtgccttttgagtccataccagatttatgatgtgtcaaatagggatgataattcgtgttcgtgggtcgtattcgtaccgtgtcgagatacatatataataagtatatactcaacccgaacacgacccgtttaataatagtgtacaaaaaataaaacccaaacataatttgtgtaacccatttataagtatatattttatttaaatatgtcaactaatagcacgtttatgatataattataaagtactaaaataactttaaatggatcattaacgagtcagtctcgtattagccgtatcaacccgaacacaatccaactcatttaagacaaactcaaacccaataactctcgtgcgaatttcaaatcgtattatcgtgtctgatcaattttagctatcgattctagtgtcaaaaaaacccgagtgtatatttagagcagtagatagaagaataaagaagtttgaatgagaattgatggagtggtggctgagtggcagtgagagaggagcagggcagggggggccgtgtgctgctgctgttgcagctgttgctgttgttgctgtacgtagctgtggttgttctgatacagttgtgcctattttcttgtccattgtgatgagtcccacgtggcaacttcaatctgattggagccttaaacctcggcccacgtggcaccatcaactgtctccctcttcctttgattatgacccctcacatcatcatctctctctctctgctcccacttttctcattcttaatttaatactccatcccactaccaccaccactactctactccaatcaacccttccttttattattacttttcatattacttcctcttttattttattttattttttttttgattaattagtat

SEQ ID NO: 260729 - DNA, 622 bp, Cannabis indica
ttcagattgtattagccttatacagtctcttttgatgtttgatatttcagttcagtttgttaaacggtctaggaaccaagcaactaattggttagctcgttcttctggttcatgtcctgaccgtctttcctgtagggggtctgtccctattagcttggaagctattttattagctgatttgcattaataaagttgcaatctttgtttcaaaaaactacggaaacaaattagtgacaaaaaatactttagtaaattttgttgcagttaagtacttatgtaaaaaaaattgccacctaattaaatttgttctttctaattaatatttacatagaaataatttctcacattttcatttagaataaaaatctagtattctttgcattattttgatgcttcatagtcgacagtttatgagtcattatgtttaaaatattattagagcttttatccttcttgtaaatctaattttttatttattaattaatgaaaattttatttattttttttaaataattaatatgcaattaaaaaagagtaatttgcggcaaaaccccctcaactattaatttacttgcaaaaaaccatccaacctcatattttagtggaaaaaccctccaaagta

SEQ ID NO: 260730 - DNA, 1368 bp, Cannabis indica
agtatgcctgtgttgtcttttcaggtgtgttctgacagattggcgcggtatagtcacaaccgggtatttcgggcggaactgggttcgggcccgaaatgcaattggattgaattaattggcattttatttgatatttgataatctgaaatttaaataggatttaatatgcatgaaatgctatttttgcccttgtatgcttaaatgaaggttatttggccctaatggcattatagtaatttggcctttatgtgttatgagttgggaaattggatttttgacacaatgaaaattagaaattctggtctttctctctctcttggccgactctctctccctttctatccctcttgatttttcaagctgaatttgaggaaattggttaggaaattgcttggatttggagcttgttaattgtagaactttgagctactcttggattgagtttgaggtagcttcctatgactttaattttggtttttatttctgaatttaagtgttgtaaaagcatgtcttgagttgtttttctcttgtggttgcatgttcttgggttttgttgtgattttgatgaattgagtatgttattgcatgatttggttgagaattatattgttgagcatggagtaagactatagggtattttctagcttggaatcatgtgttcttatggggtttttgttgctggaaattgtttgatttgttggagatgaagctcttgtttaagagcttgaagttgctaagctaagcttgatttttaggttgtggtgcaatctgatttttgagtttaattgtgaattttatgcatgaagtatgtgttttaactctctgcatgatgattaaaaacctattttatgatttgggagttttggttatgaattgggttgtttggatgtgatttaagggctgaaattcgtgatttattgctagtttttctaggttttaaacccaggtgccgcgggatggttttagcatgtcacggcgcgcccatttctttctagacagatccttttgcaaacttcaaatagccataactttgtgatccggacgctgatttgggagttctatataccgttggaaagctcttttcgagctctatctgaatatctgaattttaaatgccatgtgaatattttatgaatgtgaaatcagggattaaccctatatgtgaactcttggattatgtgactaggattaccggcacctgatcagaagcacccggggattcagaatctctaatattgcgggacaactggtaagacagtagttagcacgtagagtatgcgcagtggcgcttatattgaaaatgatgtgtatgattgtttaataaccgggattagggttattaccctaataggaacggtctaatagcct

SEQ ID NO: 260731 - DNA, 614 bp, Cannabis indica
attttgtattagatcctctccttcttttgttggctgtactttcaaacatattagtagaaattataattttgcagcccataatgtggctaggtgggcgttctcccacctgaggtttggttgtattccgcattcctctatccttgaacaactaatatgtaacgaccatgtggtctagctgattctatttatatatgaatgcttttcttcaaaaaaaaaagtaccttgccaagagagttcaaaccattagtaattgtagtaaaaaaagtatacacgttagtaatgatttcatcttctttcatcttaaagttctcatattgagtggaataaatttaaatttaagtctctttcatagcactagttcccttgatgagtaacttcaagtatttttcacatatcaaaggcggtagaggcttgtttaatatttttaaacaaatctccatccaaaccacataagtgcatatttagctctagtatttttataaagtattttcttatcattctcatcatatgcctcattattgttaacaacttcgacaccatttataacatatttaggaatgtaaggaccattagacactatatgccacaaatcataattcatagattgaaggtaa

SEQ ID NO: 260732 - DNA, 1734 bp, Cannabis indica
aggcaaagggaaaaacatcaacaacttcatagcaagaagatttgtggaaacatagaaactaagtaaatctagttctgtcattagttcacatcttccatataataccatcaattacttcaagtaaaatcactactacactaatagaaagtacttaatgaatctccacacctttgacttctcacagaaagttggatctgagaaccatgtctcatcaactacaacatcaggtgtcaggggtgttccattgaacgcaactgtagccatagaagatgttaagatcaccctcttacaagaagcacttttggcgcatgacctaagaacgttaagtgttcccttaagtgctggttcaatcagttctgcctgaaatgttaggtaaaacaatcatcttttaaaaactaaaatgatgcttcataaatcaagatattaaatttcaatattccaaacagataaggtaagaaaatgactgaaacatattcaagcctgagcagctaagggactaacctgtgggtcattgactgtaaagtttacaggtgaagctgtatggaaaacaccatcacatccatcaactaaagaatcaaaagatccttcctccaataaatttgctttgaacaaatgaagtctttccttggctccatcaagtgaaagcaagtgttctgttttcttaggatcacctatcacattacaaataaagacaaccagaatgttcatatgaaaactcagataagataacataaacttgtacaatgaaattatacttgcattaacatttacgtccccattgttgttcatagagaaattggatcaagcaatcaaaatccacacaaaatccacacttactgtatcatttataaagaaacccaagctagaacccaaaacatgtattacctcatttctgcctctttcggagaaacccaattagtaaattgagagttcatgaatttgagaggttgttatatatagaatatatagtaataggatgtgaatatcatagtgtagtcagctaaaaaagaaaaacataacccagaatccaaaagtgatgaacaaaacttagaacaagtattgggtaaagagagtttactgaggtcacgaactgaagctttgacagtgtatccatggtgtagcaagagtttgacgaggcatgaggctatgtagccggaagccccagtcacagacaccacctttcccgatccactcatcttctttcttactcactttgctgctctgttcgttctacaaaaagagtggtctccactcccaactcaactttccactaattatttattactaaaaatttattccctattttgatctacattacattttagtcactacttccacgtgtcaactttaaaaaaaaatcaaagaaacttttacaaaggtaaatggaacattcttctatataagttagagtattaatctcattcaaattctattattttatttatagtgcatcttattcgtattacctgtagattttatattttaaattgaaaatttgtgtaaaagtataaattgaactggttattttagattgattatttttttaatattcaattatttaatatttattaaaaaaatatattattattttatgtttctaacgataaattaaaataaatgaaataaagttttcaaaaaaaatgaataaatgaaacaaataaataacaaatttaaagtaagaaaaaaaaattatacgtgtagagaaaagttaaattttgttttagattatatttt

SEQ ID NO: 260733 - DNA, 1168 bp, Cannabis indica
attttatatcgtcttaggccccccattttttcagggtcgaccctgattattatgtcagaataatgatgaacaaataaaaaagtggttaataatgtagctaattaattaattactattattattaattacatgccaacatttatttaaatatggaaaagaaaatcaatggagcaatactcagttgtgtcatacttggctacacttataaattgtcttatttggacactttatgagctctcttttattcatctatgaagtattttggttgtgactataaatgggtctggtcttgtaattgaatgtacgtacttaatcatcttcttaatcttctgagataagaagaaaatgattaaagttgttcttgctgatcctgttttcatttctattctcaccattttgactttgactttgacgcattctcacaaggaaagatcaaccattgttggtaccatttgtatactctttaataccatgatgtatgctgctccataggctgttgtggtaaattacttgttactagttactagttattaattagttactttttaatatcattattttttgtttgattttaattgtttattgttttggtgaagaaattagtaattactactaagagtgtggaatttatgccatttttcttatcatttgcttcattgttgaatggtattacttggaccacttatgctctcatcaaatttgaccatttcatcactgtaattaactaccatctctctatatatttatatatatctcttaactgtatatactgtcataaatatactagtaataggttaaaaaaaactttaagtccttactataaagataaatatatttttaaaatttattaaaaaaatgcgtatattttctaaaatgtatttttttttttatttgggcccctaacatgagtgggccctaggccgcctatgcctagggccgactctatatacattccgagtactagccatttcttgagtctcgtaactactatagttaggtctgatcctgagcataggcgaattaggcttatgactagagcttacttaactcggaggcttaaaaaaaatttcttcaaacatttttatatttagtgttaccttaataaggtattatatgatcatatataattgacttataagtatattatattatagggtgattttacaat

SEQ ID NO: 260734 - DNA, 1036 bp, Cannabis indica
aaataaaggtttattattgttcacaagtaaaataaaattatccctaaaaaaaaaataaaaaaaaataaaaaaaaaagtttaatttgattggtccggcaaaacaaggttcgcgggaggccgaggtggaacgaatagtccaacaagtgggggcgacaaatagaaagaaccatttgatatttgatttgataacataacaacattaattaatcaaactcctttcctttgaaatttcgaagcctctcttctgttatctctttctttctttctctggttcgatctggatctgcctcaaaatgattgcaattccatatctaactgctttatcaacctatttcagctatggccttctcttcttatttggccaaatcagggatttcttccgcaaactcatcgattggtcttctgctaataatctccatggttatgcacctctttgtttgggactcgaagatttctacactcgccgtctctaccttcgtattcaggtaatctatgttatattacatatcatattcccaacaactatctcaatctcaatctcatcttcctcttctttttcccgttctcaaaggattgtttcggtcggcctattgctagtgctcccgatgcttggttcgatgtggttgagcgattctccaaggacaataacaagacgctcaagtaaacattattgtattcaaaccttttttgtattcgttctttctgtgtatgtatcgaaactcattgttccttttcgcagccgaacctcgaatacgaccaaatgcttgaacttgggatcctacaattaccttggttttgcggcttccgatgagtactgtacccctcgtgtgattgagtctttgaagaagtattcaccgagtacctgtagcagtcgtgtcgatggtggttagtatttgagattttcctggtttgcgattcgaaattgaattgattatatttagattttgacaataattgcgctgaataatcactgaaatcaatcaggcacaacaacattacacgtcgaattggagaaatgtgttgctgattttgttgg

SEQ ID NO: 260735 - DNA, 738 bp, Cannabis indica
aatgcccccagtatcgcggacaactttccatcttcagttacccgtgaaactttggtcgcctccgtcatgaatctactgatgtatgcttggagaggctcgcctgttctttccttgacttcgaccaggtctcccagatgcaacggaagtttgcaagaggaggagaattgtgcatggaattccggagagaaggctttccatgagttgaaatttccttgggccaacttgaaataccattgctgggcgacttctgaaagtgtagcaggaaagattcggcaacacacatcccctcatatcccctacaaatccatttgcatcttgaaatacttgaggtgggaaagaggatcttctcttcctgtgtacattttccatgttggtattttaaacatgtggggaaatgccaagagattgatctcgagagagaagggagtcacatgctcggtccagctcgagatcattgtttctctgtccggccatgccttggaacatattttttagtttgtctagctgtgcttgcacagctggactaacctgctcggcattctggtcaatttgaatcacatcaatatctttctgagcaggaatttaagcacgggctccgggctgtatgatcgtcatgacaatctgatcgtctactcctctccttctgttcagatcgctccttaggtcatgagtcgtccccaacctatcgaatacagaagcgcctggctatctcagtgattgattttcttggttgacagg

SEQ ID NO: 260736 - DNA, 843 bp, Cannabis indica
aattgaacaaaagtctttaaatccaacaatctaaatagttcagaggaaatttttaacggtcagaaaattcaagaggcataatctagtacatgttaaagttcaaagagctaaaattctaattagtcttattattattactattatttgtactctgatcacaatggtgttggttggtttatttaatttttttttatcaactatggtgtggttgaaagtataatattcgatcccttcgcataaaaacgctgttagtttgttttttttaatgaatttgttaccaactcaatgcttcatatatatttactaataatcatataatctactcatataaattataatacaataatatgtatatttcgtaaaggtaaaaggttttaaatagatgaaattgaatcctatgtatccccttcaatcatgcaataaaacaaaatgcatgtgcgtgatcattgaatgaattataagtggttctaaaaatacattaattttgtggtcctttcttgaatttcaaaccaaaaaagagaaaatcttatgtatgttacatatgtatatattgaaaagaaaggaaaaaaatagtaatcctatatttattttttcccaaattttcatgtgagcatagtacattacatatacgattcctttctaagaaaaggaaaagaaaaacgccatcctaaatgattctaccaacttagaaaaataaataaaattgacaccaccaacctctcttaaaaatagaacattttttcaaggaaaatttggtataaactttaattagcaaaacttgagtttgtcccccaaattaataagtaacaaagaaaactaattgagtaaatagcggcataagta

SEQ ID NO: 260737 - DNA, 955 bp, Cannabis indica
gccccagacatcaaatgggtctggctccaagcccccgaagcctccatagttatggttgggcgtctccgcatctcggggcggccggtgatacatcctggacatcgcgggctttattccagccacctccacgatgttctccaactggtgagggcaagttagagtggagtgaagctcagccgcctcccatcccgtagcccgaggcttgtacccctccttggcaacgggacccagcatgacgtcttctagggtagccagacgcttaccccccttcttggaagattttgagccggatgcagacatattttgattctgaaaaagagttaaaattccagcaattaggtccataccaaacccttaatcaaaaaagggaatgggggtcccctaaccgctggaaagaggccccctccggacatctgtcaacaagaaagccttagaagaatttcctggacaaaattcgggtgcaaagatcttacagatggtgacatcgcgcatgaaagaaaaagaaagaaagaagggcagaaaatcgagaaaaacgaagtcttctctatgcccttgaaggccatcacacgaagagtgtatggtcctttacaaaatatgacaacagtgcgtaacaagagtaaccctagcaccagagaaggtaaatctagacctattacgtaaaaaactcaagggagtacattccagaaacttcaaataccaaacccagaaaaacaaacagataagtaaagcatgccataaacacgaacaataaagtgagggacgcgagaaacttacaatgaagtgttagaactgggggttttgctgttgatcaaataagggaatgtagactgacagtagtgagtgaaggttagcaaagaaatttgcaaagtgtttgaagtttttttggtctgaggatttctttctctctagaaaactcgaaggaagttggcgaaaaatggaaagtaaccaaatgaag

SEQ ID NO: 260738 - DNA, 1538 bp, Cannabis indica
ttatcgtttgctttatcgggcaacgatagtgacatatacaactcgtggttaatgagtggtaaaggggtactttataaagtaccaagaatgtgtaatgtgtaaaggggtactatatgatattgtgtaatgtgtaaacatgatgtcatgagattaaattgattatcatttttcagttattgttttgttcacttttcttgctgagcctctgtgactcacgggtgctttatggtgcaggtaaagggaaggcaaaggttgagcaaccatgagtttgtggtcgtagcagcaatgtacatatcagccgcagtggcacgacccaatgaacaggatgctctattttgaatgtattttggtaacacaaagtttacgttgtaaaaatactattaaaccagtttgtatatattttgaaaatagggagaccccgtagttaatatcatttaccttttatcgaatagtcttatatgtttaattttagttattaaaatttaattaaccacgttttttttagtatgattatataatatacaaaataagaattttattaaattgcacgcacgcggcgtccctgttggacagggcgttacaaacttgatctctcatctcactctcaaaatgagcaccaaagacctccttttataatgtataggtgattacttagaattcaaatacacaacacctcatttctctcatataaattagtattaatctattttgtaaaaactatatttgataccatttggatcctatcatcaaattgtgtaacaacccttttattacactaataatgtgtgaccaacacatgagttacaagtgacaacaaattgtaactcctctctaagttactatgtaggttacaaaagtataggttaagattataggttacacatttatttaccatacacttaatatatattattcacataataatatatatcattttaatctatattatattattaaataatataacaatctgccactagattaaaatatgtgacacacttgtaacatttatttaatcaatcaaaatattatatcaaaatataacatcctcccactttgattgaataaatacacaatttcaaagaagtcttgcttaggtgcattaggtaaaatgtctttcgatttgaattttaccttattgtaattaccagaaagtttgatgaaattttagttgtcgtagcattgaaccactattccttcagtacaaaccggtgataacacacacaccctcgctaatgctcacttgagaccgcatgtctcgctcttgcaccgttaatggccatgtgcaaaattccaattcatggactctctagagaatactcccaattctcataagaggcggcaccacctctagtccatataggtggagttttagtgtctcaccactctagacacttcttaagcttaagtgagttttcttaagcttaagctccattaaaaaaccttttggttttaaccctcaattttcacaacatgtactcatccatagatgggacaattgagtaccatattcactctattgacttgttattacctat

SEQ ID NO: 260739 - DNA, 502 bp, Cannabis indica
agagagagagagagttaggaaaaattaaagaattaaaaaaatattatttatttattgattaataattttataaatgtaaatatttttttaattttaaaataaattctgaaaagattttttttttataatttttaaataattatattaggtagtcagtttatgttagtaattaactgagacaaatggatggcaccttaaatttgttaacaatttagtagtttggagggttttatcaccaaaatttaaagttggaggatgaagtgaaagtaaaatgatacttaggaggatttagtcgcaaattactctaattataataaaatactcgtattatatatgggtaaaagttattaaaaaatgtgtacatatatattttaccaaaataatattataatttatttttggctaattaggattttttcccccgaactttaacatgtatcaaatcatgccccctgaactttttttaccgttaaaaattctccctgaattattaagattgtta

SEQ ID NO: 260740 - DNA, 1212 bp, Cannabis indica
caagttccaactattttcataaagagcactgaaaataaagctaaaccgtttcatttgattgtagacgaataccagtcgacgtggcatcagaaaactgaaatatcaaccaataccatgcataatagtatcactacactagtctacagtcctaaccaaacttactttaaatactgaccgttgaaccctcagcgtacatgctaaatctaacggtcaagattaaacggggttttctagaatcaaagaaaagaaaataataaataccatttccccaaattctgaagctcctccttccttacgctgacccgccattttccagagtatctttcttctccttcgcttagctcctaagaaaaataaaattcatatataaattcaaaatcggtcattttcttactattatccttttctcaagaaaattcattcgagatgcacgaaactgatattcacgatctctccgacgacgccgattacgccgcctctcagcagcaggtgagttcgattgtttgataatttatccttttgattgtttgtcatggaaattggatgattgtcgatcgattttgaaattgatgatttcctttttttttttcttttagggatcggcgagtattatgcgaagcgatagtggtagacagagctcgtctagcgagcctgatggtgctgaagttgtttactcgaaggataatgtcacgattcatcctagtcagttagcttccgagagaattagcggtagattgaagttgattaagcaaggttctgcactgtttatggtatgatttgaagtgttcttgattatctcttatttggctttcgcttcatatctttctcttagctctcttattgagaatcctatgtgatttttgtgtgaatgtagacatggattccttacaaaggacagggttcgaacgccaggctttctgagaaaggtttgatatagtaattttgtgaatcgaatggtgtatttgttgtttttattgctaaatgtgttttttgttttctttgtgcagataagaatctctatacaataagggcagttcccttaacagaggtgcggtctgttcgtcggcacactcctgcttttggatggcagtacattattgtggttttgtcctcaggtatctttgaaatcacctagttgtgggttatatgttgattagtatgcatttttgaagccttagcagatatgcatgtcctattgagtatcgtttatat

SEQ ID NO: 260741 - DNA, 1637 bp, Cannabis indica
aaatggcagccatctaaaattttcataattcttggctagctttgaaagaatatgtaacactaactgtgtgaactatgctgataatgctttagctcttttgccttgcaagaaaataataaataacacaacactgttcacactaatcacaaatggagtcaaaaccattgtaacccttttccgacttgagatattgtcatcgatcgccaccaaaaaaatcagcgaaaggttgaactacggttccctgttgctggaaaagctttacgacgtctaccttgagagaaatcacctaactcttcatcgttgttcgatgctcgacttttatcagactttttcttacccttagaatttcccgcgccacttttcctgtgttcttttgtattattctctccaaataggacctgcttccttgctgcttcataatcgaatggctccagtttcaagccaccaccggattcctgagttctttctacttgtttcgttttcctatcctggaaacattgtttgaagcttgatgacagatcggagagactcattggttcttcctctttatctatcttcgagctggacaccactggattgttatcagcgtctttcaaggttgttcctgaatcactttttgattcctcggcatcagaattaacagtttgcaacattatgatatcgtccaatttagagctgaccggtaatgtgtttgcaggacgatcggaaactggaacttcaagggttgcaacaggtgcatccacaactggcttcggttgttcaaaggtgctggaaaaagaatggaatggtaagtgtactgaagctctaatttgctccaatgtggcgtcttccttgtcctgtaaacacgagaaacgttatgagaaccaaaacaaaataaaaacagccaaacaaatgcctcggcttggaccattcagagatgaagggaatatccaagagttaaattaattctaacctttttacttagatcagtctttttcttggggattttacttcccaggagtgcaccaaaagcccggttaggtttcttttgtgcttgtacacttacagcagaggcctggaaacaagaacagagtaaacataacttaactttcaaaaacatcaagaattaaccgaaaaccatccaataaagcatcatcaagaatttaccttttggtaaaactggtaaagaagtactggtatttctgtcttctctctgccctgaaacggcaagaccctccttcggaaccccagagtttccattgcacaatagagtgctaggactattatccattacagtgccatcagaggtgctttccacagtggctattgcaatttcagatgcttcagggtcgtcgtcgactactacattttcttcagatgcctgcacaatttgacaatgataaaaaaaaccaaataattcttagaaaaaaaaacaaaacaaataatattttaactggtccattctcggaaatacatcaaaacattcaacaacaaggtattgttagctcatctgaattggaaatcgttactactgcttaccaaagcagcacgcccctctttcagttgttcagcaacagcttcaaattcaggagcctttagcttgttagacctaacgacgttaacaacagctaccaagcttctgctcaatgaatgagtgc

SEQ ID NO: 260742 - DNA, 570 bp, Cannabis indica
acaagtgactattttcccttataggtatggtaaataattatttatacataatttttaacattaaaaactattcgaaattttctaaaaatttacaaataatcctaaatagttacaacatacacaatcatcaaaataaatttgattatattttttttcaaaatgtctaaataaataaaaaaatctaccagaatttttaagtggtgtactatataaatttcctaaacgttatacaagttatcatcctatattatttatatacataatttctgagcacgaacataaataggataaaatataaacaaatcatcatatttctttcttcctttaatgactaaacaaagttattttactcttaaaaaaatcacgaatagcatcatattctccaaacaatcttaaatcggttttacaacgaagaacatgaggaaacattagcctaaaacaactttccataacgaacccaacggtcaacggtccagatatccacctgggcaatcgccacgtgtcattagtaatggtccccacaagcttcttcaaaacaatctcaaccgccaaacacgttccatgtaagac

SEQ ID NO: 260743 - DNA, 521 bp, Cannabis indica
gcccatccacgcttaccattttttctattattgattgcatgaactatttcttgggcaataagaatgttatcaaaaataatacgcccagaaacaaaagcactttggaaaggggagattattttatctaacactaatttaagccgattagctaggactttagaaatgactttatacatagtagtacaaagacttataggtcgaaaatcttttagagaattagcatgctgctttttaggaattaaaactataagagtagtattaatatcagaaaaatcaattcccttatttaagcaatctaaaatcgcattaacaaaactagctcctaacgtattccaatttttttttgatagaaaaagcatttaaaccatccaaaccaggagctctatccccagagagactaaaaacaacttttttcacttcttgagcagtataagggctagccaaatattcaacatcagactcatctaaagggggccctaaacaatcaaggattgactagtggcctcagcatcacaaccctc

SEQ ID NO: 260744 - DNA, 3151 bp, Cannabis indica
ttctctcatataatgagcattaatataattgtaacaactatatttcatactatttgaatcctatcatcaaattgtgtaacaactcttttattacactaataatatgtgatcaatacatgagttacaagtgataacaaattgtaactcctctccaagttacaacatgtaggtttcaaaagtgtaagttataaatcataggttacacatttattcaccatacacttaatatatattattcacataatatatttatcatattttaatttatacttattatattataaaataatataacatgtggcacacacaccaacttcaatcaagatctccacatcatcataagtgatgaacctggcatactcctccttatctcggcgaggaaatagcccttttatcactgcaagttgttgtttaagattaaaaaagataaaagaaatgagttagcaattattccaaacagttctcttgaataatttttctaaacatttaagaaagtgttgacctcatttttagccaacgacaatgagccttaattaaagcaagaagaataaataaataatagaaaaaacaaagagtaataaataaagaaaacactagtattatagaggttcgaccccgtgatagtagtaatagcctactcccctttcagttatattactttgtgaggtaaagaataaagtattccctctcaaaagctcttacaaggatttctgagcaaattactcttagatcgtgatttcactcttgagtgtcttttctttgattgatttttgtccatgaatagtgagatgagaccactctaattacatagtaatagttttctttaatactataagaaaataaaataggaaagtaccgtatttctataattacaatgaagaaatgagaaaatctaggttgactacctttaaactttgaagatatgaattcatcccacaaaaatagggattatttcgcgacatgcaagcttaaagatgacatcgatcacctctgatatagccaactcacatctcctggtcggtgcatgcgagttgatcacgcgattgaactggtcggatgtccattaatgactttgttcgaacatcctgctatgtatatatgactttgatcttcacatcaatctttgtgggctgctaggggtaaaatcatccccccaggttaggaatgtaagacacgtgtcactcaatcaagtgccatgtcacaatgcaaaaattagaataacatttgtcccaaagtctgcgcaggaccttcttggtcgcacgtggacttcattcgaccaagaaactgtctagatgggtgatatgtgtctggttgttgaagttgatcccacattacttgattgaggatctcttcaatgtctaaggcattaaatacctcttgaaagttgtacctcaagttacgcactgacagtcaagtgataccacatgcatgtcgtgtgtactttcataatgagtacttaacgttcactttttggagggggatccccaaatttgaattttaaatatattaatttcctttttcaagtgcctataaaatgagatttaaaccttcaaggaatccttttagccattttatccttgaagaaccaaagcaaaattttcttcgtattttactctcaaatttttaaaggaaggttgctggaaaagctattgatgataccctctgagcatatcaaaaaagcttcgaacagtgagtaggttgcttttccctttactttatgcaatattcattgaatctatgtattactttttgaatttcttactacgaatttatttgttcttgaactgttcttgactgatcatagaatagatgaatttagggcttgtaaccttgactaacattcaattataacttctgattctgttattgtgtatcatttttaacttggaatcattcattttcacccatttttaagacttttagatatcttttaaggttttgaacttttgggtttgggaattctattcttgaacaaaatccctttttttttatcttcaatcttgcctggtcggcatattaaacttgttttacaactttccatccgtctaactctcattttcttgtctcctatctttctatagatgaaccctgatgatttttagggatgcaaacaccatatcaaccaggacctactccaactcttatatgaagatcatcctcgactccatgcaagttcatcttcatccagtgacaatctgtcgaattctagctttaaagattaggaagtgagtagtgagcacataccgtctccggagcctgaggtataacatcactaatacccccgaccagatacgtggagaagggtacgcgaattttatctaggaattaaagaaatattggaggcattatctacatgcttcttggacgtacagggtctagcctggtgttactgacactctgcccaaagcctgcccgactctatttgctaagggagtcattatttctgagtttgttgtaactgttgcaaggcatactgctgaatcaaagttcccgcccaaatgtagaattatggtgcaaaaaaagcagacaatgtaagaaagcttcaaaaactgatccacactttgctaggttattttttgcagctggtgtggagaaaactagaccttcgactgaagaaggaaaaattgttgatgaggactgtgaagtccaagaggtggaggaccagggcgaggtccatcctgctactattcccaaagctaagggagaaggagaagggaaagaaaaggaggaagaagaagcctatgtacttccttttgttgactttaatgaggacgaagatcctctcttcgaggatggtgaagttctagtaactagccaggacaatgtcgaagaagagtacactgaggcccgaactataaacaatagaggtctgaggggtgctcagtgggtttcaccaccatctgtcctaacttacgaaagattgaccaatctctacgatgatggtcttctagggaaggtcgaggctttcctcctagtctcgggcagttagcgacaaatcttagagatgaattttttgcatggtcgggaccacatgctaagcagggtgccatgtttccattgcattcgtacttcaaggagattacgaattattaccacatatgtgttgggttttatgccctaaataaaattctatttcaatgtaatccagatt

SEQ ID NO: 260745 - DNA, 623 bp, Cannabis indica
aatattgtgtattaaacacatctttgattgttgaatatggagatgtctcaacagaaacttgattgtagtgatcccaatggcaagctggaacaattcttctttccgaagtcgacaagatatgtcttacgtcgatctcgggtatacaaaaatcttctcacatgccagggttatgagcctcgctcctgttagttggataaaactataggaggtttccttgtagcgagatggtcatctcacattcttgttgttcgagtcgatccgacttttacacatagtttgctttattgcaatctaaagtatgtgttacttttcagtgacatatggtttctcgttaatacactaagtgctggttcatacattcattcctcgcctaagacctcacagccagcgggttgcaaatatactctaatacttacgtaattaatgagttatttcataaaaagatattacacagatttacattccctttaccttgacacgtgtcctccagccgaatttcaggtataataataagtattattgtaagtgttttattcttagtaacgtccatccgaatagtggtggctaagagtaggacttacaaagtatgaaacaatggtagaagctcatgaaataggaatgac

SEQ ID NO: 260746 - DNA, 2793 bp, Cannabis indica
aaaataaaatcacttaacacaagagatttgtacgtggtatcagtgttctttcgaacactgctagtccacgggacaacgcccagagaaagaaatcaattaataaagtatcaacaataattgacttaaacaagtttagactccctctaaatctttgtcccaattctttgtaatgcatatcatgaatctgatttcagaaccaccttcaaacagcgaactcccttcgtctttgaagtgggagtgcttacttcctcccgaagtaaggcttgcacaagtcttctcccgaagacctttctcttgttcaatcaagatgttctaaccaaccctaagaccaatataaaataaatagctcctccaagtgtctagattctagatgggccctacaaatcaaaatgaatataagctagtgtttcactagaagtgtgtatacttatgttgaacttttttatgtttttatgtagcttttaccaaacacacatttctcacaaaaaaagttgaccactagctttctttcagaactccttgattttctagctcattcattctcctttcactaacatgaccacaactttggtgctataagcttgcctaatcttgagcctttgtacagtttaaacctgatgttacaacatttgatattgtagagattcaacaccagtgattgtctctcctagcaagtagtaaaagtcatttcaaaattcacccttcatgataactagggaccctttcatgagttttaaacaagctatcatcaatcttacccgtaaaacctttagtagttagtgtaccaatagaaagtaaatttctttctagttcgggaatgtactttccattggtgagtgtactctaaatgttgccatgtattttaatgattacagacccagttccttgaactttataagccttattttcaccaagcaatatagttacacgcgtcttttcttcaaattgactgaataggttcttatcagaatgcatatgaaatgtgcaccctgagtgcaagatccattcttaacttgtttgatctacactatatgcaattaaaacatcagtatcagagataatgctggattcacctctctcctttgtcattcttatccttattattttccctattctgtttgttcatcagaaaataacacccatccttgttagtgttatctcttttatagtaattgcataatttaccattcttagaccttgattttgatctatttcctccatggcctcgattcccgttcccattttgattgtcataatgtactttgttcttgttgttggagctctcatggcctcttgaacatattttatcagtttttcctctgtatatttcttttgagtctcttttgaatttagtgtttccttaatttctgacatagtcaaaatttctttgtcatatagcattgtatcaaaaaagtgctcatagggtttagccaaagagttgagtaaaataatttcttggtcttcttcttcaatcacaacaccaatgttcttcaattttaagatgactttattgaattcatccatgtgctttttgggttccttattttcttctattctaagagtatgcaatctcttcttcaagtacagattattttccaaggtcttcttgaagtagattgatctcagttcctgccataatgcactagcaatttcttcatctgcagcttgtcaaagcacttcatccctaagactgaataatatggcactgtgagagccatggtttcaatctattcattcttcttcttttctttagtcaggctcacaagttttccaacatcattggcttcgggtaacccttgttgcatcagtagaaccttcatttcaatcctccgtggactgaaatctttctccccaataaacttctcaacttcaaactttttagaattcattcttgataaatctttaacctttgaatgtcattcttgaatccacaatcatcttagctctaataccatttgttgtgatccaaaatacaaataataatgatagatcaattttaatacatacacaaaattaaaaatgaataaatttcaacaaagattaaaacttaaaattgacaaaaataaacacttagttttacaagattcgatcaataaatatggtgtccaacatttactcctctaggaaaaacaatcattgatggctttggcatctttattgcttattttgatatgtaattatagagtttgtattacaaagattaataatatatggcaccaatgatacaaatcagttcttcacctggacttttgctccaagagccttgttttagaaagagagatcagttttatatgttgtgtcatccaattctagtgtcttaaccctcgacttccttatatatagcttcgtacatataggagttgtgtttgagagcaatggtattaactaccattaagctgatgtggcatgcctatactagacttacggaacttgaaccaatcaccacacaaaagtcatgtaatatacatgggcacctaattgatattagagtattaccaaagagcatttcacatagtgcaagtataatataaaatctctaatcacttgtaaagatcaatcacctccttattatgtggtattgaatttcttgtgagatatataataaaaatgagtcaagggtaatttggcaaatttttagtccaattacataaaatgaacaaatttttggtccaattagataaaatgaaataattaccacttgattccccgtttatttcttattgtaatccaaatcttgtcaatggcaagcatgtcatgctaacacccttcacgttttttgttttgttttgtttt

SEQ ID NO: 260747 - DNA, 681 bp, Cannabis indica
ttttttcaaaatccatacacttatcatcttttttttcactatctttctccttaagttctcttactctctccattaacatgtaaattttttattttatttcttgttcagttcttcttcttcttcttcttctcattgttttagtttttctaatttttagtcacacttttggggggaaataaaagagtggttttttttttattttgattttccagatatattcttgcaaatatagcttctggtacttcaaagaacactaaatcaaaaaatactctcaatctgtgttggagaactccgactctaattttgagtttgagccaaagttccaaagtctcccaaatcaaataaggtttttttctattgatcttgtgttgttttagggtttttgtcaagttgattatatttcctatttctttttttttttgcatggtttttttttgttagtcttattttatagttttctgtttgtttgtgtcttgttgttgttttggttttattttgttaactcttagggaaagggtaaataccaagtgaagattgttcaatcaactgatctgtttgaagacataattaggaaaagggttgttgaggtgtgtcatttcattattttagttttaatgtttttttatgcttgttttttatgttcttttttttgtgttgttttagtagtgttttcttatgttt

SEQ ID NO: 260748 - DNA, 1734 bp, Cannabis indica
tacaacacatgtacaccaatctagtaacaagttggaacctagatctgctaaggaaactttcctaggttatgccttaggtaccaaggggtatagaatttgcatttccaaaaggagtagaccaaaagtagcgattactagaaatgttattttcagttagaatacctcacttgacatctgagaaagatagtgtgtctccttgcgatgtaggaaaaataggaaacaaaaatactacaagcgtggaatgaattacgaaacaaagctcctagaagaatgttcatagacagaagctagtatggaaccataagataaatgcgtagacaaaagcatatgcgcagctgaaagataatgaagaccaaactgaggttccaaaaggttttggatagatagatctagaaggttatcagttagcgtgtgataggactagaagagtgattcaccttttggaaaggtttgtagagatagaattgattgcatttgcactagtagtagtacaacaaatttaaattgaagagcccagaagctacataaaggtaatttcaagttgaaacaagtcaaaatggcttcaggtcatggacgaggagatggattcactccgaaagaacaggactttgggttgttgtgttgaagctacagaacaaaaatattgtggagtgcaaatagattctcaagatgaatcgagggaatcaatgagaatgaaccaatgcagttcaaagccaggttagtggctaagggctttacttaggtagaaggaattgactacactgaaatcttctcacctatggtaaagtagaagacaataaggttgatgttgtttttggcagtttaaaggattttgaagttgaacaacttgatgttaagactgcttttttgaatagattcttagacgaagagatctatgttaagcaaccacctaggtgtcaagttgaaagaaaaagagtttaattggtatgcaagcttaataaatctttatatggtttgaaacaattcccaaggcaatgaaataaaatatttgatgcttatgtgcaacaaatcaggttcaaaagatctacatacgatcattgcttatattttaagaatctagagcaatctacagtcgtgttcttattgctctatgtgaatgatatgctcatcatgagcaaaaataaatctatgatcaaaagtataaaagccaaacttaaaagagaatttgaaatgaaagagcttggaccagttcaaaagatacttggcattgaagtctcaaagaactacaaggaaaggactattagcctaaagcagtccaggtacatcaagaaaagttattcaaaatttcaacatggaagatgtaaggagtacatccgttccgttagggggacagtttattttatcgaaggaacagtgtccgaataattcaaaggagaaagagaaatgaaggatgtaccctatgatatggtcttaggatatttaatgtatggttagcactagaccggactgctcacgctctagtatcctaagtcggttcatgtccgatccaggcattgaacattggaaggtcctcaaatggttattaagttacttgaaggacacttaggattatagtctgatctatgagaaagtaaaatgagaattatagttaaaagggatcgtggatactgactatgcctcgaatagagataccagaaaattaaccattttgttgctaaatttataatcactatgcaagtatacgcaatcaagtagtaaactcacacaggtgag

SEQ ID NO: 260749 - DNA, 975 bp, Cannabis indica
tgaattgaaccaagcctcttcacttctagttacatttttaggccaaatacaagttattctattcttaatcacatctttaactttgcacacagctttatcacaatttcctatctctccattccacaaaatattgtttcgggtgcaccaaatcaagtagatcagagcagttatagcagcagatatacctttttttaaagccattgtacctagccttggacagccacctgcaaatggtttgcagagatacagccgtgacctcccaatgcagccactctttaattttgaacaggcagtttttcgagaaaatgcagcagaagaaaatgtgctcaatggtttcactgctgtccttgcacagtaggcataagtcttcttctattactccaaatctcattagcctttccttcgttttcagcttcccaagcattaccaaccacgcaagaaaactatgcttgagaatattgagccgattccaaacaatcttgtcccaatgaactctaactagctgatcatgtagagctttataaccagcagcaactatgtacctgtcttgggtcgtggctattaaacctatattcttcatttgatcttttaccatcaccactttcttccaataccaactagcttggtctgcagtttgatatgtccaccaatcctcatccttgatgtagacattatggacccatttaacccaaaggttatcctccttcttggcaatagcccaaacatatttgaaaagggccgctttgttccaatctgaaatacatctaaatcccaaacctcccgaacattttgtggcaaaccgatgcccaagcaacaacaggtacacctgttagagtataatgtccattccatagaaagctacgacaaatagactcaatttcacttacaatttttttaggcagcaacatcacttggcaccaatatgaatgaatggccatgaggactgagtttgtaacaccctaactaaaataggcg

SEQ ID NO: 260750 - DNA, 559 bp, Cannabis indica
tccatttccatgttatctattttattcaacatcaataaaaaatagaagtatttttcactcatttgtgtatgttttggttcactttatctaaataatcaatagtttaaaaaatcaattttaatgtattaactcataaaagtggtcacatttataagacaaacatttactcttcagttagctcagagcattttctacttcctctttcagtacccatgctcattccttgtctaaaaatctatttttttgctatactggacaaaatttgcgggagtctatgttgagggcgtggtaaatcacaaatgaatcaattccaaccatgttgtcatgtgaccatgcaaacacattgaggtttgctctcaaaatttgatcaaagaaaatttgatttcttgcaacaaacctcgtcctatgttgataatttgggttggcatagatgggtcgtgttgggtttgtgccctaataaaccaattacaatgtgattagttatcaatctaagaaattagaagtgatttatgtttgcatgaattttcacgcttatggtttaattgttgggttttatgcc

SEQ ID NO: 260751 - DNA, 1013 bp, Cannabis indica
cactgttgtgcatgtgtgtgtgtgtgctgagtttgtgttgtaggaatctacaacagtggtatcagagcaaggttcttggaggatccaagactcaacactaaggttgccaagaatcaagaaagattgatcaatcgcatcttcatcaaccagattcgacttggaaaggttcgatggttcaggagattttagtctatggaaagaaaagatgatggccattctaatctaccagaaactagactccgcattggtggaaaggattgaaaagtctgaaaaggaaggagatgcatctaagaaaggtgaagttgaaaccacaatgaagcaagcaagatcaacaattattatgaatcttgctgacaatgtcctgaggtaagttataagggagaagactgcactgggaatttggaaaaagctggagctactgtacatggcaaagtctacagccaccaagattttcttgaaaggaaaattctatggattcaagatgaatgccactgttacattagagcaaaacttaattgttctctctctaaccaatatgggagaaataatcagggaggaggatcaagctgtgataattttaaatgctttaccaaatcagttcaaagagatgagaactgttataatgtacagtagagatactctcacacttgaagatgtaatgagcactcttaggtcaagatatgttgaactattaactagaaaaaggctgaaaaacaagaaaccagaaatgatgaagccttgatgattcgaggaagacaaccaagaagaggaaattccaggtttagggatcaatccaagtttagaaattactcaaggcacaaaggaagcacaagatcgaaattaagaccaaaggaaacaagaaaatgccatcactgtggcaaagtttgccatttaatcagaaattgctgggaacttagggacaagaaaaggcaaaataaagatgaagaggataaaggaaatgacccaaatgttgttgttgatgatcactacagttcagatggtgatgtttttgt

SEQ ID NO: 260752 - DNA, 1835 bp, Cannabis indica
tcctccatgagatgcacttaaatgccttcaattgagcatcgaaaaatcgatccatacgacgatccaactccatcaacatcttcgcaagctctgttttcttcatggctgagagttcttacagtgaatctttcactataattgctctcaatgaaagcaccaattgttagatattagtcctcttcgagacaagacaaatctccgaaatgcactcttcgagtcagtgccaaactcccaattgaaccaaagttctatttactcaatccatatcccataatagctacacaattacatatttatagtgattcacactctgtagaaattactactacccctacactattttatagtgtaacaatactaaagtacgattttgtataaattgattgggagtctaaattttgataatatgcatattttaagcatgcatagcatagtgaaatttcccctttatttactaattatctttgagaatttataatttacttcctccttagggtatatttacacttgtgtcaatggttagttttaaattggcaaattactagtaaggtggtgataactcctgttacgttttttaaagataggcaacttcttttgcaatacgctatcagctacaacaagctacaatatttatcgcaaaaaaaaaaaggtgactactcatctatcagaatctcattcatataggtgagataccatatgttacatttccggttctctactgagacccaatatgacatgatctaagagttaaaatttgacccataatgtcacaaaacattcaaatcaatagtctgagagttgaaattgaatacgaaattaaggtcagatactgcaaggagagacctgtctatgctccatctggctggataaaagggttggcaatctcatctgtaccatcagttggagacacaagcatcacagcagttcctctacaaacctgtggttatatatatacacataatatttgtttagcttatctccatttttttaaaaaagaaatcaacagattaagatatataaatagcagcaaaatacatactattaagccaaggcttctggtctgatcagttgtctttaagggatcatcagcatctgcacattacaggaaacttgaagtcaacatgcagttaaccctcataagccatgcatttaagcaagaaaacagcttaaaaataagttattgtcaatacgatttggttctgaaaaaggtacaagtgcaaaaaagaggtaaattgattccaatttcaaaaccatctctgaaagatttgatcgtgtcactccacaaaattgttagagctctaaagaaaaagaaaattcacattgttgtttgaaacaattttctgttgtctcacggatatagcactacataaagaacacagcttcgaagttactagattcttttacttagtttcagttacaacaaggataaacacaaatatcaagaataacaattaacacatgaaattacattaagtacacatgcatatagctaaaacagatacaaaaatacttgtgcagaattaccaacacatcccaaaacaattacctctaagaaattctactgcttcgtctagaacaaggttcaacagctgatcatatccttttaaagtccctgttactgtgatcaatcacaaaatgcaatgcataatcagacattcacagcagagcagtcataaaatctcattgaacaagagaacatacacaaaataaaaggatgtatgacaacattactttccccttttaaggaaagtctagatctaatggttaaatatgtgagtgccaactgcaaatgatttgcatgttgtccagataaaaaggcaatatatctatatatg

SEQ ID NO: 260753 - DNA, 1277 bp, Cannabis indica
tatctttctaagtcaatatcaatggttgatctttggtctatggatcttaatccggatattgttaatttcaacgtagctgtattatttatgttcttcaagttgttcgtggaagctaacctatggttctggcggatatttacatcttgggaacatggtagttcaattgagtgggagcgctgatgatagatatggaatctatagcttctataagtatttagaagtgaaacaatgatttcctttgagcttggctgaatagagataaatgattgagatctcatttcagtaattatgttagtttactgaagtatcatttataagtagctaagtattttaaggataaaatacattgaagggtagaacgaaaaatttgtccctattaagtgtagatcatctatagaggatctttgactattagaattgtaacaatggataataaaaaaatatctatattgtggtatatatagagcgttctatataattgagagtgctattcaattccagatctatagtggcgcaaggcagaattaataagttagagaatttacttactgaattctagatctacttacttaaagctcgggtatataggcccatggtcacctcactaattgagataatactacaagcagacttagttaattaattttaattaatcaattataattgtaattctaaaattagactatgccttatttatgaattttcactaagcaagagcttaattgtgaagaaaacaggttttagggtcaatttattaattaagagactttgtatggtataatgaatggataatataaatgacaattttatttagtaattaattgtaattattaaataaataattttggcatttataggattgaattgaaaaatatggtattattgaaagaagaataagtggttgaaaaagtggccaaattgtcactagagattggtcctttagtggccgaccttagagtttattttgcccaatatttattctatttaatccatataaattaggcctaagcccttgtggaaacactataaaaggaacattatgctctcactcatccactttttaactcttgtcaacttgactattcaaccaacctaaatgagaaagttccttccttagtgatttcagcttgcttcactgttcttcaccttattcgaacactactacaaaaatggattttctcgacgtttttaaatagtcgtttaaagtattcccgtcggtttctataaccgtcgcctatacgatcgtcgtaaaacaggcataataggcgacagttcaa

SEQ ID NO: 260754 - DNA, 1822 bp, Cannabis indica
tatacctgtaaattaattatgaagattagagagattaataataaatctttttgaaagaaatatgtctggagcttcgatttatatgtttattttttttttatttaaatatatgtatatatatagttgcatgatataataaggtttccaattaatatataattttttttaatgtataagaaaaagaaattatatacatgaaaaggaagtaacaaagcttaattatatccaaagcctttcgtgtcactaaaagggaaaacagaagaaaaacataaaaagtgagattctgatttgtatggacatttggtcttatggggatatcaaataataaggacttatgataagtttaaccacaaatttttgtattgaagatgattcctaccaccaatatcagttgtctatataataacttgggcctatacataattttttttttgacccatgcattggcagactacttgtatttcggctttgatttggttatgttctcttgatttaagacttagtgacctttcatgttttggaatattgttcacagttgttattttttgtgcagttaaaaacccatgtttgcctcacttatatcaagtgatatgtctagattctagagccttactttggcttctagttccatggtttttattttaacactgccgtatatagattttttttttaataaaaatcatatattaattactaaatccgatcaaaacaatagaacgcatttcggaggaacagttctccaactgaagcacacgacctgtacagaaacaaaagtcttttgttaagcaatgagccaacttatttgcagatcgttttacaaaacacaaataagcaaattaaatataaagccaaaagaaaattttgaacattttgaacaataagattaaactgtgaaaacataaaaataccactctcaatcgcttggacacacaccaagctatctgtttctaacatgactctatcccacgaatgagttgcaatccaactcaatgcttctttaatgtccattatctcagcaatttcgggttgaacacatccaatctttcccttcttgaatgcttctaccatagcaacatgatgattctgagctatacaacccatgccaaaagacaagactcgaactagaaaaaacttaaagcaaaagactaaaaaaacatgtcaaaagacaagtctaatgggaaaaactaaaaggaaaagactaaagaaccatgtcaaaagacaagactaatgggaaaaactaaattagtttcaacacattaacacgatcacagcaaataaaattaattaaggaatgtactccttattattctaacccaataaaacattaaataaaactaaactaataaaaagtgaattaaaaagtgaaaacaaaaactaaaaaagagagcagcagcaggtgccggaaccgaacgaatctcaaacggtggccatgatgggcggcgccggccgacgtgatcggcggaaggttctcgactcccaacaagaggttgtcgtcgttggtcgcagcatgttcaactcacctgtgggtatcacagaggttcacagaggttctttccctgtggatatcgcaccaagagagagaagatattttcgccgtatatagattattaagtaatatattaggtggctcaatatggggttataatcatatatttgacttttataatttttttaataaaaaaaatatatattcaaacatagtataaatttaccttactatattgactaagaaaaatttagaagaaaaataatataataattaataaaaatttatataagaaaaaaagaagaatatataacaacccaaaaaaaattaaattta

SEQ ID NO: 260755 - DNA, 846 bp, Cannabis indica
ttttaaattatattttttgttttgtttgtacctattgtaaatgtttttgtccttcttatttttttaacctcactcttttttttcatttttcttaatttttttttactccatgttttgtttcaattttcttaaagtcttttgtacatttgtaccacttttcttctccggttttttttttcaattttatttggtttttttactttttatttatttattaatatgagaagcttagagctaaaaacaaaagaaactgtttgactgagttgctggcttagcaaagaaatcagttgctgacattgggatgtaagatctgcaacagcaggagcagcaatggtgtgatcaattggattgcttgtagaagcttgattgacttgagccatgcctttgtcgtttcttttcttgtctccatatcctggtgggaagccgtgaataatgaaatatttatctattaagtgaccaggcttgccacaatgggaacaagagggtctgggttttttgtttcttggaggattagtagatagtgggcgaacagagaaggcaaggggtgggtttagaggaaccaagtgtgtgttggcgttcttcttgaacgatcatagcaaagactcgagaaagatttggaataggttcattgaagagaattttggcacgaacagaggcataagattcattaagcccaataaggaattgaaggacttggttttgattgtagaaatcaagaaaagccttcatagcaccacaggtgcaagtagtgcttggctgaaactctttcagctcatcccatagggattttaatttggtgaaatatgaggtggcggaatgatcaccttgttgcaaccgagtgagttg

SEQ ID NO: 260756 - DNA, 736 bp, Cannabis indica
atcgggtctccagggtcgccgaacctgaaaatatttctatttcacaaatacctcatattatatccatgtatttcaaataaatctccgtaattaacaaattacgcttatttatcccctaatcagttcttcaaggtcaccgaacctgaaaatatttttattccacatatagctcatattacattcacacattctatataaatctccgtaatttataaattacgcttatttactcacttatagcaaaatttaaattttatgctgaaataaattagtaggatcataatcccacttattacatgattaacacataatataaatgtaaaccctaattatttactattagacttatcaggatattgcactcttggtcagggacatgcatttttatctagttatatctagaataggcatccatgaacgacacaagctcgtgtccagcagttgcatccactaactggtcaattcttggtagtggaaaccaatcctttgggcacgccttattcaaatttgagaagtgtatacaagttctccaagttccattttgttttaggacgagaacaagattggatatccatgagagataaaatgcctcgcatatacagtcgttaaccaacaacttatccacttcctacttgagtgccccttatctctaggtatccaagggttgtctcttttgtctcttagctgggtaatttgggtcgaaattcaagtggtggcagataatgttagggtcaat

SEQ ID NO: 260757 - DNA, 626 bp, Cannabis indica
aatctcacttatttgcgtccttgctgttttattgcttttttcttttagagttgtctctttcgtcgagatgacgcttttagggcatagggcgattcctgtttccaccctcagcgttttctcctttctcttctctttcttttttattttcctttcctccactgtcactgcctttgggattttggcacccgattcttgttaaggaaagtccttggggtttccttttttggcaagcatccggagggggcctcttttcaacggttaggggacccccattccctttttaacattagggtttggtttggggcctaactgttggatttctaatttttttagaaaaaatgtctgctcctacctctgggacgaaatcttctaagaaggaggcggccaccttggccactctagaggaagtaatgaagggccctgttgcccaagagaactacacttctcgcgccaatagctgggaagcggatgagcttcgttctactttggtttgtgctcatcagctcgagaagatcatgactgtggcaggtatcaagccatctgcgtccagggtctttcaccgcttgcctcgagacgaagagacgcccaatcacaactatggggggttcggagcttggagccaaacc

SEQ ID NO: 260758 - DNA, 675 bp, Cannabis indica
tttatccaaaagacaatcttaagctctcaagtccctagctccaattgttttagtccaatcttacatattactctcacttataccatcaaatggttaaataattatcatcatcgcattctacattcaaaactgagtccaacgacatataatatgactatatttaaaatttagggttccgaagcctcacctaagcgatgcacattaacaaatcggtgacgataaaaatcggtgtaccggaaacgttgccgaaaataggcgtagtgtatatcaaaacgaccacctcgacgagtagatcacacccaggccaactgtttgtcaaaacggtacacgatgtcaccggaaagtcgctggaaaggggcggagctacaaaaatgtcaccggaaaaagtagcgaatcgggaaaaatggtttagactaggttgttctcctcgacgagttgagtttagtggtgaaaacctctcatcaaacggacgctagaggtgaccaaaaaatcaattcaaagtttggaaccccaaactttgacttgcgatcccgagctaacagtggcgaaaggagcggcgacgcttggggggtgaggtcgccggcacctagagttccgttttgtccggcgtgtggggttgggtggtggccggaggttggtcatcggagtgtggtggtgatggtggtttgtgggttt

SEQ ID NO: 260759 - DNA, 1095 bp, Cannabis indica
tgctgttccggaagcttatccttgatcttctctaaaatcccttctcctctgggttctactgtttttttcatttttcgacgttgatttgttagtttttatctctgttgcatgaacatcgtcagtactgttcccctcctttttccccgaaatcctttccttaatcttatccttcaaaccccttcttctttctcttctctccattcccatcttcctcatcactactagactgcaaaatttcatagcagtcacatatttggccgactaaaagcagaaaaaaaaacgttataattaatcaatgttgctgtatcttaccgagctagagtcagcatcacgagactggtgatgctgatctttcttggcaacttcctcttgaggctgctgcggcttgtcgttttctttctttttcaaaaaatcaaacatcccacatccggtatcggcagtctcacctccattctcagcctggtgcttctcggccattgtatgctaacaacacaagcaaatgaaaaatatagagataaccaatctagtaataagaaagctttgaacaataagtgatactgattagtgatttgataatggatatgatttaagggagaactatgtggtatttatagggagaaatcaaggttaatcgatatcaaatatgagggagcacgtgcacagctgacatggtaaactatttggcaatatagtgaagtaaaccaagattggtcggtggtgggactgtgtttgcactaatcaagaggtaatttgtggtttgctaatgtactcttagttttcgagatcataaggagttttgtttttgttaatgttatgattgtacgacttcatgtgcatagaggattcttcaaaattttcgcatttaaaatatttcattagcttatatgttcttgattaatgagtaatgacattaatgacttggtaccatacacagttgtcttgatattaagtcgatgtctaataaaataaccaaaaaattggatactagattttaaaactagaccaaatcatagatatgtgagctttctttagtttggacggtggtagtaagtgcatgaaagattattagtagtatcatgatacaattaccaattg

SEQ ID NO: 260760 - DNA, 672 bp, Cannabis indica
aaaacaatggataatcatagagtatcaacatttggtatatagagcattctatgtaatcaagagtgtaattttgaatctatagtagagtcaagagtaattaataagtgagaaaatttacttggttaattttagatctacttattaggagcttgattaaataggcacatggtccccacattatctgggataatatttctttgtagactcaactaattgacatagttaattaattagaatgctaaagaagaatatatctgatttacgaattatactaaggaagggcacatgtgaagaaactaaaagagaaaggtttacttattaaataagaaactttatggttgtaattaataaatatatttaaatagtaattttgtttgataactatttataattactaaatagataaaattagcatttaaataactaggacaagaaaatagtaattttaaaaaaattgagaggtttcattgtatgaaataaaaattgcaaaatcaaaccccttggatccatatgggtattcaaccaaggggagatttttagggctattctcctttcctaaatagcccattataaacttaccctaaacctaaaagagaaactataaaaggaggcttaaagctttgattcaagacagacattgcacttttcaattttgacaaacaaaaaagaaaa

SEQ ID NO: 260761 - DNA, 1202 bp, Cannabis indica
ttttattcagggcacaaaacccacactttcttgatagacttttcaggaggcttatcttcaggagtctcttctttggcttttactgtttcttcaacctcaagactgattgacttgtcttctacacccccattaagtactttaccactcttcagtgagatggcattacattgttgtttcggattgacaactgtatataactagggaaactactattttttttgcaaagcactcacaacattggccagttgtcccacttgcccctctatgctcttcatggaagcatccatgttagaaaaatgagtttctatgttgtccaaccttgcttcattcttgttaaacctcttgttgggttctatcataaaagtacccaaaatatcttctaatgatttcttttcaagttgttgttaggcattaaatccaggaggtggttgcaagacatttttagtgttaccataagaaagattctcatggtttctcaaccccggatggtagtagttaggcattggattttctcagtagttgttattgtaaggttatttgccacatactgtgcttgttctatactcatctcaggcccttgtggtgtagatgcagcaacaaaaatctctatagttgatgtattcttctgattaactaaggctgccttttgattagataaagcaaaaatttgagctgctatatttatcataggatctacttcatgtaacccagccacatttttgtgagtatttctttcattagtccaattatagctattagtggctatcttttccagtaaattaatggcttcagttgcaagtttagacaataacgctcctccagtagcagcaacatcaataatagtcctagttgacccattcaacccgttgtagaaaattgaaacttgtatccaactcgcatagccatattgtgagcagcggcacaataagtctttgaattgcttccatgcttcataaagttgctctaaatcaagctgtctgaattgcccaatctcacttctcaactgtccagactttgatggaggaaagaatttcaccatgaactttctggccatttcatcccatgtagttatagaccctggctgcagagattgtaaccaacttcttgtttaatcccttaaagagaaaggaaagagtcgtagtcttatggcatcatcagtaacaccattcatcttcacaatagcacatacctccagaattatg

SEQ ID NO: 260762 - DNA, 1037 bp, Cannabis indica
gtggacttcaaatcaaaaaaccacctaataacctcatggggagaaggcatatcccacttctgggaggcatagagaacgaagggggcagacagatacttaatgccctagggaatgaactaggtcagacagaggcggaagaagtctgccccattcttaaagtacgggtgcaaaggcaacaatgccccttgctaggcatgagcccctgaccaggcgcacatccccctttcagggtttgtgcctcgattattgtgggcgggaatttaacagtccaattcgcccaggtagccgtcctagtcaataactcgcaggcgcgcctcagtaacctaggacggagggctcacccacctagcacccaaggtaccttgccttctatgaggaaccgcggcagtaagttccccactgacttagtccaggccctcaaccaggacatcgccatcagcatcaactggctcgccagcctcattgtatcccccatagtttgggggtgcaacatcttcctcttcttccgccttggagggactgctaggacagacatcgtcttgctcctcaatctccttgacctcagcgtccccttcatgatcccccctccccctctggatggctggatcttgttcggcggtggggaaagtggcgtgccgaacaacttaagggtcagatgcgtcaaccttgcgcattgtctttttggtacgagccatcattctatggctggacgaaagacttaaggaagaatgcctttcactcgaagaaggtgggcaagaacagagccgaggatggtcctcgtgcaagagttgaagcaagtcctggtcgattcgatgttcgctctcccaaaactcacctgagttcatctaaaaaagacaacacacaagatgagtgtctggtcagaatatcgaacgtttaaacaatcaaatatgccgaccaggagtactaaatagattaaagaataagaatattcagtgaaaagtcaaaacctaggaagtttgaaattttctcgagttagggaaaaaaatttcatgaagcttagaataagtaagatgaaa

SEQ ID NO: 260763 - DNA, 525 bp, Cannabis indica
ttccacttgtgcctgaagtttccaacaaagaatggggtagggtgtctgagaggaagcacaaacaagggaaaaaaatatttccaagtagggagcttcccaaggcggggatgaagatgtggacccaagcaccaatgttggacctatggaagaataagaagagatcgagatcgatccagatatcccggccataaagctaaagatcggaaaaggtatgttgcccgaagtaaaatcagcattgaaaaatttttagagcaaacctagacgtttttgcctggtcacatgcggatatggtcggaattcatccttctatcatttcacacgtcctaaatattgatcccaactttccgccagttaaacaaaacgaaggctattggacaagagcgagcactagccctaaaagaagaagtagaaaagctacgaaacaatgatttcataattgaagctttctagcctgcttgggttgcaaatcccatactggttcccagctgaacaagaatgggaagtgtgcattgatttcactgacct

SEQ ID NO: 260764 - DNA, 865 bp, Cannabis indica
aagaaaatctattttttattagaaaataattggtttgattactgattaaattatgagaatcaatataaacataaatatttttatatacacttaagtggattctgaacccttaataatattcccaaatataactgaaaatatctgttactgtcattttactgtcatttttaccgtttaaatattttattttattttattaccaaaaacctcaccattttcggaactaggttagagttgtaatagcttagattaaataagtattttcttcgatctcacgcaattcccatgggttcgacctcgttcttcacaatctccatactacaataaagattcgtgcgcttgcgagttgataaatgtaaaacgtaccatttcggtatacaacactccactatagactcgaaattttattcttgactacatacaacactcaatatctaaactatagatatatgatgaaatatccattgttataattaagacaacaattaaccctatatagattatatacattaagtatggagaacatttgtaatcactgcatacttagtgttgaactttgtgcccttaataaaactctatttcaatgtaatcttttctattcaattatcaataaagaaacagatttaattttattacttgtttaatgtgctatttggttcatgtgatcatttatttacttatttgatttataaattcatccaaatccttatcacactgatattcttgtttattgtgttttcaacatagtggaaagtaatcaagattgtgtgattaaatgtattcctataattcatcactacacaaggtttaactgataggataatctacaacgtagtttacttgcactttggataagtgttatgtc

SEQ ID NO: 260765 - DNA, 1159 bp, Cannabis indica
ttccccatgtcaagtattaagaaaccagcagggaagatgaacttaccaatctttaccaaaacatcttcaattataccctgaggatgagtcaaagaacgatctgccatttgtaaagtcactgttgtaggcttggcttctcctaatttcaatcttttaaacatagataggggcattaagttgatactggctcccagatcacataaagctttttttttgtatcgaaccccctattgagcatggaatgttgaaactacccggatcttttagctagggtggtaatttcttttgcaggacggcactgcactcttcagtaagtgccagcatctcaaattcttccaactttcttttcttagataggatatctttcatgaacttcaaataagttggatttgttccaaagcctttatgaatgggatgttgatatgcagtttcttgaatatttcaagaaattttgaaaacaacttatccatcttattcttatgaagtctttgaggataaggaattttgatgtgatggtcaatgctgatgagaggtggagtttctttttgtggaagaccatcaatagtcttctccttctcttgtattggtgttggttctataccatcttcctcctttggcttgtttttgcttggcccagcataggtcttaccacttctcaaggtaattgcattacaattctcctttggattgactttagtagtgctaggcaagttaccatgagccttgttagtgttttgagcagccaactgccccacctgagtttccaagaccttaatggaagacttaatctccgtcatgaattgtagcaacgtgtctaattgaggattagaccctccactagagtcttgttgttgttgttgttgttgttgacactgttggctttgttgaggataaaacccttgtttttgctgattaggaaattgcttttggaagttctgttgacgaccataattattgtgatagtttccaatggcatgagcttgttccattggcaaattgtcgacatctattgggcaggtgttagtagtatgaggtcctccacacagctcgcagacaacttgagcttgttagacttgtgcaattaccaactttgttaatgcctccacctaggctgtcaacttagttattgttgggttttatgccctaaataaaactcttt

SEQ ID NO: 260766 - DNA, 705 bp, Cannabis indica
ttgtatcactttcaaataacatagaaaaaaactagcataaaatttagtatacgtgcctcgcacgtagtttttgctaatatatatatatatatatatgaatggttgttttatggttagtttaatttaaatttatggtttatgcttatcttggttggtctatttattttgtattttctgttttcagcattggatggtttagtagtttttttttcacaaattataatatgttcatttgttcttgttggacattaattgatacgatattttatattatcatataatatttgtcaatttattttttgaatttataactatataatattctagcaagtattaccatgaatgaatagtattaccatgaatgaatagtattaagaaaatttacatttttatatttatttttttttatctaattaaaaaaatattatttttacattatataaattgaggttgttctatctctaaaaaaaaattaagagaaaaaattaaaaaaaaaattaaattttaacttaactattttatatataaatatattttttaattaaataactaatatagaattaaaaatttatttattatttaactattaaaaatctattagtttaaaagttaatatttataattaatgtttctatatatatatggtaatacttttcaatactattacttaagtactaaataaatttaactataaatattaatttt

SEQ ID NO: 260767 - DNA, 1957 bp, Cannabis indica
ttgatgatcaaattagcagtactacaattagctggtccaaagagatattgactgcaattgatcatgatcagcatagtttaagctatgaaattttggaaagcaacattggatttcagtcatatgtttcgacattcaggatctatgcaggaggaagtgaatgtcgtgattgtgtgattgagtggtcctttaccgttgatcctgtggaagggctggcattagataatttggtcagaaaatatgatgtggggttacaacgaatggcacagagaatggaagcctcctttgaaaatttccagccacctcagtaattcactcttaatatatttatgttttatctatcaatgacttgccattaatgggatgcgtgtggttttatatttatgtattttccttgaaatatgatttatattgctctggttttcatttcatttatcatatcattataattatatataacatacctgtttagggaaatatcaataagccaacaagagaaccataggtcctaaaaaacataggaaagactcaataaacgaatataaataaagcccataaaagactaagaagatcaagattaggagtcgagatacgggaatcaaattagaggataacttcactggacaagtcaaagttatatccatttcagatcgatcaaagataattcccatctcacatcgttttgaggaagactcatatatcggtcggtcgggatgagtctcatgtctcagtcggttggtcggaatgattctcatatctcagtctgtcggtcgagaggactcatatctcagttgatcggtcgagatgactctcagttggttaattgggatgactcatatctcagtcgatcgatcgggatgactctcatatctcaatcggtcggtcgggatgattcatatcttagtcgatcgttcagtgtgactctcatatctcagtcgatcgatcgggatgactctcatatctcaattagtcgtcaagatgactcatatcccagtcaattggtcagggtgactctcatatctcaattggttagtcgggatgactcatatttcagtcgttcggtcaggatggctctcgtatatcagtcggttggtcgagttgactcatatctcagtgggtcggtcggggtgactctcatatctcagacggtcggtcgggatgactcatatctcaattggtcgatcaagatgactcatatctcattcatttggttaagatttatatgagatgacataactcagacagacataaaacataaataagatgtatgacttacatctaggatggaagatacaaccaaaaccaaaacgaatgacttaaatctaagatggaagatatatctaaaatggatgacttacattcaagataaagaagatatacaagtcgaacgacttaaatatcttatttaagaaagttacacatcatggataggagagatatagaatgtggacacgtaagataaaataaaagacacttgtcaaagtatctaaagacatctcataggaagtaatggatatatgtcaaagtaatgtcttgttaagttaacacctaagagtacaagagttagatagatacaagaggtagtgtaaaagaggggggaagtcttttgggattggaggaggcaaaggaatgataaaaatgaacagagtaaaaggttcttaaaaaataaaaattattgattggttttctgatcaatgataaactaattttggtctaaataataccatttttttttaacttacttgtgtgagaatattcaagatattatgttgatggacaaaaattgtgatgagtttataataggctatttacaaaaaatatgataaaataaaaaataaaaaagcttcatatttataaaacattaacttaatcttaagtgcaatttctttttatagattagtcttaattcaaataaaaattaataaattctaaggtaaattttcattttcatgtttttttt

SEQ ID NO: 260768 - DNA, 1015 bp, Cannabis indica
ccaatagcaatctctctaatctgttcatcagataaactaattaacgacccaaaagatatatacaaaacactgtttacctcttgttcatcaagccactccattaatctcttgtcttcattacaatctgttattatcattttatgtaaaggcccaattgcccatacctttcggtttaactttctttcttcgttttccaaaatctctatcgaagacccttcgatggctctgcaactgttgtgaagagacccagatttgaaatctgataccggaagtttcaattgggaagctaggaattctcgagagaaatctggtaaacacgactccattgatggaatatcttgacttgggattgggagattattactgagttttttattaatggctaaacccataaacacagagaggggatgaaaggagtaacattctgcgttgggaagagaaacgacatcctgaactgccgaactcattaagacatcgtaaacaacgacgagtcgttttgagttctgtgagagtgagctgagaagagcggcgattggttctcggaggtgagtcgaggcttggatcctgaggatttgggcttggaaattcttggttctggtgtcaagaaggagaagaggatcagtgggttgaggttgagggtggagaagtggtatttcgaagctgtggaaatggatttcggttgatgggtttgaggatcgagatttgagttgggtaatatggagagttgagctaacgtagtggactgggatgttgtatgaagaaatgacatggctgagttttagggattggtctagatgactttgagctaggaatggaaccattaacaccacaactgaagatgatgatgaagaagaagtcgccattgatgacgtcattcttcacagaaagtttctgtaactgtcaaagaaaaataaaaataatagtttgagagaatttcctttataacattggattgaaagtgaaatgaaagagttatgtaaaatatcttaatactatacactatctataatcataa

SEQ ID NO: 260769 - DNA, 1545 bp, Cannabis indica
ctttggtaagaaagggaagcttagccgaaggtgcattggacattttgaaatccttgagaggatagggcaagtagcgtacaagttggctattcccccagcgctggtagctgtacatgatgtgttccatgtttcaatgcttcgaaaatatgtctcagattcatcccatatcctgagttatgaagcattggaacttcagccagatttgtcttatgaagaacaaccgatgcaaattctagacaaaaagggagaaagtcttgagaaacaagacaattacaatagtaaaggtattatggaggaacagtaaagtggaagacgcaatctgggaaatcaagacggatatgcaacaaaaatatctggagttgttcaggtaaatttcaagacggaatttctataaggagggggtaattgtaatactctaagatgaagaaaatagattagcaaaccctaactagttaaatatgtattattatggaattttattattatataatttattttatgtgagttaagttgataaatgacatgttaagacctcgttaatgagccagggacatttttttaattatgacccgagaagggtaaaactgtaatttaatattatgtcgtgcttatggactatattattatatagtatatgtattctgtctttctgcaggttttttctgacaagtcagcgcggtatagtcacaaccgggtattttaggctgaaccgggttcagggcccaaaattcattttcgggattttattttggcatttatatgataagtgagacatttgaaattatgtgttattatgtgtgtgatgaaatgataagtttatccttgactatatatatgcttaatttgactatgaggttattttggtcttttgaccatttaagcattttcaaccaaaagtaatattcagaatattaaaaagttatttttcttattttctaagcccactctaaccgaccccctcttcctctctctttatcatcatcttcaatattatacaattttgaaattaaggcttagattggagaaaagttaaggagtttgggtgattttggtgcttggagcttaaaattttgtggtaaaacttcttgatcctttttgtttatgattaaattctggtatgttaatattctttgagtttaggtttgatgttcttgatgttcatttgagatttgatgcatgttggtgaaactagtggtgatattggtaattttttatggattgcaacttgaatgttgtgtgaggtatttagggtttgtttcggtgtttctattatgttatgcagctctgaattttattttgtgcttgagctagtgtttgattttaaagatttaaggtctgagcttgaattagtgggaaatttagctcaatgtttggagcttaacttttatattgattacatctgattttggttgaggattatgttgggttttatgccctaaataaaactcatttcaatataatctggttcacttattaatatagatctgaaataacatttaatgttccatggttcacatgatttatttcatgattatgtgtacataa

SEQ ID NO: 260770 - DNA, 598 bp, Cannabis indica
gaaccaccaataaagaatcagtccctatgaagtcaattgataatctaagattgacagcccatttcagagagtgagcaagagctacagcttccatttcttcaggcttgaaacacccttgtattggtttcgatagagcaacaactataaatccatgtgagtctcttacaacagcacctataccaattttacccaaagctttgttacatgatgcatcagaattcaatttaaatttacccagtggtggagcagtccacagagcagtcggttgtgccaatggtgtttcttgagacactgaaacccgtgaagcatttgatgtagcagtaccagtattgtgcagagaagaagcctgagcagtttgatatttcaaaaggtagtttgttgcaaaatccagtactgcagcagccttctttgatggtttatcatggtactcagcattacgttcaaaccatatactccaacaaattaccaagaatctttcaaactcagtggaggaagtattagccgagacatagagcaagaaatctgctgaagtagtagaagcagccattgtgaaattaaaacccagcagagattgacgccacacatctttagctcttgt

SEQ ID NO: 260771 - DNA, 647 bp, Cannabis indica
gtttcaatttccacatcagttattttcttcgtctttatccaactcaagacttctttcattcccaccacctcagcaatctcaggagcaaccacaccaattttactccccgaaactgcttggacaagcttcccagccgagtctctaactatgaacccaaagccaaaacgattttcactttcgaagatggccccgtcgacattgatcttgaactttgtaaaaagtggttttgtccaatgctccttcccattcccaatattaacattaagtaatggaaatgacccttgtgtttgagcattttgccaattgccaagattagttcttgccgaccgaataacctccaaaactgttgttgatttattgttccatagttgatcattacgtgctgtccaaatacgccaaatgagcattgccgcactctcagcaacagcccgactgccctgcaccagcaagccacaaaaccagtcgataaacatgtcttcgccaacaccagcagcaggagcacatgacagattccaacaagaacgagcaaagttgcaactgaacaacacgtgtgaagccgcttcaggtgcaagattacacataggacaggttagatcaacatgtacatgtctattagaaagctgaactttggtggggagacaacctgc

SEQ ID NO: 260772 - DNA, 561 bp, Cannabis indica
accatggatttcctatgatgtatcaattgggaatgcctgcctttactggaaattacagaaatacatgtacctcaattctagggatcaccccacaaaaacactataaataccccccatactcattaaggcaagggtcgagaattctgggtttcataagaactagagaggaaaaaccaccaagaacattctctgtaataaatactatcataaatatacagactcgtagactaaggctcattaatgccccaaccacgtaaaaatctctctcattaattccttatagctttcttaattaatattattatattggttgtcgaaaacctcagtcaatattttggtgctttcattgagagttgaaggaagcatctgaaagtagacagtaacaaaacaaaaatggtggagctcgaaacacacgtcaacctcgccctcttcaagatgctcaagaccaaaacgatgaggacgtggcctcaagagcgaatgtgggctctgaggaagaaaaaggaacccacgataatgagtatgaaggaaacttcgacgagtacgacgcctacgacgaaggca

SEQ ID NO: 260773 - DNA, 1221 bp, Cannabis indica
atctttccctttgaagaagtccttgatctcagaagctaacttttccaccaacggagcaaggaaagcagagagaagcgctcctccaaccaattcagcagccatcagatcagatcttcaaacaaacagtaattgcaaaagagagaagaactaacagaaattgtagcaaaaaatcacaattttaactgtcgttatatatataaaagcaaaacaattcattgcttgtaattaatatatatcatcattcatcaaagccataattcatgggaatctttctttttgtcaagtagagttatcttgagaatatcttttaactttttctttatgttgaatatggttcaaatctttagtgccacacaaagagtgattattaataataataatacagcaattaatgggtccattgctttacacttttttttatcaagaagaaatagcttcattaatcacaaacaattacacctaaagcaaaccaaccagctcagccgagactccacactacttacaatatattttctctcctctcatgcctatttaggcttctatttttagcaattagtaatctataataaacaactttctgaatttcctgtacaattttagaagctgttgaaaatgcagttattccaattgatccacaagttgtaaatcacgactctttgcttcctgttgtttttgttcagcactaaccaagacttccaactctggaaatcaattggccaaactcttgagcccagccatttgaagatcaaatcagtgatcctttgagagaagcagcattcgaaaaataaataaatattatatgtatagagataaagcaaattgattgtactatagagataaaattattggactcagcagtaatatatatgtgctaaggtggcaaatgatcctaaatagaaagataagtaaatgttttaagaattaataaataagatagttaaagttataaaaatatctttatttcatgttatttttttttaaaaaaaaattatttagtgataaaattatgttatatattttttttatttaatattaatgtattatatataaaaataaatatattatatcgtaaaatatatattgcaaatataaaagtatttaatatatcgtagtacaaaaaattaatatatatactgtaataataaaatggctaattagtaatttttttccctgaactttgacatgtactaaatcgtgccccctgaactttcttggccgtta

SEQ ID NO: 260774 - DNA, 1233 bp, Cannabis indica
aagatgtaagtatccactagaacaaaaagttagcttccacgaacaactctaagaacataaataatacaactaagttgaacctaaccatatcaggattaagatccatagacttaagatcaaccattgatattaacttagaaagatataacggtaagtttatgatatcttatctaaaataaatatcggtcccttccaatgtatactccatacatctgacactggtaaactttgccaaagccctggaaaagacataacacttatccaaggcataagtataccttctcgctaattatcatgtcagtctaaatccagtgaactgacaaatcattggaattaaacttttgaacatataatcatgattatataccactgtactgacgacactataatcatgacacaaataggggtgagcaaaaaataccaagaaacagaccaaaccgagtacactgaccgtccaaacaacaaaaaaaaccgacaccaaaaaaactaaaaaccgaaataaccgccttcggttaaaactgccttaacatagtcggttttagtgtcaatggcaaaccgaccgattaaaccgagaaccgacagaacatatatattatataatatatattatttttgtacatatttaatgtacaattttattaactaattttacttatatctattttttttaaagtctcaactattcattgctttattgtagatgcatttgcgtattatatacacacattcataaaaataatacgagttttttaatataactcattaccatattagtagcactattcattgtatcaaatactctattttttagttttcaaataattataaaagttttaaaaatttattgtttttttaaaaaaataaagttcggtttggtcggtttaaaccgaccaacccgcggattaaaacaatcagtttttttttacatttttataatggccggttggttttcggatttgaaccataaaaactgaaaactaaattttagatttttttgtgtaaaaaaccaaccgaaccaaccatttctcacttctagacacaaatatatatacatatatttacatatgttctcgacttaatagaattttgtacattaaatataatcatgaaataaatcatgtgaaccatacaacataaaatgggatttttgatcttttattaattagtaaatctaattatattgaaataggttttatttagggcacaaaatccaacaaactcctacttgcacta

SEQ ID NO: 260775 - DNA, 1071 bp, Cannabis indica
cccggacctggtcccgaacccaaactaggtctgagactcgaaactaaacccaaacttgaactcgggacttgatcaaggacccagaccaagcccttgattgagaatgggatttggacctagacatggacacgaacttagacctagaatagaataccgaaccagacccaaactgggatcgaaacacgggacatggactagaatccaaatgtagacccagacccaaacttgggacccaaactcaaacctggacccagctcgggatctaaaaaacccgtacccaaactcaaattgagaatcggaccccgaccccaacctgaacctagaccctgactcgaaaccaaacccggtcccagaaatagaactgaaactgtgactaggacccagacctgagaccagaatcgaacccaaaccataaccgaaacctagacgagacgtagactcagaccttgacaaggacagggaccagagacatgggacccaaacttgtaccgcgacttggacctgacctggtcctacacattcaccgggacctagacaaggttctggaccctaatagggaccagaacctgaacctagacaaagactgtgatcgagacctggacccaaacccggaacgggacctggactcaaactaagactcgggacccaaacaaaagcctggacccagaccaggacttaggaaccggacatagttgggggacctagaccatggacccacacccaaaccaggacctcacctggacctagtaatccgaagtcgaacccagacccagacccaaaacctaccccgaacaaaaaccaggacaggaacctagacacggaccaggaaaaaacctgaacccaaacttgaacccaaaattggacctgaactcgggacccgaactcagacccagacctagaataagacccaaacatagacttggacctaaacctgaacttgaacaccgaccgaaatcggaacccaggacttacacctagaattgaacccagatacagatcgagttcaaaacatgggacttgaacctggacctagaccccaccaaggacccgaacccacacctggagcctgat

SEQ ID NO: 260776 - DNA, 4326 bp, Cannabis indica
ttatttacgtcgggtctaagttcggggtcagattcgggctcaactcagaggccaggtttagcactaaggcctggtgggatttggatccgggtctgatcgaagtccaaaatattgattaagaaaagaaaaaactgttgaaaaaatattaaaagtattttttttgtttttaaattttgattctcaattaaaaaaattgaaaagtaaaaacaattttctagcacttgtttttaaaaaatattttcactttttcaattttaaaaacagaaaagtgattaaaaaaatattaccaaacgccatctacatgttgatagaaaaacagtttaacatataaacgatagattgtctgtgttaatatgtattaaactgttgaattttaattgaatggttttattgttttcggacattaagacagacaataatggttcgtgtaattttctggtgacagcaacaaaatgacccattgatcttttgcaaaacttagactatgggatgattattttcatttaacctcgaatgtaattgaatattatatttcccatcttgatgatgggtctctttgagtttggttattaatgaaattcttctttaaatatatatattatacatagtacatgagttcctacgtaagacctgatattattgcagcctgcttctagcatttctctattgtaagttataatatctagataggttaattaatgaagctaggatcgcctataaatagccatgaaaccctctttcataaagcacacacacaactactcaaacttgctacttgtcatatcttacaaaaggagaagaaagatatgaagtatttgagcagccttatcatcacattatgtttggctaatgtattatgccttggattggtttatgcagatgaaagacccgatcaccaatgtgggcctaatctaggaaatcctccatgtggagacggaaggtgttgcagcatccataacttttgtggtggcggatctagttactgcagaggaggaaactgccgataccagtgctggttcgcagcagcaccgactggtggtctccctcgtgataattctgttactaaaatagtcaccaaatcactctacaacgaaatgtttaaacatagaagtgattgtcaaagccagggcttctatagctacgaggctttcatcactgccactcaatcctttcctggctttgctactactggagacgtctcaactcgtaagagggagctcgctgctttctttgctcaaacttctcaagtaaccactggtaagttacacgtacataaagattacgacttcatttttatggtgaaaattaatcatctaaccacgttttattgttcacactaaattggttaccaggatatctctttggttgaaaatatattcttagggactatattttattacatattataattaaatacggttaacaattatgctcaattctctaccatttattctatgtgggacaatgtccacaatatacccctcaagaagatggttattttttgctcatcaatcttgaaccgtatcagagtggacatggtcactatctgtataggtgcgactcggagaaaatcacttgccggcaagggatataagggatatgggtctgataccaagaaacttatttgagggaaagtgagcttgagtaaaaactgttactcaactctaaagaatgattgtatttatatagaaagttaaatacaatgcataaacagaatactactttgattacgtattataatttataatttcatgctatgcttgtacaggctatggtcctagtgatccacatgcgtggggatattgtagtatcaatgggactgttcacacaacagctgggaatgattattgcacttcccctaaatggccttgtgcttcaggcaaaaaatatattagcagaggacctatccaactcactcagtatgtgatatatatatatcccaataaccagctatagtaattaattaattaaatcttatcgatatttaattttataatttaatattcatgtttcagcaactacaactacggacttgccggtaaggctcttggagttgatttgataaaaaatccagatttggtggccatagaccctgttgtttcattcagaacagccttgtggttttggatgactaagcatgacagtaaaccagcttcttgccatgatattttgatcaatgctaattctaaaactaatgatcaagtgtcctcaagctacgttgccatagataaaatagtaaacgacaattctcaaatagtccaaactgagctcggcgaaaatagcagagtttctaatagcattgggtactataaaagatattgtgatatgttagaagtgagttatggaaagctcatatgataatatgtatgagaagactacttataacctattaggtactacgtagctcaagaaaagaaataaagtgatatggttctccccattttcatataggagagagatcatgtaatataaccttactatatgtatttgtgtcaagtgatcatatacatatgtaaagtgcttgaatatttatatgctgataaaataaatgagctacataaactttttacgtaccttccaatacaatgatacataatgagttttagttattcttctttaattattattaataaactcgatagaaggtgcaagtggatgatatcctcttggttcaaccaaatcatgaacgcacatgtcagattggaacaataaaacagaaagtgtaaagtactggtccaaaaagaacattgctattagcagatgtggagccaagactagatgtcaaggtggccaaactatattaaaaattagggtaatttgcggtcaaaccttctcatgtttactttcgcacttaacccctattgtttatttttggcggccaaactatcttaaattagttcggtttgcaattttaatatcccgttatttgcacaccgatatttgcctccttgacacatcaaagtcagccgaaaatgcttacctatcactataaaaaattatattaagaaatgaaaagaaaatacaactgaaatcgtacctaaaaagaacttgaagattatgagaacaagaaaggcaacttcaggtcttctgtaatctatgaaaggattgttttcttaaggattgttttcttaagtttccaccacctgagatttgtgcgatagaggttcgaaactttgtcgtactggcggtggaagctccatctggtggttttcatggagaatttaagccatctcaaaagtcgttgtaagcccataaaatattcatgtataacttgctggaagtatcctatgagttttcatttttcttagtcacttatctctgctactttaatttttatttttgcttgctactactataaatttagatgttgggttttggcaggggggttttgtaatttttggaccctcagatgtgtgatggctcaagagaagtgatacatgggtttcttaagaagattaattatttgagagtgaaatatcttccaggagagagatttatgaataaccaacatatttaggaggaaaatgcacaacatgtcccattccagatgttggacataaatgagaatgagtcatttcttaagatctcagttgttgaatgttatcaaagcaggcccattatggaatgttatgagaacaaaagcaatcaaagttacaaaaaatttcttgtcatttgtgttctattagttaagatattactatatttcaaatattaattagtaattgagaatttttttggtcagaatctgtgtattggtaattactatattgtagttatctgatttagtatgtttgatttatattaaattaggcctctctaattttgtatggaattagtaatattttgaaataaaatttagcatgacttttgaatcatatcaattttattaaagtgcaacaataaagcctttcctttattatttttaccaatcaaacaaattctacattatacattactataccactaactatacaagaaacaaaaaatgctactgcgaacaaaattacaatgaaagctaatacattatacattacttacaataaagtggcttataaaaaattaacatctaaattatcacttttgttaacacttaatcaaattaacatcatataagaagacttctaaaaatatatatttgtatctgatgcatataaatgatttaaacataataagctgcatataaaatactaaattcccattccttaagcattgtttgtatttgatctacacatccaaacatcatgatctaattgagttttaaaatgcatcatgataaaaatacatcataatctaatcaagttttgcaaaaaccaaaaaaaaaaaaaa

SEQ ID NO: 260777 - DNA, 1223 bp, Cannabis indica
acagttataaaccgtggggaatacttagtattcccaacagttataaactgttggcatttattgttttcttttaaaaaattctatttagtattgcccacggttctccactgttggtattaattttttccaacggttttttgtgcttcatttctaaaccgttgggaaaaacttccactcatcttttccaacggtttttataattgaccttcttattaaccgttgggaaaagccaaatttgtagtagtgctaatctaatccaatctacaaaagtgaggattggatcagttattttaaattacttattttttaatattcaattatttaatatttataaaaaaaatatatattttttttcacataactagcaacaaaatgaaacaaattataattattttatgtctccaacacattaaaataaataacaaataacaaatctaaaagaagaaaaaaaaattatatgtataaagaaatgtttacttttattttaaattgtatgtagaaaaaaaattatatataagcatagaatatgcatttgatctattaagttttgaaatataattgtatgtattaaacttttaaattactattttctttacattaaatattatttgtatatataattttttaatttatttttttaaaaaaatttgtagattgaattggatcggttacttttacatgtcaatcaacatctaatctgcacaaacacgaattttgaattttacaatccaatcctcacaagatggatttcccattgatttgctacaaagattaaggtcttcttagcattacacaagttgaggactttgacaattttgtatatagtcttaaatgtgggcttaagagatagagtttttaaaccatatatgtctccaatcaaaaaatatttatattgtgtgacaatttgtacaacatttagctgatgacacagctttcgactataattgaagctagtactttttaaagtgagtgacattttaactatgtattaccgattaatttaacacacaacttttaagatactcctaatctacgtacatttctcctaatttctttcctatataccaaacataatgttacttaatcatacgatgaaatataccaacaacaataagccaccattattatattaccaacaacaatgcaaggtgaccatattttaattaaaattaataaaacttgtaataaaaggaaaaattaccaaaacagcaacatacaaaaaa

SEQ ID NO: 260778 - DNA, 1870 bp, Cannabis indica
ataaatgaatgtaaaatatatatcttttactatttttattgtaataattaaaaaattaaaacaaaaatataaagtattatagaaaaataaaccttttattctattatttattaacgtaaaaagtaaatataaatgttcttgctaacagaatgagacatatcattgacaagatcatctccgaaacacaaagcgctttcattctcggaagattaatttctgataatgtcatggtcacctttgaagtgatgcgctatttgaaacggaagacaaaaagaaaaaaaaggatatatggcaatcaaacttgatatgagtatggccggttgaatgggattatcttcgtgccgttatgtcaagaatggggtttggtgatagatgggtcaatcttattttgcagtgtttatcttcggttaaatactctattgctcacggtggtcgaatcattgggccaatcactcctactagagggatttgtcaaggagaccaacattctacttatctcttcatcatttgtgatgagggattctcctctttaattcaacagtttgaatctaatggtattttacgtggtatccgtgttgctaatcttgctccctctattactcatatgctcttcgttgatgacagttacttgtcaagctactcatgaggttgcttcttatttgctccttctgctccactcttttgagaatgcttcaggtcagaaagtgaatgtttccaagtctaatatctttttcagtcctaatatggacactgttgtttgaggtaacatttgcaacacgcttggcatgatggaagcttctgaaggcagccactatctaggcctccctaacattatcggtcgtaacaagaatgctattcttggttttctcaagaataaagtcattaatcgcctgaatagttggcatgataagtttctctccagagccggcaaggaaattcttcttaagacagtaattcaatcgcttcctacttatgccatgagtgtttttctcattcctattggcatttgttaagagattgaaaagcttatggcccgattttggtggaaaactagttcaagtaaaggtaacagggtcatttggatgtcttgggatcgaatggccactcataaacatcttggaggtatgggatttcgacatttaagtgatttcaatcttgctatgcttgctaagcaaggttggcgcttgttatgtaatcccaatactctagctagccgggtttacaaagcaaggtatttttctcactctaattttctcaatgctaaacttggctccaatcctagttttgtttggcaaagtatttggagtgctcaaaagctaatcaagttaggagctcgtcgcacaattcggtctggtatgaataccggtatccttcatcatccatggcttcctgataagaatcaaccttatgtcacaactcagacccccgacctcttaaaccagcaagtttcttctttgtttactactggtgcgactagctgggattatgatttggttcacgatatgttcaatcctagagatgccaacctcattctaggacttccactcagctctacaaatgaagatgactgctgctattggattggtgaatccaatggcagttttagtgttagcagtgcctatttgctgctgcagaaagaaaaagctcctcaacctgcaacaaataattttgggttctggaaagagctttggcaactaaagataccgcctgttgtggcgagccttgacaaattgtttacctacttgtctaaaccttgtcactaaacatgtaaacatatataatctctgcccgacgtgtctttcccaatcaaaaaacacttcccatgctcttactaattgcatcagctaggtgtactctgtcaaactccctt

SEQ ID NO: 260779 - DNA, 1852 bp, Cannabis indica
gaacccaccggagatcaaaggcaaacccagtccgatggatctgggttgaaggcggtggtgaatctgtgatttttgggttgaaaattgcattttctgggcaggcccgatgcaggcccgatgcaggcccgatgcatcatgatgaaaaaattgaatctgggttgaagacaaaggcccgatatagggcccgatggggcccgatatagggcccgatgggcccgatggtcagcccgatggccagcccgatggccagcccgatggtcagcccgatggtcagtcaatttttttggaaaaagaggaagagagagggacggttgggaaaaatgggaggggttttttggggtttaggaaaaagttatcccattttacaaattatacatagtattagtttaaaaaaccaatttatgagtttattaagcatgaaaattcaaatttcccaaataaattacactatatgctatatatggcagaatcaatgttttattttattttattttatttgtttgagataaaagaactcaatcaatctgtaaatagcaataagggtatatttgaaagtatacttattaaagtaggtagattttaaaaaaaatttaatatgcaactatttttagttaatttatatatatataaaaaaaatatttcccaacttattattttattttttttaaatatcaacttgctagtgttattcttttgaaacaaactcgtcaattcataagagattttcacgattactttctctatttttcaagttaaataaattcaaattacatttattagtatacgatccagacaaaatcgatgataatggcaacttttcaaataattgagaactaaacaaaagtccttttcaaaaaaaataaaagtaaacaaaagaaaataccaaaaagaaaagaaaaagatggatgtatacttaagaaggaggcaagcaggacattcccagcagcagcatcggctgtcattttatttggaaaacgacaagattttaagaaccaacccactacccattcattgtcgtttactaatcaaataaagggcaattaaatagaacacaaaaagacactatgttatcttcactcaaaaccatatgtaatgtctcatcacaaaatgttaaagacaacactagtaatagtattaggtgatgaaaaagtgacaatattgttagataaatttacaatcccaagttacaaaattatatacaattgtgattgatgtatttatagagttaggaagggtatttagctgcgtaactctaattggagtgggcgtgctcatcaaaaacttcagtcaactaaaaaaacttacttagaccttaaacatagatactaagcctattaactattgattactaagaatatagattaatacagtaaaaaactatccaatcaactcaatgtttaataaaatcaatataaattccaaatgttaataacattgattccccctccacaccatttattgttctttttttacatgatcgaacaccaataattcatggtgaacaagaaatagctagattaccaaaaactttattgaacaaagcatgattttgagtactctaactaagaaaatttcaaaaaaaaaacttagttttgttctttttatttctaaatgatcgtggggtttaagtgacatgaacatggcagcgtactgcatgagtcgacgctcagtactttcagcttcatgggagatatcaggaatcacaggacctcttgtcctcaacctgtaacgacaccatgcgagctgtatattcacagcagcccatgttcgccaattcgaagagtagtatctagccgttcgtttaagtctttcgttggcgaatttgtagcgaagtgatctgtgatgtacttca

SEQ ID NO: 260780 - DNA, 547 bp, Cannabis indica
atatatatatattataattaataagttaattacgtaactatatgcatatttaatagtttcaattatattcatataattttttaacaatattttatagataatcatataaaaaaaataattaaattattaaaatttaaatatttacttataaaatctcaaatttttatcacactataaataaattaatataaattttaaattatacttttaataattttaattatagattacaatattcagtgttatatttaagttttattattattttaataagttaattacttaactatatgtatattttatagtttcaattatattcatataatttttcaacaatattttatagataatcatataaaaaaataattaaattattaaaatttaaatattacttataaaatctcaaatttttatcacactataaataaattaatataaaatttaaattatacttttaataattttaaggggaattaccccatatactatttttctaacttttcttttttgaaatttacagtttgggtttctaaagtggttgcagcgc

SEQ ID NO: 260781 - DNA, 1622 bp, Cannabis indica
cagaatacattccgtaaaagtacttcacggtacaaaatcgtatccctatatatttattatttattggttgttgatctggttatggggtgatgcagaggtacggacaaggggctgagaatgagctagcattggaagcaaatggagactacacaagagaagttgggtacttgaaatttgcagattatgcagtgaatgtaagtaataaaggtggatcagataatgtgttgaacaatatatggtaccaaccagaggaagtgtttcctattgatggtactcctgagcaaagggaacatgccttttggatccctgttgatccttattactattatgtcgccaaatctcttcaggtatatatatctatatatatatatacatatatattggtcaagaaataaagtagactttttgttaattaataataatgtgatcatcgtgattttgtaaaatattgtaagtacgtcttatttgatgacatcttttccttcttttcaaaagtggataattgagaagtaaagtaccaccaaaaaggtaaagacagaaaattaattagttgttgaagagattaatttaatcaataataattaatggtgggatgaattaattaatatgtaatattggatgagcttgttatatatctgcaataaatatataatatatactaatggggaaatgagatttaaattaaaatttataatttttttaattaattacgtgcatacataatttgtctatattataaattcatgttcggactagacaactctaaaaatttagatatttcataatatatatataaaaaaataatttggacaattttatatatatatgcagcagggttttacaatattatctagcaattatataatcattaatttatataaatacaaaatgaacattattaatttaatttatacatgtgtgtgtagaatctagaactagagaagtgtataaactcaacgacatgtttatcaacaacacctaaagtttacacagttgaaaggggaacaagtgcaagcatctacctagacaacgcagcgtaccgcagcttcatttacgacaagttcaaagttagccctgtcgacatggagagcgctgcggtcgctctcatcagtcttcagcaaagagtgccctacattgctattagggcactctctgatttagccggtggtggctctgctgactctaatgaagctgatatctttatcaatctcgccgctgataactctattatcgccgttttggcttttattaagcaactttcggcttttaaaaatggtggtggtgttaattctatgtagtaaactattaagaatgtagtaataaacttaattaggcaccacacatcaagttttgttatgtgtggtgtttgtttctcatgcttattatccttcaataaattgatgtcttttgttactcatggtaagctatcatgtgccttttatcggtttattcctttagtataaacatataactaagggaggaccacatactatatatttatatctataaagataaaatatattaagaattattataaaatatatagctttcaatgcaatacaaccactttgtcttttcaatatgatggtatataattaatttaattttattatataatatta

SEQ ID NO: 260782 - DNA, 552 bp, Cannabis indica
gtgcaatattattattagtataattaaatgtgagaaaattttctcatatagctttattttggttaaaattaaattttttgctctcatgtaaaaaattaaacaaaaaaagaaaaactcaaagttttttttttttttttcaaaaatacggtctctacaatgaccttcccaaaatgacttttctaaatatttagatgtcaaatcatcatgagctcacccaaataatctaagatctactccataatcgacgtagcttcttcaaacaacaccatgaatgccaacgagaaagcttttaccgaccaccatcaactttgacaagaagctttttctgatcagccatggcaacacgaccaacaatagagatctccatgaaaagttaacaagagaagatcacgattgaggtaaatctccataaatgcttaattacttgccaaattttctagattttcttattaaaaacaaatctaatgttgattggtatatttgctttaattattttcttaattagttgttgttgtttagttgatttacatatattggtggttttagttcata

SEQ ID NO: 260783 - DNA, 1072 bp, Cannabis indica
aatctttttttatctgattttattttagtttttttgtcaaacgatttagaaattaggtggccaattagttaattcattttttctaattttaatcctaattgtattttcaacgaaggagatgtccctattagattacagaatattattttaactgattgctattaataaaattacatgatttcttaaaaaaaaaaaatacatgtatttgtttttttttcaatatattattgttggatttagacattaatttaaataggttttacaattagttgggacgatttgccattagagctatagtacgtatactgttttaattaatagtaataataataaaggtaagtaaaatatataatagttaggtgtgtaagtgttacattattttttcaaatcactttctatgtatcaccatctaactccaccattggccgccctaattaaaaggattaggaagctatagctttcttttttagcactaattaattataaagtctaatacctatatcatcatattttattattgccttttttctatttctgataacttaattgcaattatgtatactattcttaatttgccatcaattaattgataagctcaatttttcaaaaaaaaaaataaaaaaaaattgataagctcaaatttaattacaatattgcaattttgacgtttgtttgtaaccctaagtactctctatgcctctatatctatatctttctcccttttaaatgttgttatcactcaatctatttctaaaatatttgtctattagatagggggcaagttgtccttcctttttttttttgttttgcattatttaaggaaatttataaatttatgtactttttaaaaaaaatcataagatctattaattaataaattcgttcaaaacaatataacgcacttcagaggaacagtcctccaactgaagtaggggtgagcaacggtcggtttggtcggttttttacacaaaaaaaattcaaaattcggtttttcgatttttatggttctaatccgaaaacgaccgactattataaaaatataaaaaaaaaaaaaccgactgttttaatccac

SEQ ID NO: 260784 - DNA, 1896 bp, Cannabis indica
ataaccgagctttcaataagtagatctagaatctaccaagtaaattctcaacttattaattccgccttgcgccactatagatttagaattgaataacactctcaattatatagaacgatcctttagttattgcgatacaaatagctaatatgatggtggccagggtaatgattgaagatggagcatcatctgtcatcaaacaccttgttcaagcaagccctaatcataatgggtttaacattagaagacctggaaccatgcaagcagcttatgtatggttttagtgaagctgtcattgctccatgtggcaagatcaaactgtcacttaccgttggcactgccctaaagcagaccaccatcatcgttatattcatagtggtggacgtgaagtctccgtacaacgtgatgctcagaaggcctactctctacgaccttcgagccatctcttcaatgtaccatttgtccatcaagttcccaatggcagctggtatcggttgtctccttggtaatcaaagaactacctatgagtgctataacgcttcgttatcactcaccaagaagacctcctttattgctatggcttcatagtggaggaataagacctcctctactgctaaggcacaagagggcgagtaaggcctctcccgcaaaagccggagagatgacaaagacctctagagaccaaactatggagaagaaggagacgacacctaaagtcacttgaaggtgcacccaagatggggatgacattgaccctgttttgggaaaattgaagtgggagttggtctaattgaggaactcaaagaacttcccctcaacacattgaacccaaccaaggtagtcaagattggaacaaacctgacagagatcttgagtcaaatgctcatggcttgcttcggtagaaatcaagtcatttttcctagtggcatgagaacatgatcgggatcgacccccaggtcatcggtcatgccctcaatatagacaaagtgaactttaagcctatacaacaaaaacgcaggctccttgagaaggagcactctaaatctctcaaggaagaagttgaaagactacaggagaataacttcatcagggtactcagtttgggtatccaacccagttctggtgcctaagctaaatggaaagtggagaacttgcgtcgacttcaccgacctcaacaaagcatgctctaaaaattgttcccactaccacgaattgatcaatgggtcggcacgatagtcgaccatgaaatcctcacattcatggatgcctattccgactataaccaaattagtatgcatgcaccaaacgaagagcatactagtttttgaactgacatcaggttttattcctacaaagtaatgcccttcggactcaagaatgcaggtgcaacttatcaaagactagtcaaccttatgttccataaccaaattaggaacaatatggaagtctacgtcaatgatatgcaggttaagtcgaaaagatccaaagaccacatccaagatctagaggagtgcttcaacatcctctaggagtatcgaatgaaactcagacctctaaaatgtgccttcggcgtctaatcaagaaaatttctcaaattcattgtcaactcaagagatattgaagtgaatcccgagaatattaaggccttgcaagacaagaagtcaccgtcgcagataaaagatgtgctgagcctaacaagacgaattgctacacttagtagattcgtctccaactcaattgacaagtgtgttcccttcctttatttacttaaaggaagcaacaaggtgtttgaatggactgatgaatacgagcaagccttggaagctcttaaacatcatctagccaagcctcccaacctgtccaagccaatagatagtgaagaactatacatctatt

SEQ ID NO: 260785 - DNA, 1769 bp, Cannabis indica
attatttaattgatgaataaagcaaaacacatatctacaaataaggcaaacaaacaaaaatacaaatagtttaaatgagcttacctgcccttaattttgctatgtggcagttattccttttttattttgtttaactgttttgctcaattttttttttttttgtaattccattacataatgtctcccgctttttctttttacagtttttcttccatttgttttgagtttccttccttctgaaattcaatgatctttgtattttctatagattcctttcaccctgatattcttactgcatgcacaagagaaagagaagtgtttaacatatctaatgtcgctactccaactccaccacttgcaattcatcgacttttttgcaaaatattctcaaaaaaagttacaacccaaaacaactaaaaaccttcattgctaagcactagcagggtagatttgctattgatatgtccgattatgagtgtgattctcttaggattacatttagatgtgaaggtgacttgagaagagttctttctaaagaaccttggcactttcattcatatggttttgtgcttaccaagttccctagaaaacgcttcaattgaatcgatgacaactacttctttttggattcaagttttttgactgccattcctgagtaagtctgaagctctagctaaagtaattggtaacctcattggtaattatattgaagttcattaagattctttaaatgagggatggggtctttttttgagaattcaggtgaaaattgatatttcaaagcctttgcttcgaggccagttagttacactcccatggttggctaatgaattatggctagactttcgttatgaacgtctacctaatttttgttatgactgtggcattatcggtcatgtctttaacaaatgccctcaattcgtggagaaattagacaatggtcttgatccagatctaccctatggaccttggttggaaggggctgctctcctaagaaacatatatgatcgatataggcaagatttttcaaaagctgggccatggcccttcattactcgattggctagcaacaccattgcacccattatatcacacccacgacaactccctacccttccatcacatatcactccccaagaaaaaggaaaattacttattgtctcaactgatcattttgcattccctactgacataccaccaaagcaaagcaccaacagaaactcttcttctttcaataaacccgctatgcaattgaatcaatccttaacacacactgctgaactcaccaaaattcatattggctatctttctagcgctaatcctgaacatctaaaacatggtgcttcttctagcaacattatttctacgaatgggatacgaagtctttccaacatcaattctaaagtttctactgatcacacttctattaaaaaaaataaagactcagcatcaatgacctcgggacctccgggtttcactcttccaaagtctgtggctcttccagtagacactccaccgacttatatgcatctcgccaataacacaagcatcagttcctccatgttacctgcaaccacagtagactctaccactactgctgactcagcccccaataatgccactgcatttgaggtttgttcaattaatctcttcaatttggatccaatgacggttaatgagaagagaatggcttcatttttttttccaaaagacaaatggtgtcttctagtgggaatgttagacaagtattgaagagatgccgcaccaga

SEQ ID NO: 260786 - DNA, 953 bp, Cannabis indica
ctagtcatcagggtgatctcattggggagggggggctcttggtatgttcgcgaacctttgacacggatctcatttcaagacatagtctatacaatctttcttcattgttggccagaagtatccttgtctcaatattttctttgagagactcggacctccggtatgatctccgtagaaaccctcgtggacctctagcataatctgtctagcttcagggtttgatacacaccttaagtacgacatcctgagtcctcttcggtagagaatataatccatcatcacatatcgatgtgcctgatactgtagccatctggagagggtcctttcttgaggaaactcgcctttggttatgtatttgacgatggggtccatccagtttggctttggctcgattgtagccactgtatctttaactttgatgcttggttctatgaggcactcagcgggcaccacccccagtctctcaacctcgctgtctgatgccaacttggccaaacagtctacgtgagcgttattttctctgggattctttccacactgtactcggtgaattcatggagcaactctcggataatagctacgtacttttgtttaccaccagttacgaatcgctgaagacttctactctcgtggctcccacgatttttgctaattttaaccctgcgatcagggcttcatattcagcttcattgttaaaagttaggaattcaaaatgcagggccgcctggagccaaagcccattcatagatatcatagctatcccagcaccagatctgttctcgtttgacgctccgttcacgaatatcttccatgtcggggttttcggtactagtacgcttgcactagcctttccttcattgcactctgttatgaagtcagctaaggcttgtccttttatagaaatgcgcggtacgtcgtgtatgtcgaacaggcttaattccatggcccatttg

SEQ ID NO: 260787 - DNA, 693 bp, Cannabis indica
tgtgtctttattttgtcaaatttcgcaaattcaaagtttatacataaaatttatatatgtaataaataagtattatgtattataatacaatgcattatgtattataatacattatattaattatataaatcgttgaaatggaataaaaaaatgtactaaaataaagttttacatacaaatatatataaattataaatagaaatactaaatagagagtattagcatcgctcggccaaaatatgatccatacttggatataatgatcaaaaacaagtgtgaaaataattgaatggtataatttctctttgccaaggagaagatgtgggctcgattcccgctatccacccatgataatgggcttaatgtatttaatttactacgataaatgattacatatagttgattacgatagtaaattggttctttactcccaccgaaaaaggagaatattaattaataaattaacaaaaccaaactccatttttcgtcaaaaaaattttgcggagataggatttgaacccgtgacctcaaggttatgagccttgcgagctaccaagctgctctaccacgcgatgaagggaagaaatgggaactaggggacaaacaaggattgaatgggccactttacccttatgtacaaatagaatagcccatttgtacagaatggtaaaggggccctctatgatagatgat

SEQ ID NO: 260788 - DNA, 507 bp, Cannabis indica
ttttgctaatctatttcttaacctagggtattacatctagagtcatgttcccaaaagagattttcatgagaccatccctacaattcatgagtgcatttgctgttgcgagaaatggtcatccgagaatgatgggaattttggactctaggttgacttcagattgagtgtccaagatgagaaaatccatggggtaatagaatatatcaatttgaatcaagacattttcaactattcctcgaggtttcttaactgatcgatcagctagttatagtaccacagatgtgggcttaagttctcctaggcctagttggaagtatatggaataaggcatgagatttacacttgcacctaagtcatggagggcttggccaaattcttgttcccctatttgacatgaaatggtgggacaaccaggatctttgtatttaagcggtgtcttggagtcgataaccgcactagcctgttttgccaagatgcaagtttcttgacatggtgcttccttttgat

SEQ ID NO: 260789 - DNA, 763 bp, Cannabis indica
atacaacggtaagattataatatctttacaaagatcaatatcggtcccagtccaatgtatacttcatacattaaaaactatcatactttgccaatgttctggaaaagaacataacacttatccaaggagtaagtatactttatcattgattatcacataaatgtaaatccaagtcactgctgaatcaagggacattatcttttgaagcatataatcacaattaccttccagtgtgttgacatcactctaattgtgaataactatatgttctggactaaacaaattttgtacacatgaaaccataaacataaaaactacatgtgtaacataaataacttctaatcttctattgataacaaattagattagattaaatgggttatatttagggcataaaatcccaacaataacacattaaacaagtaatgaaataaaatctgtttctttattgataattgaatagaaaagattgtattgaaatagagttttatttagggcacaaagctcaacaactatatcctggtaaaatattcccaacaactgtcctcaaagccatggtaatgatttactttcatgaaatatagatttaaaacgatgaatattgtttgtgtgttaatttggatgtgctcatgttggtttatttgataatttgatgattgaatgtgatttacaaaaattttccatgaaaataatttattttacgttatgaaaataatttatttggtattccttgtgaaaaattaagcaactttcttttctacgg

SEQ ID NO: 260790 - DNA, 756 bp, Cannabis indica
atctctgtattccttttttttttctctctatagctctctaagaatttcagctgagtttttgtaagtaaaaattgttcaccttttgtacatgaaaatagaggtatttatagacccgtaagtgggcgagggcataccctcttactccactaagttccttactcagcacgcaaatgagactgtgaacactacaagacaatctaaccgtcaattcggtagctagctcttccatcgtgtggtgcttaattgatgtagtctatcatgtgaggacatggacacgcatcactcaaatgcctctcctttaaaaggaatatcctagataagccgttggacattaagcactacagaggcacctgctcgcacaaccatagtctgacgcgggggacaaagtctgacttggtgtcagaaaagatgtaatcgtcgtgtaaacttccgaattagggcacagggagctttcagggagtgcaactcaggacctcctagaatagccaattcctaagagctccctagagatttgtgcttcgcgtatgcctttgaatgccgaaagcattaggttatgacttcaaggatcaattcctccttctcaatggatgctctctcctagatacttcagtgtctttcctgatcctattttaaaaggaaggagatattcctatgcaatttgacgtggcatctttttgctacttccatgtagaacttatccagaaatagggataacatctactatttttgtaacgccctaatgctaaggcacgctac

SEQ ID NO: 260791 - DNA, 1076 bp, Cannabis indica
ctgaggagctaaataaaaatagtcaataaatattactaactgttttgacagttagtaatacaataggtaatggtcctcaatttacagtatcatatattttcattctcttgaaatcccatcatcaagagacaaagattccaaaaaaaaaaaaaaaattgatttcactacaaaattagaagattataacatttcaaaatcaattttatggattcgggtatgcttctgttaatctttgttttattatttaatttctcataattagagctaaatacaatttatgttttccaacactacttataagttttccaacattacttagtccttgtaccttataagaaaaattatgttgtggttgctatagctttttcttttcttcaatctatttttggtttgtctaaaataaagtttgttctttctctttcttgttaaatgaatttatgccattttaatcttaggagctgttcctttaattatagaaagcatacttattactttatgtcacctttctttgtaatttgtatagaagatatcatgtcacccatcattttttttattttctccaacctccaccgccaccaaagattaatatacttaaattattattattattgttaaaccaaaatgatgaatacagtgtataaatatataatcacattaagagaagtttggaatctctagctatcaaaatcaagggagagtgtccaaagaagggattgttgattttcaattatttatttctttttgttattaaggccacacaacaaagagactaaagccccatatagtgacaaaccacagtttcaagaatcttagcattatcaagccagaaataccaatggggtcttatattgtttactacttttggtgaaaaccagagaagcagtagctatggaccattgcttgttttcctttgcttacatcaccaccttttgtttaattttattaaaaataaaaataaaaaagtacacctcttatcattctcctgaatgatcccacattcacattcaactaattcttgagactaacatctcaactttatcactttaaaataacaaaatttagacagaaaacttttt

SEQ ID NO: 260792 - DNA, 499 bp, Cannabis indica
ctgcaaatcatgaaataaaattacctatgatttttttgtataactaaggaaacaaaatttcaagtactagcatacccagcagccctgacacgtccgggatgctctggtgtcccgagctcctgcgtctggatatcattttggccatggacctaaatttttccctgagtaagttgctcctataattcagccaaatgcacatattcaagcaattattatatgaattatatatactaactcattagtagtactcaattaaggattaatatatacttactatctttttggcaattttcttgtcgtaatccgtgacaagttttgttctcttggaccgagatttgatccaaacacgatggcgtgggggatcttgaacgtcgaggtcctttttctatattattttataacaattaaatgagtgtaattatattttaaagaacattattagaaatcattgattacttaccacatcttcccttacgttcaccattccactccgaccact

SEQ ID NO: 260793 - DNA, 786 bp, Cannabis indica
aaatctgattatattgaaatgatttatttaggacataaaattccaacactattttccattataattatttcctcaaaataatggagtcattctattattgtgggatccaaaattatactttaaagagagctattgcactactcaaatatttgcaaaaactttcgagagagatcaagctgttttttcttttcttctcacaagtgaaatacaatcagaaagaggagtaggctattaccaaataaatgggcctgaacctctataaaatcttgtattcttagttcgtactttaaatttgatatattctcattgaattcaattaattttaagttactttcaagactcggtgtcattggccaaaaggaggtcaacaaattcaatcttcaaacaatcaaaaattcataataaactattaaaagaattaaatattattattttctaaacttaatatttatgttcatatattagaaataatagcttatattgaaactaagaatttttaggattttgaaatttaaaaaatcaaaatttggtaaaaaaaaaatcccaaatcaaatttttgggtgcaaaagtactattgttcgagcaccaaggtgcgtgcagtcttctccgcgtccgcaagaggctgttagcaacctcatccatgtgcataggaagatgcttgcatcctctgtgttcagacaaaacgggtgcacggacgatcattagacaaaaagcgcgtgggaacgacggcttgtcttcgagatgtgcgacacacaatgtgttgcacgcatggcagccatggaattc

SEQ ID NO: 260794 - DNA, 699 bp, Cannabis indica
gccgaaaattacgttcaaatagtgtgttgcacgcgtgactattttattttatacgtgtgtaaaatagattatttgaatattattttccatattgtaaattattctaaattttttaaaattttgtatgatatcttaaatagttataacgtacatgaatatgaaaaaaaattaaattaaaaaattattctagatgtcgaaacaagtagatagtacatcagtacatctttttaaaggaatacattgtaaaattaccccaaaatatatatctaaaaaataattttcttttcttttttttttctcaataaaataaattattattaaaaagtaaattataaattaaataatttatagcgtaaaaaatataattttcaattacaaatttaatttttaaccataataaattatatttctaaaacttcactaattacctaatagataatatcgagtcattatttaaaaagaaaaaattaatactataaacaaatcaaagttaatacatacaaaaatttcgtaaatataatttaactattattacctttaaaaaataaatttaaatatttatctagggatatgattttgtcccgtgacatactttcacggaatgtattccgtgctacattagatgagtctcagcgtacattaaatgaatgtcagggtacgtttctacttctaaccctaattacccctagatcaatctca

SEQ ID NO: 260795 - DNA, 587 bp, Cannabis indica
ttgtagtaaatctagattctggtaaaatattcccaacattaattataaaccctaattattaactattaggcttattgagatattacaaccatcccctcgttataagaatttcatcctcgaaatttatctgaataactcaggatacagctcccgcacgtacgactctaattcccaagtcgcttccttaaccttacaatttctggttttttcagcagttgataatggcatggaatcaacctttagtcgactgttttgtaattttaatcattcctctctcaattttaggtttaattatttgtagagttttgtgttcttaatggattaagaagcataattaattatttcttgaatttcaaacaatgtatatgtaattgtattttacaaggctttcatgtgaatgactaaaaaggttattaaaagtaactaattaaagtaattaagtaggtctaaatagtttgttaattctcttactgttattgcattatgcatgccttaaattctataaattaacagcttagatataatgtaactaataataattaattaaagaattatttggtggagaatggatatcatttgcagggtcg

SEQ ID NO: 260796 - DNA, 506 bp, Cannabis indica
tttccaagaggactttggctttggacattatatgttatatagaggtcttctcaataccagtaaacttgctttgtaatgatctgcgggtctacctttcctattaatatcaaactattttattttcagaaatttatggactctctattttcaatccaaacttggactgaaagagctcatagaagaaacccaagatgtaaactacaaggaacttagtgacctatttcttctctcagatcaaagaaaatatactttttcctataagatttatgttaagaaaagacatcatgtacatgcatactatttcatgtctttcactttatctttatgcactctcacatataattcattcacattcatacattcatattttctctttaaattatacattaaaaattcagagtagttcacaaaacagaattgatgtacctgaagcaaaaccttgtacctatatcaatatctgatatggttgttctcataggtaaaagttagtattaccttttattttt

SEQ ID NO: 260797 - DNA, 605 bp, Cannabis indica
acatgaccaactcataaataatataacaatgaactatttgaaaatatacttttatctctcaaaaaaaagaaaatacacttttacattttttatatttattatatataaaatatattaagttagttaaatggcacataaacatattaaattgctcatatatatttgtcatataccaaataatttcattaaaaaattatcaattttgtcatttgaatttttgacaatactaatttttcttcctaaaatatatgacttgttaaaaattttccctcaacttttacatttaaagaaatttagtcattttgttaggttccatttcaatatttcatttaaatgctaatgtgtctttgtaaattaacaattttacccttctaaactttaacaaccatcaaatcatacctccttgaaataaaaatgtgaaaaattcaatatttttttagttgatcttaacaaattaatttagatattaaaaaaatttttttgatataaaataaaatcatcatctttattagttgtcaatccatagtgattacatgattaaaatctggagtaacatcactactcctgataaacacgttcagtaactaaatagaatgctcgagcta

SEQ ID NO: 260798 - DNA, 1406 bp, Cannabis indica
ctactctcatttttctttttaagttgtcatttcaaaacgttttctttcttcttcatttctttcgtaaactcatataaatataaaaaagaaaaaaaaaaactagtgtgtcctcttctctgtttgaaatgaagaatcttggtgtgtaatttagtactcttttgtttaatttcattacaaaaaaaaaaaacaatgatcttttcgaaaattaaggattttggttttttaaaagaaaaaaaaaagattttaatttttattttgtttactgtgatttttcctttatgtaaaagaaagagagatctagcctttaataagttgtgttttgattctggaaagaccaattcctctactaaccattaaaaggtactctttttttttgactcttttaatctttttagttttactatctctactaaactattctactcttttttttttttggtagaggtagcattatcattgcttgagataattgttctcttatacgtggtcaagtctacgcagcaagtttgaaccagttgatgaagtgaccataaatcacatggctttggtgatttcactaactctttctttctttgtttttttatttactgttcagaatatgtgattgaagtaaagatgtatagttttggctacacatttattattattatttggcttggtattattgacaggtttttccactttaacttgtgcctcacttcagatctgcttggcttctgaatatataagtttcattttaatcataggttagtgatattattattattattatttattatttcatagaaaataggtcactactatagtactataccgattgtctcttacattaaattatgaccaatttactatctaaaaaaaagattaattacatattttaatactaataaattaaacaaacaatatttaaatttaataactatttattgtatctttgtaacgggttgtaggtcttttaataatatatttcctcgcttgttttaaaaaaataactattttatgatacctacttattttttattcaatccgtgtatttatttactttatttagacattatatttattttctatttagtttttattttcaattgaataattcttttttggttattttgtatgacaatctgtgtactgaataaagtgagtattcaatcagtgacctttttatgtttgatggaacactagttaactgcaaatttcaatttagtaagtggtaattaaatatgtgtttgatcgataagttatttttgatttggaacagtaatctttatcagtgttgctaaatattttataatatctaactgttaattttttttattattattttgaaagggagctgaataaacattaggtgtgaaaaaccgtgtttttgcaaatgtcagttgtatataagaaaatataaaaac

SEQ ID NO: 260799 - DNA, 947 bp, Cannabis indica
ttctcaatcttgcaagtttttctcccttctatcatctctctcacactaagtatttggtcccccaaactaattgtatggcttatgatatcattgataaaattgtgaagacaaaattaatagcgtggatacaaatttcggttcaataggtgaaaaagaaaacaagtttaggctcaagagggttaactaaggataatcatttcatggtaggcttgaaaggctcaaactatccaacaaatgcctaaatcatattcctattgaatgttgtcaaggatttcgcctcaaaagaataaggcatgcaagttctaagctatcctatcaatcttaccacaaactatagtaaaacaattataacatattccacagatcatcaaattgcattcatacacaggttttacaagcatccaaactaatccaaagagttaacagaattaagcacacagttattttccaatttcagagcacattacaataaacaacagcaaacaattattttttagcttattgcccattcccaactaaaaacataaaaaattaaagcagaaattaaaaatgcagcaaattaaaaattttaaatctcttcccccaaactaaatattacattgtccccaatgtgtacaataaaacagaaaggtgagagacttaccagaggccctttcaaaaagggtttggtggcagcggttgatcatacggataaaactgaggacgtggcgccaagtaattcgggtcgtccatcccgatgttcattctattgatgagagagttgagtcggttaacttgtccctcatcatgaatactcctttccaccatatagttttgcatgtgattattttgctgaattatgtaactcagcagtgcatgactatactgcatcgccggatcaataggcccaagcagttgtgggggctcgtcctcctcttcttcgacactaggctctctttgtcgccttc

SEQ ID NO: 260800 - DNA, 1020 bp, Cannabis indica
actctcagtcagaagaggagcatgagcaacatctctggatggttctgcagcgacttcgggaacataaattatatgccaaattcaagaagtgcgaattttggctatctcaggtgtcttttcttggacacattgttagtaaagatgggatcaaagtggatccgggaaagatagaatccgtcagggattgggcgagatcgaaaacaatggcggaagttagaagtttcttgggtctagctggttattatcgtcggttcgtggaagggttttctaaaatttccacacccttaaccgagcttactaaaaagaatcagcgttttgtatggacggataagtgtgaatcaagttttcaagagctgaagcaaaggttaattacagctccagtgttacctctgccttctgacagagagaagttcatggtttattgtgatgcatccggacagggtctgaggtgcattctaatgcaggccgatcgggttattgcctatgcctcccgtcagttgaaagattatgaacatcgataccggactcatgacctaaaacttgccacagtagtgtttgctttaaggatttggcggcattacctctatggagagagatgtgaaatttatatacaccataaaagttcaaatatttctttactcagaaagatttgaatatgagacagaggcgttggttagagttggttaaggattacgattgtgaaatcctttatcatcctgggaaagccaatgtagttgctgatgccctgagcagatagggtcctaggcaagtagctagcatggttcaaatttaacctcagttagcaaaagatatggtcagatcaagcatcaagtttgttgtagggaaacttcataacttaacgctgcaatctgatctgctagaatgtattaaagatgctcagctaactgatccaaagttagtaaaagtcagagaagaggtttcagttagtcaagctaaagactttacagtatcagattgtggaatgttgttgtttaaaaccagggtctgtgttcctaatag

SEQ ID NO: 260801 - DNA, 463 bp, Cannabis indica
aaaataaaataaaggttttacttaaccaattcagacaacaaataaaggaaataaacacatataattcattaaaaagtcactagaagacaaaatactaataactaagcgggctttacaatacccctgcacgcgcggaagtggggagctgaccaagggacaaggctgcatgcagcctgtttggccgagggacctcagtatgtcacggcttctgacaacccgtgtccgagtttcctcgttcaggttgtctgaaaccatgtgatgatgccgagtgaggcccttgtgcgcgcatgtgtgttccacccaaaatcagatattttcatccaaattcaaaaaatcataactaattcatattaaaaaaaaaatcagatggagttctgtaacagcctaaattcattaattttttttctactttccagtaaaatatttttagaacaaaataaaaaatacttttacaacatacatt

SEQ ID NO: 260802 - DNA, 916 bp, Cannabis indica
tccaacttaggagattatttaggttggtcccggatgggttctggacctctggtgcctgttcccttggatccttcggcctatctttcttgtagctggttccgtccctcggacagctatctcggggatgatgcatccagtattaagatttagaactttgctagggccgaattagagagtcagggtaggactagctttattcctctttaagtgtttactgctttcacagatattctaacacttaactcttttctcttgttgcagcagctaatcccatggaggcgatcttggccacccttgccggagcccacagtcctgatgcttcccttcctccaacttcttcccagatggtccctcgcgaaagcttcttccagtgcccctccagacactattgacttagtggatgaggaggaggtacttcctgaggaagctaaagaaggtcaagaagagcaatgggctcttcctggggaagttgaagaaagtgaagaagagcaagaggttgctctggtgcgcaagcgcaaaggcaagatggtagctgaggagacacctaaacggccgcggagggtggacactccggccccgagccatgattccgggatccctcccgaggtggaggaatttacagtgcctcctaacattgtgctgactccggttcccagagatgaggcgaggcaggagcttcggatagccaagtacaattatgcccttgacgagtactcccgggggcatgctgaggtggaggccttgaggaggattttgcgagaggagatgcaaaattcccttaacgatcagaactaccagaacccgtgggatctaaacctggaccccctgacggactggttcaatcgtttcctcgggcctaccttggctccttttgtcgcggagatgaccgacaagtacgtctcccagctaacccggt

SEQ ID NO: 260803 - DNA, 1457 bp, Cannabis indica
aactcaacaatggtactttgaacttaccccaagaaggtttaattcttgggttgagttctaaggaaaattttacacacaattcttgtcttcgagacttgtaccatcacaactagaagaccttgtcgaagtcaaacaacgacaaggggaacccttgaaagattacatctagggtttatggccaaggctaccaaagtcaaaggccttacagaagaaggctgttatacgaccatactggggggcatactcccattgagtgacttttggaaagatacttggagaatctctaccaacaacatgaaggagttccttaatagagataatgtctttatcaaacttgaagaagccatacgacaggcccaggcagggcatgtcaacaacaggcagtcatgaggcatctagcagcctcatgacctaccaggcgcacagacttctaatggtaaaaacactagaaacaagcacgacaccatcaactctaagaggaacaatggaaaaaagggaagtttaacacttctcccacgccacagaagaataaggaggaaaggtacacttaattcaccctcctaatagagaagcttgaggccatcttcatggatactcagggaacattcccataccaaaagccctctcctatcagaagggaaatgggcaagagggacatgtcaaagttctgtagatatcgcaacgacttcggccacgacaccaatgagtgtcaaaatttgaagaggcaaattgagtacctaataaggcataagaatccccacgtactctgttatgtgcaagatgaccaaactcaggcacaaggttcctagaatggagatttaatgccacatcctgtagcaggacacctaggggtcataataggcagaccccacattgcaggcaaaacgaacaaagctagagagtgctatgctcgaaccctctatcatgagcccaaagataatatcctagttatcgaagataggagctctaagtaacaaaagaccatagagcatgcgatctccttcaccgaagaagatgcagctccggtcatcttccctcacaatgaccccctagtcattactgtacaaatcgggaacatgaccatagaaagatgaatggtggacgacggagcctcctccaacattgttttaaaatcaacatataaaaaggtggggctctaactcaccgacctagcgccttgtaactaagtgatgtatggcttctttggccaaggcattgcacttgttgggtatatcagattacccctcatagttagagaaaatctaactaccagaacactgatggcgcagtttgatgtgattgacattccctcagctttcaatgccatgataggccaaccgaccctcaacaacttgaaggcggtaacatctatctaccatttatgcctcaaaatttccatcaagccatcgggtggcatgtgtgaggggacaccagcagtctgcccatcagtgttacaa

SEQ ID NO: 260804 - DNA, 950 bp, Cannabis indica
cattctattctattttattactttaggcccacttaatagagtattagacacaacgttaccttcaccaattctaaaaagaaaaacgaagactccaaatcccaaagcccaaccaacactgccacatctttgaaatttgatactggtacggtacaggcacaggcacagatgaaatgacgaaactatcctcaactattgaagcattgtttatcacgtgcaactaacaaatgtggaagaaacgtgaacttggtggcctcgaaagaaattggaataggaataggagtatgtatgtatgtgtgggacccacccaccttgatgtcggtctttgtcggcactcactgtctcacacgttaaataatccttacctaaatttgccgctacacccggttttctatacctaattataaattataattaactccctctttcatttctcttaattactatttattattaaaaagtgtagaattattactattcttcttcctcggaaccactcaaattatattttaatgcaaattattatttacttggaaccatttacatatatttttttttaaaaaaaaaaattaggtagtaccttcaaaattaaatgaaaatgagtatagcacgaggaaagaatgtagtttagtaatgacattagataatctacgaaaataactaattaggaaatgtcatgtctctactattctatacttctttttagagaaggtaaggaagtcacaaatttaaattctcttatcctaatttaaaaattaaataaatataaaaactaatattaaaaaatgcttaagattatttaattaaatattaaaatttggtgtaatttaagcatacaaaaatcagaaaaaataagtaataagaggaggagggagaggggtttagcgagtcatttgcccccttaatttcttataaattaatttttgtgtaatatattttctaatattttaggt

SEQ ID NO: 260805 - DNA, 552 bp, Cannabis indica
ttaatcacataatcttgattactttccactgtgctgacgacacaataaacaagaatataaatgtggtaaggatttggatgaatttataaatcaaataaacatataaatgataacatgaacaaaatgacacaataagtgatgaaaatacttgtgtttctttattgatatttaaatgatagagattacattgaatgaaattttatttagggcataaaacccaacacttagtaaattttgtagttgagtgtacgagtaaagcagagagcacttcaaaaaataatccggagccagtacaagaacctcagccgagcaacagcaaaggcgaaccaacctggaaattacatgtagatgggttggccacagatcaactgtctggtgcaaggattgcccttgtcacaccttgggggcgacgtctacacagagtagtcgaattcaggtttaaagcatccaataatgaagctgaatatgaagcccttattgtaagcctaaaacttgctcgggaattgcatcccaaacacattgatatctccagtgactcacaattagtggtaa

SEQ ID NO: 260806 - DNA, 614 bp, Cannabis indica
ttttatttaatttccaaattaatcacaaccatttaatagtaatccaatggcttaaaaaaatgtaaccatgatggttacaataaaaatgtaaccattgaaacctcttccatatatataacacaaaggaccatgtttataaacacatatattttccacaaattttaatattaaaacaaaaattaaataacttccacaaaaaatcaaactagttaataatcaagaaatatataaatatatatatatatactagattaaagttacgtacaatgtacgtatatttaattatattttagttaacttttaattattatactatacaatattattatagtttaattaaataaataatcttattttaaagtaattatttatcataaaataaaaaacataatgatatatattgggaaaaaaaataatgtgtaaaatttcaaaactaaactcttatttcttgttcataatttaagataattaatgtattagctttaataaataaatcaacaatcactaagagcatctacaatagagatgcaaataagtggtgaaaaactaaaatgtaattcatttaacaaaaagtatactctaaatctaataatgtgctaaaaagtatgtaaatt

SEQ ID NO: 260807 - DNA, 742 bp, Cannabis indica
actgtcccgcttgttagatatggcccagatgtacttacaaatagctgctttattccactcttctatctttatgattcccaaacctcctgctttttttggttgacatatgttttcccaagctacagccccaggaccattgaacattgcttggcccttccacaaaaaagccctacacacagtttctattgctcttacaactttttttggcaacaccatcatctgactccaatatgcctgaattgctattaatactgagttaattagagtaatccgacctgcaaatgagagatttcttgaactccaactcttaattctagccgtcattttttcaaccaacagttcacattccttacctgaaatcttcccagagcaaataggtatccccagataagtaaatggcaggacttgtctagagaaccccgatgctttaatcaatttcttcacacttccttcattcatgttactgcaataaattgcagttttgctagcattcggttgaagcccagaagtgaaagaaaaaagtttaagagcttgaagcatataagtgatgctctgtgtatctccatgacaaaagagaagtacatcatctgcaaaagccaaatgattcaattgaagtgaggcacatctatcatggaataggaagtcctttttctcacctatcttcttcataagtctagataagtattccattcccaagacaaataacagaggagacatggggtccccttgcctaagtcccctt

SEQ ID NO: 260808 - DNA, 977 bp, Cannabis indica
cctacgctcgatacgtcaccaggtatatcgagtcacctaatcaggcgagctcgtatattatgttcataatatcatcacattatcattgtctaattagataatcgataatttcaaaacttattgtgccatgtggtacattatacttttcttacctcaagttctagttcaagtatgttggccaactttcttggagaacgatcgatgatcctgggccctatgtgataaaaatgataaaccaataagtgtttatctcaaaacactacttagcaattgcaaagaacaacctaggatttcataccaaatctcgtaattcaaatacactaaataaaacatatattttggctctaaaacatataccatatggtagagctcgtcgcaatccttgaaatgttatatagaacatccaaaaatggacaccagagtgaaaagttatggcaaaaatacaattcctaaattctcgagactgcccagaaacgacaaacctattcacaaccgattaaccgtttctagtagaaccagttgactagttcacaaccaaatgaccgattgggcaaggtggtaaaacccccgattctcaatttatgcactcaccgaaacactaccgaaacctgtccaaacccctccaaacttcatagggcacataattaccatatatactactatacttatgtaatggaaactaaaattgagcctttaattggcaaacgccactagtattcaaacttaaattataaaaagtttcaaactcaatttctaacccaaaatatcttccaaccacttgaggctagctcaagtggccataggtgggtgtgtgtgtcttggaggtcctgggttcgagtcccaggtaaaacatgattataatatataaacgcttaaataaaaaaaccccaaaatatcttccatttcagcaagaaaatatcaaaactagtcccatgactacccgagaacaatcctataaggtcagaaccttcacaata

SEQ ID NO: 260809 - DNA, 822 bp, Cannabis indica
tcctaaaatatagggcttattaagaatttcctaaatttttacatctacagatttttaattcttttgttaagttccgtcccattttccatttaaatgatgatgtgtttgtaaattagtaactttattctctaaactttgacaattatcaaaccgtacccctcaaaataaacatgagaaatatttaacactttttttagtaaatctcaaaaaaataatttagatcttaagaaaaaattattttgaatgaataaaaaaaattaaaaaataaattaaaattttaaaactaattaagcaatttcaaaaaaaatatttatttattattaaaaaatttatttagataattaaaaataatatattaaaaatttaatttttgtaaaaactaaactttacgggaacaaacttaagtatattttatttttctcaaaaaatacaaatttgtttaactaaacataaaaaaaaaaaatagtttaatttataactttttttaaaataattttatatttttattgaatttttaattatttttctttatttgttaagatataagtttataaatataaataagtttaattttttctttaaaaaatttcagtttatttaaattatttattagattctcaataatttggatttgattttttaagatacttgattataaataaaataaagtttgaaaatagattttttaggaataatttgagtttttcttaaataaaattaatatttttatcaagtttttaaataatttttattcattttttccagaattaatagaatattataatcactttaaaaaaaaattaaatattataatttttaaaa

SEQ ID NO: 260810 - DNA, 961 bp, Cannabis indica
tggttgggttgccttgtgttcgggttgctaatcccatttttaggcaacccaaggttggaagaagaacaagtattgtcaatatttattttttagaaaaaaaaagaaaaaaaaacaaaagaaaaaagaaaaatgtagaaaaaagaaaaaaaaacagaaaaaaaaaaacagaaaaaaaaaagtattttcttcatttttcttcatttttattttatgttcatttttattttaagtgtttgggtggattttacacttggtttgatatttcaggtgtttttggagcacaatttggagctctgggggtgatttgggagtttagaggttttgctaattttttattgaattttactgcagcatttctttagagcacaaaagaatttctcgttgagttggagaacctccgcctgctgcagcatttttctagcaaaattttagcaaaagtgatgcctgttaaaagagcactcagcaacatgcctcatgtaaaatgtgtacacgtggatacaaccaacctgacagttgacagatgaaaatggatggaaatggttaattgttaacagaacgcgagttttggaagttttaccacttaaatttgagttttgaggtttaaatgcaagcaaaataaaagtattagagattttgccgcaattaactttatagaataatgtttttttatcttatctttttactatttaataacacatgtcatataaaataattttcttttgttatgttttgctgagtggtccaatcaatcatagtttatttataattgggcctttttatttttacacttcaaacttatttttttgcatttttacgaaattctacatagaaacccctattacaactagcgctgcaacctaaattgcaacaaaaaaatcgtatagaaacccctattgcaactagcgctgcaaccactttagaaatccaaaccgtaaatttgaaaaaaaaaaaaagttaaaaa

SEQ ID NO: 260811 - DNA, 598 bp, Cannabis indica
tctttttgtgggatgtattaaatcaggtttttaattaatttcttagctaaactatttggataaaaccaatgtaatttgtttattttgcaaaaaaaaaatagaaaatcatcaaaataagtcacattttctctcaattctctctctctctctttcgtgcattcaaaaaccagctaggggtgagggtttttcttgtgtaattcaatcattctcagctagttgttagtgatctcaagccaaggtatagtcttttaactcctacttttattttcttgaattttaagagaaggatttttgcatgaaatggtgttttagctactgttattgatgtagttgttaaatgttgttttcagaagtttaattatccttgattgtgttggtttaagcttgaattgatggttgttagttagatttaaccaagttttgagttttgaattcaaacttggagctttaatggtggattttgtttctgagtatgttgtgatgttttattgctttaaatatgttcattgggggtataaatagcaggtctggaaagtttggtttggattggggatgttttggttgagatatgaaaattttggtctttcctgcactgaac

SEQ ID NO: 260812 - DNA, 845 bp, Cannabis indica
ttcccttagaatgtgtattgactatcgggaaccaaacaagttgacaatcgagaataagtatccattacccagaattgacaatttgttcgatcaaatttagggaaagacagtattttcgaagatcgacctacgatccgattatcatcaactcaaaattcgagaagaagatataccaaagaccgcgttttgagctagatatgggcgctacgagcttctggtaatgtcattcatattggctaatgctcttgcaacctttagggatctcataaatagggtattcaagaatttcctcgaaaactgtgtcatattgtttattgatgacatccttgtatactctcagtctgaagaggagcatgagcatcatcttcgaatggtattacagtgacttagggatcacagctgtatgaaagttcaaaaagtgttaattctggttgtcagaggtatcttctggttgtcagaggtatctttctagggcacattgtggaaagaatggaattatggtttatccaagcaggatcgagtcagtgaagaattggccgaggccaaaattagtgacaaaaattcgaagttttctcggtttagctgggtattatcgacgtttcgtcgagggattttctaaaatctctatgccacagaccaagttaactaagaaaaatcagcgattcaagtggtcagacaaatgtgaagcaggttttctagagttgaagcaatgtttgataacagctgcggtgttagctttcccatcatatcaagaaaaattcgtaatttattgcgatgcatccagatagggtttgggatgtgttttgatgcaagctgacaaagtcatagcctatgcctctcgtcaa

SEQ ID NO: 260813 - DNA, 628 bp, Cannabis indica
ccgaacttggacctggacccgaacctagacccaattcgctgtcaagaccaggacacaaacccgaacagaaacttggacccgaactcaaaacccgacacgtagaatcagacccaaagctagactcgaactcggacccaaactcgaaccctgactaggattagaagcaaggacttaaaccatgaactgaatctagactcagatcgggattggaacttgggactcggacccaacctacaccaagacccaggatgcgaacccacacccagagcttgatctggacctagactgatatccggaccccacccaaaactcagactcggacccgaactcaaacccacacctataatcagacccaaagctaaacccagacacgtacctggaccaaaactcgaacccagaccaggatcgaaaccaaggacttacacccagaattcaatccaaactcaaatcggtattggaacttgggactcggaccgaacctagacaaagacccaggaggcgaacccacacctgaagcctgatttgcacctagacagaaatcaagacccgaacctaaacttcgagcagttctcgaactcggacacgaactctaacctaaactcgaactcagaatcgcaaatggaactag

SEQ ID NO: 260814 - DNA, 1712 bp, Cannabis indica
caataggttctggtcttgcaggctacccgcacaatcactaatgcccaccttgaaaccattgagaagatgaataaggaagccttatatcaactgaccaacgataagaaagcatttttagccttggcagcaatgcaaggagctagggagaccaccgtgtaatccatccaatatgttgtaaaggtggaagataaggatgaaaggcttcgaattcgatccatggaaatgtcatactcgcttcttcttcaaaacccttggaagaaagacccttctatcctcaagcatttcagagaagatcaagaagaatatactcagagggtgatcattgttgatgatgaaacttatcttgagaagtataacccccatgaatatagtgaggagcctgacgatgaatcaactgaggacttgtagcctcaacattctgctaaagtggtagtttctttgaggaatgttgcccaagacctctaggacccttccaaagacaaacctataggccttctaacttcaacccaatatgtacctccagcccaaatccaggaccagactaaagagtcatccatagtgctagctcaagatcaaattccagacccagtccatgagcaatttatatttcatatctttttcctttctttattactttaaaaatagttttttgcgaagacaatttaactatgccttaactataaggcttcatgtaatagattagaagaatgttgttgtagtttatgtatgtttgctttattttccatgcttgtgcttactttattttctgctactatttgttttcttggtcatttgatagactatcataggacttttcaatgtttttggttccaatggccaaaacttgacacccttagacttattgactttgagatcatttatcgaatctttgaagtatgcccgctacaaactctttagatgtcaaccttcccaaagtccttgttaatggcacttcacttatacaaagggattgtaagcttattcccaaacttctataggagtcgcaaagcataactcctatctacgtgtttctcaattagctgccctaagcagaatacaatagcaaatttgtgtcatttagatttagtgagggaacagggtcgagtgtgtaatagactctaggaaaagttcctcacagggagacagggctggatacatattaacacttaggtcatccttcctcattctaaagtaacaaagtttgtttagaatttcaataggtttttcccaaacttgtgataaaagagctgttggaaaggcgagggacttccagacgtgcttcttttatctcactctttgtaggaaacctatcaatgtggttaacggaccaaagcaactgcaatagtattcatgcaatgttcctttttcagggagaaaggctgaaaacgtattggttgtgctttttgtgggaaccaagtttggtatgcaatagactttaagtgattcttcttttcaggaaggagggttaaagacgtttcaaaatccaagtaatattcccactttaagactaaaagtgaaaaccaagtttaatatgcaatagacttcaagcgattcctccttctaggaagggaaggttgaagacgtatcgaaattcaaccgatatttttgaccattagtttgaaattttaaaattaaactacaagtaggaaattaaatgggaataaaaattaaatacaaagaataagtaggacactacgtgtttttgagggcac

SEQ ID NO: 260815 - DNA, 655 bp, Cannabis indica
gataactaatcagattgtaaagagttttatttagggcataaaacccaacactttcccccatcgtcacaaccacattttgcaaacttcgtaagtgattattctcttcttacttatttacaccagtcttcctttttaagtttatgactaatgttttgtttgttctggtagctcttttgacgagacctactcctctccctgagatggttagtaagcataggcaattgttaactcttccttacagtcttcggtcatgcaacttccttttgagcaaagttaacttgcgatcggtgggccttctcgctgataaagaatatacttgtgattacaagattcccaagtattcttcttggcaacacattattgttttgcccgaggaccaggcctgggatcgcttggctcaagcacaataccttcaaagtatgcccctcgagaatccggtgaaggagcatcctgaggtaatcaatgtggttggtctcctactgtacttagagctgagcgtagtacattagtcaccttcaaagactccagcctttttttatatttggaattctcttctcatggatcgcattgctcataagtttgacagttggtatcctagattccacgtccaggttaactgtcatgagtcattttatggtatagccgagcaatacgg

SEQ ID NO: 260816 - DNA, 1094 bp, Cannabis indica
tatcttgtttctaggtgtttttcgaaataaacacacacccagccttattaatatgagggtaaatagcggtataagtattaaagttttaaatttataagtggcataaaccaataattattttagtaacaaaagtactaatgtttgtaaaactgtaatttttatccaattttattagtacagacttcattataaagcccacattttaaatcatcataaatttgaatggaaacatgtagtatcaattatttctaaatatttttttaataaattcaaaggaaaaaaagattacagttttcactgacattgagtacttatgctattaaaaaaatcattaagtttatgctgcttatatactcaaaactttaagtacttatgccgcaatcaaaccttaatatgaaatataaaaagaacataattcagtcattcatagagatattcaaatatcctatttcaattaagctatgagcaaaaggttttttttttgacgcggtgatcaaaatcacacaagattatcaaagcagcaatccacaatcgacaacagcatctcctcgaaccaggatagctcattgtctaaccgaagggcatgctttgccaaaccatgcgctacagaattctcatcccaagccacatgggacaaaactgcccccagaaatttaaacaataaagctataacgccttcaaacagcaccacatcacattgaaaaaataccttcccattattaactagttgtctttagagtagcaaagcgaaactgaaaaattgcaacaccaaaacaaaaagtacacttatattagaatgacaatcttcaaaataaaataatatataaatttagaaattaacacacactttataactctagctatcagcaaattctaaaaaactaaaaaatcaacaaaatttctaagaataactagccaaaggtattaccctttggctagtaacaacaaactagcaccctaatataaaaatgttgaaaaacaatatcaaacaaattaagtttaaaattagaattatcagaaattctctgtaattgtaggcgccctccacaaaataacctacaaaatagcaaaaaataaaactctattaccacaca

SEQ ID NO: 260817 - DNA, 1020 bp, Cannabis indica
ccccatggaggaaacacgaagatccaacgatgaatacctctctgactataaatggtcagccgccaaaatccccggtcacaggttccacctgtgggccaagttgttggcgggcagactttatgcagtaattcatctgcagaactcatacccaataattccaacaaacttaatggtgccggtcagcaaattggccaaaccaatcagtcgctaaggcagcaagacatttatgtatttaatagattagggacgactcatgatctcagcaatgatctaaacaggaggaggggagtggaggatcagcttgacgcgccaattgtgcaacccgaaacccgtgctcaaaatctctctcaaagatatactgatttgactcaggtcagccgagaggccgaacaggttagtccagccgtgcaggcacagttggacaaactaaaaagtatgttccaaggcctggccggtcaaaggaacaacgatcttgagttagaccgagcgcgtggaacccctttctcccctgagattaatatcctggaattgccccacaagtttaagatgccaacctggaagatgtatactgggaaggaagatctcttcccttatcccaccttaagtattttgagatgcaaatggacctgcaaagagtacgaggcgatgtatgttgcagagtttctgccaccctctcaaaagccgcccaacaaaggtatttccagttagcgcccggaaagttcaactcatggaaggctctctcctcgaagttccatgcacaattctcctcctctcgccaacttccgttgcacctaggagatctagtcgaagtaaagcaaagaccaggagagcctctctgagcctacatcagcagattcatgacagaggaacctaaggttgcacgggtaaccgaagacgaaaagttgtctgcaatactggggggaattgaagtccttggcgaactttggaaggccataaggaagaacggaccagtacacttgatgagtgattttcttggtcgtgcagaaggttttatcaaac

SEQ ID NO: 260818 - DNA, 625 bp, Cannabis indica
aatttatctttgttagttggaacgcacaagacgggcgctgttatgagtttatctttcaatgtctgaaagctttcctcacatttatctatccatgcaaacttttgttgctttcgagtcaaattcgtcaatgatgtggctattttcgagaatccctcaacgagtcccctataatacccagctagaacaaggaaactccaaacctcacttgcagtttttggtttttgccagctgttcaccgcttcaatttttgcagggtccacatctaccccatctttggacactatatggcttagaaacaccactttctctaaccagaaatcacacttcttgaatttggcgtacaattggtgctctttgagtctgcttagagttagccttaagtgctcctcgtgctcttccattatccttgaataaatgagtatgtcatcgatgaatatcaccacaaacttgtcaaggtactacgtgaatactctattcattaatgacacatttactaaattgtaattagaatcagaataaatgaataggagaaatcaaaaggaataaaaatttaacaaccggaatcattattttattatgttgtttactaaattgactagaaaaggaatcagaatcattaattttg

SEQ ID NO: 260819 - DNA, 1682 bp, Cannabis indica
gcttatcctatggacaattttgagaaattaaactaaaattaccaagaaaatgtaaaaaaactttagtccatattttattgcagtatactaggccttctaattatttaagtgattatcttaaagatttacgatataactaggaaaatgtttcaaataccacacatgggttactcggcatgctcgtaaacaatatgattctactgcaaagttatgaacacccctattgagaccacccataagaccctctttgatagccaacaattcaaccattaaaggggtgagttcctactgtattaccatggcagctgcatgagtgacaatgccaccacttgctaaaaagggtttaattaaatatttaaagtaaaaattaatttttgcttgttatatatttaattataattaattaattttgaaaaataaattttgaccaggtaaaaaaaaacataaccattagtcacctataaaatataaatatatattattgattttaacattattgttaaaaagtattttaaaagtagatatggaaggctcatattttatagcaatgacaataagataagttaatgtgaatgaagaagaccattaaagttgatattaaacaattaataataactaaaaaatcttaattttatatataataaatttattaatgcactatatctatatatagagacactatatttaaagaaatcatacaatttacaacattattattgaataccattagtatatgttcaatatttattagatgtggctccttacaattagttaagaatatttcataaaaatataaaaaacattaatcaataaaggacatgcaactatgtgttgtcctttattcaaacaatcatattaaaagaaaacccttatatatgttatgtcctacaaattgactcaatagaacaaacatgatttatcatttaactaaatatgcatgtatatttcagaaaatgcaaaataaattttctatagtttttgtattttagatagagaattactacttagtttcatactgctattagcataattaagtatcaaatatcacataactttaaaagaaggctaatttaaattttttagtttccttgaactttgacatgtaccaaatgatgcctcctgaacttttcaaatcgttaaaaattcccctcgaacaattgtgattattaaatttaaggacttttgttcaattttacttaacaaagtctaatgtaaattaaaatttaggggacacaattttgtacttttaaaagattgggggcaatatcaaagttcgataaacaaaatttagtatatggacaatcgtcacattagtaaaattgaataaaattagacaaaaattcttaaatctaacaaatttaatagtttagagagatttttttaacgactttgaaaagttgaggagacatgatttggtacatattaaagttcacctctccatgcaacagagagctttgtacttgccataactaaagcgaagaataagtgttcaaagtcatgacattcagaactcaaaaccatcgaatagacaaggaaaaaaagcacaagatgtatagaaagcattaatttcttaaagaggaaaaaatagtaatgtcaatgttcctaaatcatgtatgagaatttctagaaacaattaaccataagagaaggtaacgatatcaagccattatcttaggccgatc

SEQ ID NO: 260820 - DNA, 2247 bp, Cannabis indica
attatctctatactctgtatttcaaaacttggtatcagagctccgcctttgacgagtgtcaagatctatggaaggtgacggcagaccagctacaccagtagaaacaaattcagcaaccaaccaacactcatcagctccaaatgtgacgaacgctacagtgcaacctccaacctagaatgtggtggttcctcagttcggaagcacactgaaccagccgtttgccttgaagctggatcgcaacaacttctccttatggagaaccatggtgacagccattgttcgaggccatcgcttagatggatacctcaaaggtacgttacccagaccacaagagtttctccctttttctactgattcagatggtgttgtaagctctgtaggtcaagtaaatcctgcctttgagcaatggattgtgaatgaccaactgctactcgggtggctgtatggttcgatgtctgaaggcatagcctcagaagtgatggggtgcgaatcctcagctgctttgtggaacgcattggaagctctctatggtgcccattcgaaggcgaaaatggacgaatatcgcaccaaaatccaaacagcaaggaagggagcgttaacaatgcctgagtatcttcgtcagaaaagacaatgggctgatgttctcgcccttgcaggcgagccatacccagaaagccaactcgtctcgaatgttctctccggattagatattgaatatctacctgctgtgttgatcattgaagctagagaatcaacatcctggcagcaacttcaagacatgttactcagctttgatagcaaaatggagagactccattccttctctggatctaataaacttgctgctgtagcaagttcttcaactgctccttctgctaacacagccaacaagagtccatactctggaaatggacgaggagcgaatagcaacaacaaccgtggaggctataacaacaataacaacaacagaggctcaaacaacagatctcgtggaagaggaggtagaggaaatggacctcgaccaacttgccaagtgtgtggcaaatatggtcattcagctgctcattgctacaatagatacgatgagagctacatgggacaagcacctggtggaacaagcaataaccagcccaagaacccaaataatgcagttgcctacacaacctctcctgactctcttgaccatgatgcttggttcgctgacagtggtgctagcaaccacatcacagctgaactcaatcggatgaacttgaaagaagactataatggtaaggagacagttacagtgggtaatggtaataaactccctattcatcacattggacttggtactttacaaaccttgtcagcatctcctttggttttaaaagaaatcttacatgttcctcaaattactaaaaatctccttagtatttcaaagcttacatctgataataatgtctatgttgaattcttctctgatgtgtgtcttgtgaaggacaaggtgacaaagcaagtggttctcaagggtcggcttagagatggactctaccagtttgacatcccaaatcctacttcccaatctgcctcaaatccatccacgtcatgttttacctgcttctctggtcttgttgtttccacaagtgcgaatgttgcacaatctgttcctagtgtttgttcaatcaaagatcgatggcataggagattaggccatccttgtagtcgtgtacttgatgttgtgttaaacaaaatgaaaattaagaatattaatcattctcttagcttctgtgatgcatgtcaattagggaagtcacacacactgccatataaaactaatcaccaccgagcctcaaaacctcttgagcttgtgcacacggatctatggggaccatcacccatagcatccaacactaatttcaggtactatatccattttgtggatgactacagtcgttacacatggatttaccccttgagagccaaatccgaagcacttggtgctttccttcagttcaaatccctggttgaaaataaattcaattgccatattaaacatctccaaactgattcaggaggggaatatcaagccttcaatcagtttgtgtgtaataatggcattgaattcacacactcatgtcctcatacctcagcacaaaatggacgtgcagaacgcaagcatagacacatagtcgagatgggtctcaccttgcttgctcaatctcatgtccctcaaaaatattggtgggatgccttccaaacatctaccta

SEQ ID NO: 260821 - DNA, 1262 bp, Cannabis indica
tacaattttttaatcaacttttatttttaaaattacatactagaatagttttttttttcaattttttttcatagcagtagttgttatagttacaatattatttttgtaaatttttaaaaaatttcaaataatttataatactaaaagtagagttcctaataggcatgtttaaaaaattttgaacatatttttgatattataaactatttcaaaaatttcaaaaatttacaaggattatattataagcataacgaacaccaccataataaaattgagaaaaaaatattttgatatgtattttcgagaataaaaattgactaaaaattgtaacaagatattcacaacaactctctttgtttttatatatattttccacatgtgacacaaaaatatttattttttagtagatttctccatagcatacatataattagcaaaaaactataatagagttaatatttgttcacgaatcactcaatcgaaatatttaaatagttaatatttgttaatataagtctcacaaaagcataatagagttttagcaatatgtacacattgtaattataaatctatatataaaatagaaaagaaagcttacttcatcataaaatcgagccaggcttgggggtttctcctaagagcattaacaacaggattatactcatgtggctcaatcccatattctgcgagtatctcagccacctccgctgcctctgccattattaatccaatttttattttatatatatttataaaagaaaatttaaataaatttaaccaaaaaaaaaagaaaagaaaattaaagaacgagtttcaaaaacctgtttcaggcacagctataatttcctcctgttctcttcgtaactctctcgaatagtgatcagcttcacttttcgcagcgaggtatctgcacagcacaataaccaatacaccaatcctatcaaaatataattcacgcgcctctgtttctttctttcgtttggttactcgggaaatgaaatgaaaaaacgtgatcatcagattcaggaacaagttcgccgaatccatttcgcaataaatttcaatcgaatcgaatcgaatctaatttattaatttaatcgatttcaaaaaaattgataataacacacattattattattattattaggaaaagaaaaatgaacagagtacccgccgagtcccatggagatagcaccggcggcaacttcagcaataccggcggtgaggacgatagatgaggtggcattggcgccggataaacc

SEQ ID NO: 260822 - DNA, 159 bp, Cannabis indica
tctttacaatttcgcccttgcttagtgaaaattcacaaactagacatagtctaattctaaaattataattgaactatcacatttaaccatcgttataatcttaatgtgataaaagatcctctatatagatgatttacaccgagaagggataaatttacc

SEQ ID NO: 260823 - DNA, 683 bp, Cannabis indica
ccgcctatgcctagggccggccctgtccacgacacagtaataccatacaaccaactattcaaccaatgtaaaacttaaaaaatgatgctctcacctaataatttttatacaaaaaagtgtaaaagctttatatttaaacaggttaaagaagaatagaacttacaggttactaggatgggcaacatgtcacatgttattgaacttatagtgtgatgctaacaacatataatgtggtccatcaaaaaataaaaaacaccatataatgtggacttggaaaagagaaaatatgaaaataaaaatgcgtctaggcatgttattgaacttaaaacattttacaagctcaaatttaacgattcaaactcattcttttacacagcttgaagctattactttacaaagtagattctacagctttgacattgaatagtccaaagcatccacaagataatctgcaacagtaaacaagtaaacagtaagtcacactccttccatatcatataccaccactttgtttctcagtaagaatgagattggttaggggtaatagaatggaatgaaaaagaatcaaattttactctattcttttgtttaattgcagttaaaatattgaaatattattagggaataacttttcactattccatttcaaaatgagcagaaagatcaatttaatgcaagatgaa

SEQ ID NO: 260824 - DNA, 1059 bp, Cannabis indica
ggcataaaacccaacatatacttgtataaattgttgattaggtgacttttgggaagtattaatgttatccaatgacaataactttaaaggggcagcatataaagttacgacaagcattttcctattccatttaattccattttttctgagagcatcaatgttcgctaggccaacttgaatttctatggaatctctcatgtgtcttgtgtgtgagtctttgtgtaaaatttgttgttgtgttttattttgtttattttgtgttgtcattgctcggggacgagcaagattctaagtttggggtgttgataactctaagatttagagttatttttatatctttaagcttgaattttaagttgaattgtggagcaattaatgtctatattatgtaattgtgtttagtttgttgtgtctttgtaataaatggaagtgtgtgtgttagtaagtgttaaatagacttatgttgttgtttttatgtgtattaagcagaaaaaaatgcaagaataggtatttggaaatatttgggacaaggaggaaaaggagcagaaaaatgcttattgctgactggcattgctatagcaatcatcgcgtagcaattgccagcccagtaagtatattttggctgaaagtccagctggctttaatgaagaaagaaaggagctgaggtggcgaaatgtggctaatgactcaacaaataggtggaaaatgaaggacaagtggaccatgacttggatttccaattagggtaaactttagtaccctaattggggagcaaaaaaaagaggaaggacatagaataaaatggtggctgcactttgaagagcggtacgaaaacttacagcagaaaaagaaattcaagtacagaaaaaggagagtacaaagaagagaagaagaagactaagaagaaggaaaagaaggaaacttacaaagaaaggatttgagctcaccactcaaatctcttgctctcctcttcattttgtatcattttctactctctaattgtctctttaactccatgaacatttcactttctggttttgagtttttaatttcagctat

SEQ ID NO: 260825 - DNA, 972 bp, Cannabis indica
ggaaatgaaaactcatcaaaaatcacatcacgagagatatacaacctgccattagagtctaggcatttataacccttgtgatttagactataacccatgaaagtgcaaggagaagacctgaattctaacttgtgttaattataaggtcttatgtttggatagcatttgcacccaaaggttttaaatgtggtataatcaggttttgtattaaagagagtctccaaaggtgatttaaagttcagcaagggagtggggagtttattgtgtatatacacagcagttctaaaggcttcatcccaaaacttaaggggcaaagaagcctgagcaagaagagctaggccattttcaacaatgtgtctatgctttctttcagcaagaccattttgttgatgtgttgtaggacaagggtgcctatggtgaatcccattttcagcaagaaaattcgtaaaagacctgaattcacccccccaatcggtttgaagagtttcaatggatttacctaattgtaattcagcttcagccttaaagtgctgaaaggttttaagtgcatcggacttatttttaaggaggtagatccatgtgaaccgagaataggcatccacaaagtgaatgtaataatttgtacccattgaaagattgtgtgtgtgaaagtccccaaagatcagagacaaccaactgtaggggttcagatatgactgtttggtaggctttagggaagggaaacttgtgaattttcccaagacaacaagcagcacaaacagagaattgaaaatctttattcattgctggtatattacaacttttgagtacagtttggacaatcttttcagagggatggcctagcctattgtgccacaaagtaaaggtattttgtacatttttattacactttgaacaactcgacatagtgacagaagagtcatttaaagtaacaacaaaagtacatttattatttggctgagaaatgaaact

SEQ ID NO: 260826 - DNA, 551 bp, Cannabis indica
ggttggactggaggcggtcagggaaatcaaaatcccaagactcgtcgcggccgtggccgtggcagagcttagggtggtcgccctgtaaatccaccacaagctcctccagattgggagcagaggtttgcgaaaatgcaagatcgaatccgccagcaggatgaagagattcagaggctgaggcagcagggtcctcctgtcgtgcctcctcagcaagttgctcaggtttttgtaactttagcgatgccagcaaaacaacctgttgctgggaaccgtatggagccattgtatgaaagattccgaacgcaagcacctccaatgtttttgggaggtcctgatgtggtgaaggcagaacagtggctcacaataattgagcgtattttaaattttatgggagtggttggtattgatcgggtgacctgcgccacttttcagttccaggagcacgccctcgtgtggtgggagttgataacccttactcgggacgtcactgttatgacctgggaagagtttcgggagttttttgactccatattacaatgaagccatccgca

SEQ ID NO: 260827 - DNA, 492 bp, Cannabis indica
aattatcacactatttatttatactattttttttttatctaaaaacttattctttaaaattagtaaaactgtataattttgaattattatacatgagttttcaaaatttaaatattattaattaaacaatagttacttaaattaatactaagaaaaacaatatgacaataaaattatatattacttttaaattactagaaaatttatataaatattttaaaaaattaatatttatattaaaatagtgtttaagattaaacaattttatgttattaaagtatttttattttactattttaattatttattaaataaaaaatatgataaaatattttattatatatttacgatatatacttgattagataagatatattattttattttattttataatttaattatttttattttttgctgcgaattatttatttattattatatatttttattttaatttaagtttttctttttctaaaagaaaataaataa

SEQ ID NO: 260828 - DNA, 662 bp, Cannabis indica
caccaccaattatgaactacaccattccaaaatatcaattccaaatcaaagaactacacaaattatgaactacttcaataattcccaactatcaatttctcatcaagaaattcagaatattcatggcaatcaactaaatcactcacacatcaaacaaatacttgactgccatagcaaaagtataatccaaatgacaataatggttgaccaacaaatcagggagagtcgaatgagccgttgatgatggtgctttactcgactggttcggagtcaagcggagcttgagttttgggttctcggagtttgagttgacgagaagattgctgggtgctattggatgaacggggctcggatggtgtcgactggaatggtgaaatggaggtgcttgtttgcttcctcggttgccagtggtgtactagtgtgtgtgcgaacagagtcggagctggagtggggtcgactaggtggatctcttggtggtgggggattcacgtaatggcttcgggttagcttgctggtggcgatttttgtgaatggaggttgaacgtggtgatgggagatgaaagtgatggaaattattttaccatgatcttagatctacttacaagtatgttgattaacaccctaaatatgtgttgggttttatgccctaaataaaactcttt

SEQ ID NO: 260829 - DNA, 737 bp, Cannabis indica
aaaaaaaaaaaaaaactgaaagtaccttgtctttggagacatcaaaaatcgtagtcgtcaaaattttaaaagtgggatggctgctacaagtccactgaataatccttggaattccagaaattttcttttagccattacttaccattcatgtatttacaacactcataaaaccaaacttgaaatacatgaggacaatcgatcaaagtataaaatacactcagcatctttcctaaactcttcgcctttctaacactttcaacccaactatcaagtttatccttcaacgacgaaatagtcaattcaaaagaactcggtccccaagcaaattcatcatacctaccactgtctacaatatctaaaatggacaaatgaaagtttttatgctttgttccactaagcaaaaactattcaacaaaataaagaactgctaacttaacaacatcctcatcagaattacctcacctctttgtggtaaaatattccctaacagattctttagtaatagaagtgaaggtcgactaatatttcaaataaagactgttaacatcttgcttaaaatccaacacactatagtcaccttcacaatctaaaccagttatctatgtaaattcctcaatgctaaacctaagcctaacaccatgaatcataacccacaattaagcatcgttaggctgctgaaccttccttaacaatacccatgaaaaactgggttgcactttgaaatcaagaagcttaat

SEQ ID NO: 260830 - DNA, 656 bp, Cannabis indica
tggagataaacatgtatgtaaataatggaaggagataggcagacatagtatatttataaatgtaataagtaggtagacatacacacacaaatgacatgcatagaacataccatataaatattataaatgaggcttgtgcttgtctgtctacttcagcttctccttttttttagctgacatcatctaacttgcaggttactctaaagttgaagtgatgtgtgcttcttgacctttttgtctaatggacgtttaaagactaccatatatatatattggtatccgtatttttgtaaacatgacacgtggatagtaatcaaagaaggccaaggagtcattaggccacccaagtgcttcattgagagtcccaagaagataaaggcatttaacctcatggaaaaggtctccgtgaaagaagtctccccgattgttggccataaagagggtatccgtgagctggagtctcattccattctagaagccaagactgttttctcccgcaaggtgttacgaaaattgtaaatagtacgcaagtgcacgtaatcaagtagtaagctcacacaagtgagatcgaaccacagggaattggattgagtaccactagattaaatttatgtttctatttggcaaatcttctcttgagtttaataattgaataa

SEQ ID NO: 260831 - DNA, 576 bp, Cannabis indica
taagatcctggtaaaataacttccaacaggcacttcctcaacaactccttgaatctttcccatgcatcactggtagtctcgtcttttgattgttgaaaggacatgatctcacttcaaaattttgcatttcttgtcggaggaaagtactttctcaagaatttttcagccaagtcattccaattagtcaccgaatcgggagggagagtattaagccaagctctagcccgatccctcaaggaaaatgggaacaacttcaatcttaaagcctcttcacttactccttgtagtttgaaagagtcactcacctccaaaaatgagcgaatatggaggtgaggatcttccgttggcgacccaccaaattgaccaacccttttgagcatttgaaacatgacgagcttgagctcaaaatgaggtgcttggatttcgggtctcacaatacccgaattaagctcattgaacataggggctgcataatctcttattgctcgggctctatcatcggccaaagcaatagggttggcttcattatgagcacccccaactattgggttttgtgccctaaataaaacccattac

SEQ ID NO: 260832 - DNA, 1181 bp, Cannabis indica
tctaatatcatgaaatgcctaactactgcgaccatttctttctctgttaatggggaggtttgtggtaaagtctttcctaccagagggcttaggcaaggagatcctctttctccttacctttttatcctctgttctgaaggactttctgcactccttcatcattctcagcgtcaaggagttcttaaaggtgttgctatctctcgcactgccccttctctcactcatctgctgtttgcggatgatagtcttcttttttgtatggctacaccgtcttcttgtgaagctttgaactcagctcttcatacctattctcaggcttcgggtcaattaatcaattttgataaatcatccattttgttttcccccaacactcaagccaatgttcgagatatgtttatgcatactctcagaatggtggataagccttttatctctaagtatctcggacttccccaatgcttttctcgtgctaagtatcaatcttttgctttccttaaggataaggtcttgtctgttcttcaatcctggaatcataaatggttttctaaggctggaaaggaaattttagtcaaggctgtccttcaagctatcccttcttatgctatggcttgctttcgtattcctaccaaaatctgtaaagaacttgaatcaatggtgtctaagttttggtggggctcttcccttaatcgcccttcaattcattggagaaagtggtccatgatctgccaatctaaatttgtgggaggtataggttttaggtccctggttcattttaatcaggccatgttagcaaaacaggcttggagaattcttcaaacacctaattctttacttagtcttaccctccaagctagatatttcccacatacttcttttcttgatgctgttccaggtcataacccttcgttctcttggagaagtatcatatggggtagagatcttcttaagagaggcctttgttggaagataggtaatgggcaaactattaacacaatcaatgatcgctggttgcccaattttattatcaaggattctgatttgatagccgctcttccttctccttctctatcttactttatttctccttcaggtgcttgggacttgaacaaactgagaggtcattttcctgctttcattattgatcatatcttggatatacctatagcaggtcattcgtgttc

SEQ ID NO: 260833 - DNA, 1434 bp, Cannabis indica
ttacaagttaaaagttctatgtaattttacttaaaaaatagtgagcgtgtatgcccttaaaaagctctgtggcagttgagtatattttttctttttacctgttataacggtctttctgcagtgattctatccacaatttcaagccaaatttttataactgttcccgcctttatgttattcaaattatcgttcaaccttaaactgtatccttcaactctgatactctgttgcttatttttctgatgatggacaacctgctttctgaattgaaccataccatgactctgtctgatcgagaacgagatattcaaacactcccagtttcatcaaatcctgggcttactgcttcccagaattttagtctctatgctagagtggtgtcttcccgtgagatcaatcgtaaaactttcaaaattaaaatgactgggcactgggaaggaaaatatccagtcactatcactgaccatcactcaggtcttttcctggtatcatttggttgccttggggatcttaaaaaagttatatttatggaaccatggcactttcaaaatcatcacatagtcttatgtccgcctactgctcttcaaattgcctctgcggaatctttgcatttatcacctttttaggttcaacttcacagacttcctttcttaagtaagtcgaaaatcatggctgagtgggctggtaatattgttggtcacttatattggtggtttcatgaggagttcactcaatgaaggatggggtccgtttccttcgattccgtgcttcaattgatatctcaaagcctttactcaggggaaaaatggtaaaattgcaggattctagagatgaattctggctagaatttcgctatgaaagactaccagaattttgttttgaatgtggcactattgatcatccttttgagcattgtcatcaattccttgagaagatctataatggtattgaaccctccttgtcatatggaccagagatgataggctctcccctcccacaatctggatacgataggtacagaacttatttttttaaaggagaagtgtggcctcttatgactcgattagccaaaaaatcctttactgctgttgtgcctcaaatatcaaacagaacccgatcctaccctcccagtttaaccattgcagaatcgtcccaaacaccagtaacccagcataccaatatgccattgaatgattccaatcgtgcccttttgattcacaataccacaaccacagttacaaataccagtcataatattgcagtcactcttccaatgccatcttatctccataactcttttccatttgctacttaccctccaccatccacagacattaatcttcaccaatctacaagtttcttgtcttcaccactaccctcagccatctatactaacactactggttttcccaatatacccaaagacacctctat

SEQ ID NO: 260834 - DNA, 764 bp, Cannabis indica
cttgagaagaaccatacttggatcattgtatcattaccttgtaggccatcatgtcattggttcaaaatgagtttacaagattaaacttaatgctgataggagtgtggaaaggttcaaggctaggttggttgacaagggttacaaccaacaagaggggattgactacacagatacatttgcaccagtaactaaattggttactgtcaagttggttttatctcttgcagccatcaaaggttggcatttgcatcagttggatgtcaataatgcctttctacatggtgaccactcaacggtaggatacctccgagtatggccgtatgaccttggtgacctcagccatgaaccgttaaatgtagcccttcaaagtttcatcttatctttgattcatttcgacaagatcctccagtcggacaggtatttgtcttgaagaagagaattcaatatagaactctctggagaactcttcccaagaattaaatctttctggggccagcttgaaataccattgttgggctacttcagctagagttgctggaaagattcgacatcgcacatctccgatatacttgtaggagatctgtttggatctcaaagtacttcaggtgtactaggggatcttttttctccgtatacatcttgaatttgggcaagggcaaggcgttgatgtatgccgagaatggtgatccccttgacctgtctagctcaagttctaaaggttttagaccagctaggccctaatcatgtctcgcaattgatccaac

SEQ ID NO: 260835 - DNA, 583 bp, Cannabis indica
taataaatattataaatgacaatgtaatttgataattactttaattatttaataaatagttttgacatttatagggttgaaagtgtaaaaagtagtatttataaaaataggtaaaatagttgggaaaaatgacaaaacccaaacttgagtggggctcattttagtggccgaccatcaatttaattttaccttattttatcattttttttattcctaataatttaaccctaaccctattgaagatagtataaaaggatagctaaggtctcttcatcaaaactaatgcctccaaagctaataacctagcttttgataagacctcttccttcttcttcttcctcttcaatttcgaaacacttaatatttcttactaaataattttagccattagtgattgagtaagtgcccacacacatcaagttggtcctcaatcatagtatgtaagactgtgaagaatccaatcaacaagaaggagagaaagagatccagagttgagatcttgataatgctttgttacagaaaggaatcaagggctagagatctgaacggaaggagttaatatattccgctgcaatcaatataa

SEQ ID NO: 260836 - DNA, 514 bp, Cannabis indica
tgtttagggtaggtttttgagcatgttgggaatggttttaagtggtctccatggctgcttgaattggatatggtttgttgaaaccaaagttgagtttttcttcactttgaagtgtgattttgagcaaattgatatattgtaatgaattagttgttgggttatgtcatgtttactatattatactgttctggaaggttttagcaggtttggtgggggttggattagtttttggggtgaaaaacaagaaattttcatggctgccaggaaaaaacgacaggctacttttcaggcacccagaaaaacggccgaccgtctttgccagtaggggggaattttgagtttttctcctcaagtctaatctgattcggggtttctttcggagtgaaatttagggtgttttagagatggttaagctagtttgaaccgggggaaagtaaggtgtgtccgattgtgagaattaaagtcgattatgagaaatttgattaaggtttttattgagttttgattgtcgtga

SEQ ID NO: 260837 - DNA, 656 bp, Cannabis indica
tttactttttggcaactacttctgtgttagtcaggaagtaacgctagtagttaataaattgttggtactatgcgaaaaaatgtatagaacctttccattgactgaatgagtatctttcctgcgactttaacattcaatctcactggtagagttagagactccagatcagttttacacttctccaaaatcactgctccaccccagagtaatcaccatctcatcagtagacattctagcatcaaggcaagtctagaaacctgatttggtgtagtctaagagtattaaaattccactcttatcgactaacatatagttcctcttcatgatcttaagattcacttaattgtcttccaatgttcctttcttggattaatctgataccaactcattactcccactcaacagcagatgtttggtctaatgcatatggaaagcatatctggatatcttagaccacccactgttgatcgtaaggaattccttcatggcttttatattttctggaatagttaagacttttccttagataagtaaaatctatgtctagaagtcaagaagcttctatagattgccattagaaaaatgctccagcatcttactaaagtaagttgctagcactagagtaagtaaattaccaggcataccacaagccatag

SEQ ID NO: 260838 - DNA, 640 bp, Cannabis indica
ggcatccaaggagaaaaataaaaataaagaaaaaaacaaatctttattacatatagtaaattaaaccacacatagaatgatcaaaaaccatacttaaaaatttaaaattagaagctcataaaaaaattaaagtatcaataaaacccaaatgcaagcatcactcacatcagtccttacagtgattatttatttgagattctagcactgcctgtatttgagcaaatagtcatacccaaacttgttacatgtgcacataagtgagaccatgcctattagaacttactcctcatcactgctaccacttcatatgaagccttaaactaaccagatatgtatgcttagtagaattacatatgtctatgaaccttctaatttatcttcaattaaaccattttatgaaactttaaatattcttactgtatgttgaaccagtaacagattaaggcaaaaaagttctaacaagacaaaaaggggcagcaaatataattctaaatttctaattcaccaaactttagaataatcccaaatctcaaacaatttttggaataaatcaaactcccgagaaatcgtaatcaaccagtaaatatttcattaatttacaatacatcattatacaataatatatataaatcagaaaaga

SEQ ID NO: 260839 - DNA, 1044 bp, Cannabis indica
gtgtctaaaccacttgattataagatgaacttcttaaagttattcttttttagttctacatgcgtacaacaagtagcaccccaagaaagttcccaggctaagtctatgaaacttggtgaattacaagtgaccaagagaccgtaagtctgcctgctcacttggggggcacccacaccgtactatgcatcgaactatcacagagaatttatgcagagaaatttaatgcttagtataagctactaaacctgcctctaagtcaagtgcaggcatatttgagcttgacataaagaaaaataaatctggatactaacatgttaaggtaataagaagatagccaggattaaagactgccttgtctgtcaggtatccatgataaaaagctttagagctaaacaatagtaatattcaaaaatagagtgcctatagaccaaaagtacaaacatgaaatccctaaggctgaaaataagtaatgtttaaaaataaaaggccaataggccatacaaaacatgaaatcaaaatgtctatgcaaataaaatcataagtctgatgtactaataaagtgaagctactcgtgtgcaggtgcaggtggagccgggtcgtaagctgaagtgtccagattgctaaaagagtgggctggccatggcctttacaggctaactagccatctggtcaatgccctagccgaccacctccttagtgggtgtgctggccatggcctcatcaaactagcttgatgacaatccttctgtatggacggtggtctgatttgtctccatcctactctcatacaactctttcccttgggccagtgtgctctcaaggaaagaatatcccatataggaaagatcaaccttgggattgcatagcttgatctccaaagataggccatcatactcctttctcatggcctgttggccatcaaggacaagctttagttcttctttgctgagcttaagttcttcgttgctcctcttgagttctgcctctagcctagagacgtcagcatcaagtgcgttattctcttgggtcatggtgttgagaatg

SEQ ID NO: 260840 - DNA, 686 bp, Cannabis indica
caattacccacatatatcattttcaatataggcgccactgcgcatactctacgtgctaactactgtcttacctaatgtcccgcaaacgtggagattccaaatcccaaggtgctcctaaccaagtgccgataatcctagtcacaatataaaattggcattcaaattataaataatcacatagagctcggaacaaactttccaatgatataaagaacgtcccaaacggagtcccgagtcaaacgtcatggcgaaaaaaaaaactcaaaaaaattaacaaactgccattgtcatggtcgcgaccagacctatgatagtcgcgaccaatgggtttaaaaacccagaaaacccactttttagcttcgaaaattatgctcaaacagacccaaattaagtcaaaagcatgcacaaccaccagatttaatcccacaataattatcaacataatagagagctaacacacatattttaagctctaatccaccataagaatgcttcaaaattaaaatttaaacaatattcaatataggctctaaacttgagcaaaaatcaccaaaattctcatatccatgaacctaaatacccaaaaaaaacttcagctggttatcaccataaaattcagattataaaattgttggaatttattttaccaagatcttagatctactcacaagtatgttgtttaaaca

SEQ ID NO: 260841 - DNA, 1643 bp, Cannabis indica
ccatataataacaaaaaatatataccttacaatcaaaatatatataataacaaattataaatataaaaatatgtaggatgctaaaaaaattatacatcatgtcaacaaaaatataatagaaaatagaacttatatattatttaaaaaaataatttttgtgagcaaggatggaatttttgtagacccgataaagattgaggcaaatcaagatcgacctttcccgctcttctctctctttcgatgtctcactggaactatggcaaaaaccggcgaaaaaatggacgagaaagggaaatccaaagaaaaaaaataggtccatcttcttcggatagggtcatcaagaccagatccatggatgatgttctcagagttcaggaattggagattgcagatgacattgagccaatggaatagtacaatgaaccaatggaatagtactcggaaaaaaaatcgcctgaagacggagtctatcttcatgagacgaagtgaaatccagtaggacttttctgactggcttaccgtggcaaagaatgaaatacggatagctatcacatcatttaagcatctcaaaatatgcctaaatcccaagaaactaaattttgggcgcccaggttgacgtttatgccaacctgcgtgcccaaaagttaggttgatctcacacttaactattttcaaataagacaatctatttacaaattctcaaataagacaatctattttcgaattctaattgacttattaaatcaattaatttagtctacaagatgatattatctcagataatatggggaccgtgggcctatgtaatcaagctcctaataagcagatcttgaaatttaccgagtaaatttcttaacttgttaattcatcttgattccactatagatttaaaattgcactattgattacatagaatactttatacaccaaatatagatacagtataatttatctattttttcaatcacaacaatcattgattctctatagacagtttatattgagtaaggaaaaattattattttaaccttcaatgtatttatccttaaaacacttagttacttgtaaatgatattttaaaatactaatataattactgaaatgagcgctctatcatttattgcctttagccaagctcaaaggaaatcatcgtttcatttttattagacatagaagctatagatgtccatatctatgattaacactcccactcaattgcactaccgagttctcaagatgtaagtatgcgctagtcctacaggtaagctggtaacaaaaaagtcaaagaaccagtgcaatacaattaagctagagcttaaccatctcaagattgagatcaaatgatctatgatcaactaagtgatattgacttagaaaagatataatggtaagtttatgatatctttttcactgttaatattgatccagtccaatgtatagtcgatacatccgatcctggtttactttactaatgccctggaaaagacattcgacttatccaaatgtaagcaaatcttatcgttgattatcacgtcagtataaatctggtgcactgataaattgtgagactaaataatttaaagcatataatcacattactttctactgtgatgacatcagtgtaattataaataactatatgt

SEQ ID NO: 260842 - DNA, 499 bp, Cannabis indica
attatatggattaaaaaaataaatattgggcaaaaatacacttatggccgtacacttaaccactttctagttagatttttgccactttatttcaaccacttattcctcttttcaataataccatattttcccaattcaatcctataaatgccaaaactatttatttaataattataattaatcactaaataaagttttcatttatatattttattaattggaccatacaaagtcttttaattaacaaattgaccccaaaacctgttttcttcacaattaagaccttgttagtgaaaattcataaataagacatagtctaattttagaattataattgattagttaaaatcaattaactgagtctgcaagcagtattatctcaactagtgaggggatcatgggcctatataactgatctttcaataagttgatctagattcaccaacaagggtgcgtttggaaagccacaatgtaattggatttgtgtgtaattggaggt

SEQ ID NO: 260843 - DNA, 378 bp, Cannabis indica
gtaaataagattgctcattatatggcgcagactttgtatttttcccacttggtcgtagtattcaagatggttttctgtaacctgagttagttaccatttcaatgactgattttttttagttaaatgaaagctgaagttttaattcaaaaaaaaaaaaaaaaatcctaaaataattacaacatatatatgtttttttttttaaaaaaaaaacggtaattttaaacactatatatgttaatgtgttaataatacattatacatcaactattagtcacattaccaatttaccattatattagtcatataagataagaaaaaagttccatatttataatttggaaaaaagattaacaattttttttttttgagatacaattt

SEQ ID NO: 260844 - DNA, 908 bp, Cannabis indica
tcagctcttatatctaagtttgagagggagttacttcaaggttgccgtgttgctcaaggggcgccaatggtctctcacatgctgtttgctgatgacagctatgtcttttgccaagctcataatggttcggctggtagtgttttgtctctgcttcggcaattcgaaaatgcatcgggtcaacaaattaatttggctaaatcttctctttttttcagccccaatgttcaagctcagcttcgggccagtatctgctccattcttcatattcctgaggctcttgaaaatagtttttacttgggactccccaacattatagggagaaacaagaaagctattcttggtttccttaagaacaaggttttgaacagaatcaatagctggtctgggaagttgttgtcaagtgcgggcaaggaaattctcttaaagactgtggttcaagctctccctacttatgctatgagtgtctttctcatcccacttggtacttgcgacgaaattgagaagctaatggctcgtttctggtggaaaacaactagtagtcagggcaatggaattatttggatgaattgggaccgtctttctcgaccaaaagatgaaggtggcttaggctttcgccttctccatgattttaacttggctatgttagctaaacaaggttggaggttgctgtgctacccggactcccttgtctccaggctctataaagctcgttattttcctcatgatgactacctctctgcggggttggggcgtaatcctagtttcgtttggcgaagcatctggagttctatggatcttcttcgccaaggggttaaaagaactatcggtactggctcttctactagtatcctgcatcacccttggctccctgactctggtaatccttacatcacttcttctcatattgg

SEQ ID NO: 260845 - DNA, 781 bp, Cannabis indica
aaactccactaatcattaataattaatttataagagaagttacctcgaatgttacaattaagtgtttaggccaaggaaggaacatgtttggtacgtccctaacatatctgcacccttcaattgagattgggatttcagcatcctcttacagcattttcgaaattagaacttaggcatgtgaatcatcgtagtccgtgcagtgaacagtgattttactaacatgctcgtacagatacgctcgggccacaatattatcgatgttgtctgagtagagatatacttgctgatcaagggtcgaatggtcatcgaaattgcacaggagagctagctcgttgagggaaacaaactccgcagcataggtttgtggtggaccctcatcctcatgagcgtatggttgtggaacatacgcctcaccagccacctctccttcttcctcttgttcgacagtgtttttcttctatttaagggattggagttcggcttttaattttttaatctccttctgttgccgagccacaacatcagacacttccctttgcttcctgccgaacagtttagatgccctggtcaggaacctgtaaatcataaaatgcaaattagctacgatttttttgtaaaactaaagaaacaacattttaagtactagcatacccagcagccctgacacgtccaggatgctctggtgtcccgagcgcctgcgtcaggatatcatttttgccctggacttgaatttgtccctaagtaagctgctcctctaattgagcctaatgcacgcatatat

SEQ ID NO: 260846 - DNA, 655 bp, Cannabis indica
aaaaaataatttattagttttttagtgtttttttttaaataataattccatatataatttttttatttctattattagttttatctattttaggaatatagagaataacaaaatcaaagaaagaagtggtaaaattagaaatattaattttttaatatttaattaatgattatgaatatcaaccattagatatttgattcaatggtcaagaataaaatacccatacatgggtaatacccattaagagcatacccatatatatatatgtggtattagggtttatgttttgaaaaggctataaaaataattctgattataaataaaagttgaatatttttatatatacttgtttgttaaattataaatatcagaaaatttcttatttatacatgaggttgtgatttttagttatacgaaaaattaagatcacttagtcatgaagaaaacagtcagcaacatattaaattttaagaatctttaatcaatgtttgctagtatcattcactgatgtccgttattcggtgcaagtaatctcgattcggattattgatgtaacatgacatctaagtaaaggtgttgtatataataaaaattatatatgacaatgagcgatatgaataaagttgtctttatcaaacttaccatttactataaa

SEQ ID NO: 260847 - DNA, 1055 bp, Cannabis indica
caaatcaatgggagggcatttctagccctttcttcctctccttccgggctcttggtgcacggaaacgctttctcggtcctctcgactcctgagggccaagactccctttttggacgtttgcccctctgcggacctttcccttttggaaaatctaagcggacctttcgctgatcctacacctttttcttcttcccgggagtggaagtagggtttttcttttcggttcccttcagagggataccttatagggctaggttccctagacttctgctttttggaacttggcgaggattcttctggttccttcccaagtccagcagggatggcttttgggtgcaagtggattcctgctacctccatggctttttgcatggccagcatcacctcttgcattttttggttttgctctttttgggctgcgatttcagcctcatgatcggcagccttttgccttaagagtaccaactctgagtagctgccttcgtcgtaggcgtcgtactcgtcgaagtttccttcatactcgtcatcaggggttccttcttcttcctcagagcccacatttgctcttgaggccacgtcctcatcatttggatcttgagcatcttgaagggggcgaggttgacgtgtgcttcgagtctccaccatttttgtttcgttgtaaggtattgtctactttcagacgcttccttcagctctcaatgaaagcaccaaaatgttgaccgaggttttcggcaaccaatataataataataattaagaaagctataaggaattaagagagagatttttacgtggttggggcattaatgagccttagtccacgagtctgtgtatttatgatagtatttattacagagaatgttcttggtggatttttcctcttctagttcttatgaaacccagaattctcgacccctgccttaatgagtttgggggatatttatagtgtttttgtggggtgatccctagaattgaggtacatgtctttctgtaattctcagtaaaggcacacattcccaatgaatatatcataggaaatgcatggtctaatctct

SEQ ID NO: 260848 - DNA, 1965 bp, Cannabis indica
ctaagggttagttaacgagttcagtggtgttaaaactgatagcttatgcaattaacaagctttgctgaaatattgattatttatttattcaggatactatggggagtgtggaaagagaggaggctacatggaagttacaggatttagtgctgacataagggaacaaatatacaaaatggcatccgtaaatctttgctctaatatttctggtcaaattcttgcaagcctcgtaatgagtccacccaaggttaacatttctcttgtcctttctatttaaactcttatatgtgagacagcacaacttttggtaaaccgtatgaatagtaagaattaaaggcggcttaggccagtcagaagtttctagtccacatattagtcatatgaattgcttttgatttttgctgttgtgaaatgtatggttgtaaacaaagataacaatttaacacaagtttctccagaatgtagtcaatatagagattgattttaaaatactttttatgcaggttggagatgaatcgtacgattcataccgtggcgagagagatggcattttatcatcccttgcaaggcgagcgaaggttagtatagtatgcttgtatcaatcaatttaagttacatgttgcatgcttctaaggctttttattttttgtttgtaaaacataattgtaatttccttgtggtataaatagacactggaagatgcattgaacagcttagaaggcataacatgcaacaaagcagaaggtgcgatgtatctctttccccagatcaacttgccccagaaggcaattgaagctgcaaaggctgcaaaaacagtacctgatacattctattgccgtcaactgctcaatgccaccggaatagtagttgttcctggttctggcttcgggcaggttagtgttgtaattatattgtcagcggaaaatgacattccttttcgtatttagatttgacagttttaacatggtttgtctttgtttatttacttaaacaggtcccaggcacttggcattttagatgcacaatactccctcaagaggacaagattccggccatagtgacccggttgactgacttccacaagaaattcatggacgagtaccgtgattgaatgaaaatgctatcgagtggatacggagataatagcgggaataataaggtaggtttgcctttcattatgcagaaagaagctttgtaacgaggaaacaaacattatagacagcaccattccgttgtctgtggaatataatcacctcggtattgtttgattgattattggacaatacttgaggatgattatcattcgtttcatttttcttggctttctctgtttacataataatttaaacagctactagtactatctatctattatattattgaaatatgattggaaggaaagtttttttgtccttttttcaaaccatctcatgaagatttatttcagttccccttgcaccaaaattaattgaacgtgttctggattcaccttccctgtacacgcaaaacaatattgaatctataaatagaaaatcaaaatctaagagaagagctctgtttttcttttctttttttttttccctgatctgaaacaatcgcatttattcaaaacccctctattgtgtatcaatttactgtcatagtgtcttgtggaaaacaagactcaaataagttgcataaattacaagcatttacatcaaaacctcaaatggaaaatcattttctaattttcgtcggtgcatatttggcgtagattaattagatggcacttgttgtaatgtagtgaaacctcacacgttattgtgagccactaggcttataattatccaacatagctttttttataattagatcttactttagaaaggatatgacactattggataactatcccaccggtttggccttttacatccaacattttcaatcaatctctaatcaacaggcaaactattctttgtctat

SEQ ID NO: 260849 - DNA, 780 bp, Cannabis indica
tatgccaaaaagggaatacaatccctgattgtactgtagccgttggattgaattggggcatgatttaatggctggggttaaagtaggggtagttagggggagaaaaatagtaactggttggtttttttttaattttaattaattaatttttaaaaaactggcaatgattgacgtttgatgtacgggtgacagttaccaattttcaaaatacactaaatagtgggttcgtgggttgtattagggcatagttctttcttcacatttgttcacacttcttcacatttccttctccttcttcacattttgttttagtgattaaaattattttaaaatttgggggaggaaactgcagtacgttcggagttactgtacttcgttttttggttctccggctccgtctccgacctcggtgtacaagtaagtttctccgaatgtaccaattttattcttcttttgcatgtttgttcgttctttagtttgggtatgtgaaaaattgtctaacattgttaaagaaagatttaaacttttgtaaagagaagtgttgttcttcaaccgtgtatgtgcatttaattttgtttttgtgttccatttttggtttattgagtaattttaatcctttgtacatgctttaaatctgcttcgtgaacaagatttgattctcagattgctgaaatacaaggtacatgtgtgtacctttcttgtttgttttttttattgtgaaagtgttttggattaatttataccctgtgtgttaggggtctttgttcagagtctgttaga

SEQ ID NO: 260850 - DNA, 1300 bp, Cannabis indica
aaatgtgtatattttaattatttgtccaaaggtaataatttcaatatatatttattattatttttggcttaaattaatatatattatttaagaaatttatttgcccaaaagtaataaattcttacttgatatgtattttttttttattgttaacttcatgaaggtagatcatgtgtgttatattctcaccctaaaggggagtttataatgaccagttgactctacaatattttctaattgcttggctcatatatagcttgatcaagttttattttttggtctccttttctgcgaacaacaataacgttttatctgaattctgaatgcttctaactttaagacatggaaacgagatgtgaaaattactttaggcataatagatttggacttatgtactgatcttactaatatcaacattgtcgcctaaaaaattcttcatgcacaatggaaaaattcaaatcatcttagtctcattgctatgaaagttcaattccaaaacattcatttaatggtttgccaaacaccttaaatgctaatgactttttcaatgctgtagaaaaattatatgacactagtgaaaacactgcagttgaatattttatggatgaaatgagaaccattcagtatgataaatcaaaggagtcatctaaaggaatttttattcctatgtctttttcaagagatgataatagtagtcttaatcctactccaattggtaatgctcccattgctgatgaatatattgctcctaatatctaagatgacgagggtcctattattgatgaggaacctattattgaagaaggttttgttgttgatgaggatcctgttatcagagaaatctaattgtggaatatgtcatttaaaatgatggtcaacaaatagaggttattccagaagtacctcctatatggagatctcaaagacaaaagatgtcaataaggtgtgatgataattttgtttaccttggagaaggtgaatgtgatcttggtcattttgtggaacctctcacttatagtgaagcacctaattgtccacattcttcaaaatggatagaagctatggatgatgagattaagttcatggacaaaaataatgtatatatggaagttagctctattacctatggttttaaatcaataggttgcaaatggatttttaagaactaaaaggataaaatgggacagattgaaaggtataaatcacgtttagtgacaaaaggctttactcaaagagtgtattgattatattaaaactttctcacttgttttcactaaagattcattcagaattattatgg

SEQ ID NO: 260851 - DNA, 920 bp, Cannabis indica
attgtatataaagtactacatataacctaataatttaattgcccctaagactataagtaaaatctaataaagttattaccaaacagtaaaatctaataaagttattaccaaacagtaaaatctaataaagttattaccatgggcagaactcaattaatttataactatgagtactactatagtcaatatccgcagaggggtccttttattattgatttgtacggctgaattcaaagtcacacactcgtgcagtgcattgctctctcattcatttatttcttttttctttttcttttactctttttttttttaaaaaaaaaggatttcaaatagataaatgaagtttttatttgaccatatcagtgccagaaaagattgcagtgaaacaagttaatagtagagaacaccattatataacttaactgctggccagctatttgcttttgagtcagctagtaattatgatttggatcgagggagctgaagatgatcgatatagctttaattgctatctttcaaaacacagtagtaataataattcatcacctcatgacccattttgctttttttcacactatatatattccacagtacaaaaagttaagattatgtatatacataatagacatatatatacatgcgtatatgagtcctcgaaacatatctttaattagtgatgtacgtttacgtaattagaagttgttataagaatagttcgataaattataacactgcagtttttaaaacatgtaataatgtgacactagtacaaaaggacatttatcacatttttatcacattatatatataagtaccatatttaaaaggagcattagtatttatatatatatacaaaatagttagttagcaagccttataatatagtatgatgattggtttgttagttattaagtatttgt

SEQ ID NO: 260852 - DNA, 1056 bp, Cannabis indica
agtgcaatggtctttccaggttcaccacccgtgtgttgcatcccttttattacctgaagattcattttaatgaagttatgagtaagctactaatgcaaatttctaagaaacaaataaaaagatagactcagagaactttcaatatccaaaaccagctgcttaaatttcattaagatgaaggattgaatgtacaacagaagcagagctagcatcaaagttatagtaggacaaacaaaatatagagcatgtacttttgtgaggacaaaataaaaatataatcaggatattattgaaaaataagaagaaaaattgtggaggccaaaataaagatcacttctattttagcatattcactataaataagaaaaaattaggaggccccaagcccacttggctccgtctctggtcataaaagcacttagtgtcccccaaacgtagaacccatctttcaataactctatacagataggctagacaaactacacgtattatctctggaagtcaaagtgcctgtgaaaataacccttcatgttgattatagaatcaagtggtgaggctatcaactcacgtttgtaaagaagaaagcatgacaagagtaagattgaaaattgtagcaaaaaatgagaacaggaacatttcacccaccaaatccaagagtggttgagcctctttccttaaaatagaaaagtttgcatgggaaagttctgcttgttccttgttgatctagtaaaagaaaaatgataatttttaataagcaattgtacttcaccattaccgccaacaatagtatttaagtttgcattaaaattatagagctagaaccttgtggagatctagatcatcaccatcttgctcatcaagtagtaagtactgaagaactgccttggggacatctggatcaagaatatgctgacaatactgaaaataactaagtagcagtgcatattggctgaaaacaaaaagaatattgaaggtcagaaaatgacaagaaaagttcacagaataaacaatctctttattgccaatataagcttaagcattaaacccaaaactagc

SEQ ID NO: 260853 - DNA, 1592 bp, Cannabis indica
atataagagattaaaaaaataaaaaaacaagagaaaaaaatatgtatatatatatatatacttacatgatggattattggtttatgttcttctttattagctccaagcagtgatgacatgaagtgccattttcccaaacgaatccctgaaaaaaaaaataatagatttagagttaagtattttccataaccaaatcgatcatatatgtatatatatatatatatatatgtaaataatgccaaaatatacttttctgctgcataccttgagcttgctctgatagtgtaagagacaaaattagaagaagagcgactgtgaaagatggcctcatttttgcaaagtgatcaagaacttaaatatatatataataaagattgaagtaagaaattatgtgtaggaaagaatatatatagattattttggaggatctttaagttactcaatgaagtaaaaaaaaaatatatatggggttttggtttcttaatgcttctctgctagctctgatgaaaattaaatattttggaataagagagagtagtagctagtagtactgtggtggcctgatgtttttaagttttaagtggttgatgagctatatatatatggctaaggaaagctaatttcccttatatatatatatacaaatattatatctatatacacattatattaatgtgtgagctagagagggtggtggggtggggttccacatttgggttttccaacatgaactagaaaaatgggatttttcttccacttacctttgtttttccttgtctatataatccttgtagtgtaaaataaaataacataaaagggaaaagagacatcacccataattcaatcatcggctgctaattaggtttggaaagttaatttgagtgaggagaccatgatgtaattccattatagctacagacatacttaatcaaatgtttttataaatcaatacaattattaaatgatgtttaattaaccttatttaccttcaaaaaagtaagaacaaaattgtcaatatttacttgccatacatctcttcctgcacattttgaattcttttctcaattttttgtcttattgttgatgatcacatccaaagaacctttggtcttctccactgtatctaccatgtttgcataaattgcagaatacttatttgcaatttactcatggcaaaatctatacatatatatatatacacgctataagataaggaaaattgatttgtcaaggcatgtttaatatgttaattagctagtatatatagtcaactgcctttgcctttttgctatatatatgataaatcagatcatggctctatagtaaagggatactctttttgagtcgattaattaatcccatcaaatgactttagtgatttgtttgtcaagagaaagaaacctatcattttcatggtacgtcacttggctacttatggttgatatggggggctgaatgatagatattggggggttttggaattattttagacttgtattgtatctttattttattatgtcactagttatacattataaatttttagttaaataggtacacagttgtggggaattactccatatacttttttt

SEQ ID NO: 260854 - DNA, 1061 bp, Cannabis indica
aggatgttaataaaacatacttggtaataaatctagatccttgtaaaatatttccgacagctagaatgacttgggaagaattacgtgatttttttaatgccaagtattacaatgaagtggtccgcagtgcaaagcggaaggagtttgtggaatttgtacaaggtgagaatatgtcagtgactgaatacacaaccaagtttgatcacttggctaagttagccttggggattgtaccaacagacttcaataaaaaggagaagtatttggcaaggttgaatgtaaagattaagcatgatctggttatcacaacaaatgataccacaacttatgctgaaatggttgacaagactcttcgagttgaaggggcagtcaagttcttacaagaaactcgagagactactggtgctggagggaccactactctccctagttttggccctggaaaagagagtggtgattccacttttgagcaaaagaagagaactttcccatctttgggaagttcagggcaaagtaaaaggttccgaggaaatcagaataaagggggacgtgagaattattcctatcttgagtgctcgcgctgtaagaaacgtcataccgggacttgtaactggagagcttgtttccagtgtggatcagtgggacatcttaagaaagaccgtccttagttgaagaaagaggaacctaagcctgaagttaagcctgcaccagcacgtgtatttgttatcactcaggctgatgctgccgccaacccttcagtggtcacaggtcagcttcttatcaacgattttgtttttactattttatttgatacgggtgctactcgatctgatgtatcatcgagagttcttaatcagcttgataggcctagtgatatttttgaaatgggattgggaaccctgttgcctaatggggaattaattatttcaagaaagtaggttagattagtgttaattagaattgaagacagagaattgagtgttgatcttgtggagttaccattggccgagttcgatattatactcggaatggactttttgtccaaatactctgctagtatt

SEQ ID NO: 260855 - DNA, 632 bp, Cannabis indica
tataaagaatacaatttgatagtatataaagttttgggtgaaaaattctaattttttagataaaaaagacaaaaaagaatatcttttttataaataaaatagttaattagctgtattttctgggcagtcaaacagtcaacataaaaaactgttgtgaagatttttgtattatataaaagcccaagtaaaggcatagagttattagaatgaatataactgttgatattcattagtcaacagttattatacacttatatatatatatattctatttattagtcttcagtgcacgacctcattgtcaattaattttaaactttataaaaaaatccaatttaaaagtttgaaatattcaactgatattttttcaaaattttaaaatatatcatatatcatgatatttactttaagctgtacacttaaataattatatatatatcgcaatcagttttttctcaagatggaaggaaaacatcaggtattaatatttgctagagagcttcgtctacgagtgaaggaagttcagtcaagtactggtgatgctagcaaggattctgaacttggaaagagtatgtatcacttgggaacttcgaatgcctaacttaatctctacaattgctcttgtatcacac

SEQ ID NO: 260856 - DNA, 1489 bp, Cannabis indica
tataaaatttgcctaacatatatatatatatatataatatgttattctgacggaaactaacatttacgctaaatatgtataagcatatgagtgacattatactaagcttaccttgattccgaattcaggtgtgccggccaacctgagtggaacaactgctcggcaaattacaggctcctaaatcacatcaattataacataggtgagtgacgcgctaaatcactttccggtggcttaaacttggaactaaaagtttccctatcgataaataacatgaaaataccctaaacaacacaaaaatgggaaaaactagagtttccaaaactgccccaaccggtagaccggttgcccaaccggaattccggttctgtggggattcctgggagccaaccggaatttcggttcctacaggcccctctgaattggaattccagctcagtgcaagaaagatcaaaaatttaatatctcaaccagttcaaccctaattcaaaccaaactttccagacttgcgttttagaccataaagaataaaacccaagcaacaaaacaaccacagaacctcaaaatcaaatttcaccattaaagaccaaagtttgagttcaaactccatactttattaaatccaaccaacaaccattaaaaccagcttaaatccacttatctaaacataattaagcttaagaaaataaaactaaacactaacagcagccacaacaacaaaaccacaagcatgcataaattttctttccttacacttcaagagaacaaagaggaggttgcaaaagctttaccttggcttggattcacttgaaacttaacttgaaatcccctagagctggtgaagaaaacccaaccctagttggttctatgggtttcgaaaatgagagagagaattgagagtgaaatgaattttccttttctttaattttttgtaaatgaagtaattgtgttttatcaaatattatcagccattacacttctaaaaaaatcaggttattaagtccactaaaggacaaaatacacattgggcaaaatgaccattttgcccctcccacacaaacacaacataaagatgtactaagggtattttgggaaattctaaattcccgactaatcttgacattcccaatgtctaattatatctccccgctatactaaaatactaagatgtgattcaactaagccatacatcgcattcaatattgccgaacactgaacatgcaaaaatattaaatttctatatatgacatataaaatgcattttgaattcaaataaaatatcataaattaataatttagaattaataactaattttcatatttaaaccctaattatctgctaatttccaaatttaagttaagcggtctttacatgattacttttcactgttcagacaacacaataaataagaacataaatgtgataaccatttggatgaatttataaatcaaataaacatataaatgataaaatgaaccaaatgacaca

SEQ ID NO: 260857 - DNA, 1759 bp, Cannabis indica
aaagaaaaaagaaaaggaatgagatcaaagtttataaaattagatttctgcgacgtgttctttttgggatgattagatggaagaattaaattttcctaatttgcattcagtattttttttctttttttttttcagcactaatcatattataattagattaagtactctctataaatagttttgtctattgacatatgttcgagtaaattttttttagtgtgtttgtgtgatttaagtgtgttgcgtgtgttctaaggatacagtttatgtgttaagatctttcgaagaagttagggctagggttattgtggagaatttgtgttcacgttagtcgtgagatttcaaaagtgatgtgggaattgtgctggtcaaccatggcttcgagtagcatgtttgttcgtgatctggagaaagaatgtgttagtattgtgattgaaggggaagaggagcatgagttcatatgtgatttctctaagaatgaggagtaaaagattgatgagcactgatgtattgttggtcgttttttgactcacagacctattgattttgacgtgatgcaacacatgatggcctcgttatggaagccttgcaagggaatgtatgtgaaagagctggaagttaatcgatatttattttagttttatcatgatctatatctcaaaagagttatggaaggatctctgtggacgttcaatagaacaaaatttgtatttgcaagattaaagtgaggggaagatccatggtctgttgtgataataattaggatttgtgggttcaggttcatgacttgtagtatggattaaaatctgaccatgtattacgtggggcaactaagtatatgtttgcacttttgtagaaatagatccgaaaaactttcaagggttgtggcatgattatttgtgtgtatgtgtgactgttgatattactgtccccttgaaacggtgcatgaagattgagcgtacgggggtgagttctcttttgggccaatgtcaagtatgagtatgttcccactttttgttttatttgtggtattattggtcattacagacggttttgttcgaaattgtttgagttatctccaaaggatattgttaagacttatggttcatttatgagagcccagcttgaaaggacataccacttgattggcgtacattggttgaggaacggtaccaaagatgataacgtattttttgttgagcagttgtctgattctagtaagttgtcaaaactatcatgttgcactaataattttcttgaggaaaggcgtgataaggcagggtcgtggtggtgacagtgggtcctcatcaggttattgtttctcagatagatgagggtcgaatggatgagaaagggtctgaggttttggtggttgtagattctaaacggaagcgtgctaaggggttttctagtatatggactctaatgtggataagaatatagtttctagtgagactattgatgtggatatgggaggaaacagtacaaatttgttggttcaaaaaaatgagttattggcgagttctctgttggtcagacacgctgtgcatcatgagtgtccttagttgaaactatcgtgggcttggcaaccgacaaaatgttcagttccttaaaaacgttgttcgtcataagaggcctatttttattttctttttgaaaatttatgcaagaaggataaaattgaatggattcttagacaactagagtttgaaggaataattgtggtggagccgaggggtaggagtgggggtgtagcaat

SEQ ID NO: 260858 - DNA, 935 bp, Cannabis indica
aagcctgcaagaccaaatacaacgaaaaaaatcaaacttatcatttggtaacatccttgcaatacggctaagaaagtcaattcaaatttaaaatctttttttgtgaggagagaagtaagtaataccacttgttgaaataaatctccacatgtactgtccagatcagcattgtttaacaagaaatacgaagcattaaacctaagcggccttcggcctctaacaacctactatgacagaactagtagttagttgcaaagtttgttaaaactgttgcaactaactcccagctttctcttctaccctacaattataaatacatgcaaatcaaactgaaaaatagagatcatatcaaaaaatttggagaggaatagatttacagaggtttagtcttggagccctaggtttagggctcagagatccaaaccaataggagacatacacagaaaaagaagaagaagaaattagcacaatattcaaagagaaagagagagaaaataaacactgtaatataaaatggattaccaattgtacctgtgatttggaatcctactttgtaacttttttatcttgaaaatctactagtggaaaagagcttttctgaggcgagctctaagaggatgtacccaacaatatttggggaacctctataaatcttggtgcactctttctaattttttcttttgctcttactattgtgtttatctgtttgtgtatgaatctagggtttatttttgatatggaaaggtttgattgggattttttgggttgtatgcagtcttactctcaaggggtttccatctttggctaagagtgtgtgtgaatgaattggttctagagggtaatggggttaattagggttaagcataaacgacttctcgtttggggttgatgcttgtcgtttagccctataaccattcgagtcaactgagtttgac

SEQ ID NO: 260859 - DNA, 820 bp, Cannabis indica
aggcattagggttccaaaccctctttctagaatatcataaggcctaacttaaagatcaattattcgtgtagccacatatgagcatgtagctcttgaatcaaataatactataaacaaggagttgttgacgggaagctgacctgtcacgacgaaaggactggctgcagcatcagctcaggtgatagcaaacacccgagcaggtaccggttttacttctgctttcggctcttctttctttgcctaagggcaatctttcttgaaatgccccaccatgccgcacagaaagtatgtcttccggttgcactctctcggatgatgtttcttacaatgtggccactcagggtaagaataaccctagcttggtttccacaaaaccgcttactcttctgatgtcggggtaacatttggagtcacttggggctcctgaaggaatttcacagcaccttcggctctcaaagctttttcaaccatttcgccataagtggttgcttcattagtagtaatcaccagatcatgcctaatcttcacattcaaacccgccaagtacttttctttcttactaaaatcttttggcacaatacccatggtgagcatggccagacggtcaaactttgtagtatattcagtaaccgacagcccctcattttgtgctaacttagtgaactctttccgcttagcactgtggacagctttattgtaatatttggcattgaatagttctcgaaattcttcccaggtcataacagtgacgtcccgagtgagggttatcaactcccacaacacgagagcatcctcatgaaactgaaaaagtggcacaggt

SEQ ID NO: 260860 - DNA, 615 bp, Cannabis indica
attaagtcaacagtcaacaccaccatcatgatgtggcattataggattggttattatatacatatagaatttgtatgattagacatagtcacatgttctgatgtgtctgccaattagcatgaaatttcttctttttctgaattaacgttagtttgtagatgtacgaaagtaaacattaacaatatataataataatatataatgataagtaataataattatggtgacaacttaagcaagtgagtactaaaaggcattacaataacattaagacactgttaatttaattcttaacttaaaagaccactgatcactatgttattagaagtaatcgaaagttggctgtctagtgcaactcataccattagttttctgcctcctaagtcctgcgacatgccaaaggagcggcgaagacctaatcaaggcgaaattgagacccttgaagaatgggtgtttcttaacttcagtcgctccgtatttggccccgagacgcttgatcggatccttgacaagcaaagcggtaatcaactccctcgcatgaagctcgagctcgcataacattgtgcctgcggggaaggcaagtggcatattgacgatgtttgagatgattctctt

SEQ ID NO: 260861 - DNA, 844 bp, Cannabis indica
taatttttttagcgacggttaaaaaaaaacgttttaagaccgtcacgaattctgacttttgtagtagtgtaacttcacatcaagtaattataaaaattttagaggtaatatcactctaaccccaatttttcttcctaatgttacctcttatctaatccttttaagttttttcatatttgcatctgatatagaccaaatatatagtaaaattaactctctttggggtgatttctcatggatattattgtggatcgctagtgtgaacatgacatatgccatttttaaccttgcttgtttgcttgagtcaaatagaaatttagggaatctgtcatctatgcacataaggtttatgaattgggttatttatgatcttggaagagatttctaacaaacccttcctcaaattaatgttttgccgatcattatggctataaatggtctttttgctgtgtttggaaaaacccatattgatgtttctgctcttaattttctctttctgaatttggctttctttgttctgttttctcactctttcttaccaaaaatggatgacttagttggttttctctctgttgccctcagtataacaaatacggagaatacagtccattcccttcaagatttctcaactcaaatcgatcctaacctccctgttcccaatatctttattgtggccaagttacatactaatacggtcgagtcttatagtaggaaacacttcagagaaacaatgacaagaaattgaaacaaactttgtcagttgttataactgagcgcccctcaaatattttttttggtggagtttggatgtgatggggatagaagaagagtcatgattcaacaa

SEQ ID NO: 260862 - DNA, 3414 bp, Cannabis indica
gctcagtatttagctgtagattaacaatcccaaataaatcaactctgactttagtatcgtctcccatgtatacatactcctccaacctatttggccttctttgacttgtcactgcctgcaaaaaattcataacatgaattgtagcaccagtatctaaccacaaagtgtttgagagcacatcaataatattagattccaagcaaaccatcacaagaaaattacatttcttctctaagtgagctttgagctttaggcaatcagctttcttatgcccgaaacattgataaaagttgtacttccctttgaaaaactcattcttatgaacagttgaagatgagcttgcttgtccatttcccttaggatttgtatgttgctccagtatttttcaatccaaatggcatgactttgtaatagtagagccccatatttttcacgaagctcatatgttcctggtttgggatgtgcattttaatctggttatatccagaatatgcatccatgaaattcatcaattcgtgcgctacggttgcatctaccaattggtcaatccttggtagtggaaagcaatcattaggacatgccttattcaaatctaagaaatctatacaagttctctatgtgctatttggttttggtacgaggactggattagagatccacgagggatagaaggcttctcatatgaagttataagttaaaaatttgtcaacctcttctttgagcgtattttgtctctcggtatctaatggtcatcgcttctaacattttgctggataattatggtcgatattaaggtgacatgcctgagtggcttcaagcaaactgatttgggtttgtcttcaaaaaagtgattaattgctattttagttcttctccaaaacttttcccaatataaacacactttatgagacgttggtcaaaatcacctcttccaactctttgattagcttgagttggttgttatcatcttagatcctaggatccaaattttctatttccttctcgatttctttagtcaaaattaccatcagttgatgactggctcttctatttctaagtcccactgtataacactcttgagccaataattggtcgcctctaacggttcccactccagaatacgtagaaaattttaaggacaagtgctttatcgagctcactgcccccaatccaattaaagtcggacgacccatcaacacgttatatacaaagaggatgtcaacaatcgaaaacacttgcatttgtgtcgcaaacaactgtggttcccccgtagtcaagggaagctcaattatgcataagctcgcgacactgttgcttgtgaagccgcacaaattcaccatacaaagtcttagctttgccttttctaatcccatcttcttcaatgtttccttgtaaaggatgttgacatagcttccattatctactagtactctcttcattcttttattggcgagttaaattgttatcatgagaggattggcatgtggatatcgtacatgttttgaatcttcttcagagaagataatgggtggttcatttcacttcattctctttaaagattctggagcgaatgctgataattcatttttcacttcattaatgtacctcttttgcacactattactgttccctgcgaggtgtggccctccaaaaataactaagatatcctcaccctctacggagggaggttgcaatctcaagttattcgggttattggacttattaggctcatttccctgtgttctaatgtattgcctaaagtatcctcacaagatcagactttcaattttattttttaattgacagcattcctcgatggtatgcccaatatctttatagaaacggtattacttagttgaatctctcttattccttgcgtgcctcatcagttatggtatgcgaaatgcaactctattttcattgacaaggtagatattctcgcgagtttcatttaattccatatgcactgaataaatgggtacatacttctcttggtatttgatacattgggattttccacctttgttgtcacggtgctcactgttgcagtgctagtgttgggtttatctcccgagccaatctttaacaacttcatctcattttgtgcttcttttttacgcacaaaaatctatgctctttcattaatattccttaaaggacacccttgtaaatcatcccataactctcccaccccagtggataaatcagttgcaattccaacctcaagggttgttagttgaatgctatcattcaaatttctaactttagttgaagttttactaaagcgactcatgtacgcatgagtcgctttaagggactcttctggttgttgtttgatgttagtaaaaattgatgcatctggtcggcaatctcttgccgcttgaaactactttttgaaatctttcgataattgttcccatgttatggaatggttggtaaatttatcaaaccaactacttgcagctcctatcaaggaagttagaaataatatgcatcataagtttttaaaaacattgcttgctcgcattatgttgttaaaattatttaagtgggcgactggatcagtggttccatcatattacgagacatgcaaatttttaaatccttgaagaaattgtgaataggatgtcaaggtggaatggctcaatttcttcatctgaatcgtatcctagcagtttgccatattctccatcttgatatttcttaaatgttgtcctctaattgtattactcgtaactgaatgggatccaaggttgttgatttgcgttttgattaagttgattatgcaaattgggtacatttcaattcaagtgttcgcgaaggtctggctgccttcgatttaacctttgacggagatcaagttcacgatgcatttgctcataattactcacgaacctagtccctgagtaactttcagattggtaactatgcgagttacttatactttcttagttagtaaaataacgtcgagatctgctcccatctcacatttgtctatttgttccagtcgacctactatgcctgtaggatcatgattctcttgtacttataattgcttcacgcatctcatcttgcattggtcttcttctttaaaagagattagacacacgtcctctactcaagtaagtatgcatattctctcggtctgtgcgagaaggcctttttggatgccttgggggacaaccataagacctaggttggcttccaagatttcttccatcattatgagggatttcctagtttcatggtcacaattgtctcacctctgcgttcatgcgagatgactcaggtatattagtttgctcattctcttggtttgcaaatccatgggaagttcctggagcattgagtcgataatcttgatttcttatattatttgggttgggttgattttctctatccattgggacatcc

SEQ ID NO: 260863 - DNA, 1698 bp, Cannabis indica
tttggaataaagtaaatgaggttttatttttttttgacttttggctcttggattaatttttttgaatttttggtggctccattttgaaaagtagcccattgctcttatatattctattatctttccacacattagcaatgtgggactctcaaccaattttaaatttcaaatagaaagataaaatatttattaattgcataaacaatatttaaccataaaattttaaatataaagtctgtattatggtatattttagttatatttgttaagacactactaattaattattaaataaatctttaaaggagagactggattagaatataaaactaaatattaatcaaataaatctaatggaatatcaaccctcctctcatatatattattagagtttaggacacgtgtatataataacctcgatgctcataagaatgtttattatggtgatatagattgaagtgtattcttcttttactaaagttctttctattgttttttcttgattatattatgttatatacagtattgaatttaattgagtagaagagagaaaacatcatggttcattgtttgacacttaattttgtcattaaaaacataatatataaatcatataaataaagtgtgtagaaaccccactaatattggtatatcacatgaatcgatgtagtttgattagcgtcaaaacgtttgacaacgtgcagctcatgtgtaaaaaaagaggccatatatttcataccaaaggcttgacgaaaaaaattgttggtatccaccctttttctatgcttccttttgtatttttgttttcaagtcgtgagtaagtaaagcctgggactcgttttttgttgttacttgttagtagctagtacgtagttctactactagagctagattacatcattaataaaagagttatttgtggccataatatctaaatttacctttaaattttttacagtaaaaatactttgtgttacaatttggaacttttcgtagtgttgatgctgaaaagttatcaactctgcatcgtctgatataagcggtagcagcaaatgaatgtataaacataaagtaaaaaaagaacactacaattatagtagttcactctccttatcactaaggtaatagaactatctctacttagagtttttattatcacaaaaagctaattgtcttacaagagaactcaagaaaaaatgaatagtctagcttcacttcacaatttctagagggagaaagagtgaagagagagaacttatgaccttgtagagaatatgtaaattgtgactaatgaggtaggggagctctctttttataggaaggatgtccaatgaaattacaataaaataatttgaaaattttgcacaaaattcgttaagaaatccaacactatctcgcgagtcaattatgatgcccaaaacttcaaaatttgaacgagggtgaaaaacacacttagatttgtcttgagaatagctttaattttacacttgaatcgcatcatttggataaaaattgagaaaattatgaccaatttacttagtagtatgcattgcccaaaagtgactgcgagaatagactaactttgcctagaacttggtttcatgggatttaggcatatttcagatgtttgaatgttgtgactgttggaaatattttaccagaatctagatttactaacaagtatgtttcattaacatc

SEQ ID NO: 260864 - DNA, 355 bp, Cannabis indica
ataaacaagttatgcattagacaaattttaagttaaggtatgatgtaaagaaaattttaaagtgatattttaaaaatattttcaagtgaaataaggtttaaggaggattaagtttaaacgataatagcttttagctatgattggttcatatttttaagaattattagcaaaaagggaaagttgtggaaattagtagtcagattctaatattattattattatttaaaattaatcaagtaatttgaataataataaatacgaagatattgtaataaaaggaggtgggaatactaattgtcaaatgcgaatttattgtgttcagatatatttgggaagttaaattttatggaatttg

SEQ ID NO: 260865 - DNA, 2290 bp, Cannabis indica
acctctttgacgaaagtggagtctaacttttataactccctgaccaaacctttttgacgagagaggggtcgaatcgttataagaccttaatcaaacctttttgacgaagaagggatcaaacaactatattttgatttaaaacctatccgacgggaaaggaaaatcaaaagttataactcgcgtacaaaactgaatactaacggttctcgcgagctaggaaattacaaaacgaggcatcacgatgccttgataacttaaactaagaaaatagatagatactataactattcatacgagaaaattaaaaatatacaaagtgataaaatccttaaagtatatttaagtttgactaaggcagattataactgctatagcgaggcagaattgacaactgctcaaaaatcgaaaagtttggaagattactaactacttaaataggaagattacgagcaaataaaaaaatccaaaagtactgtacatttgatcaaaatatagttgtttacattgtgaataaaaatacaagcaaatataattgtattaagttcaaataaaaatggtacatggcttttaagataagaaaaaactcaagttgggttacaaacttgtctttataaaaatgccattaggggcaaaccattaagtcatcttcctaaacaaaggatgagaggggaagccgatgaactcgagaaagaccgtcttcacatagcttgagaaagaccagctacatgtagagagccttgatctctgcacaaacctcattctcctcatcatcagaagatcccatttcctgaagccgagatctctttcccagcctcagaaaattcctcgataccaaaaagaggttgatgacaagatcttttggcacaggtttgggtcttgggttggctggattctgtgatagaaaccacgccaacttccttcccagattcatctgcaaccatgccaacctttctctggaattctttattagcctgaggtggaccttttaaatcgcccacaagatctatgatcacttgtgaggattacccatggcagggtacggggttcccctaatttggattggtcagaagctcctcagccttggaatccttcgtttccggctccgattgaggcttgaagtctttaagaacacatggaaaaatggttggtgcatttggatattatgagtttggaaggatgaacttcttaactcaaaagggacattttggcaggaaagagatgatccattctgaaaatagatctcactaaagagccagaggtttgtgaaaaatggtaaacttgagccgcccttttatacacgaagtccagtgacaagaaagccaaagattgggaaatataacagttggaagttgtgcaaaacataaagagacgattcataatgactctcaaaacagtacaacgcccagaatcaaaggatgcgttttttccaagaaaagatcttgacgaaaatgccctctgtaattattaaaaagttctttttaaccaaaaaagaactttttaaggggcaattgttatacccgaaattcggcgggaggacacgtgtcaagataaattgaatgtgaatcgatgcaatagctttttatggaataactcattaattacgtaagtatgagagtatatttgtaaaccgctgactataaggtcttaggcaaggaatcaatgtacaaactgacacttagtgtattagcgagaaaccatatgtcgctaaatatgaatagcgaggcaccgaagaaagtgacacgtatcaaccatgaaagtccttagcatgcaatgaacaaactaagtataaaagtcagatcgactcaagagcaagtaaacgaggtgaccgtctcgctatgggaagacttcctgtagctttatccaactaacggtaacacagcttacaaccctagctagttaaaggaagtatttgcaagtaagaatcgcgatcgataccaaacctacatcgtcaacctcgaaagaaagaatggccccagctcgctattgggatcgctataaccaagtttctgtcgagacatctccagacacaacaattaaagacgtatttaatacacgaatatcttaacccagtaaaagcgtggaaaatcacagctatatgatttttaaattataaaccgcatttacactacatgatatgtaattcaaatcccatgattttagggatgattgttgtaaacatattctggtcaaccttgtaattaactgtccactatgtaattataaatagtggcaaacaagctaaaaaaagggacgaaaaaaaatcttctacaagagaggtcgtaaaaaaaaa

SEQ ID NO: 260866 - DNA, 608 bp, Cannabis indica
gattcgaagagagagaggtgaagagagagctttcttcaatttttggttaaatgccttattttccttattttcccctaataaactaaagcctaggaaattaattccttgctgaaataaaagaaaccacatgtcacctccctaggcagccaccacaccaacaccaaagaaaagactaaaatgccctccaagttaaaacttaggcattttctaaaactaggggtaaaatggtcaaattccataaccccgcttaaccccaataatttattttctccaatatttattccactaagaaataaggttctaaacttacccatgtgatcaaactagtcatccatcgcattctcctctgtctcctagcaaaaattacaaaaataatatatttcatatacaattcataaaataccccaagagtttaataaaattcccgaaattgagaaattataattctagtgcccatttctataattaaactcataaataattataaaaatttcagaaattagtgctaattgccttcactaatccaaattactaaagcggtcattacaaaggatatcatcgtttcacttctaaatacctatagaagctatagattccctatctatgat

SEQ ID NO: 260867 - DNA, 500 bp, Cannabis indica
gatacgatgtcatttctggaacccaagttttcatcaatgcatgggccatcggaagagatcccgacacgtgggaagatgatccaaatcagtttaaaccagagaggttcttgttcaagaatgccgcagtagattacaaagggcatgatttcgagttgattcctttcggggccggacgacggggctgccctggaattctctttgccataactgttgatgagcttgttttggctagtgtcgttcataagtttgactggacgtttttgactccagaagaaggtttggatgatcatatggctgaaaccactggtttgactgcgcatagaaagttttctctgatggcggtgccaactgaatatcatgatcatcaatgatctagtaatatgatcaaatatatatttatatatacacttataaattaatatatgtatttatagtgcatgttatataataaggaatctttactgttagcattgcctttaataagtattttagttgtttat

SEQ ID NO: 260868 - DNA, 548 bp, Cannabis indica
aataataattatataaaaaaaagtgaagaacggtttggacgggttaacccgaccaaaccgacgaaatcattgggcgggttgaactttctctaatttttgattgggcgggttatggttaaatatttgcaacccgatatttatattgggttgataaaaatatgctataacccgactaaaccgaccgacgtacacccctaatgctccccagatgttaggttatttttagtattaaatttagattaattttagcatattttttatttagtttaaatcatgtttggagcattttcacgctttttatcttttaattttacagatttaaaatagatgaagagttggaaaatatcaatagaaaatagataaattatcgcataaaaatgtcccggtggaaaatatcaaattcaaatatgagaaaaaagataaaagcacggaatagagagcagaaggccacacgggctgcggcatggtattagtatgccacgacccgcctacgtgaaaaatcaaaggagatattccaggaatgccacacgggtcgcggcatggcttta

SEQ ID NO: 260869 - DNA, 531 bp, Cannabis indica
cctggttcgggggaacccaagcactagtcggctgagatgtgttctcagtgcagatgaagcttgtaaattgttgtgtgatctactgcttgattattgattcatgtctataattcatatcttgaaatcaattaatctaaagataatcaactcggtaatttggatcattaaaatcaacaagtagtactttgagaatgtttaaaggcgtttcaagttcttaaagagaaactgatttcagcaccaatagttacttcaccgaattgggagttgccttttgaattgatgtgtgatgcaagtgactatgcaattggagcggtcttgggtcaaagggttgacagggtgtttcacacaatctaccatgctagtagaaccttgaatgatgctcaaaaaaattatgccacaacggagaaagagatgttggcaattgtgtttgcatgtcataagttccgctcctatcttattggaaataaggttgtagtctatacagatcattctgcaattaaataccttatgaccaaaaaggatgcaaagcca

SEQ ID NO: 260870 - DNA, 890 bp, Cannabis indica
ctaaaaagaacaactataatatatatatatatatatatatatagaaaactaatcatatgtataaattttaaaattgttatcatcactgtcttcgagttatcgttacattcaaaattgttatcttcaccatatctcatttatagtcgccattatattcaaagtcattgttgtcatcatcatatctcgcttatagccattattgttatcactatatctcacttgtaatcattattacattgaaagcagttgttattaccgtatctcacttatgcatccaatcaaacacaaataattataattcatgtaatttttctttcaaataatgtgtgtttaaaaaattagattatcattatcttctcgtgtagttgtattttctttagtgataattaaattataaaagtatatcaaatttcaaattttagtatttttatataatattctcctaatatataagtaactattttactaaaaataattctcttaataaagtcttaattttttaattattttgaactaaataaatgattttttaatttattatttgttataaatatattatttatatggttaattttcaaaacatatattgttagaagaaattaaaaaattataacaattgattgttttatagaaaattcatcatatattttgtcaatgtcctttctaataaatttacattgattaattactcccttttatacaaatatgtaattatatatatatatataataaattaaattattagaatcaaattttgaaaagaaaaagtaaaaaattaaggcatgaagaagggaaagattagagaagaccatgaacaaataagagcttaaaaaaaggaataattatataaggcacaattttttgtaaaataattacatttttacgtttaa

SEQ ID NO: 260871 - DNA, 510 bp, Cannabis indica
ttgaaaaatatttttactttttacttttaaaaacagaaaattgattaaaaaagtattatcaaacgccacctaagtaattaactatcttccattgtctaataagacacccatatttttgactctatcatttatatggtcataactaccggcataattacaaatgaagacatccaaccatctagcaaatatccatgtaccacacccacaacacattacttgaaccactatttcatcataatacacattcaaactcaactttctcccaatagtgttcttatgtaacccaaacatttcggtaaatctactattttccactcttacccagggtcggccttgagctaagacgaaagaggcagccgccttaggccccactcagggccccattttaaaaaaattaaaatatagttcgtaataatataaataataatacttttaatactaaatatgtgttgtagcctagtagtaatttgattagtttaacaactaagaggttgagagttcaaatctcaa

SEQ ID NO: 260872 - DNA, 553 bp, Cannabis indica
tttgaagtgctacattatttgaaaaggaaaagaaagggcaaggatgggtatatggctttaaaactggatctcagcaaagcctatgaccgcattgagtggagtttcttggattcggttcttaggaagattggcttctcggaccattggagctctttggtgatgaagtgtgttagttcggcaaagtacaaggtgatccatggagggagaactatggggccgattactccgtctcgaggtatacgtcaaggtgaccctttgtcgccttacatttttattctgtgtgcggaaggtttatcagctttgatccgaagatatgaggcaatgggctctattcatggttgtaaagtggcgaatggggcgccgaaggtgactcacatgctttttgcggacgacagttacctttattgcaaagctactcttcaagaagctaatcgaattagagacctccttcaccaatttgaatgcgcttcaggacagaaagtcaacctgggaaaatcatcaatcttttatagtacaaatacagcaactcaggttagagatgatatcaatactc

SEQ ID NO: 260873 - DNA, 833 bp, Cannabis indica
tggtgctggacgggttgaacgtgctcattcagagaatgagctaatttgactgaagcgtgaggctaagttgaaaggaggtgcaaggccaagcaatatgctcaggaacccttgaatcttgaagatgaggttgaggaagagcaggtgactccgctcaaaaggaggaagaaacttctggcctagcccaggcctattgaacatgcaattcgcattagggagcccagtttgcttgctcggccgccttctcacgtgctcaaaaaagggaaagctattatgtctgaaataagagcgatgtcaggtgatgatggactttcgagccttgctccggcaatcatcttgcataatacttcgtcttgtttttaagattcttcactattatgctttatgtttttgatgtctattttctctaaccatgttgcttttgttccgtgcagacatgtctcagaagattcttgatgctctgaagaagagaattggcggaagcttaagtgtatctcctcaggccaagaagtctagaggcggtgaggggacctcttctaagaaaaaaatgcctgccggagaggtcattgatctttatgaggagctaacagttgcaacccctctactccaaaagttgctaaccccaaggagtctcgaggaggaagttcgaacaggcctgaacaagtgaaaggtggatttgagctggtcaatagtggacccgagcagatgcgggcccctactccacctttgccagtgcttccagaggccaagaaaggcaaggagatgctcgcccactatatgaaccggttggttcctaaggttagtgagcaaaatgccggtgctgacaatgactcttc

SEQ ID NO: 260874 - DNA, 1224 bp, Cannabis indica
ctaaaaaatgcctcacgtgcatagcacgagtactcttactagtttataagtaaaaatgttaatttttaacaccaaatgagaaagaatctaataaaatgtacaaaattatataactattatattttaagcaaacttttaactaacaatatagtttaagtgcaagatcaactctccaaaatttaagagaaaaaagtactattgttaagaaggtcaacgtaaataaataaaaaaaaaaatagaaaaaatgttgagattgtcggtggaggaacagaaggcggatggcgtagagcgtcaaaactgagaaagcaaaatgaaaatgacttactcatcatattaccttttctttttttaaataaaaacaaaaagataaaaaatatgagttgttgtaagcgtttgaggtgcatgttttaacggataacacgttaccctttccgttcgcatatatcttacacacaagcatataccatattcttctttcttctcttcttttatctctctctctctctttaaccatataccaaaccaaaactttaactttgttcctcccagaaaatttgaccaaacattatgggaaagatcatgtctttcaaacaggagtactcttttggtttggatctcttttcttatcgtttctttttctattatgttctttttgtctttttaattttaaaattttatttatttttttttctttctaataagctttgattttgtgttgtggactggatggtggcagatgagcgagttgatgaatcaaagaacatgattgcgaaatacccagatagagttcctgtatgtttagtttccaaatgttatttcattctcaattttcttattggattgtctcttgacagtacttatacatgtttatcatatttcttaggtgatacttgaaaaatatacaaagacagatttgcctgaaatggaaaagaagaagtatgtttccttttccctttttctctttcccctttttaatttcagtttttagcacatttaacctgccaatgatctctatatgattttatataatctataccttgttcctaattaaattgagggatttttatttttagaaacaatatagtaatgaagttatttaacataccaaacggtagttgaatgtcacccccatacctttctctttttctagatattggactttttttttttaaataattaaataaataaaaattcaataaatagagatcatttccaatctaatta

SEQ ID NO: 260875 - DNA, 796 bp, Cannabis indica
taactgccctcttatgtaactataaataggtggatgttacactgaaaagggatggaaaatccttaagagaaaaaccccaagaattgtatcagaaatatctaataagatagactcgtggactatgtagaattttaactgcaaaaccacgtaaaaaagctttgtgttcttattttttctttactgctattgtttttctgtgcaaatctattacgttttaggctttaatatagttaacgaaaatctgcattaacagtatgattaattaattaagttaaatataattcaaatttaaattaagatttatataaaaaatatagttatataaatttaatttaaattaaaatatatacaaaataaatatttatctaatatttttttgatactttaaaattaaatttagatatttaaaattattttttttctaaaaataataataattaatttattaatttaacggtgttaattttaatcgttaacttaaacgaaaaaaaacggttaaattaacaatttttattaaatagctacattttataaaagacatatatacataattgaaataaaaataaaacagacttaattttaaattctacaattaaacaaaaatctattttgttttaatataaaattcaaaaaacttatccattccctagtataaaataaaccaaaatagaaaaaatatctgtaatttttattcatataaatatagaattcaaaaaattttgcaactgaatacaaatacgataatccttgtaggtgaggagggcttaccgattatatgctgaaaatgaaaatgctt

SEQ ID NO: 260876 - DNA, 631 bp, Cannabis indica
taggagatcagaatccaacaacaatatgctattctttttttctctctccatctggacatttttttttcctttctttttctgtttctttcggtcttgtttcctaccatagccaagaccgaactcttcgaagaatacgtggtggtctttgcttctcttctattggtatgattttttccattagctgcagcaaaatagaaaaacacagcatatcagttgttgattattctttattccttatattttgaccttgatcggaatactgctaaatttccttatgtattctaattttttagataccgcatcacccaaacaaaagaagtaataaaaagactaccaagtacctaacaatgtacatggctggaaacaattgaccttccaaaagaaatacttgtctagtcctgctaatcctctatcaacccgaaatgaatatataaataccaagcacatgtcttccagtccctcaatgtcaaataagcacctaattatcaacacaagctagtttgctataactaatgacaagtgaactttgtctagtctacagcacacaagtatcagaggaaatctaaaactacccaacctcacaaaagcattgaatatactagtttaaattgtaattgtttgcccatttcaa

SEQ ID NO: 260877 - DNA, 1126 bp, Cannabis indica
gatgctgagctttttcttcttcccgtactaaagttgcgctaaccgcgttcttggagacagccaagtataggaacaagtcttatccgagaacaggttttgataggatcgggggtttagccatgtgctcctttagttttttgaatgcctcctcgcactcgtcggaccattcaaatttttggcatttcttcaggatgttgaagaagggaatgcacttatctatggatcgggagataaatcgactcaaggctacaacctttctggttaagctctgtacatctttgtgctttttaggggaaggcatgcttaggagagcttgaatttttgggtttgcctctatccctcgttggctgacaatgaagcccagaaactttcctgatttgaccccgaaagtgcacttcttcgggttgagtttcattccgtatctccgaaccacttcaaagcattcttcaaggtcatctgcatggcttgcgcatgcctttgatttgaccaacatgtcgtccacgtatacctccatgttctgccctaaaaggcctttaaacatccggttcaccattcgctgataagttgcaccagcattctttaacccgacaggcataaccaggtagcaatatacccccttatcggtcctgaagctagtgcattcttgatctgcaacgtggatcttgatttggttgtagccggcgtatgcgtccatgaagaataatagcttgaatccggaggtggcatccaccatttggtctattcgtggtaaagggaaatagtcttttgggtaggctttgtttagatcagtaaaatctatacatacccgccatgtcccgtttggttttggcaccagcaccggattggccagccattctgggtaatatacatctcggatcatgccactggttagtaatttgtccacctctttctccagggcttctgcctttacagaatcgagggggcgacgcttctgcaggaccggtggcatgtctgggttaacattaaggacatgggttatgacgtggggacttatgccggtcatgtccccttggcaccacgcgaaaacatctttggctgcccttagtgttttaattattttttctttttcctccggctctagacttttccctagccggaggacctt

SEQ ID NO: 260878 - DNA, 1046 bp, Cannabis indica
aggtaacaacttctagacgtcatactaaccgtgtacgcagggaacgcagaaccgaccctgaagctctggacttgaatcacccgatgtcaagagatcaatctgcaaggtttcctaaccagagcgcacaaattgacgaagatcctgagcgccgcaatcctcgcagtcgtcagcctcttcgtcatcgcatggccgcactccgagcagatatacaaggtccggctctgtacaaacacaacagggaggacgttatcaagtacaccgaggtgatctgcgtgatcatctcaacgcagttttcagggcacgctcccgaggcccacataacaccgagacgctccgtgatccccatgcgggcgatcagggtgtcaacgcaggtaataacccgcctatcgcgccgatcgcgactactgggattaatatcccagcaaaccttgccgcagtggttgcgagccccgcagtcgcagcgacttcagcccctgcgacaggaggaattgaccaaagcatgcttctgcaagctctaaagatgctcgagcagcagcgaaagcctatatacaagctgcatggcacctcgccttttactgcagaggtgcgacaggctcaacttccgaaagggtttcgtttatccgaatccctcaaatataaaggtacttctaacccgatagattatttagaaaagttcaatactataatggaagtggaccaggtaccgcaactcgcgaagtgccgcattcttgcggcaacactcgaggagaatgctcatgattggttcacccaattacctgaggcatcgatatcgacgtgggaaaccttcgtcgacttattcctcacgcatttccaagccacaatgacgtatagccaccctatacgactttggccaacatcaaacaagaacccggtgagtctttacaagactatttcaagcgttttaacgcagaggtaacaaaggtcgagaaggcccccgagtcttcgcttgtttgtatgttgataacaggtatcttgccgaggactgacttctggaaggaactacaagctcgaaggccgaagtcctt

SEQ ID NO: 260879 - DNA, 536 bp, Cannabis indica
aaaaaaaaaaattagtgttaatatagcatttttttagtgttgatttaacaccaaatttaagttttaccattggagataaacttagttacattttaacttctcggatatttcatagtaaaaaaatattgaacaaaggagacagttaacaatgataatgatttaaggaaaatttaaaacaacataaaaaaaaaattaagaatcacgattaaaaaatggtaatactttgagggagaaaaattataggcgggaaccattttgttttttatttttttaaattttacttaacaaaatcttgtagtttcttcataaattttgattaattaatcaaaaattgatttttttaatggttaccgaacaatatctatatttgttcttttattcttcttaaaattgaaggggcaattgtatctagtatatatatatatatatatatctatatatacgtataaatatatctatataacgaggattgactgattgtctattgtgttgacagcaagatctgggtgatcttgcctggatttctggaaattctc

SEQ ID NO: 260880 - DNA, 1500 bp, Cannabis indica
tcaaaacaagggacctataagtttgagttaacagaggtttctatggagatcacacttccaaaccaagcctataaaaaaagattctttgttaagggtatttttggccaatggtgaagaaagattgtgttgagaacgtccagaagtgtgaacagtgtcagagatatgcaaaggttccacgtgcaccgtcaactgagatcactttgatgagtagcccttggccttttgcggtatgggaattgacctagtgggattattgccaaccagaaaaggaggagtgaaatacgcaatagtttttgttgattacttcaccaaatgggtagaggctgaaccaatgaacattgtcacctccgagaaagccttggactttgttatcaagaacatcgtatgtgattttgggactccacacaaaattgtatctgctaatgagaagcaatttgatagtgtacattttagggatttctgtgtccaacacagaatcatcaaaagcttctcaactgtggcaagaacacacgctaacagacaagtggaggccattaacaaaattctaaaaaccacgttggagaagaaagttcaagcttgtaaagcccattggccaaaggagcttctacgaatcctttgggcatacagaaccacagattgaacttcaatggggcacacaccatacttgatgacttacagatgtgaggtagtcatcccagtagaaaacactatcatttctcataggcgagatacttatatctaacccaaaatcacactatgcttcaagaatctctagatttgatcgaagttcttcgggaacaattgcatgtccaacttaaaatgcaccaagtcaagatccccagccactttaattacaaagtgaaaagctgaacgtttgaggttagagatctcgtctgaagaagagtgttcccagctttgcaagaactgagactagggatgttaggaaaaatggggggaccttatgaaatccaacaacagtgggaaacaaaacttatcaactaaaaatgatggacggattagaaatcccacgtgcttggaatgcggaccacctatgtcaatattaccaatgagctaggggtgtccgtgtctagatgctcatttggttaaattgtactttttgtaattttctcttcttattgtacgcctaaaggcataatgaaatgaaaatagaagaaatttacaaaagattacatttttgtttgcagctttaggctgtattttaaacaagtgactaggaatttagagacgtctaaaattcccagctcacttgggggtagtatatccagctacgtgttctcaaaaatgtatagtgcccttttatcattttcactttggctatttaaatttgttagtttctttaaaattataggaaggaagacatcacctaaattttaatgcatttttagtctgaatctcgtagcattttcagcccattttcttaccatgtttaaagtgaaccttttaaagtcctttggagaaagggagagtagaaagctttgc

SEQ ID NO: 260881 - DNA, 619 bp, Cannabis indica
ttgtgtggttcaggagtttagaaatgcctcctagaaggtcagttagattgggttgaggtcgaggtcgaggtcgaggccaaggccaaggccgagatagaggccgagatgatggagggatcaatgaaccacctcaacaccacagggatgggaagagcgcattgccgcactggaaggaatcattcataggcaggatgaagaacttcgtcagctgagacgtcaaccggagccgccagtccaaataaggcaggatgcagaaaatagagacccaccagctgcagtggtatatcctgctacagaggctagacatgagttgttagcagagagatttcgaaaacaacacccacctgagtttgagggaggcatagacccggtagtggctgaggagtggataagtcgcatagaaagcattttgcagatgctaagggtggatgggaatgaccgagtgaagtgtgcatcttacatgctgaggaaagatgctcgtatctggtgggaggtggtggaacaaacaaaggatgtagataccatgaactgggacgatttcaaaagggtctttaatgagaagtattataactcagcagttctagcagcaaaggtcgatgaatttactgggttagtccaa

SEQ ID NO: 260882 - DNA, 7507 bp, Cannabis indica
ttgtgaacctatcttggagtgcttctatcttcacactaccagaccggttgaaatatttgttgatcaatcggtctgaccctgagcgagcaacctgcgcagccttctcctcttctgttggccccgaggagaagtctaggcctgtaatgagtgcaaactcaagcactctgaatctgagctccttccgaccaatgtaaaaccgcatcctcaactcttcctgagcatcaaccttcatcttgtgcaacatcagttggtgaaataacaccaaggagaatgtcaggggtacgacattccaaaagtttctgaaacgactttccttcgccgtgttatttaaattgaactctgaaacttgatttttgcaaaagttctggtgcctctataagtcacgcggccagtaaaatgttcggatgctggaattatgagtctgggagccttctgaaaaaataaataacaaatcaatattactgtcaaaaaattataaaatggtcgacataacatcgacatcatgtcgatattctgtcgacattatcaaacagtaagcaacaacataatttggtcgacaacatatcgacatccgatatgctgttgatattccaataatatcaacacaacatatcatcacacaatattatcacacagcaatcacataaatcacattaatattattgacattatgtcgacatcatatcgacatgaggtcgatatatcaaacagaaagtaactgcatcacattgtgtcgacaacatatcgtcatactatcgccatgttgtcgacaaagaaatttaagcaataaattcatattgtgtcgacaacatatcgacatactatcgacatgcggtcgacaaagaaatttaaacaatgaattcaaataaaaaatttttactcaaaatatgtcgacatcctatcgatacacctacgacatcctatcgatatacttaaccacacagacatttataatggtcactttgtcgatattatatcgataacattgtttaaacaaatagacaccactgatgaacatgcagaaaaccatctaaattcgcatacacaatctgaaacaatctaatctgaagaacataaaaaaattcacatccaaatctatgaaaattctaatttttaataagaaaagaacttacggttggattggtggtggcgaagtttgacttcgagttccctcggtggttcgtagttgtggtcgtgtgtcgtcgtggatcaatgtggttctctgtgggtcgtcgtgggtggttcgctcgcgtctggtctgtgggtttagtcgtgggggtgggtcgtcgtcatcggtcgcgtctgtgggtttagtcgtgggggtgggtcgtcgtcgtcggtcgcgtctgtgggtttagtcgtaggggtgggtcgtcgtcggcggcgtctgtgggtttagtcgtgggggtgggtcagttgagatattggtgtgtgggtgggtcggttgacagagagaacgataaagacaagagagagagagagagaagaggtttagagtagacggagagagaaggacgaagagagagagtgagaagaggaagagttagactgttgggcagggaaaattaaaataaaatggtattttgggtagtttgggaaaataatggaattaatttgtacaaattagtagagggtctaaaatttgatattgggggttttattagggtcaaataatgaaatttcccaattaaaatctaaaaataggtttcataaatcaaaagaaaaacatattcttatttactctcattgaaacacaaaacaataattttttaaaaactctttttgtcccaaacacttacaatgatgtaaaagattttttattttctgtaaaagttgcttaaaaaaaaatcagatatacacaatcatacaaaattagagtgcaaaatcatatacaaaataatatatttatgcaatgcacatatacttaattttattaaaaaaaaaactatctatctaaagtggaacgataagaaaattaataaaagaaatcattattgtttattattaattggttgatacagattgtattactgaaaatcttttcttatgtatacgaaattcattcttgaagtaacattagaaaatagaaaaatcagcactatatttcttttcttgcatccatatgttatccaaagcaatatcaatatttatctcaaaacaatcaataagactatgcataagagtataattaaaggggtaaaaaatgacccctttaattgatctcctagataagaaaatttgccatattataatttgcaatactcaaacttctgtacaccctcataaccaaaataacatataagaatctaatgaaatacatcttagatgacatatatcttagatgtcaatcaacaccatctaaagatgacatatatcaaaattccatttttgttccttttaaaaaaatacataaaatatctgtctaaataccaagaatactacattaaaatcgaagtagattaatggaacaatatattgccaagcatactctaaaaagttgaaggaattcaaattgataattgatcctcgatatagacttggagatttccattgagacaaaatcaaattgacacaatgtatcataaagagttctatgtttcacaacattattttctaaaattttctcactccaacgcaccaagataccctttcaacgtcacttagaacagcgttggtaatgaattttgccaaaatcgacactgaaaaaccttaaaaaccgcctctaaaatccaattttgtagtagtgacatatatctaagtttaaacaaaatcaaaactgaagaagtctaaactctttcaaagaactcgccggttgtagttgcgaccttctaaagaaaacttgtgagcttttttttacctccaatgatttcaaaaccagtaaaagaataaagagtgatgtgagagtaacacaaccatgatatagtacctacctagtcccactcggtataatggaaacaacaagaaaggtaatgtcaaattaaagttgcaaaatttactattaaagaatgtcaaggataataaatagtttgttctgttagttagttgtaactaactccaactgtcatgactcttttcatgtattctgttacaagttgttgtgttctgttttactctgtatataagccttgtacagtttgatattcattgaataagatagtctttctcctctgttatcttcttcttcttttcttgattgcattatcacatggtatcagagctagactcgttcgttaatggagattcctacttccgcaaatggtgcagcatcaagattgaacaatgctcaaccaaacaacaatcaacaagtatctctaccgaaatcataccctgtttcattcaatcactctttgtccatcaagctagatgaacacaactttcttccttggaaacaccaagttctggcatccattaaaggcagcagacttcaaaaatatctggatcacactcgagcgccaccaaagttctcgactgctgcagatcaaagaaacaatattatcaatccggagtacgaagacttggagcagcaagataatctactgatctcatggctcctctcatctatgtcggagaagacaacgaacagaatgataggatgcgaaaccacgacagagatctgggagcaactgaccgtgtattacactgctctaaatgcaacaaacataagcctgtacaagactcaacttaaaaacaccaagatgactggatcgttaagcgattatttactgaaaatcaaaggtcttgtggatcgacttgccaccatcggtcacagtcaatcgactcaagatcatatagaagccattttcaatggattgccatcggagtatgatgtttttgtaacctcagtcactaccagaaaagagcagtacacagttgcagaaatagaagccttgttaatggctcaagctgtccgaattgagaaaaatgtcaagaacatggatatctccaaagatgaagccaatttgtctcaagcaagaaactctggattcaactatggcagatctccctatcctgcaccagcagctccaccaggtttcaccaataacaatttctcatatggtcgaagttctagcaatttcaatatggctaataataatgcatgccactatcaacaaagcatggccagaggtagtactatgtacaatcgtggtcccccctccaataccaattccaaaacgtggtccccctacctatagccgtggtccccaatagcaatatgggtcaacaagtgcaatgtcagttatgccataaattgggacacactgtcaaacagtgcttttaccgatttgacaagacattcacgggtccagaatccttcacaaacttccctcatgtggccaatatagctgagatgcaagctatgtatgttggaccagacacagttattgatgaaaattggtatccggatactggggcaactcaccacctcacaccagatcagaccaatctctgcaacagcaacccttatactggaaatgaacaagtgttcgtgggaaatggagttggcttaagcattgacagtataggtaattcctatctcttatctccttatacttcacaacagctaaatatacacaacctattacatgtacctgctatcaccaaaaatctcctcagtgtctcccaatttgctcaagataacaatgttttctttgagtttcaccctttctcttattgtgttaaggacatacctacacagaggatcttgttggctgggaaccttgagcaaggtctatacaagtttcaaccttcttcctatccaagtgtctctactcatctctcaaactcggtccagtctcaccaagaaccaagttttcaatgtcacactcatgtaacagatacaactaagtcttctttttctttgtggcatagcaggcttggccatcctgctgccaaagttgtaaccatggctctttccaaatgtaatataccttattcaaataaaaatgttactgatgtgtgcaaagcttgttgtcttggcaaatctcataagctaccattcactagatccactactcaatacaatgctcctcttgaacttttgcattctgacttatgggggcctgctcccataaactcatctagtgggtatagatattatattagctttgttgatgcttactctagatacaattggatctatctcttaagaacaaaagatgaggctcttccaactttcaccaagtttaaaactcagattgagttgcaattagggaccaaaataaaaacactccagtctgactggggggtgagtttagatccttcacaacattgctagaaaactcaggaatagttcataaacttgcatgccctcatacacatgaacaaaatggggtagttgagcgtaaacatcgacatatagtagaaaccggcctaaatctacttgctcaggcttctctccccttaaaatacttggatgaggcatttcgaactaccacataccttataaatcgaatgcctacaccagtattacacaatgccacaccattaaagacactttttcacactcaaccaaattattctatgctcaaagtttttggttgcttgtgctatcccaacttaaagccatataataaaaataaattgcaatatcgatccactccatgtgtttttctaggatacaacatgtctcacaaggggtataaatgtatgtctaaagataagcgagtttacatctctagggatgtaatttttgatgaaagtagttttccctattatcactctactcacttatctaacattactgttcagcagcctattttttaccccaccaggacaaccacctgtgttcacttctttgcatgttccttctcctgtccatagcccaaacactgtcaccaacactggtcctctgtctgcttcaccaattctcagtcaacaatcgggttctagcaaccaaatccctacacctgtcaacagtgtgcacactcaaactcctgcaactgctacagctacagaagctgttattgtctcagttcctttagctatagccacactcaatgtcccttacacctccagcccatctgcccctactaatccaacaccagtgtcaacttccactcatcctatgaccacaaggttaaaagcaagaatcagaaaacccaaagctctattagctgtttgtgaaccaaaaactgtcaaagcagctcttcaagaaccacactggcataatgccatgaacactgaagtggtggctttgaaaaagaacaacacatgggtggtagttcctagaccagcaaataaagttccaattgggtgcaagtgggttcttagagtgaaactcaatgctgatggaagccttgatagatataaggcaagattagtggcaaagggatatcatcaacaagctggttatgattttcaagaaacatttagtccagtggtaaaagctgttacaattcgggtggctctcactattgcagtcactaaagggtggcctataagacaacttgatatcaacaatgcatttcttaatggagatttgcaagaggagatttacatggagcagccaccaggctttgtggatcctgattttccaactcatgtatgcaaacttaacaaagccatctatggtcttaagcaagcactaagggcatggtttgacaagctttcctctgttttgcttaaacatggttttcaattctctaaggctgatcattcactctttatccgtgtcacttcactcagctgcacttatattctgatgtatgttgatgacatactcatcatgggcagtgatgatgagttagtcaatcaactcattagagagctaagcaacatttgctcttaaagatcttggctttgttgattatttcttggggatacaagttaccaggtctactgaaggaattttaatgacacaaaccaagtatcttcaagacatactttacaaagctgacatgcacaatgttaacactcaaaacactcccatgaacagtggcctcaagctctcaaattatggaagtgaaccagtaaaagatcctactctctatcgatccatagtaggtgctttgcaatatgccacagtaactagacctgagattgcatttgttgtgaataaggtttgtcaatttatgcacaaacctcttcaatctcactggatggctgtaaaacgtatactgaggtatattgcagggacacttgactatggactttggatcaaaccagcacaagacttctctcttgatgttttttgtgatgcggattgggctgctgacccagatgacaggagatcgacaaccgggtattgtatctattttgggggaaacttagtctcttggaagtctcaaaaataagttaccatcagtagatcctcaactgaagctgaatttcgaagcttggcgagtgttgtcacagaggttacttggctgcaatctctcctcaaagaacttcatatatcttcaccaaaaattccctctgtttggtgtgataatcaaagcacaattatgttcactgccaacccagtgcttcatgctcgaacgaagcacattgagcttgatctatactttgt

SEQ ID NO: 260883 - DNA, 748 bp, Cannabis indica
gaaatatttttaaaacgatgatcattgaattaaaacatttgaataacaatgtgtatattatagatttatatacacaattatgacattcttaacaagtttattttcataaaacatatcctttaataaataatttacaatttattaccgaattcttaaacaaaattcactaaaacttaaatgaaactaatatttacgtagctcgccacataactttcatttagtatatatatatatattgaaaaatataggattttttttttattggttagtacatagaaatattttttagttagtatttatatttattatcgtatattttacataatttttttttaaaaataaaataataaattatgtattatgaaattattttaaatatgaatttttttttttttgagatttatccttagtttagagtatattatgtattatgagattttatttatgtttataaattactagtggagtctcacgtgcttcgcacgtgtggctctgaaaaatatctaagcacaattattttaaaaaaataattaatattttatttacgaaatttataacattatttataattaatatagtacttttgttgatttttgatcttttatatcgtttcacagttgatgtatcgttgtaaattaattacttttctcataaacattgaccactaccaaattatgtctcttcttaaaaaattaattaactttttttctaataattaaaaaaagccaacctaaaatatattattgtt

SEQ ID NO: 260884 - DNA, 530 bp, Cannabis indica
attatgaagttgtgatatctgaatagattggggatttttgttggattttatttaccaggatcttagatctactcacaagtatgttgattaacaacctaaatatgaagttctaaaacgataataaataaacacatataaagtatgagaaaccttacagtgggtgcagcggaataatatgtctccttccactcagatctttaacccttgattcctttctgttgcagaatataatcaagattgagcccgaatgtcctcctgttcgatgtgatccttcacagtcttccaatctatgattgaggtactgtttgctgtgtgtgggcactactctctcactagggaattcaaaattgtatctctcttgtattgttgtgtattgttcaagcatgaagaagagatgatgggcggctatatatagagaaaagggaagctcaactttctgaaagaggcagtttcctgaattacagagtaattgcttaattgccttatttggtgtgagccaccactttccttttatagatagctgctaggtt

SEQ ID NO: 260885 - DNA, 609 bp, Cannabis indica
tataaaagttttatcaaaaaggacgatatacaacaacaaatcaaatacacaatagatacaaccaaaataactcttggaaaatcggcacataggtcggtagggtcaataagtacattcgtcggagaagaccatcgccccatgactgctctaacttgtaaggacagcatttttaatatggattagtaaaggcaattaacgctaattattgatatttttataattatttgtcaatttatttaattgtggttcctattattaaaagtgggcattaaagttataatttctcaatttcagagattttattaaactctacatgtattatttgtataatatttgaattatgctatttttgtaatttttgctcggcgacaacgtaaaatgcgatggatgactattttaatcacatgggtgagtctagaaccttattcttagtgggatatttatttgagaaaaatagaataccgggtttggacggggttatggtttttgactattttacccctagaccttaaattgcccaagtttaagctaaagggctatttttgtcattctgatgagaggggtgtggtggtttcttagggaagtgacacccagcaaaatttaatttca

SEQ ID NO: 260886 - DNA, 723 bp, Cannabis indica
ggttaattataattataaatgattatatattgatcaaaataacttatgttacttttttgtttgtttatttttatagcaacttttacgttacctttatatatatttaaaatttaataagataccataaaatacaaaaaatactaaatagcttatattagcaaaaataaatatattttttaatatacatataattattgtatgttgttattaaaataactctataaaataagtttatatagaatatatacctaccatacagtaacttttatatatataattacaaaataatttttagtaatatgaaattagttgacatattaaattttgtttaagctattggttacttatttttttcattgttaaaatataaaagagactatgaggttactcttagttctaaaaattttatttagtaaaaaaatctatgattctcatatatcaaaagaatcatctcgaaaaaaatagatcataatagtatcacttttgagctcaaacagtataacctaaattttatttttctttaagtttttcttatacgttattttcaaaatctatcaaaattattctataaaagagataatacaatttagtaactaaaacgttacctacttaatattagtttgaaaaatatatgcttcctacatatcaaaatgatcactttttaagagtagatcataatgtttcaatttgcaaagtaaacttatgtagcatacaatttagtaa

SEQ ID NO: 260887 - DNA, 1172 bp, Cannabis indica
tcgcttgaataattttagatgctctagaattggaaccgtaccaacttgcttctcctaaactcaatttttttggcagaaaaaataatatctaaccgaattaattatttgttttttttttataagtgacgtctcaaaagagcatccaaacaacaacaagataataaaaactactgagaaaacagtcaataacaccagaactacacacagcctaaaaacaaaacaaagaaaagattaggtgtaaacataaaaaaaactagcagtaaattatgaaaaaccaaaaataagaagccaaaaaaataagtttagaaaaaaataattacttttttaaaataaataccaatataaaaataattcaaagtaactttaaaaaaataataattcaaaataaaaattaataaaattttaattattaatattattttttagaaaataaatattattataatatgtataaagttttaatcgtatacaagcagtcctatcgtaagagtatataccttacagcataattaataaccacatgatctaaaatcaatggtcaaaaaaagttccctaccgataacgaacttttgctaggtccagccataatcttgcccatatatattaggtgagttatatataaaaagaaaattaggaatttgagaggaagaagatgagtagttttaaaaaagatgaatattggaaaaaaatatgttgtcatatataatattgttcttataaataataaatttaatataatatgtatacgcctatacgtacgtatgcatggttttgatgtaacgtgttttgttaatttcttaattatgtagaaatgatcatgtatagtgtataaaaaataaatataagagcatacaaattaattaatacatttttgtgctcataataattaaacacatgcatatatacatgatatattaatcattaattaaatactaatacaactaacattttaaaccaaagtaatattaaaaagggttaattgcggcaaaacttccaatagttttattttacttgcaattaatccccaaaactcaaattttggcggtaaaacccccaaaatcagcattctgttagcaaaaacacacttccgttcccttgacttcgttatttgctagtgtggctcagttcagtttagctaacgtggacacagtgtacacgtggacaatccaacc

SEQ ID NO: 260888 - DNA, 946 bp, Cannabis indica
atttgatttttatctctaattttcgtcctccttgattgcttgttaaaaactattgaagtccacttcttatatagccaaaaaatggtaaaaaaaagataaaaaacgctaaaaaaactattttgcttaggattagaaggggtgggccgcggcccatgatttccataggcgcgccccctttatttgggcagtgagttttctgctacgtcgactgatcgtattttggccataaatctctcgatattgcttagaattggacgattcaagatgttccgaaaacatgaaagagagatctagaacttttatgttttgactttttccaaaatctaaagcgccccctttatttggacagtgagttttctgctacgttgactgatcgtattttagccataactctctcgatattgcttagaattagacgattcaagatgttctagaaacataaaagagagatatagaatttttatgttttgactttttccaaaatataatcagaatatagtcacattcaggtttgaaatttcaactttattttttgcacaattttttctattttatagattatctttttctgagatctttttatctttttccatcttattcctttgatattttctaatcttcttctattttaaatctgcaaaataaaagataaaaaacgtaaaattgctccaaacaagagtagaactaaattaaaaacacactaaaaattaacttaaaaataatactaaaaataacctaacattcatcactgattgagtatattacaagaagctagctacaagatctttgttgcgagatgttgaatgtttatcgaaataacatcccgacaatgctgagataccccacttcatgaaccttgtgatctttatttagatgagatcacctcacaggttgagtcctgagttttttttgacctgtcccacaatgtatttattgtgagaattta

SEQ ID NO: 260889 - DNA, 761 bp, Cannabis indica
acttccacgaccagcgggtcgctgtgcggaaatcttatctggacagcatcttcgtcgccgaatgttatggttggctctcctgctcgtggaactttgggcttcctttcttccacggccaggatgacttcttcttgctcgtactgagctgtgcgggcatatcgttcccgagctttgcccgtgtctccagcgatgtgcgggcctccaatgatgacttgcaagtgtccatctattggcggaggcatcagatcctggttgttctgaccttggttggccttgacatacttctgtaggtgcgggttgttcttcttgatcagaagttctatttcccgcttcaggttgtagcattcgttggtgtcgtggccgtaatctccatggaaccgacaaaatttcgtcatgtcccttttgctggtatctttcttcatgggcccgggcttcttgtacggaattagcgactgagttgctatatacacactttctatatcctcagttaggatagtgaatgcagtgtgtttggcgcgatcacggggagtctgtccagttttttcggcgaactttcccttcttcccgttcccttgcttgtggttgttgcctgaacgcttgccacttcaattgctggaatattggggaagctgggcggacgttccagtagaaggagccttcgtttttttcggcttttgctcaccttctgctcgctgaatagcttcttcgagcttgatgaaaccttcggcccggtcgaggaaatcactcattgagtcgaccgg

SEQ ID NO: 260890 - DNA, 1833 bp, Cannabis indica
aaataattaagcgtgacaaattattaattttgtcaaatagtaacgtgcaataagaagttacatagtttgaacattaatcatagaaagaagttgcaaattcttgagaaatgatgatcataaattgtgtaactctcctatctacattatcactcttaataatcagtaaagatgttactaattgtgtttggatatgaataaatgatagctattaaaaatatagttgttggagacttgatttattcatttataaggtatataaatagttcaaaatcaagtgagaataatttggaacactttgaagaagaattaccaaaactaaaaaaaaatggtaactagtaataactagttactgttttttttcagcatacaatgacatgtatttttgaatgtttaggagcttttctagcagctgaaaacacatttaagttacccaattaataccataaacactcaatttatgattggtaacatccaaaaaatttatggtggtcattcatattcatatgggagtgaaaactctataaatataagctatattattcacttgtgatacatgtagttaaatcacttgttgtggttagaatcgtgtggggatatttcatccttagacactagactgggcatatgagacttgaaaaaattttatgaacatttctagagtttccctaaatgtccatgtgagggaggaaatgacttttaggacaaagatccataaactttggtcaagcctattgtatgttggtgagtgttcttcttctttttcttcttctctaattattttataatcttaatttaatattttatttttattttatgtatttgattgtgatcctccatatttcctcttatacgagaaaatttttaacaatctaaaagtcaatttgatggcataatcttctttctaaaagacatcttaccatggagaaatatacaatcaaaggaagctgatcatgaaggaagagcatcaatcaatatcatgagaaaaaaaaacataaacatgtagtaagagattcaagctatttatgagtaatcataatggatttattttatgatatacaatttatttgataatgatatagtagcatgttcatataatgaggtatgataatttagtaaaaattttaacaacgttacatatccgatatacatcagttatatatatttgtgtatattatattattatatatagtgatatatgatattataattgagtttataatattttagcatatttatatattgtaagagatataatatatgtatatgtgagttatgtataatatataattgtgagaataaatatgtagaaatagtaattattatatatatatgcatatatgaaataaattatgtgtatataatatatatatagtgtgtatatataaactttatgttaatatatgtgtataagttatcatattattatataatatgataattgagatgatgataataaaaatgtgttcattctattattattaatatgagattatattgtaattaaaataattttataaaaatgaagctccattttggtgataatcatcccattttatgatataaaaaaagatgaacttttaagagttacatcttttgttgggaatatcttatcatgtaagaataacttgatcaaagtgaatttaaattgtgagatgaactcataaaattggaagagtaattttagactactcaaagaaagtggatcattatggattcaaataatgagacaaaaaattatattggagaagcaattttgaatattaaaaagcaaaattgtgaaacaaaattgatgagaaaaaaattttgtttagtgtaatacttggactaatctcg

SEQ ID NO: 260891 - DNA, 551 bp, Cannabis indica
attcttaatgaaattcacacaagttctaaataaaattagtaaaatcaagtgtaatgaatatcctcaccatttactaatatttattcttattgataacacaagttctccataatctttggtgctataatgtagaagaattcttattaataacacatttcttattgtcagattgaacttgcatatctttatgagtgacattttgtagtaaagacctttaaatgtgtctaaatcaagtttcaaaagaagcttggaacataaaggtctttgctaattttaaaacaaagtcactactatattgcttgttccttaaacttctaaatgtgagaagttatcttgtctgtggataagatttgctcacagttactgactttcttaggtttatttgtaaaccttgcaagaaattatgaatgtggaataacaatctaaaataatccactatgtgttaataatcacattaactatattagaatgaattcatacacaataaattaaaatttattggtgataataaagtgtgatttatttttcttaattatacagtaaaaactgta

SEQ ID NO: 260892 - DNA, 583 bp, Cannabis indica
cgttatattcacaatgtaaacaactatattttgatcgaatatacaacacttttgggttttccattgctcgtaatcttcttgtttaagtagttagtaatctaccaaactttatgattttcgagcagttgtcatttctgcctcgcaattgcagttataatctgccttaagcaaacttaaatatactttaaggattttgtcactttgtatatttttaatttgcttccatgaatagttatattatctatccgttttctaggtttatgttttttatcaaggcgtcgtgatgcttcatttattactttcctagctcgtgagaaacataagtattcagttttgtacgcgagttataatttttgattttccactcccgttagataggttataaataaaaaattatagttgtttgatccctttgtcgtcaaaaaggttcgatcaatgtgttataacgattcgacccctttctcgtcaaaaaggtttggtcaggttgttataacggttcgactccactttcatcaaagaggtttagtcgagaaccttttgaatttaaaaaaaaatttaaatggtgggtttgcattatacaatg

SEQ ID NO: 260893 - DNA, 1908 bp, Cannabis indica
ttaaaacaatgaagaatggggataagtgtgattttggagaacatgaaatctatttttttttctatgaatgtgctctagttcatgtatgtatgtatgtatgttctcctatgggctccatctttattgcgttgtctccattctactcaggccagccttcgtaggcccaattgcataagtttagaaatgtatgtatgtatgttttaattctgagtatcttaggttcctatggatttcatcgagaaatccccaaagtgagctcttcatttctttggacttttccatttctgtcatatctcatccttatttttttttgttaaatataatatttattttgataaatataatatttgtttgtgtatatgaagttctggtttttattttactactgtttacatatttatttattttttcttatatattatttggtttttttactgtaagtatttgctatgatctttgaatactattttaattataatttaaataaaaataaatttgaatataaactgattcttaactactattgttttgaatataaactttggctaatgtaatttgctactataatagtgtatatatagcatatgttttactctccatattataattttatttagttactaacactatgtaatactgcttctttaatttgagtgataaaataaaactgtatcatatgttgtgatacataagtttgtttatggatacactatgtaataatgctagttacttggtgtctctttaatatttgtggttgctttgttgttagttttggtatatttatagatgtaatggacggaaggtataattttttttataatgattgttttataaattaataattttattttattatgctaatttaatttaaataatttgagtaacttagtttttgaattgtaggcaataaagtaaaggtcaaagcatcaacaaagtgaagactattgacactgttaattgatgtctacatagaagaacatcgattttattttaagttggtaattattttagatttcactaattttactacttattttgaatttggatgactgtaataatttatttttgatgtttgaatttttatgactttgcctgaactttatatttatttaatcattcaactaaattttttttaattaggaaattttaattgcaaaaaattaagggttgtaacccaacccaacccaacccaacccaatcaataatgggttggattataattaaaacttgatatgaatgggttagaattgaataggccgatctcattgggttgacccactaaaaaatagcctcaacccgaccaacccaacccatgcacagccctaacccaaaactttcaaagggttatacaacatagaacaatgtgttaaactgtagaatcataaatgtgttcacaattaatcactgtcaccacttaaaatcattctaaatttaaaatcttgatacaaataatgaaaaagcaagcacctcatactagcagaggaaaaaagatttgaattcatgccttatacctcttatttacctgcaataatgaaataaatagaagcatgacattagaaaaaaagagataaagaaattaataaaagaaaaaatatatatggaacaaatagattgaataagagagacatacctgtatcttaaagctttcaaaggtcaaaaaataaaataaaaataatgatgctgttcatgaagtagaggtagaagattataggatataatgtatatataataataatatataatactttactactaagatatatatgatataaataaagtcctttttggttttttttttttgggtttgtatgttttattgcccaatataaaatctctaaaaccacaacttctttgttcatcatattaacgttggtatttttttgtttttttgttttttgttttttattt

SEQ ID NO: 260894 - DNA, 495 bp, Cannabis indica
tgtggatattaggattactaatagtccttaatatctaacatataggtcactttcataaatctttcttgattgtcccctaatgttccttatttgattacatctcagatagctcccactcaatttcatatatctggttaatttttttttaacctctattattattttgagggatatctcgttgtgacttattgccttagtctgaaattgtaagtttctttaatactaggtcatcaacatagcagtttagtatttaaagtgtaaaatacttgctagagattaagcaatcaaattaagataccataaaatgttatgaggattagaaatcttgactcaagtcatttgaatagactacgcaagaatttttctatcttattctcataattctgataagttatttctatccacgtgaatggttagatttcttttattagtggtgttctcaagttcctatcacaagtgtcacccaaatgagaatgggtaaagaattttaatatt

SEQ ID NO: 260895 - DNA, 518 bp, Cannabis indica
gctcgagaagccgtaaatcctttgctgagaagggtggtctttaatttttcattccaggcccgcggggcctgctttaagccttatatggctttgttcagtttgcagacgtgggtggggttcaacttatcttcgaatccaggaggttgggccatgaatactgtttctgtcaatgtgccatttagaaaggcatttgacacatcaagttgggtgacagtccactggtatgaaacaacaatggtgagtagtatacggatggtggctggtttgacaaccagactaaacgtttctgaatagtctattctaggcgtttgatgataatctttggctactaatctggacttgcacttggccagggtgccatcagcatttagcttaaccctgtgaacccatttatttcccacaatgtgcatccctggtttgtaagggacaagagtccaagtcccatttcgaactaaggcaacaaattcattgttcatagcactgtgccacttaggatcagctagagcctgtttcaagga

SEQ ID NO: 260896 - DNA, 1543 bp, Cannabis indica
aggttgcagttgctagagcttcccccaaaaatggtttctctaatccagaactgaacaacaaacatctaactttgttcaacagggttcggttcatccttttcgcaacaacatttttctctggggtattcactacagttttatgcctagtgattctatattattgacacaacttgtcaaatttagagttaataaactttaacccattatccgtccaaagattcttaattttaagattcgtttgatcttctaccggagttttccaaactctaaactattctaggcactcactctcagttgctagtaagtaagtccaaacaaacctattatagtcatcaagtatagaaagaaaatatttcttaccggagtgagtaggcactttgtatggccaccaaagatcaacatgcatatattcgagcatcttcatagttatatgtcttgctagagtgagcttcaacttatgttgtttccctaaaatacaaggttcacaaaaaatggtaaggcataagaatttaaattttcaattatacgttgtttgtgcagttctttgaggcttgttcactgatatgcccatttctgtgaggccacagctgcatatccgattctagccctttcaccaaactttcctctctggctacaacagtttctccttagagaacatataaaccattgatattttcacctttcatcactataaatgaacctttggtgatcctaaagatttcgtgcatggacttgtatttgtaaccctcatcttcaagcgtacctaaggatatgaagtttcgtctcaactctgggatgtgctttacgtttgttagcaccttgattccactatcttactatttgatggcaacctttatagtttcaatgaccctacatgaatgataatttcccgttagaactttacatccatcaatttatttataatcgaaaaataattctcaactcggacacatatgataagtgcatctggtgtcaagaatccactcccgttcattaaagatttcgagatggagaacgattctccatccgttgagcaatcgtcactatcttttgcaactccaactgaatctttcctgaggtagtgatgcctattctccttcctgatacgaaccacaccaagagttgtgataaaacccgacactaaatatggccgactctaagaattctcgaaatttaaatgtggaaccgcgacccaatgcttagttaagcatgaaccttggtataaaggaagatggcaaaaacggtggtggaaatccgtttgataagtcaggttgaacgccacaaggaatactccttgataagttcgaatagttctctcaagaactcaagaagaaaacctctcaaaattttattccaaattattctgatttttcaaagtatttataaggctttatatagccaacttacaaccaagaaaaaaggaaactaaaagaaagataactttcaaaataaaacaaagacaaaataaaggaaacaaaattaaaaaaggaaagctgccaattgccttagaaaacgtgataagctcaacttgggtctaaattga

SEQ ID NO: 260897 - DNA, 275 bp, Cannabis indica
gactattaggattgtaacaatggataaccataatgtatctatatcgtggtacatatagagcgttctatataattgagagtgctagtcaattcaaaaatctatatcagcgaaggcgaaattaataatttagagaatttacttggtgaattcttgatctactaattgaaagctcggttatatagactcatggtccccacactagtggagataatacttcttgcagactcagtcaattgaataagtggttgaaataatgtggcaaaattgtaactaga

SEQ ID NO: 260898 - DNA, 1808 bp, Cannabis indica
taggcatgtgagtgtgacatgcaggtttgtgacacacagacatatatgaatgacattactgtttaaatatcatgatgagcatattatatttgttaagatttatactgtcttgctgggcttggctcacgggtgctctactgtacaggaaagggtaagactgtcattgatcagccatgagtgcagaagctcgacgaagaatgtacatgtccgggccataacagaccgagcgggttaagggtctaccattgttgaatttttgaaactctatttttccgcttaggccagctaactaagagagacttgtaataaagtttgtaaatatttttgggatcccaactgttgtaaagtttaaattattacaagttttattttcatttcgtttatcgtaaagtttaaattctgcgctaatctcattagtaatcccgtttagggattagggtttcataagtatctggggtagcgtgcctaattatttagggcattataaaaatcctagggttcacacaattgtgtaaattttccagtcttatcataataatattgattcatgggctaacgcttgttaacgccctaaccacgtaaaaactctaatattatttctttaactttcacatatattttattggtttccaaaagtgttagtaaatattttgttattttcattaagaaaattgtaaaaagaataatcaaaccaatggaggaagtagaagaagtgagcatcaacaaagaagatcatggtaaggtcatcaaagtaggaaaaaaatctacctttggccattaaagagaacatggtatccacagtgaagaagaatcatgatgtgttggtaaggaacctttctaacatgatttggatcagtcctcatgtaatttgccacactcagaacattgatgaaaaagaagatccaattcatcaaaaaagaagattgttccatccagtatgggttgaagcagtgaaaggagaagttgaaaaactaacctctatagagttcctccaggaagccttgtatctagtttggctagccaatttggtgttggtttcaaagcctaatggaacctggagaaaatattatttcccactttcacagattgatcagatggtggatgccacatccggatacaaacttttaagcttcatggatgcatactttggctacaataaaatcaagatggatgaggcgaatcaagagcacaacattttctaaatggataaaggtgtatactactacatgataatgccctttgggctaaataattctggagcgacatataaatgtctggtaaataaaatgtttaaagatgttttggagaaaaacatggaagtctacgtagacgacatgctgatcaaatcaaagactttcgaagagcttagtgatgatctggaagaggcttttcccgtcatcaaaaagtatagaatgaagttgaaccccaaaaaatgcacctttagagtttctttaggaaaatatctaggttcattattaactctagaggaattgaagctaattcgaagatgatactagccctcctagatatgccttccccccaaaaatacaaggatgttcaaagctttgactagaagaattgcaacactcagtagattcatttcttagtcaaccaacaaacacattctgttctttaatgttttgtgtagaagcaacaattttgagtggacagtcaagtatgatgatgccttccagaaactaaaagaatatttactggctccaattttgtccaagctaattgagagagaaccattgtacctatatttggctattttttgaccataccataaatgccacctcggtgtgaga

SEQ ID NO: 260899 - DNA, 615 bp, Cannabis indica
ttgattatatagaacgctctatactaagtacagatacacaataaattatccattgtctcaattcaaataatcaatgatcctctattgatgatttacatcgagtagggagaattttactattttatccttcaatgtattttatccttaaaatacttagctacttgtaaatgatattccagtaaactaataaaattcctaaaataagtaatccaccatttaaactcgtttagccaagctctaaggaaatcatcatgtcatttttatgcatttatagaagctacagattctaatattagcgctcccactcaattgcagtaccgtattcttaagatgtaagtgttgggccaatccaattggttagcttcaacgaacaagtcaaagaatacatgtaatacacttaaacttgaacctaaccatcttaggattgagatcattgatataagattaactaagtgatatttacctagaaaagatattacagtaagtttatgatatcttttccactgtgaatatcggtctagtccaatgtataaccatacattcaatacaagcttactttgctaatgccttagaaaagacattccactgtacgagtgtaagtaaaccaaatttttg

SEQ ID NO: 260900 - DNA, 897 bp, Cannabis indica
caactacctcaatgtcatgtcatgacatttatttttctcgatggttatcgataagttctcgaaaggttctcgaagcatatgttccaaggtcaggaatgacctttctcgaatggtattcgatagattttcaataggttcttgaagccaatctttatcgatatgttaacaattttgttgagtgtcttaaatgcctcaatgtcatgacattatatcgatagattatcgacactttgtcgatttttatcactgctcgaaatcatgacacttcttatcgatgggatatcgatgagatgtcgataggttgtcgattatattaaatatctctattttttgtttttttatatttttttggtattgttttctaacaaaccttttgttgtttcaaattacaggatcgattgtgtttcttgttatatcgtacgatggtgtttggtgtgttgagggttttaattgggtttataaagctgaaggcagtttgacgttgacagttaaaactgacacaactatacaacaattgcgtcaaattttatatgaagagttagaggttgatcctttggcgtataatttgaaattggagatttgttccttgtacatgaagggacaaatgattccgccagaggttattaagaaagaacgccaactaagaacgttcttagagatgagggcaacaatgtcaaacacagcatttatgccattatttgtgactaaggtgaaaaaagttgggaattcggagcctatgccgcctactaatcctctccctcggagtgtggtagggtctttcgttcctgaaatagatgttgggattggagtgaatgaggaggttcctaccaatgtagatcaacagcaagaagtggcaagatttgatcagtttaaggaattcgatactaccttctacaa

SEQ ID NO: 260901 - DNA, 1371 bp, Cannabis indica
atcacaaggatggtcatcacaaatgtatacctttccaaggtttccagggacatatctgccaaagaattctttcttcaaagtagcgtggaatgatgctccagagtctaacacctaagagtaatccttgctctctagagagcatatcattgcatcatcaccttctgatgtagaagtaacatttgcttcagccttccaatcttgactttttggtgcactcctgcactgatttttgtagtgtccaatcttatcgcaattccagcactcaatggttttgagctctggtaattatttggattcctatatttggacctcctatctttagatttacttcgataattcgatcttccatggccaagccctctagttgaatttcttcctcttgactctgtatgtaatactgaagaggttgatgattcaaccaactccctacgtcgaatctcttcactgagaactagatcatgaacatcgtcaaattttaacttattgcttcccgatgagctacttaaaactgtggctgtagcattctagttgtctggtagagaagacaaaagtattaatgcttgtacttctttgtcgaactcaattccagctgaactcaactaggttgtgatagtattgagttcatttagatgttgagctaccaatgcaccttccgtcatacccaaattgaataatcacctcatcaaaagaactttgtttaaggctgattgcttctcatacatattagagagtgctgccataatatcagccgtgttcttttctttttcgatattaaaagcaacattatgagacaaagtcaatcgaataactctgagggcttgtctattgagaagattccattcttcatctttcataccctctggcttcgatctacatcttacaaaatccaaaatctgcaccatcaaatttctcaagtttcacctttcctacgtctgcggccattgctacaactcaaatctaacttctggataaaatttataaccacagctctgataccacatgttaagaaaattacgcaaattttcttttgaatgaaattagtgagaataaaataacagcgggaataacacacagacacacacacacaaatttgataacaaatttttgtatgactctaaatctactgcaaatcttttagggaaactaagaaaaaaaaatacacagtgttttacaacactcctcacaacccacaacccaattatactcaagaatttttctcataaaaattctcaaaaaaaaacttttctccctctaaacttttaaataaagctattcttattttttgttttgggatatatttaaatgaaacctatgtaggtctatataggctttggacaaataaaatgtaacgtccacgcttcaagcctccat

SEQ ID NO: 260902 - DNA, 965 bp, Cannabis indica
ggaatactgaaaaaacccgtcacccggactcaaactagactcagattgggaccacaactaggacccagacccggacccagaaccaaacccagacccagaatcagaatttgaactatgactagaacccatagctgagagcagaaccgaacccaaaccataaccaaaattcagataagaacttggacacagaccttgactaggacagggacctgagacttgggacccgaacctagaccgggacctgaactcgacctggtcctaaacccttgctggaacctgagacccatgacccagacaaggatccaaaccctgacaaggacccaaacctgaacccgaacctagactaaaaccaagactcgagacccgaactcgaacctagacccaaaccaagacctaggaaccagacacagatgggggacatagaccagggacccaggcctcgaaacccaaacctagatctaaatccgagattcgaacccgaaccaggacctggcttggacctaggaattcaaagtcagacccagacccagaacaaagacctgccctggacccaaatcatgacaagaacctggacacaaatccagactaggatcgaacccgaacctagacctgaacacaaaatcaaacccgaacccgggactcgaactcagacccaaacccaaaatgagacccaaacctagacatgcaccaagacctatactcgaacccagaccgggatcgaaacccaggacctagaccgggaactaaaccctgacttagattgagatcaaaacctgggactcggacccgaacttagacccaaacttaggaccccaacccacagccgtagcccgatccggacctgaacccaaactcggaccagcactcgaacgccgaaccgaactcgaaccacgacccgaactctaacccaaactcgaactcggaatcgcaactggaactagaaccagacaaggactaggaccagg

SEQ ID NO: 260903 - DNA, 652 bp, Cannabis indica
aaatcacgtaatacgcctaaggtagttagggtgttacaataaatctagagtgtttaacatcagatgttccttcaaactgagtttgaatgatctcccaagcatccttggcagattcacaagatgatataagtttaatataacccttacctacaccattaaatatagcatgcagtgctttgctattgtaggcagaaagtttatcatcttcaatagaccattccagttcagattttattgtagaattacctgcagaatctgtctcaactgcagaagaccaacctgatagaaccatcctccaagctttctcatcttgagatttgatgaaggccctcattctaactttccaataaggataattagaatcattaagcaatggtggtctagaaatcgaacttccttctacaaaaaatgacattttacacaaaacttttaaaggaccacactaagagtttaacgtcccgctctgataacaattgaaaaaccgagtttttgcaaatgtcaataatatatacgaaaatataaaactgtatacgtctgcagaagcagaatgtaattctgttactgcaaaaaccagttttgcaacgaaaaaacagaacaagcaaaatataaaaatatttgcagaaaataaaataacttgacacaagagatttgt

SEQ ID NO: 260904 - DNA, 668 bp, Cannabis indica
taaacgacatgtcgtttataacttcttaggaacgaaccattatcatcatgattcatcttcttgtctaatatatggcaattttctctactttgcaaaaaaatatagtaattttctccacaaatgaaaatcaatatttcaatcattttattggaccttatcaaaattatattttctcaaatttgttttagttgtatttaattaaaaaaaaaaattacccaagtaatgaatatttcatcaaaatttgcatagaaaaatattaaaagatatcagtaactagctagtggtaactattagtataattaagataataatttttaaaacatatcggtaattaattaatatctaataacaatatcctaatttttatgatgattttaaagtactattaatgatataatattagattaggctaacctttagggtgaccaagttgtcaacttgatattgaaaacaataattataatgataataacaatttaatttggtctttacaaattacaatatatgaagagatgagattattagtctccatgatcatctttacagatcacatatatatctttatatattaaaagtgcctatctaatggcatttcttggtttaacagaatatacttaaaaataaaagaatattctgttaaatttaacgattaggtttgatctcccgtt

SEQ ID NO: 260905 - DNA, 1272 bp, Cannabis indica
attattaaaataataatatatatcaaaagctttacatatattaatatacataaattaataatggtctaaatggtattttggtcggtttcggtttttttggtcggtttggtaccgaaaaaaaaaccaaccgcccagtggcggttttaatcattggcggttttttcagtttttggttttagcagtgtcggttttagcggtgttcggtaggtcggtttggacggttttttcgattttctggattttatgctcagccctactagtatcgatatttacttgttgaatttgaggtgattttgggttagaaatcgagtttggaactttttaaagcttagttcgaacttaatagcgtttttcatttaaaggcccaatttttatttctgttacgtaaggatggtaatatttatggtatatatgcgccctgtgaaatttggagtgatttggataagttttgatagtgtttcggtgagtgcaaaaattgagattttcgagtttcatagtttttagaaattcctaggatatcagaaatcgtatttttgtcataacttttgactcgggtgtccgttttggacattctatataccgtttcgaagcttgcgacgagctctaaaatacggtgtatgttttagagccaaaatataagttttattttagtgtatttataccgcggggtttggtagaaaaccctagattatcttatgtgaatataagcaatgttttgggaaaaaatacttattggtttatcgttgttgtgacatagggccgagatcatcggggatagttctccacttgggttagccaaaatgtatgaacctggattaaaggtaagaaaagtatattgtactgcatagtacgttgtatgtaatataattagtattgttatgaattgattaatattgagatatagttaatattgttatataatgaaaagactgattggttgaatattgataatgtgatgttattatgcatgtgatatatgggctcacctgattaggtgatgcgattttcctggcgacgtactgggcgtaagtacgggcgtcagtgatatatgatgtataccaagtgtaggtacgagctcacctgattaggtgatgcaattttcctggcgacgtactgggcgtaagtacgggcgttagtgatatatgatgagtaccgagtgtaggtacgagctcacctgattaggtgatgcaattttcctggcgacgtactgggcataagtacgggcgtcagtgatatatgatgagtacaaggcgtaggtacgagctcacctga

SEQ ID NO: 260906 - DNA, 614 bp, Cannabis indica
aattcaagtttaaagaccgcttggccggtcatgatctctgaaaggccttgaggccatatataatatatatatttatgaataggagataaaaagagaagtgttcaaacagctggagtccgaggctcttggttcggttcttttgagccaacttgagcaggaggatcattgttcgagcaggagaagcatcagcagcctggtcagaagcttggccggaagttgaagcagccacctctttcccaccataggcaacttgggccgcgcagtactcgaggtacatgtccttagcgtcacctaagtagtcgaagttggcctggggattggccttccaaaaatcaaagaagagctcgaggccggcagtctccaaatcattgacctctccttcaaaaggtccgccttatcctcctttagccgaagaagaacttgcgcagagaactcctctcatcctgaagatggtcaacttcagcggataaggtctcgatggtttcttcaaagcgatcagcagcctcgacgtcctttgttagcacggagatcttcttcccggcggcaaacaacttcttgttggcctcacccaactcatggcgaacagctccagtctccgccctggcctcctcagc

SEQ ID NO: 260907 - DNA, 889 bp, Cannabis indica
ttaccaatattttaaaattattgattcataaaaacttatacaataaataaacttagaacatgctaatgtacatgtattgatgtaataaaaaatataaaaagaaagaccattggaaagacttgtatataataatcataaccaattggaacccaattagccttaaatattggtttcttttcttttcttcatctatttttatgtttatatatattacattattataatgatctataacttaagtctttatttatttacttattattgataaatcaactttagacttctttgtaaagatatattttataatatgtgtgtgttcatatttgtgttgttctttataaaacaaattaactatatatatataaataatttaagtagaattgattccaattaatattaattgagtacatgttggatgtgttaaaattaaagatatcatatttggagggctcgtaataatgcttttcggaattttaaattccctttaatttttgttgtagttagaaacattcaaactttgaggtttgtaatagaatagtgtacaatacaacaaaaataggtaaagatgatacagattaattggggaatttaatttgtaagtaattatagagttgtatatgggtgggtttatattacattgattggagtttgtaaatggttttttattaataatgaaattcagctgatttaacaaaataataataataataataattaattagagatatcaattgttctttatttaaaatttatattaaaaaccaatatataaaacttaattaattaaaacatctatatatatatatgtacattgtttgttggagagtgatagagtgagtacccacacacatcaagtggaacctcaatcatagtgtggaagattgtgaag

SEQ ID NO: 260908 - DNA, 722 bp, Cannabis indica
agtttttagctgtccttgaagggcataatgatgttgactggaacactttatcggatgattccaaggcaaccaatgactatattttaagtatagctagtgcatttatttcttggaaatcaaagaaacaaaatatttttgcacagttcaccatggagtttgaaatgatagcattaataattgctagtgaagaagcaggttggttaagaagcctgctagctaagatcccttttatggggaagaccaatactaattgtgttgatccattgcgataatactgcgactattgtaaaagtttagaaccgttattacaatggtaagaggcaacgaatacatcgtagcacaacactgctagagagtttctcttaacagaagctattagagtagatcatgtatgcattgatgataaattgtctgatccttttgacgaaagatttagctagagagaaagtccttaatacatcaaaaagaatgggactactgcccttagattaatgaatcattcataatggcaacccgacctattgactgaagatcttaagaaagaagttcaatatgtaataacaagttatgatgaatcattcttgaagtgattgttgtggtaaattcaacacgcaagtgtacgtgtcataacaagtagtagactcactaagagtgaggtcgatcccacaaggattgtagttaagtactttaaaattaaacttttacttctatttagttgaata

SEQ ID NO: 260909 - DNA, 818 bp, Cannabis indica
gtatagtgtcaggttttgttagaactaaaaaagtaccaacaaccctcaaaaagtgtcactatattctttttttattatattttattattattttgcagatatagtgacacacaaaaagggccattaaatgaagtttttatttaaaaaaaacaatattcaattcttttttttttttgagaaaaaatacaatattcaattctattttttttttttttttgagaaaaaatacaatattcaattctttttaatatagattttatacttttgatgaattatttatttttttaattcactgttattatttttatttaattcaattttagagtaaaaaagtgtagattagctacattaaatgatgacagatttgtattaaaaaaaggaaaataaattatatttcatttaaaaaaaaatgataccagattgtttttaagtaaaacccaaagaagtaatttttatgatcattaatgagataactaatcaaattcctatatacttacactagggaattaggccgcgcttcgcgcgggttcgacctcacttttataattcttttaattattttaatgtaatttttttacattttatttaaaatgtaatttaaaataaatgatattcattagcgtttaggttactataaattaggcaacaataaaataatagagctgtaaaatgtaaatacatgttgctttttaggtctaaaaaaccacttaaaagatgagtatattgaattgtatgatttctttttattatagattataaaaaatgtaattattttaaaaaaattaaaaaaaaaatactgatttatgtatttattgaga

SEQ ID NO: 260910 - DNA, 454 bp, Cannabis indica
aaagcttcaattcgtttgagtaaagctattggtaaagacttgaatgaaaagcatatgcagctcggttgagagttagaaaggaccaatacacgtactacatctcaacatcataaggtagctcgcatgattatgcaagataatgctctggtttcttactttttcagtgtcccaaataatgagaaggatgaatgggcgagacttctttttgatggctctctttaatacacagctcgagaaagagttagaaagatcatgttcattcactttgatctaatacaatttgcaggacaatttacattgcctttgacatttagtagtatacaaattataatcttttgaatctggtgtaatgttttatgctcataattttgcaaacaattgttttgagcataaatatgagtattggacatgaatacttacactttttgtaatgatattttatgtatggacaatg

SEQ ID NO: 260911 - DNA, 600 bp, Cannabis indica
tattttattatttagtgctgttccagttttcatttcagttttagtcagtagattttggtattctaaatcagtcgtcgtttttattattaaactttactgtagttttgctttcacggtggtttttaagatgtcgtgcgttcatgaactttttagggcattgtcgtttaaaacagtgcaacttgcaattctttaataaatgtattgtcgtgtctgggtttcttttccattttaaaggatattgtcgttttagaggtgagtagtttttttaggtaaatattattttagattttatgttttgcaaaaattacagacagactttctaacaaattgaatttgtagtttttaaattggtataaaatagtaccttgagttcaattttatcaattttttttaacataaccaaactgaattcagtttttaagcaagaatagtttattattcagaatagatgataaaaatgtaaagtcacataactattattttgataataaatagagttagagtactaatgttgtatctattttaaaaaattataaatttaaatagtaaaattaatggtaattttgtaaaatacagttttaagatgtatttttttttttt

SEQ ID NO: 260912 - DNA, 1463 bp, Cannabis indica
cacagatgctaagcccattaacaattgatcaccaacaacatgggctaacacagcaaagaactatccaatcaacccaagttttaataaaaccaataaaatttaatgtaagcccaaataaaagtctaacatctttcactctttgcttgatgaccagttccattttggcattggcatctgctagagctttggaaacctcctttctcctccattcaacattgatgcgctctgactttagcaattcaagctcataagccattttgctgaccaaggcacaattcttctcttccatcaagctaacttgtaaagagaatcataaatgaatcagataaatcaaatgaacatacttcttgtccaaggcaacttaagcaaaagtcaacttacagcattagcttgagtcctcatgctatctaccatatagatagggtccccaatcaccatcatggaaaatctatcagcacctagcttgcaactagtgatcgcactttgatctaacaaatcagacaagaatggagccagatcagtccaaaccctgggatggagcctttccaccacttccacattgagaatatcaaggaatggctcatcccacttttcatagtctacaaattcagcattacgcttagtggatatgttggtggccaatttcctcatgctcaacacatcatcttttttagtaaaatcattcattgtcctccatctgcgctcttacttctttcgacatcaacatagacccaacatgaagattacaacatggagaaggtagctgaggcaaagcttattttctctagacagttgagtagaggtggttggaatgtttttgggtacttgaggttgtgaaggcaaatcacgagtctcttgttcgaacgagtacttctcctggtagaccttccgccatccgaggcattagatccccttttgagattaagaatcaaaggcttgtctcctcacagtagccaactgttgcaaacttctccttggcattcaccttcgtcttcttgttcaccccgtcattggaggtcccagattgctttctggaaataaggactggcccatcacaattagaagagtcctcttcaacttgccccatgggcatttgtcgcaaaggcacaacgtccataacatgttctatcaaattgatgacaagagaagataagtcttctagggttagagctttcagaacagcttcctggctcgatgccggaggtgttgacttctgagatccactcccagaaacttgtgcagtcttacccttactcttgccatctttggccacttcagggacctcgttggccctagagttaatggcatccaaaaagttgtccataatacctatctagaatgtagcaggttgttttgcataaagataaacaaagcagataacatatcaagtataattacaaccacaaattactagataatattccagaaagatccaaaccgtttatcgtaacataatttttttt

SEQ ID NO: 260913 - DNA, 1080 bp, Cannabis indica
aaaaattaattgaaacaaaataaaactaaaaaaatagaatccattttccctccgacatacacgaaccaaaaaacctctgtgaaacaccaagctccatcgaacacggatgatcgaggtcaacgacaagctcgaacgttgtcacctcacctgcacaagagaaatagcgagcgagagagaagaaaagtagagaaataaagaagagaaaatgagaacaagtgttgatctttgggtttcgaggttatggatctgggataagcatttgctggaggttaaatagttgtctcagccgaggaggagagacaacgagtcggagagaggccaaaaaggggagatggcgaggtggattaggggctttggaagtcgacaaagttaaatatgatgggaatttttggtccccagtcgccggaggagggctgcgcagccatgacgagagagaaaacgagagaggtgagagggagcgaaagaataagaactaaataaaaaaattagggtttgtgaaaggaccaaataacatatgtccttttatttatcttcttataacttgttttcttttgtctaattaaaaagtaagtaagaaaaaaaaggctaaaaagagggattggtaggctcattttagatttttttaaaattaatattttataagttctttttcttttgtttgtttttataattttttcattaagtatttagtgacccgcattgtgtgattctgaatacttttagagttgcacaatgcgcatcactatatatatattttaaaataaataatttttagttacacatcatggaacataaatattaaattttacggtccagcaatgcgtgtcactaaaaactaataaaaacatttagtgacccacactttttgtgcttgtcactatagagtgtcactaaatgtgtaaattgtagtagtgcaaggcacgtgtcattgcatttattgaggctggagacggtgcacaagtctcatttacccacgactaaataagacttgggggtaaatgttgccccaagtttctcccaatatatgtggcaactgtaatgcgggacacgtggcaggtagaagcctatcatccggagatg

SEQ ID NO: 260914 - DNA, 1070 bp, Cannabis indica
attatgacttgaatgcataaccctaaatcacaatatacacatatatttaacatgacatagcatttacacattaataatcactagggtaataaccctaggccattaaaccactcatgttagggtaataaccgtaatcccggtttctaattactcacatatatcattttcaatataagcgccaccgcacataactctacgtgctaactactatcttacctaatgtcccgcaaatgtagagattccaaatccccggatgctcctgaccaagtgtcagtaatcctagtcacaatttttgggattcacaagtacagggttaatccctaaatccacttccacaaaacataaaattggcattcaaattacaaataatcacaaagagctcagaactagcttttcaacgatataaagaacgtccctaacggagccccaagtcaaatgttatagcgaatacaaaaacaaaaaaaaaataataaactgtcattatcatggtcgcgaccagacctatgatagtcgcgaccactgggtttaaaaactcaggaaacccacttttcaaaattgcattaaaactcacccaaacatgcatatatctcaaaatcaatcccacaataattattaacataacagagagctaacacacatatttaaagctctaattccagcataaacatgtttcaaaattcagatttaaccaacattcaaagtaagctcaagcacacactaaaatcttgaacctcaagcatgctttcaacttcaaccttcaacagcaaaacataaggtaaaacttgaattcacatatgaaaaataccctaaaatttcatctaaaaatcatcaagaacacactcaaccactaagcgagacaatcaagtcaaacacatcaagattaacaccaattttatccacatgcatacaagagcaacacaacacatttttcatgcttttcaacattaaaatctgagctgcaatttcacataaaaataacagtaagaagagctacctcaaatccttcgaatctccagcacatgccaccaaaatccaagcttgcaccaagtaattcctcaacaattttcaac

SEQ ID NO: 260915 - DNA, 1723 bp, Cannabis indica
ccatttgttttgtattccaacaagttttcaaaatccatttctaaattagaagctagtgatgaagcgtgctaatattggggacgatcttccgtcgactgtggaagatcggaagatgaaaaagattaaaatcgacgaagaaggaggagtgggtaatggtgaagggagtggattcatgaatcttgacaacaatttgttgtttgaggtttttaagcacgttgatgcgaagactctggctatggctggctgtgtgagcaagcagtggcacgacacggcccaggatgaacgcctctgggagctgatctgcaccaggcagtgggccaacaccggctgcggtaatcaacagctgagatccgtggttctagcccttgggggatttcgtcgccttcactcgctttacatctggcctctctctaaaccccaatcatcctcgtcttcgtcttcttcggcaatcgcatcgccatcgtcggcagcaccgcgggcgtcgtcttggggtccgttcccgccgatgataaactccaaacctccaacgcgttggggaaaagatgaggtcaatctctctctttcacttctctcaattcgtttctatgagaagatgaattattctaacagaggcagatgagacttttaattttgttataatatttctaatctctactattaccctaatctcatgtttcggaccttgagtttttaatttaatgtcctttgattttgtataatttgttgtgggatttatcaaatagatctgtaattttcctttttatgctgcttgtgtgtataaatcgaatcaagactataacttttcgtttccaaattttatggttctcccaagataatacttttgcagggaattcacgtaatttcttatctgtatttgaaatgaaaaaagaacaaaaaaatagactcgggaaatttcataccattttagaactttgtttagctaactctatgaaaagaagatcagaagtgagtcgacatgatatgttagtgtaagttaacatgttagaatatataccacactttttgttggcctcaactattgtttctttttgatggagttttttagtagttctaagataactattcagtttcagtcaaattgcttgggatttcacaatgttttagcataatgagtgagacaacttgtatgtatagttttacaaaaattcagtccttagaagctattttagttatgctctttactttatttaatattacacatactatccctgaagcaggcataatttgacacattatatcgaagtattttgttagtcgtgatatcataaatcatattccaatattctattttctctaattttgttattgatttctgtgtaccaatcaaaattagaatatcttcattttcgtctcattaaccttatgaaggtgatgattccttttcatatgatacaagcatcattacattaaacacaagtgactagttgtagtaataactacaaacatagagcatgccaagtctgctacaaatttatgagataaactcagtttttagcaagattcgatctttggttctggagaaactccacttatagcaaatgattcttcactgtaaaggttggaggaggttacttacttgattcccaattgattgatgaagttgatactgaatcatcagtagggttcagacctgccagcttcgaaattctctcgatctccttcaccacctggcccattgtaggcctctctgccctttcattct

SEQ ID NO: 260916 - DNA, 956 bp, Cannabis indica
atacttgagactcgaatcaagacttccaacacacacgtatcctcttataaccacttaacctaatctcgagttattcgtcgcacattctggttggacattcatgtatgcttttatcatatattttcagccctagctattctacgtaccatcctattttcattttttttttctctgaatgtgcaacttgaatttcccttcattttgatgaatttaaatataatgaattgcgcaccaaaattaattaacactcccatctctatttagattgagtaattcaatcattatttaattttttgtccctactctcctttttaatttcttcttctttgaaatgacataatatatcatttaggtctaattatatccaaggacaagattttaaagccttcattggttttgtggatgtagagagactagtatattattgcttgagttgaaatccctttttcttttttctttttgttttttggtagggaggaaattgagatcactagttcatacatcgttatcgtacgtaatatatattgtgttattaattatggcttacactttttcgtatatatatcatgtcatatgagttcatgactatcttcctttcattcattcatgtgttatattatacgtacgtacacattaaggacaaggattgcgcgcgtacgacataatcacgatcgatcgatcgatctatctatatacacactgaattttgttttctatttcttttatatataatataagatatttttaggtgatattaaatgtatccacgactatatatatatttatagaatggtaaccacaaacaaatatggaaagtacttggttgatgagaaagtgaagtgaagtttctatcatatatatatatatgttcacaggaagctcccatggaaacttacctaatctaccactacccccatatggcccatgccacgtaccacaattctccactctacttt

SEQ ID NO: 260917 - DNA, 534 bp, Cannabis indica
tttttttatgtgttataatttgggataattaaacaccatgtttaatttttaagcatagattatcaaatttccctttattatatatctattatctacaatattatgtgcttgcttatcattaattaataaacatcttctctccctttcaaattccataaaaatctattgtacgtgagaggtaggtgtaagttggggagattttgaatttttattagctattctatcattaatgaatgaaaaggtttggcttgaaaaatatatactagtgctataaagaaaaatagaaatgttaaaaaagcactagtgatatgacatattactataagtaaaatttaatattgcacattttaatttaatgaataatataataaaaataaagaaattacattgtatactcactttactttatttgttttaatttttatatttatttttattttttttaatatacaccacttttatagataatatttgatgtatattatgtgctaaatttaaataaaaaaatgaaagtatattagacaaattattcac

SEQ ID NO: 260918 - DNA, 893 bp, Cannabis indica
caaatttactttacagagcataaacttatatttttcaactattggtaatacattcagacgtgatcagcattccaggccctaggtaccatggttccgtcaattcttttgagcttgtaagtcccggagccgatttcgtcctcaattttgtatggtccttcccaattaggcccaagtacccccactccgagattcctgagtggctggaaagacccatcttaggaccaaatcaccaatagtaaatttcctatttttaaccttcgagttgaagtgtttagccaccttcttttgataagctgcccttcgtatttgagactcatcccgcagttcgttaatctgatccaacacttcttgtaataaagccttatttgttgttggatcgtaagtcaatctcctgtgggatggaaataacgtttccaccgggaccattgcctcacaaccgtatgcccttgagaacggcgagtagccggttgtggttcttggggttgtccggtaggcccataacactcttggaaatttttctggctaatcgtttttgcaggccaacaactttttctttagggcgaattttaggattttattgaccgcttctgcttgttcgtttatttgcggccttgccactgcatagaagcttttgatgactccgtgttgcttgtagaagttggtaaattcttcgcagtgaaactgcttcccgttgtctaagactatcttatgaggcaagccatatcgacacactatgtttttgataacaaagtctagtgcttttttagcaattatagtcttcattggctcggcctccgtccactttgtgaagtagtctactgctactatggcatactttacccctccctttcccgtgaagggccagggactagtcatcagggtaatctcattgg

SEQ ID NO: 260919 - DNA, 684 bp, Cannabis indica
cttctctaatattttgaagcatttcgcgcggtctgtggtatgattcccactttttactgactttactaacatatcatcgacgtaaatctccatgttctgtctgatctgacttgcgaacatctcgttcaccaatcgttgatatgttaccccagcgttcttcagcccaaacggcatgagcttgtgacagtagagtcccatgttggttacaaagctcgtatgttcctgaactaggacatgtatttttatctagttatatccagaatatgcatccataaatgacattagctcgtgcccgacagttgcatccactaactagtcaatcctgggtagtggaaaatagtcttttgggcacgccttattcagatcagaaaagtcaatacaagttttctatgttccgttaggttttgggatgagaacaggatttgttatccatgagggataaaacacctcacgtataaagtcattgactaataacttatccagttcctattttagtgccccttgtctctcagaatccaacagtctccttttctgccttttcgctgggtagtttggatcgacatttaaatgatggtaggtaatactagggtcaatccctatcatatctccatggctccaagcgaactgatctagattctcccttaagaaacttattatctgctattttagttgctcgtccaggtt

SEQ ID NO: 260920 - DNA, 563 bp, Cannabis indica
ctccttctttgatgcagaatttccatagtcttacatactatgattaaggtaccacttgatgtgtgtgggcactactcatcactaaaaggaattcgaaattacaaagagaagaaaagagagagagtggcggcttgccagtgtttgagaaaataatcagtaaagtctttgtcaaacctaaagcctttaccttctatttatagaataccacatagggttaaagttgaattatttggcatttaaaattgaaaaataaaatgagaaatagaagcaaaggtggccgggcaattgtattgaggaaacacaagccttccacttttccaactttcctatttcatcatttctagtttcccattttctcaaagattgccaattctctctttcaactacataaatgtcaaatctaattatttaataactataattaattattaaataatatattgtcatttatttttatttattaataaaaactaatcaaagtttctcaattaataaatataccctttaaactctctattttctgttttacccttgcttagtaaaaattcacaaagtagacatag

SEQ ID NO: 260921 - DNA, 630 bp, Cannabis indica
tatagggagctagaccgattttcggtcaagtctcgaaatttgagttggataagatcgggaaatgtgaatcctttggtaacttctgagttgtccaaagcgaaaactgggaggcagagtgtgtatcgtagagccattgctaatggtatagttgagattttgtcagtgtataggtctgctgttctccacattgagcagaaattgctgtctgaaactgttcccattttggcaacagttacccagggactcaataaggtcggcctgtaatttttttataccatttttatctttagagaattttgatataaataatttatctgtattcttattgggagtgtagttttttgttcttttgccacctctccatgagcttgttctagagattgagcgagatgatattcggggtggccaacttcttaatctgttgcacaaacgatgccattgcggagttccagaattgcagacatgcattcaaaggtatgatcttatttcttgatatttcctgatcatttaatatgtaaacttttttgtcagccagcacctaattcttcattgccttgagatgattagtataaactaaaccagaatgtatgcatgcttggtgttcttaaattagtattgagctactgcatt

SEQ ID NO: 260922 - DNA, 2524 bp, Cannabis indica
ctagctataaaatcacttgggggtcttttacgtgggaagcataataaggaggattgggatgacatattaagcaatgatatatggggtttgtatgagagtgagagtgttggtattcttccagctttatggctgagctatttttatttaccttcgcatttgaagtcttgtttctcttattgtgctatatttcctaaagattatgaatacaaagaagaagagatgatcttattgtggatggctgaaggtcttttacttcctaagaagggaatgagaattgaagaaatcggaaagaagtacttcaaagatctaatctctatggcattttttcaaccatcaaataacgataagaaggagccatttgttgtctcaatgtctctttttaatccatcaaataaagataaggagccaacttttcaaatgcatgatcttatacatgatttggcaatctttgtttctggtgagttttctttgacgatgaataatatccataaatgttctcacaggattcgtcatttttcattcatacaagattgtaaaagaggctttgaccctaaagaagttgaggggttatttaaagctaagtgcttacgcaccatattgtggcgacaatatttaagtgacgatcagctaaaattgttaaagatcgaggagttggacaagtcattcccaggcttgagagtactatccatctgtgattttagcatcaccatgcttcctgattcaataggccatttgaagtatttaagatatttgaagttagattgttatgagattgaagagataccttacacaatatgcaagctgtataatttggagacactattgctggagaaatgtaggagggttaccagactaccaactaatataggaaatttaacaaagttgcgacatcttagtgttccttggagttcattagaagagatgccattgcaattggcgaagctacaagatctgcaaacacttagtacatttgttgtgggaagaaatagaaactgtggtggtattgaactattgaaagagtttcaacatctacaaggaagtctttctattagaggactacagaatgttcatagccttgaggaaacttcagatgcagatgcaccattattaaagagtaagaagtttcttagtcacctatccttgacatggaacggaaatcaactcagcccccctattgatcaaagagaggtactcagtgccctccagcctcatccaaacttgaaggaacttatgattaggcactacaaaggcaacagctttgcaaattggatgggagatcatcattgcttgtctaatttagtaagtttgcatatttcaaattgtgataattgcagattcttgccgtcattgggacaactgccttctctcaaagctcttatcatttggagttgtggtgtggtgagaataggttcggagttttactgttctacttctgctgcattacaaacaaagtccttattctttagatctttggagactttgaagtttgaatatctgtctaagctcgaagagtggtcatttatggaaggtggagttttttctcgtcttaagtatattcaatttactgagtgcaagagactcaaagtgacattgttaggagattattttccttcattgatagagcttgtaatacatgacagtgaggaagtaataccattattactcccaagagctcaactcatgcaggcccctttgatcaatttaaagaagattataattgaggattgttacaacttgaggcacttagacgaggcggcctttcagtacctcacctcccttgagaagttacaaatttataattgttatgaactcagatgcttgccaaaagaactacccacttctctctctgagctaatcattgaaggttgtccatggctaacaccacgactccaaagagagacaggggaggactggccaattatcgctcacatcccaaatatcactgttagtggcaagaaaatctagaggtatttctccttttctcttctcttttgtattatagtttgactcttctttttatatttatattattattttttgtttttgttgatgttctgttgtaatgatttacttaaaaattgttggattttttaaagattgtggtatgattaatatgtttgaaaaaccttagctaaagaggctgcttggaatttaaataatcacatgaaattaatttttctgaaaaataaaaagaaaaagctactctaaacccattttgaatgatggagagaaatattaaattatatcctttcatttcatctcgcgcgctttacattgaaaaatgtgttatctaaagaaaatgagactggtcatcggcaaattctttcttgaagcattattaatttgattgcataagtatgtgaagttgatgaagctagtagtagtagaagatatactaaatatgatactttgtactgtgacagtgttataaagatatattataaatatgtaaaaagctataactctgtttttgtcagggttgagtagtgggaattaaatgcttctgaatgaggctaaattggag

SEQ ID NO: 260923 - DNA, 513 bp, Cannabis indica
ttattttattttttttaaaatatatatatatatatatatatgtagtatttcatttagtttctcttttatatttgtttataagatacagttatatttttattgataattattttgctgatataatttatttcaacatatatgattttatttatttatctagaaaataaatatatattaaattattgaagaaaatatttaaattatattttttaacaatcatgagccattgttagatttttattgcataatttcttatcgatgtgataagatcaaatgatcatggatttacaaaatttgtagatttatgtatttttaattacacacgactcattcttagaaatgaattatgttcacaactattgaacttaaacttgaagtttattgaacctgaaattcaatgtcatatagtatatatgagtttaagcaaatattaatttattgtgatatattgaaatccctttaggtgtattaatattattagatatcacaatttttaaaaattctctcgatcag

SEQ ID NO: 260924 - DNA, 813 bp, Cannabis indica
ctaggactaggaccaggaccaggacctaaacccaaacccgaaccctgagcaaaacccagacagagacctaaacccgaacccagactaggactcgaacccgaacatagaccggggacccaaacccacacattaattgggacctggacccatataaggatagggacctaggaaaccgaactaggatcccgacctagtaaccgacctagctcgtgacctggcactagaaatggaaccagacttgtactcaagattgggatccggatctagatcaagggctgggacaaaacccgtagtcggtgtctggatttgagacccagaccaggactcgaaccctcacaacgacccgaacccacacccggacctgaacccaattccaaaaccaaatgtggacccgaacccgtaacctattacccaaaattggaaacaaaaccggaagttaatcgggactggaactaggatttggagttggaatcataactgaaacttgacgtagatctagaaccgtaaccagacctggactcggactccaaatccgacctagacctgaattgggagccgaactcggatcccaacccaaacctggactcgggacccaactcgaacctgaattccaacccaaacatggaaccagactagggccatagaaccagggtcgggacctagaatcgtaccccagtctcgatctcgaacccaaactcagaaatgggacctgatacatgaaccagaacaggaccgaaacccgtgacagtgatcaggatcctaactcgggattcaggtaacgggtgtgggtgtctagatctgggactcagacta

SEQ ID NO: 260925 - DNA, 3319 bp, Cannabis indica
ccttgggagagctagagtaggactcaaattaaggtcatctcatgtaaatttctctttcaattatattaaatgaaactttcattcctatacataattaaacaaaaaaaaatcttccaagtgcccatctaagatttttgtatttggtaatggtatatcactgcgccttgaattacaaagtgatgatacaataaattttatgttttatgaaataaattggcaacaatggtatcccaaaacatgagatttcaatagcccagagaagaaacaaatgaatctcagaattaaccaaactgatactcttcttcatctaattgttgccctgcaaaatatcatttccagtggaagactcaagattaaaaagagttcggttatccttagccaatcccatttgttgaccacttacagaagcaacaatgactagtattaaaacttacttgaagaggctgaccaactcaattcaaaactccaaaaatggatattacaaacggaaacattgctttttataacttgaaatgcctttccaagacctattcacccaatcaaataaatgaattccacttacactccaattcaagtttcaatagctaatttgaaacatcaaacagccctataatttgaattgacgaggaaggcgtccacatttggtctgtaatctcaaaatttctcttgcaaaagcttgattacccgttaacaaaagtccatccaaaactcgatggaacgtcaacctacggggtagaaatcctctatcaaccatctcaattaacaatttcccagcaatcaacaaatcttctgatctcttcctcacaaacattgcacttatcaaaacattgtaggtatccaaattgggcaagcaattcgcactgctcatcttctcaaacacattcaaccctttttcaatctccccagcctcacaaaagtaacggagcacaatggtgtatatctgtacatttggctcacaatcatcacccttcattcggtccataaactccatcgccctctccatctgacccgcatgacatagtcctctaatcaacactgtataagttatagaattaggcacataacccttcttcaccatctcctcaaaaacagctatggcattttcaacactatctttcttacacaaaacttgaatcaaagcattgtaagtggcaactgaaggaagcacaccctccccaaccatctcattaaaaattttccgagcttttgcaatctcaccaacaacaccaaaaccattaactaaagtggtataggtaacaacatctatttcacaatcccttctcttcatttccataaaaaaatcccaagcttccttaatctgaccagctctaagataccctttaagcattatgttatatgtagtcaaacttgggtttaatcctctcttcaccatctcttccaaaatctccaatgccttgggagttcgcttaaccaaacaccacccatttgcaattatattataactaatggtatcaaccttaaacttagtcctgaaaactttcaacaaattataagccttttctaccctatttgacttacataacacatcaagaaaagcattgaatgaattcaaatcttgaggacaaccatgttcgtgcatagacaaaaagaccttaacagctctatcaggcttaccagcagcggcatacctctcggcaataatggcgaaagttttgggttcgggaccgagccggcgagagcgcatgcgagcaactagggtccaaactgtcttatagtcccgcaaacgggcggcaaggtcaatcgcatggtcgaatgaagaggaggagtgagcatacttagggtggcgatcgaggaccctaaaaaattggagggctttaggtccatggttccagagtcgtttaaggatcttatcaactaggtccggggaccaatctaaagtggagttgagaagagtttcgggtagagtttctggggcagcttttagaatgagttcagccatggcagcaacttgttccagctctgccgccgcagggggcatggcagagagtgagcgacatggaatagagaatatgggttttggaacatggattgggattttcttttgtggggttctacaaagcatggtggacatttcttgcaggtttgcacattttccctccgtttcctcgacaaccaaacagataaactaaaagagaattgttgacaaccgaatggacttgggttgtgctttccctttatatttttctgccaaaaaacaaaaactgtacttagtataagaagaaaaaatttatttttaaagtaacatccaaactaaaagtaattggcaatattaatgtttgatttgactcacagtctcatactaatctttcggaacataaccagtctccaaccagcttattcaaatgtataaaatattgtataatagtgtacaaaatattgcttcatttataatcatgaaactcaaatgtataataaaaataccaatacaattgactattgttaatgttatgcttaattaactatttactttaccatttataatatgtggatgtttgtatttatatttttatttataaaatgaactattcatacaaatactttagatgaatacttacgttttctttttcacccttttgcagtggtgttggagctcacctattaaagttctaccagaaatatataaattattagactcatcgtgtgtttcaaaatgttaggaagaggtaaagggttacactaaggcaatcaatttatttattgtaatgtcgagtaatttagtgaaagattgtgcttgagctagataatagtttcagcattataggagagatccagcctctcaaaacatttgcatgtttggttaatattattactactataattttattctgctataccagtttctaatctgcttacaatagtattataatacatttttgtcccaagtcgttataaatgctatagtcatgtaatattaataatttctgaatgaacctaactcatgagtatagtgtcacggaaggttttgaatgattatgctattgtgtggttctcccaagttattaccctctgatgaggttcatcttttcaacataaatttgttttttgaaatggcatttgtcttttttttttttttggtgtattagactttcattgagttatgtgttcgagttaggttgagagagctatcactaataatttccattttcttttttaagtcaaatcaatgtaagatactaatatccgcaaaagattgattgtttgtaccgagcatatctttactatagatgctatttattttatcaattgctctgccaaacacacatataaccaaggatatgtacattgcaatggtgtatat

SEQ ID NO: 260926 - DNA, 966 bp, Cannabis indica
ctttttcatttattgatcatgatctgcttacatttaacttaagaaatatttattttaccgatacatttttattccatgtttgacataacacagacttttaatgacttgaaatgctttgatactaagaatacaaggggaacaatgtatgacaaatatttcacttggtactcttagatgagatctgacattgtgactataattaatcctatcacttttatgatacttttatctttcaggtaccatgccttagcgataactatgcgtatcttctgcatgatgtggatactggcacagttggtgtggttgatccttctgaagctgtgcctgttattgaagctttgagtaggaaaaatagaaatttgacatacattctaaatactcatcatcatcatgatcatactggtggtaacgtggagttgaaagcaaggtatggtgcaaaggtatgatgacattagcctttcaataagctacttttcttcttattttatttgttaataagttaattttcacacaaaatgaacacatttgtattacacgttgatgcataggcacatgacgttaggatataagaaaaactatcatttatcgtgtgtggttggacttggattattttatcagttgatttgactctcatcttcatatcatcaacatgtttaaacttcaacagcttttattacaagtgcagtagtgagatttttgtccccaattttgcttctgtactaatttcgtcttgcataattattattggtactgctactccaagaaagtagcataaaaacttgaatgagttattgcatccagcaataaattgctatatggtactgctgtactggtatattattcaaatgggaatgatttataatgattattgtggaaaagcgtgaaagatgtaaaactatgcttacacttgataaaacaactaatctgtaaacttgttagcgtaaaactgcaaactcattttagcag

SEQ ID NO: 260927 - DNA, 5460 bp, Cannabis indica
ttttttttttttgaattaactagttttcttctaagtaattaatatttgtgatcaagttttgattttgttatctgttttgtattgattgctttgagggtttttgttatacgtgatacctaagtttgaatattggcactctttttttcgtctcaagtcaacttccgaatttggccgttagcaattttaatggctagtgatctattaatgctatttcagttgcgattttcaactgtattcttttgtttattgctggaattttttcatgggttttccagtgcatcgattatacaaagagaatttactttgttatgaattttttattgttcatcagagtttttgatccatgaagatccgattcaataagtctaagattctgtttgactcttccttttcttacttcttgataatatttcatgttaaatctcggggtttctgttttctattttttcagaaatagttttagttattatatattttggttttgtaatttagctgccatatttctttccctaaagtactgattcattattggtaaggctttatttatatatcttaattacaaatctcttttgtcaaaagtacatatgttatttgggtgtttctccatgatgacaatttagttatgttagctgtgtgatccgtacttgtttgttgttaatgtccttaatgatttatatctgtgctctggtgtatcttttgagttccccctaatgattctaaattttggcttcagtgtcgcgtttcacctcaaattattgatttcatactgggaggactggactttattctgtttcaaacatacaatttgttccatcagcaagaaacagcaatcaatttcttcttctgaagtcacttaagttcctatgccatggctgccacggggactacatcggctaaaccacagagaatccacggtttgatcactactttggtttcagcttttcttgaatggttgctgatcatatttctgttcattgatgctgtgttttcgtatgtaattacaaagtttgcttgtggctgcaaattgcaaacaccttgtctgatctgctcgagactcgatcattggttttgggcaaagaaagtaaggggatattagttgggacttgatgtgcaattgtcataagtcagagatttcttctttagtactttgccatgctcataataagcttgtagatgtacataaaatgtgtgaaagttgtctattctcatttgcaactattaacaaatcaaatgccgaaacatatagactgttggtgggaaaattgggtgaagatataaactctgattttgatcaggaccctttactcagggatcatacgatcagtagttcaagcacaaggagttgtgcttgttgcaatcagccatgggctccaagagctaatgctcaggtgttgtatcagtcaaagctagttggtttggaggctgctgagcttgagaggtctctttctggtgccactggaggtaaccaggatggcgtggaggagacatcttttgggtcaataacagctagtcattctagaaatgacgggatagaccctttacctcatattcaatacacagagctcaatgtagcttctgatactgaatctgaaggcattgaagagaatcttaatgtcatgaaggagagatcaattgtgtcaatcacagatagtcattctagaaatggtcaggttaaccctttatctcacatcagatatacagagctgaagatatcatcagatactgagtctgaatctccattttctactgatgaaggtgtgagtgctcttattcatggagaaaatgagtctaaggaagaggtctttgttcgatgcgtagagcctcgtgctgtcactctggatgctgatttagcctttgatgaaggtgtgcattctctgatccccgaagcaaatgagtacaaggaagagctctctgctcaatgtattgaacctcgtgttgtcactctagatgctgatttggcctttgatgaaggtgtgagttctctgatccccaaagcatatgaggacaaggaagagttctctgctcaatgtgttgagccttgtgttgtcactcaagatactgatttggcctttgatgaaggtgtgagttctctgatcaccgaagcaaatgagtacaaggaagagttctctgttcaatgtattgagccttgcattgtcactgtagatgctgatgtggcctccgataaactcatagatccagcatcagggccaaaaccttcaattttgatctcagaggtacaagcagacgctgttgagccttttaattacgaatctctagattccaccgttgctgctgggcatggattagaacaacttaactggcaacaagatgtagagaaggaaaatatccctgcacaaactgaaacaatccctgttgtattatcaaaaagctgctgtaagtccaatgtttttttttcttttaagcatgttttttatttgttctattagttggtatgttttgtgacatactcatccaatccttgctgcatatgggtcaatacttgaaagataatgccttttggtgtgtgttgtgtggaacttgtgaacattattttttgtattgttctccacagaaacttctgcctagaagacttcattattctctctagttgatttactttactgtcatttctcatgtttgtggttaattgcctcagtggataacaggagtggtgaagttgaggaggcatctgtgaccagaggtggtgaggtctgtaaggaagtagctacgatgaaaacaacaaccgagacaggtatagaaagaaaccctattgctagtgacaatggacagcaagcaccaaatttattggatcttggtgatgcttataagttagctgttggaaatagaggaaaacaactctctggtttacttgcagagcaatggatagggaaggatgcttcaaaagttagtgaggatttgaaatttttactatcacacttatcagtcactcgaggcactgagcaacccatgaatgaaattagtcctaaattttctttaaatagtgatgatattaagactttggattcttccagttctattgggatgcatatacttgaacttcaaaagaggatctcacttgaaagaaatgaatctggattgtctattgatggaagcatcgtgagtgaaattgagggtgagagtgtggtagaacggctcaaacgacaggttgagcatgataagaaacttatgactgctttgtataaggagctggaggaagaaagaagtgcttctgcaatcgccacaaatcaagccatggccatgatcacaaggttgcaggaagagaaggcagcactccatatggaagccctccaataccttcgaatgatggaagagcaagctgagtatgatgacgatgaacttcagaagtcaaatgatcttcttgctgagaaggagaaagagatacaagatctagaagcagagcttgagttatataggaagaagtttccaagtgaacgagtgatgggttctccttcagagtcaagctgtgatgtgataacagatattgcaattgataattcaaaatatagctgcattggtgataaaccttgtatatctgacaaagttgaagattcgggcatttcttttgagaatgcagatggagggaatttgaattcttcattgctagagtttgaagatgaaaagttatatatattggactgtttaaagaagttggagaaggcacttcatctgctccccaatggtgaggatgataactcagaagagctaagttgcaaggatcaggaaaatagtacagcagaaacgaatacgttgtcaactcaacacaatgaatcagtatccaggcaggatttgcatactgaaggaaactcttcctcacttgagaaacatgagcttcatggaatagaaactgatgaagtttgttacagcagggaaagccctgcagagctatcccgagccacagattccacttctcttggaactattgtttctgatctaaacaagagattagaagcacttgagacagaccggaagtttcttgagcacacagttaactcacttagaaatggggacaagggtgttcagttcattcatgagatagcttctcacttgcgagaactacgaaacattgcattgaaaaatgatcaaaccgtgtcttgagccgtatgcaactgcataacaatgtgagtccttcaacatttattctattcatgtcatcgtatcatggattatgacttgtacatttttgctttagaaaactagttgcagttgttgaaccttgatttagtagagttttcagtttcagaataaaccttaacatatttttgtagaaaaattgtcatttgtttcttatgtcattgtttaatgtacttgtcttcttactcttcaggattgcaagttgagaagatcattatatttcccagaccatacaacagtttgaaatatgtatcttattttggcttgaattgtacaggaaagaatggtgacgacaagcttactataaaaggaaaacaaatatatttttttaaaaagaattttctttgttcccctccttttttggggtctttgttacagcttacaagttagaacattttgtattttttcataattcaatagagagagttggtgttggtgaggattttttttaggagttggagtttgcttatttaatgtatttttttttatataaactttttcagctttgtgacgtgcacgagtgatttgattgtaatttaggagagaaaaaaagagtgattcaattgtaagaaagtgaataattgttgtgtaaaaaaatatttatttgaattggtaaaaacagagtgaagttcaatttaccaaaaaaataaaataaaaagagtgcagtatttcttttcattcattgattgatatataatatggagagaatttcaatttgtattctgttaagtttgcctatggtatgctgcgtcatgatgctgaggttgcagctgccagcaatttttcatatgtttggaaccaaatttggcaactgagttccttctaaagttctgaatcttttgtggcgagctactgctgcttgtcttcctacaaatcatatttgagggtgaagaaagtggagctgagtgtgctttgcccgacgtgcaagattggagctgagtgtcctcttgcgaacggtcgttgggagcgactggagctgagttttttggtgggtaatgagagaatgttttttcggactgggtattgagagcttggtcctttttagacaatacctgtgcgactatggtgtctatggtttgtgcttttctttggacaataaggaatgacctggtttagtgtaagaaaaacactttaattgaagaaattgttgtatcttcccatctcgtacttgataaatggttgtgtgctcaaaaaaattcaattgatccatggttgagttttcttactcttgaaggcaattgtagctgtactgtgagaaaaaacagctatagcaaaactgtaaaaaaaaactgagctgagtgtttggta

SEQ ID NO: 260928 - DNA, 743 bp, Cannabis indica
taaaattgtcatttataatatttattaattagactccacaaagtctcttaattaataaattaaccctaaaatcatatttcttcacaatcaagttataacaatgatcttctatagatgatttacattacaaagggattaatttaccgttacacccttcaatctattttatacttaaaacacttagcaacctataaatgatatttcagtgaactaatataatcactaaaatgagcgctctatcatttatctccatttaaccaagctcgaaggaaattatcgtttcacttctatgtcccaatagaagctatagattccgtatctatgattagcgctctcactcaattgaactaccatgttcttaacttatacgtcacgggaagaaccatttggttgactttaactaataggttaaagaacacaaataatacaactgaactagaacctaaccatctcaggattgagatcatttgatctaggatgaactaggtgatatagaattgaatagatattacggtaagtttatcatatctaatcccaattcaatatcagtcccttccgatgcatactccatacatccaactcaagcttactttaaccaatgccctagaaaggacatagcacttatccaaggtgtaactaaattacgttgtaaattatcaaatcagttaaaccatgtgttctgataagtctaagaatacatttaattacacaatcttgattactttccactgtgttgacgacac

SEQ ID NO: 260929 - DNA, 547 bp, Cannabis indica
gtttatgtatatgcatctagattgaattgggagattttagggttgaattatgatgtttaaattttgggaaatgctttgaatttctaggctaagctttgaagctttgagtttcaagcttttgcgtttaaaaagttgttttgtttgtggtttgtgaacttttccatttaaaaaagttgtaatgtttgtggtttgtaaactttttcgcttaaaaagttatattattttctgtgttagagtgctttcatgtagggggagtattttttatactcttttgtttttatttctaacacttgatgtatgttttctccaaataaaatgttttgtcaatcaaagtgccaaaggagagattgttaattccatttttgacatatttaattgacaaaaatcttttattatttataattaattttggctggagcatttaaattggtttttatattttgtgtatttaacttttatattaatcaatttaattttagaaggaaagttgtctagctttcctatttatggaaaataaggtaaaaatggtaagtttggttactcattt

SEQ ID NO: 260930 - DNA, 453 bp, Cannabis indica
attttgtttatgttttatctatttgtattcatgatttttattttttttcacatttttgtgtgtatttctttatgtatttctcttgatgttatttttgtgttgtttttagtttttttttttgttctattactgttattaactagttttttgccttattgaaccaaactacacaatgttactgtttctcagttttggttttcttattagttgtttttaagttttaaaggtatttttttcgggtttttttgatatttttgttcttattttttgtacgaaggttttgtgtttcataacattttttccttatttttaaatcgtttttggattgttcttttagttttctattggattttttaaaaatagatgttttaatgttatttttcagtatttttagtcttgtttaattttattttacaattaacactttttctagtaatttcatgttttgcagat

SEQ ID NO: 260931 - DNA, 1266 bp, Cannabis indica
tttgctcacacagacaagcataccgatacatgcactcacacacacacacacaccctatttagtcatctgaaattaatatatatatatatatatatcctttttgttcggtttcagaagaaaattcgtgaagctctatattctagaatgaggtcatcaagaaagcaggagtataaaaagcttgccttgcagtatgaggatgacaaaagattgagtcaagaatctcgagaggctttaacagcaacgatgaatgcagggacgaatatattaccacggcgtgattcttgtgaatctgaatgggaacttctttagatttaccatgtgtaaataatatttctaccttgctttgctggacactagcattgagagccatattttggcatcctgcttaatatatagtaaacagggcaaagctccctaaaatggtaaataaattttagcaactaagactcctatgatcgagagtgtttgctagttccatttactgtaggaacctgataaaaaactactctagtgtctaccctgttttcgactttgttgactcaaccttattatgttgtgtaagtactttcgtttgctggtcccccttatctgctctatgctttaactcgtgattagctaaggttagtgagtaatgaagcttacgccataccctatactcgtttttattcattcaaagctgcctaaatgggcaacagtgttttatatagtaaaaaactgacaggtaatccttgctgatgaattacattgaatcatattaaacacagtattagtagacaagagggtagtgaagtaaggaagcatggtttgattccatttttcactgtgcacgtacaagtcaaatgaatgagtaaactttattatgggaaagctatgcattatgttttagatcaaggaatgattttggcataagctttccaactagtatgcacaacttttattgttttttgactactgttctgaacaaaaaaaaaaaaaaaaaaggaaacaactaaatattaactagtgctgtctttgggggtttccaagagaatcgccaacagtaacctgttccaggtatctggtactccaggcaaacaccagtggctacaatcagcaaaagtttcaggctttttatgctgagactccatcaatttcattcccggctttgactttgtaatacttggatagtgcatctttctggtcccagacaagttggtgatgttcaataagttactggagtcttcattgtcagaatggcttctttccacatctcggtacaattcgttt

SEQ ID NO: 260932 - DNA, 508 bp, Cannabis indica
gtcccagattttggtccaggtctgggtctcagttctggtctgggtacacgcccgtggccgggcctgagttctagtctcaatttgggtctgaggaaaggtctgtgttcagttctaggtctgggtttgggtcctggtcatggtcctagtcttgtcctagggtcctggttcggcgattcttgttcaggttctaattttgggtccgaagtctagctctgggttcgggtatggttcttcgtctatgttctagtacttttctcagtcccagatcaagacaccgactactggtctattccagtccccgttccctaaatgtcgagtcaagatctggatcaccgtcatgagtctcggtctggttccatttttgtgtctgagtttaggttcgagttcggttcccgagtccaggttttggttgggatccgtgtccggctcccaattcgggtctaggtctaatttggagtctgggtcctggtccggttacggttctggatctaggtccaatttcagttat

SEQ ID NO: 260933 - DNA, 516 bp, Cannabis indica
ggcatcggcgttggagttctattatctcagattttgttcaattttaaagtaatcaaatctttccaatttcttccgaacattctctaaatactgtcattttcaagcctttagcctggtattccttgaggacttggtttaagatcagttgcgaatcactatgatagatgagatttttgactttcaacgcctcgttattagatgtgtcaaattataatctcagagcatagtgaagcttaaagccttttggtgatattaatatcacccttgcacccaaaccctgctcgttggatgcaccattcacatataacttccaggtttctgcatctcgctgattagatgggatttcttctggggttatactttctatcaagcagtcagctaaagcttgacccttgatggatgttcgaggatggcatgttatgtcaaactgcgccaattcaatcgaccattttataaatcttccagaagcatctagtttttataaaacttgtctgaagggctgatcggttaacactt

SEQ ID NO: 260934 - DNA, 4719 bp, Cannabis indica
atcttgtgaatctgcaaaggacgcatgggaaattgtcaggatattttgggattgtttcctaatctttagggattcatccttgctccattttaggagtcaatcttgggatattatcttggtgatctttaggatattatctttaggaatcattttgtgttaatgttgggatattatgtttttgtatatatatatatgaaatgaataataaagaagggacacgataaacaccaaaagctttctacatggtatctgtcgccaaggttacctaccatagccatggcagaaaatgatcagccaccaccttcttcaaaaatcgaaccaacttcaccattctaccttggagcgcaagatcgaccgggagattttattactcctactcgtcttcgtggagacaactatgatgactgggccggagacatccaaacggctcttgaagcacgccgtaaatttgtgttcttagatggaactatccctgccccttttcctccttgcacgcagtccgattggactacgatccatgctatgttagtctcttggattatgaacaccattgatccagagattaaaagcaccctctcaaaatatcgcgatgcgaaacgcttgtgggatacgttgaagtcccgctttgcattggtgaatggtccacgtatacaacaattaaaaacttccatagccaaatgtcaacaaacaaagttgatgactgttgccacttactttggcaaactgacatctttatgggaggaattgtatcaacatgaacctttgatttattgtaattgttgtactgcctgtactgcaggaaatgagcatgagaaacgtcgtaataataatatgctccatgagtttcttatgggcttatattctgagtattatggtcagcttcgtactaatattttgtcacaggatcctttgcccactcttgatagagcttaccaattgatgattcaagaggaaagggttcgacttgtcgaaactatacccgataaacaacctgatgttgttggttttgcagttcgcacatcgtctgccaaaggccgtggttcaggtcgtgtagagaagcaagacaaatcacatctttcatgtgcccactgtaagaaatcaggccatgagattgcctcttgcttcgaactaatcgggtaccctgaatggtggtctaatcaagcaaaggtggagggtggaaattctggtcgaagcaagccgttacagtcaggggagcggggtcgagggtctgttcgtgccaatgctactactacctcatcttcaagctcgattggttatgccgctgctacaccgcctgctcctacctcccagttgttctctcctgagcaatggaaagttcttgctggcctacttggtaacactacaattcctgatgaaagattgaatggtacgtttgataaccaattgtggattattgacacgggtgctactcgtcatgttacttgtaacgcttcgtggttatttgatactcatgatgttgaccattgtcctgtgggccttccaaatggtgaatctgttgctgccaccaaagagggttctgttcgtttatcgaataaaatcactcttactaatgtgcttttcgttcctcaattaagctgtaatttaatttcggtttcacagttaaatgatcatatgggttgtattattcactttaactcatatatgtgtgctatacaggaccaatggaggcagcagattggaacgggtgttaggcgggatggactatactactttggggatcaagaatctgtgcaacaagtttctgtggctgaatcttcttcaactctggatttgtggcataaacgtatgggtcatccatctgaaaaggttgtcaagttgcttcctccggttggtaattgcaaaagtcgtttaaataaagcttgtgagatttgttttcgtgccaagcattctagagatagttttcctctgagtgaaacaaagacatttcgaatttttgaaaaaattcattgtgacttatgggggccatataagcatcattcttcttgtggtgcccgctattttttgactttggtggatgatttttcacgtgctatctgggtctatttgcttattgataaaactgaagtcactcgaatgtttatgtcctttattgctatggttgaacgacaattttctcaaaatattaagattgttcaaagtgataatggcacggaatttaattgtttaagagattattttcatgcatctggtatattatttcaaacctcttgtgtgggtactcctcaacaaaatgggcgagttgaacggaagcacaaacacattcttaatgtagctagggctttgctattccaggctaaattaccaacttatttttggggggaaagcattttagctgcaacacatttgattaatcgaacaccgtcttctgtcttacataataaaactccttacgagattctatttgccacacaaccatcttataatgccattcgtacttttggttgcttatgctatgcacataatcaaaaagacaaaaggagataaatttgctagtagaagtcgaaaatgtgtgttcgtcggatacccttttggtaaaaaagggttggaggctctttgatcttgatacaaaggagtttttcgtttctcgtgatgtgaaatttgttgaggatgtttttccgttttatgatacggattttgttaatacggtgccggaaaatattcttcaatcaaacctcgaagtagatccagattttgatataacacttgaatattcaaccttgcccacaccaaatgaacccaccacgtctttctcagcccatcctcaaacacatgagcccatacctcagctcgagcccacattttcccctcaacccaatctctccaatcaaccccagtccatttattccgaggcccaatctggccagcccacctcttcctctacattggacccgtccactgggcctcctgctacttcaattcaacaagatgcgttgggtcgtggaatgagggaaaagttcccctccgtgttgctccgggattatgtcactcatacaatttctactaatagtccacccccccacacttcgtctccatcggcttcctcaggtactccctatcctatagcacactatataaactgtgataatttttctgtgaattaccgaaatttctttcagctattactctggcaaagaacctcgtcctttaaagaagccatgcaggatcccgaatggagaaaatctatgaaagaggagatcgacgctcttgaaaagaatggtacatggaccatggagtacctcccaccaggcaaaagagctttaggcagtcaatgggtatacaaaatcaaatatcactctaacggtcgtattgagcgcctaaaatctaggctggttgtgtttggcaatcatcaaactgaaggtattgattatgctgagacatttgctcctgtagcaaaaatgattaccgttcgggcttttcttgctgttgctgcttctaaaaattgggaacttcatcaaatggatgttcacaatgcctttttacatggagatcttgaggaagaagtctacatgcggcttcctcctggttttgaatcttctagtcctaatatggtgtgccgcctgcgcaaatctttatatggtctcaaacaggcaccacggtgctggtttgccaaacttgtgtcttctttgaaaggctatggatttttacagtcttactcagattattccctatttacctatactagtggtaatgttcaaatgaatgttctggtttatgtagatgatcttatcatttctgggaactgattccgctgcattgagaatttttaaagcatatcttagtaattgttttcacatgaaggatttgggacctctcaaatattttttgggcattgaagtggcccgcagttcttcggggttgtttctttgtcaacgaaagtatactcttgacatcatctctgaaacagggctactaggggcaaaaccagctgcttttcccattgaacagaatcataaactttctcttgcaaacggtgaactgtatcctgatcatgcggcttatcgacgactagtgggtcgtcttatctacttaaccgtcactcgtcctgatctatcttactcagttcatattctctcacagtttatgcaggaacctcgtgtggatcattgggaggcggccttaagggtggttcgttatttaaaaggaacacctggtcaaggtattcttttaactgctaatagtgagttgtcattacagggttggtgtgactcagactgggccgcttgtccaattactcgtaaatcactaacaggttggcttgtgtttcttggcaactctcctatctcttggaagaccaagaaacaaaacactgtgtctcgttcgtcagcagaggcagaatatagatctatggcagctgttacttgtgaactaaaatggttaaaagggctattgttaagcttgggtgtccatcatcccaaggcgataaaacttttctgtgatagtcaatctgctcttcacattgctaagaatcccgtgtttcatgagcataccaaacatatcgaaattgattgtcattttgtgcgtgatgccattaccgaaggtcttcttgatccttcttatgttcctacaaagactcaattggctgacatctttactaaggcacttggaaaagctcagttcgatgctttacttagcaagttgggcatcttcgaaccttatgctccaacttgagggggggtgtcaggatattttgggattgtt

SEQ ID NO: 260935 - DNA, 685 bp, Cannabis indica
attcgggggttgctgcccaacagcttgataggcttttcgtatcaacacagtagcttgccatctacgattgtcaatctctacatgatgagcccttaacgcttccatcaatttgtctctctatttggcaaacatgcatctctgttcctcgaacgcaagatttacggcagtgtggagttcctcctgatcatgatgtagggtgttgatatgaccttgcatgagtccaatagcagcacggaggttttggatctctgtatcatctccaatggtcgttcgaatgttggtagcaggtggaacggctgtgttatgaatgccctggctgggtgctgaacttgtattcccagtctcttacacaccaggcgcgatttcatccacaggagtcgtcacaccatgacccgcatttgacggctactcgggattaaagcatatatgcatataatatgtaacagctcaagcatggttctatcctattatttgtacttctcaaactttctccttatgatttacgaattaaactctctacatggtagttttgaagagttctaattccaatagcctcatgtgacaaggacggtggtgatgacattgatgaaaagtctcaaaaagaatttgaaaattcatatatctccatctaagactaaccaacaccaaacaactgaaatttaaatgaatttagactacactttga

SEQ ID NO: 260936 - DNA, 1184 bp, Cannabis indica
cttgggggtggatgaagctattgacatatgtagttcattttgaactctagactatactcaatacgccacagtatctctatgtcacacatattttgattaaacatggatataattaatgaacaaaattagcaaattagtagaacatattcttgatcttaattcttgttccaattaatatgttactgttgtaatagaaattgataccaataaaagttcctggacatagtatcacaatacctcatttaagtgggagaattttaaacattctaagctcatctctatttggatgacacttgtgataggaacttttagaatacaactgagaaagtaaatctaaccattcatatggatagaaataactcttcagaattttgagaataagattgtagaattttgcatagtctattcgaatgacttaggcaaaatccctaatcctcatgaaatgttttatggtatctctaatgattacttaatcttaagcaagtattttacattaatgttaatactagattgctatgttgatggcttagtctagaaggaactttcagactaagataatatgtcacaacaagatatccctgaaaaaccatagtaagaggttaaatgtacttctatgtattaatttaaccagactcctactgatgagtgggagctatctaagatgaaatcaaacaaggaacattaggagacagtcaagaaagatttctgaaagtgacctatatgttagataatatgggttatattagaatccttatatctacaccaactcataaccaattcgagatagtggttactctggcggtggaggaattattctaaaagagtgtaaaaccccatctataataatttaagctccatcagtgaacatacataactttgtaatttcaaaaaatactggaaagttattcaactaaagaaaattctacactgtgttatctctattccattttttttggatagaatgagagatatgtcttctgtttattcagatgcacttaataagttgtaaagaattcagtatccctagatgagtaatgacatatagtaaataatgatgcataatgttttatgaacacaaaggaagtaatgggggagaaagcagtagcttaccacagacttacagttccagtaattgggttgagtcaaatatactacacttgatctggatatcaagacaattgatt

SEQ ID NO: 260937 - DNA, 935 bp, Cannabis indica
tttcgtcaatatgtgaagtaatactttgtacatccgtgtctcgcctaagactttacagtcaacgagttatagatatattctatcagctctgcatttaatgagttattctattttaatatcttcgaatataataatcattatattcgttgattcgtattctcccaggttgacatgtgtcctcttttgaagtaccagccgaatttcaggtataacactagctaatcacttgtaatctgttactgacaattcaatgaattcagcttagttttctttcaattctctctgttttcctttctttggtttctcagctgacataaacgaattatttttttatatataaattatatataacaaacgaatatttcaatgttgcaatgcgaaggggacaattaaaagaagggatatttcacaatctgatcaatagtgtattgtaatatattcacccaacaactcaaattaaactgtgattttaaagtagatttggagagtttgtgtattgcggtggtcgcttgagaccactttaatgaggttgtctgggtcactacgactaggttgaactttgcggatgctctatgtgacaaggtggttgcgtgttgcttagcccttgattcggcaaagctgaaaggatacaagttcattatcgtggagagcgactcaagtgtggtgatcaattctcttaatcgcatgacatcgtgttgggagattgacaactattcttcattttgttttaaactctctagttattttgatggctgtatttttacttgtatttctaaaatctgtaattttggtgccccataatatggctaaacgggcttttacctacaatcaatttagtagcttgtctgtaggagtgttcaaccaattcaattcgcactattttgctcatatgcatccgatccgcactaagtgcgaatttcatattttggatccaa

SEQ ID NO: 260938 - DNA, 3205 bp, Cannabis indica
acctacagttagcctcttgatgtccttccacaactcacctttaggctcaatacctcctagcattgttgtcagtcttcctcttctattagtcacttcaccttggttgcttcggtcatgaaccgactaatgtaatattttaggggctctcctggtatctgtttcacttctaccaggtcttttaaatgagcgggaagttgccttgaaaaggagaattatgtgtaaaactcggagccaaaggcgttccatgaattgagcttcccaagtctcaacttgaagtacgaatattgagcggtctctgcaaatgttgctaggaatactctacagctaacatcacctcttactcctcgcaggtccatttctatctcaaagtacttgatgtgagacaatggatcttccttccctgtgtaaatcttccaagttggcatattaaacttggtcggaaggtcaagggaattaatttgagtagagaatggcaaacctcttgtccgatagagttccagatcagtgagttttggacggtcaagctttgtattaagccctttagttaatctaattaggcttgcatgcctggatcgacttggcctatctattgactgacttgtgtcacctgatgacctcctggagcctcaaagggcacaaaattgtctctattttatgggaaataatttttgacatttattaactgataattgggtggggggcaaagtgtccatcccgattatctctcctctggtttaagttgtttcagaggtcacttccaggcttaagtcttctgtttaggttttggctggtggaccttgccggcctgggagggtcttcatcattctggttgttactttgattaccatcattaggcaatttgtcttgatggtaatcacaccttcgattgtcgttacggggcctactatcagctgcgtcgtcaatcctgctagggtgtatgactgtccactctaggatcttgaatggccttgtcaaggttgttggttggcatattagttctgaccgtgaacctggattcttccatcctaattatataaaagttctcatatccctgagatcctctagctagtcgaggaggtacttcttctctccttgcctcgggtttgggttagaagtttgtctggttgtttctcccaaggtagtgaccaagaaaaacttgatcatccacaggacgaccaatgatttgatcatggggtctggaactagaaggtacataattggtagggtgttcctccaactcatactctggtcttctactcaagatgtagggacctttccctctcctagtgtctcatctgggcagttggacctcgtgtgttttcccccagtctattggataaatcacctgatcaggttggtaacttccctggagcggcaatttatctcttcctattatgcatgcatggactgagcccgacgttccatccactcttggaactcatgccattccttttacaatgcatggtttagatggtacgtgtttcctcttggttatggtgaagtgtgttggtatgaatttagacttttcctaacacgtctcttaggttctccaatttggtattgtcccctaaatctactcagggctctccttcagatggttgaccagtgccatgtctagtttctccaatatactaatgttggtcgtcccagtttcctgaacaccaggtttgaagctggccagtggggttgtgattccagtagctctagtattagtccctataatactgtatctttttcttgtccctataggtgggttgcctcgaggaggcaaccgagcattggggttgtcaacccctaggtcagtgggcacttagacattagggtctgttgccattggattacgcagttcattcgatgaggatatccttgtcaaaaccattatttttttattctcaagtgtggatcaaagattgaagattgacgagagcaagatgatatttcaggctctcaatgaaagcaccaaaatattaacctcatttttagccaatgacgcggagtctttaaagcgataatatttgtggagtaattaataataaaatgagaacaataaatgacacaatatttatagaggttcgaccgctgattatggtaataacctactccccttttagttgtattactatgaagaattatcaagattataaggtccgatcaggtgagtttctcaataactttgtaaagcgtacaaatatttttacagagtgtttgctctttcaaatgccaaaaaggatcccctgaatagtgaaatagattcactatttataggataagtgagattacataagttgctaaattatatgagttattatataaaattctcgatattaaagggaaaaaatcgaggaaggagttaaatataaaattccacgattattttagtctggttagcaaattctacgaaaatagagatttaattgagttacatttaaggaaacagttaaggaaaagatttgcggaaggtcttcactcaatgtgtgcctctagtcggtcattataattgttcgacacgctaggtctagacattttacgagatcttggctctgcctggatgattgttgttgtgggtcagactataatcaatttaactttattctagactatcgaaataactaggagatatactttgcccaagttcaattatgccagtcacatgtcaccttgctgagtgccacattatcagtacgaattttgagataacaataataatattcttgactttgaaagtgtattaaatcatattcagtttacaagacttaagcactcttaatagtttctctactttattctttcaaatatattacccaaacctcactttatttattttatcgcgaacttttatattataccatacactaatttttttattttttttgtctgtacatcatttaaatattatatttttgatatattacatttcttttctaaaattaaaacataaaatattacatagaaaagttaaaaaattaatagtaaaatatattgagctatttttttttttaattaaatcacactaaacataatatcaatccaattatgaaaactttattattggattaaggtttagtaactattaactgtaatataaacatcaaaaattaactcacacatgagcattgtgggacaaacacacaaagtttctttttttctttgtaaatcgtatttatttaatttacaaaaaaaataatatgtttagctcaataaataa

SEQ ID NO: 260939 - DNA, 628 bp, Cannabis indica
tggaagacaagatgagagctttcttgaaggctgtggatgaaagagtctggatggctgttgccgaaggctggtcacctcctattattattgacgatgaaggagataagatcaagaaatccagtgaatggacaactgacgaaatggaacgagctaatttcaattccaaagcgttacatgccctcttcaatgctgtctctacaaatcagctaaaagtaatctcaaattgcgaagttgccaaagatgcttgggaaaagctgaaaatcaagaatgagggaactgatgctgttaaaaaggctcgacttcgatctctagaaaaatcctttgagaatctgtcaatggaggaagatgaatccgtctcgaaatttcatgctaagctgtgtgacatttctaatgaatcctatgcactcggtaagacctactccaacaagaaactggtaagaaagctacttggtgttcttccaaaaagattcatgtcccaagtgacgtctattaaagaaagtcgggatatcgaagctcttgatctagatgaattgattgggtcactccaaaattatgagttaactcttgagagatgggagaaagggaagaaaaccaagagttctataaaggagaaaaccgaaatgggagt

SEQ ID NO: 260940 - DNA, 833 bp, Cannabis indica
aactttattccaaaatagaccacataaatttgacttatatatttgatgacccaacacactattttatatatacaattgtgaccccaatttatttctaacagttttatttataataaatgataatattattggtatttaaatttatttattaatttaaaaatgttattcaaattaaatataatggaaggtactaattcaatcctaccttttttttaaaatatgaacattaccctactcaagggtagttatattactaggggaataacattttaaggctaaaccctccaaacaaacaaggtaatgttaccattcccttactagcattaacctattccaaatagccccttagaaaacacgattttttttttctataaaaaaaaaaaaaaaacaagaacatttcctttaaaataatattttgtggtttaattttgattaagtgagttaatatgattaaaagaattaattaaacatatttaattagcttactaatttcaaaatattttttttttattattggaataatgttttaattattttttcaaaaatgatataagattgatcaataaaaaatgtgacacatgtcactttagataatattcatgtagtatttaaaaaaagagtattgttattaagcactagtgcccaacaccttctatatatttggcgtcctacatttggttagcgatatttcttaaaagttattttcttaggttttatatgatccaatatttaattacaccaataataaaaagactaaattttttgagctagttggatgatatttttggaagggcagtcaaatgagatgaggtgcttggtgtgttttatttttt

SEQ ID NO: 260941 - DNA, 885 bp, Cannabis indica
gtatctgttcgtgttagaaattattttaaagtttgttatattaaaaaataaaattattaaaaattgagctcaatgttttatttttaccattttagaaaatatagtatctgttttgtcatttatcaaaacagaggatctaattaataatttttgtaaaaaaaaaagggttcaaaatagtatttaccctattaataatactaaattttaacttcattgatcagcgatccaaacaagtcagcaagcatattttaaaggttaagcaataaaacccagccactttaagttgtctttcaccacctgatccgagaaatggcatttaaaaaatagaaacttacaaaaatattggaatttgggttaacttttacaaaaatattgtcacacggaaattttttaaaaaatactgtgtttttataaaacaccagtagaacacaaaacaaaataactcaatacaatagtagaacaactaaaaaacacaagtagaacaacaatgaaaacttaacacagtatactgcaatatgaaacttataaaaaaataacagtaaaaaagtaaaaaatattatctggcaatatttttgtaaaaaatagcaaaagttagtataccatgtaaattttccatatctctaataaggagatgagcattaacaacctgccataatataaatctatgttaatgtgttataactataaaaaaaaaaaaaaaaaattgctaaaagagcacccatatgatgttcaacatcacttgaattgccatgcttgaatccaaattgatttggtattttgtaattagttagaggttaaactatttatgttcacattaaaaatttggttattttatattttgatgagtggggatagataatagatttgagtcattattgattggaa

SEQ ID NO: 260942 - DNA, 510 bp, Cannabis indica
attgacactattacactactttaagtaggttcaattttttgcataataaagtttatggttttattatctttattgctctgaatgtgttatctttcaattgtgattcgacataaagtttaaaagactaaggattgatctcactaaggaataaaggaccaattgaaaatagacatgattaagatcacattgcatgtaatttctagttacacattcatagttgatctatgtcattgactatatttgatatggtgataattgatgacgataaatgtaacaaaggtcgctttggtctcatattggtataggagatggaccagattgtctaaagaagatatttgagaataattagcaagtttgtgtcaacataaggttatcaaatgtaattgtcattggaattaattcgtagcccaagtaggagattattggattatttttaggacattatttgacaaatacacaaaaacaacaaaaaaaaattagaaaaatacagttttacggaattttaaatat

SEQ ID NO: 260943 - DNA, 705 bp, Cannabis indica
tttgtaaaatttctatttttaattaatgggttttttattataacatcttcatactatatatcttattttattaattcaatattttatggagaatttataaatttttctattttttaaagtttttttttagatttaaattcttttaagtgagtttctttattaatttttttaatttttaatctttcgttttataaattatttagcatatttattctttagattagacaatatttttaatctttatggtgagttttgattttcctcatttttttagatttccccatttctagataatttctccatttttgtttttatggtaaaatttttcttttatataaatatatcaattttttcttagtttagatctattaatatcctaagttagtagatcacattagtattatgttagtagattatttaagaaaatgaatagaaataaataaagattgcatttgcaaattgcaatgatagttatagttatggaaaaaaattacaaaaaaaaaaaaaaagttcagaaaagcatagttccaaaaaaaatatcctatttattattctagatattttttgtattatttttctcattttacattataattattattattttacacatgtctatactcattgtacttgttaggttatatttagcctatgtttcgggtctgtaaagttagcattttctcgtctattggtgtcttttggagc

SEQ ID NO: 260944 - DNA, 604 bp, Cannabis indica
acaaataatggaacaaatatatggtcttggagtactatcattctcacaaatgaaaatttatattatcattaatgtgttatgttcatatctacttaaaattttaaatttttgtgtgaacaatattgtatatactcatgcattaatgattaaataagttggataaatattgatattccacgaacccttcatccataatttagaagtccacacatactctggaagagttatagaaaatatgtgatcatagataatatacggtgatattttaaatataatcttatgagatatattatcactaaaataattatgaatcatatgtgtatgagagagagacatattcatgttccactccttttttcttagttcagcttttgtcccattggattttcctagcaagttttttaacgagataactttaaatcattaacatgcttgcactttatgaagcaagtagagaatgtgttgaagtgagatcattgacataacatattcaaaaaatatatggattacactcaataaagaagtatcaacacaagcagtactctatgaagataatattacttgcatcgctcaactaaaaggagggtacattgaaggagataga

SEQ ID NO: 260945 - DNA, 720 bp, Cannabis indica
ttatgctataaatttattgtactatagaataaagtgcacaaatgcaagaccgtatctacttctaaaaaggactttacatgtcttcataaggggaaaccaagatccttaaacatcaaatgctaagcagctaagatactttctaaatcaatcaagtacaacactatcataagctacaaataaaccagtccatgaattcgtatcttttatagatcttttagctttaagagaccaacagatgagttgcctacattaatgaagtaggccaaaatccattctaaatttcaaatctactacgagctttaagcatcaaacttggccaccaatttgtcaattaaccaaatcaatccagcttatatccgctattatgttctctagatgaatttaattactcattccaataaaatctacatttatatatacagctggtgcatcatgaacaatgagctacaataaatacataaatttatatttctaaactgaataacaataaccatagttgataagctacattgagctcaagaaaaataagaaagaagaaatcccaacaaagaaagaagagctcacgttttagataatgcatcaaaaatactctgtgcctcactggtgacaccaactcctattctctcagcctcaacctctgcttgtctgcaattaatctcaccatgttcccaaaatcaaaaattaaaacttcactgtcaagatgggcaataaaagcaaaac

SEQ ID NO: 260946 - DNA, 770 bp, Cannabis indica
agaaattgtaatttttgtgactaatacattttgccacgaatcttttagtcacaacataggaatgaagattgataaatagtcacaactttttcacttttagtcacaagttttgttgtgacttaaagtaagattttttgtagtgaaaattttacattgttcccaatgtgacataaaacccgaggagagaaagactaaccatgtcacatcaacaagccattgacacctctaataagtgtcatgcaagacaacttgaaagttattattgtaattgccttcaagcttggcatgcgatgagtttgaaccaaaagcaacaacaacaacataagactttggatgatgagcttggggagaagtctttcgtagcacgtagaggatataatatggtggggatggaattgatggaaaatatagatccattggtggtgtataaatcaatatcattgatggatttgaatcagtgatgccatgtgcttcctcttcctctaatgtcacattttcttcactttcatctaacaactcttctttttgttgctcattctccacttggttatccataaccttgcttgggatttcatatttaatgatttcatgatcatgaatgaaatttacttcattcactacacgacattcattatttgtcaagtaagaatccgatttagcccaattttgagttaatatcacttcaaaaagaacttgatcttcaattgtaggctcattctcttccatgtattcaactaatgacacttcttcattattcaaacaactctcat

SEQ ID NO: 260947 - DNA, 1281 bp, Cannabis indica
ctccactcaaaatactcatttttccccaaaacttgaaccccgagatcatcgtctttcgatttacaatgaactgtcagattcaacccctccccctccaataagttgacaactttcacgaacttgggataaaaaatcgaatccgaacctttttcatttgatgtagcaatatttgttgtgatgggagtttgtgttgcctcaccacacaagcacacacaaactaatacaaccacccaacaaagcagtaatcttcttcttcttctgtgttcaaccatttttcatacaatttttccaattgatttttttctgcccaggctaggctaggtaacccctcatatataactgatataattcatgtacattgttaccatttattttccttttccataaatgcttatttcgtcatttatttatttcatttgtttccatccatgcatgtaacgtacttttgactttcaaaggcaaattctccaaccccattccaatagtgttttgtaataatacaaaaaaaccatttataactttcttttttgtttttatataaatgataattaaaaaaatacacataattaactaaacctttagcaatatcataatgttcattttttttttattatatttttaaattttattttaatttgcaaaataatatatttggtaataattaattaagtaattaaaagatgaggaaaaaattgtcaactatttttgtaattttgtaagctaataaatttagtatacatgattccaaccaggttgcttcttgcttggttgatttatttatttttttgaatgattttattcagtgtattttctatttttttcttaacatttaaatttttattaataggtaaattatatataattcatgtattacatatagatattctaatcaaattatttacaataattaggaagaaaaagaattgctaaatttctttccagaataaaacgtgtgataagtcatactttattaatagcaattcactaaaaaaattccaataaaaattaaataaaacacccaaaatattcagtgtattaactgagcattttttttaaaaaaaatatagcacttttctagaaattttctttaaaaaaattcttaagacaaagatgatattcaatttttcatagggatgtaaacagggctacttgctttttaaatttaccccatactcactccattacccgtttaaattatagcgggggcagagtgaggattacccgacggaggaaaaattcccatcaggtacccattacatattatatatttttgaaaaaaaa

SEQ ID NO: 260948 - DNA, 1102 bp, Cannabis indica
actaaacataatatttagacacactactacaaaaaccccctttagaggcggtttttaagcccttttagcgtcgattttggtaaaattcgctaccgacgctgatcaagacgacgctaaaggattttaaaaaactgacgtcatatatactcttatgacgtcggttaatatctagaaactgatgccataggggtatatatggcgtcggttcttagctaagaaccgacgccataggtggcgtaggaaccgacgccataggtagcgtaggaaccgacaccataggtggcgtaggaaccgacgccataggtggcataggaaccgacgccaataatgagcagttttcatttttttaattttatataatttattttaattatatatttattaatttatatattattttatttaatttaaattacatatttattttttaaaatttaaattaaatattattagtccaaaatattaataacttaataaatctaactacaacttaatctaaaaaaattacataaggaaaaaaaattcttgggcctttcaacctcaatcatcatcgtgaatcagcgccatcagtcattctatccactgtcgttgtaatggtaacaattacgtttttagatcgtattgccccttaccccgaaactgttaaaaaaataaaaaatttatattagttgatatatatatatgtatattatatatatttgttattataataaatactataatcaataataaaaattacagctttttgatcttgtatgtaacggttggggtttgcacgtgtgacgatgtcagtcatgtatttcaaaacataaaaaccacattcttggcttttaggctgtcttggacaatttgctagttaaatttgccacggggcaagatacacatgtacccctatatatctgaatgcactgttttaaaaaaattatattaacatttcaattcattagttaatttaaatttgttacatcagaagtcattaaattattaccttccgatcatttgagtaatttcttcgagaattgggcggccacgtacagggtctaaacagataattttctttggcgcaacgacctctagcgtccaatgcgcactacaaaattat

SEQ ID NO: 260949 - DNA, 635 bp, Cannabis indica
ggtccagatcaggctccgggtgtgggttcgtgtcctgggtcttggtctaggttgggtcctagtcctaggttccaatatcgatctgagtgttgattcagttctgggtctaagtccttggttcttatcctggtctgggttcgagtttgggtttgggtccgggtctagctttgggtctgattctaggtgtgggcgtttgagttcgtgtccgagtgtgtgtccgggtttgtgtcaaggtctggaccccgatctgggtctaggtccaacttcttgtcccgagagcgggtccaagttttggtctgggtcaagatctctgtccagatctaggtctagcatttcgattccagtctgggtcttggtccgagtccaggttcgtattcagatccctatctatgtttgggatcgtgtcccaaatttaggtccaggtccgggactcagttcccgtctgggtacacgaccgtgtccgggtacgagttctagtttcagtttgggtttgaggctaggtctgtgttcagttctaggtctgggtccgggttcaggtcatggtccttgtcttgttctagggtcctggttcagcgattcttgttcacgttctaattttgggtcacatgtctaggtctgggttttggtttggttct

SEQ ID NO: 260950 - DNA, 3576 bp, Cannabis indica
aaatcggatagacgacggcggtggcatgctcgtatgagttcttacccatttgcacaaaattaggtatccattattggggccaacacaagtgccaaagttgcattttgtatataccattgtaaattatgttcatatgatcccttataaatgcacatatcactcataagactccatatcaagcaccaaaaaactcttatttttgtaaaaaaaaatcattaactttgttaaaagttccaacaaaaatgtaatcacataaatacccttgttcttaaatacttgctcctctaaaatctactgatatgtctaaatatttgtatttaacatgttatttgtatttgctcatcatcatttttataaaaatgtaacatgaagtgttttttttttccctaaatatttgtaacatgaagttgaacatgatgaaacaatttatatcataccattgcttgttatgtttaattattgctgaacattccatgttacatcagtgtaaatctacttatacatttgtttctaaaaatgtcatactaagtctcaggccagtttcttagtctgcataacttggccttggcactagtactattgccattaaacagaacataatattatatcgatagatttcagggcctcaaagttgcagcagctacatatatatatatatatatatatgtatgtatatatactagagaggaacatctgatgggtattcatttggatatcttttgacagctaacctcagcaacttctcttgctcaacaaggttggagggaggaacatcatagacatctgtaaaaagatctgcaactgctggtttctccactttctcagccacttgaattgcttgtaacatctacacaaccaaacaccataaagggtcaaagttttcaaaagctattaatctaaacaattttactcctaatataaaatcttttatcctaggcctcattgagctagttctttaaatgatggtttacttccaaactttcttaggttcataattgagtaataaatgagtatatgattgtttctggaagtcatttcagtcttggttctaccagtatctcttacttacctgttttctcacattgtgtctatgctccgattcagcctcagcattccaccaaccattactttcgatccattgtctaaaccgagtaacagggtcacgtgacaatctccaccattcaatctcttccgctgatctgtacttggttgaatcgtcagatgttgagtggtgtcccactcgataggttagtgcctgtaaatggaaaccaaataaagtgagaagcttcttaatttcaaaatttgcctcctaaaaatgccaaatttcatcaattgtggccttacctcaattaagactggtctgtgttcacgaattgccatgttacgtgcagcatgaacagcgctgtacactgcaagcgcatcattaccatctactcgaatacttcggattccatatgcctggcccttaacaacaacgccatcacctatacatcaatgaaagacataccaccgacataatacattagaaagaaacaaatgttattgcttagatattaacaaacattttgtaatagttggcaaattagtagagcaaagggaaaataaaagaaaaattacttcgaaattgatcttctgttggtgtacttatagcccaaccattatttcggcagatgaatacaaccggtgcctccctaactgccgcaaagtttaaagccgcatgaaagtcaccctacattgcttcaactgttagaaaaccatgtaaaaacgaatgagttcattatcttgatggaaataggatgttacctcacttgtcccgccatcaccaaaataagttacagcgcaagcatcttttttgtccatctttaatgaatatgcagcaccaacggcctgaggaatttgtgtactgcaaaacagatggaaagatatgatggtgcactttaaatgttttacataatttactttacagagtacattctcaaaatcatacgcgatcggtgatgagatggtgaagtaattgagcttgttagatccatagtgtataggcatttgcctgcctttcccgtaatcagctttgttaccaaaacactgatttgcaaattcttgcagggtgaaaccacgccataatagaactcctggttcccgatactgcatccgtaataaggaaaattctagcattattctcagccctaccatacttaaatgttaaacaaaataggtaaatcaaaatatatgaaagtatgcagtaacctgaggaaagataaggtcgtcaagagttagtgctgcagcagatgcaatgttgatggcttcttctccaattgtggttagataaaaggaaattctcccttgtctttgagcttcatagaaaatattatccatcacttgaagtgtgaccatttcactgtacattttcagagctacttctttatttacctatttaaatcaataggtaatcggtcacaactctgacacttatcctcattatactcaaaatttatagaccaatttaagtttgatcatgtgaagttctgaggtacctgtacataagtgctgcctaaaataatctgcccattgttatcaaggaccctatagcagggtaccctctcttcaggagattcagatatgaacttcaattcgggagtgaatgcaatttttcctcctgagaaatccaagacctgtcacacacaatagaaaccttagaaagcacaaaacatttgagcataattcattataggtatcagctatgaagagctgtcatgttcttgcatctactattaatttaatgagttaaccatgtcttgttgctcagaagtaaatagttctgtctcctttttttatttctcttctcagaccaaaattacattcatagcaagataacaaaccagctatagcagttagacaacaaaccaaggataatagcagatgcaagttcaaatgaactacctaaatgctagcctaattttcttttataaggaagaaaacaatgaacacattagcctctagtaagttctttcactaaacccaaattagaaacttcataatttcttgtgtggtcccaaaacagaggaaccatcaatagtttaataacttcatcatctatattaacagagcaatttctttaatacaaagattgagtatacatcagaataattgtttccaattccaaacaaaggcatttctgttaaaaaagattgcctgtgtgaaatgatacacaaaatgaattgtcaacacatagatatgttatataagcaaggagatccaatcttttattcactggaaatagtatgctctgacacaagatgttcatagaaattttttacttttattattgtttatatcttcatagcggcttatagatacatattgactttgactctgccagcctatttgtgtatagcacatgtatattcatttatcatcctttgcacaaaactctggatcaatatataaaactatgaaagaaaggccacaatattctaagccacataacataaaaagttgaatttcaaacattctgtcccaatcatagtgataagatcaacaataaataaaaatgtgttgaggtttgaacacttaaaa

SEQ ID NO: 260951 - DNA, 541 bp, Cannabis indica
tattcaaatcatcaacataaatagcaatgataacaaacttaggacttgaactttttataaaaacacatgggcaaataggatcatttttatatccttcttttaataaatattcactaagtcgattgtaccacatgcgtcctgattgttttaatctatacaatgatctttgtaatttaattgagcatatttcttgattgcttcaattatatgcatcaggcatcttaaatccttcagggatcttcatgtaaatatccctatctagtgatcaatataaataagctgtgactacatccattatgtaacaccctaactagtataggcgtgttgacgtgattttaaacgtactgtgcagctcgttgctaatcaacgaggttaatgaaaatcgcgattgattaaaattttgctatttaattaaaacttatatattacatacaaaatatttcgggatcccgtttgcaaaatactttacaaaagtttactattcaatacataatatttgtcgattagcgactaactacaaaagcactattgtcccgaggat

SEQ ID NO: 260952 - DNA, 593 bp, Cannabis indica
agcaacaaaaccagtatccaaacttagaaataagaaatgccattaaagctccaagtttgagttctaaaactcaaaacttggttaaactaactaacaaccataaaaacctgcttgaatccacatatctaaacataaacaagcttctgaaaacaaaaccaaacactaacatcaactacaacaacacaaaccacaaagcatgcataaatttattttcaagaaaacaaagagaaggttgcaagaactataccttagcttggattcacttcaaatagttgagaattgctagaattactgagagaaattccaaccctagcagccatagggattgagagagagagagagagttaacgttaacgttaacgttaacttaacttaacttaacttaacttaacttaacttaacttaacttaacttaacttaacttacttacttactctctctctctctctctctctctctctctctctctctctctctctctctctctctctctctcgtgagcagctctaaaagctgaagccatggaaaaaacgcaaggaaggggacgggggagaccaaaatcatctgcaaggaaaacgaagcaactctcaaat

SEQ ID NO: 260953 - DNA, 676 bp, Cannabis indica
gcataagcacacagccgagaccctgtctcgacccatcacaaaaaaccacaaacttttccttatctaaaggaagggttagtactggagcggtaattgagcgctgctttaactccaggaaacttttctcacaccgatcaatccaaaaaaactttaggttctttcgggtcagctccgttaacggtacaacaatctttgaaaaacccttaacgaaccgccgataatacccagctaatcccaaaaagcttctaacctcagtagttgattttggtgtcggccaatcccgaacaacttcaatttttgtcggatccaccatgatcccatatttatctactatgtgccccaagaaagagacacgagataaaaagaattcacaatttttgaatttagcatatagcttgtgatcccgtaaccattgtaaaactgctctaagatgcaactcatgctcttcttttgattcagaatataccaagatgtcatcgataaacacgatcatacatctatccaggtaatccttgaacacccaattcataagatccatgaatgtcgtcggggcattggtgagtccaaaagacatcgtaacgaattcataatgtccataccgagtacagaacgcaatttttggaatatcttcctctcgagttctcagctgatgatagcctgagcgaagatcgatctt

SEQ ID NO: 260954 - DNA, 806 bp, Cannabis indica
aacaacagaagcagaacaacaaacaacaaacaaaacaccaaaactagagaacaacacaggaaagaaaacagccgaactaacttaaaacatgaccatctgcaatgtattgctgcaggaaatcatcaaaagtggccaaatcgagaacaccaaatatgttgtaccgatttgcccaatgagccgccgagtgggccacacagttgcaggatctgggaatccattggacttcccagaggttgagactgcgagagaggatgaaaaaattagcaaccttatcttgaatgttgaattgcagcttgttggtttccatcgggttgctgcgtatggcgttgacagcatcaagggaatccgattgaaacaccacgttcctgtagccgaaacgaacagccgcagcagtaccttcgtggatcgcagcaatctcaccagacaaggggtcacaattggttacacggaaggtgacaacattgagaatagtccccgaggcatctctgaatacagctgcacctgcggaatgatatcggccaatggcaacatccgaattgcatgtcacccagccctcaggaggaggattccaacaagtttgctctacagctcgggaaacacaagaagggacaagttcatgaagccgtaagttgatgagttttatgatgactttgattggggttgttctcccttcatgaatgatgctattacgctccttccaaatgctatcaaagatgatagcagcacctcccaagaattgattaagatcaaggttggctggtctattatcggaatgttggaaccactctagccactcctcccacgag

SEQ ID NO: 260955 - DNA, 1895 bp, Cannabis indica
tatgtgaatctacagctactcagactacttgggcttttggttttgggcttgttgggacaactggcggctgttaacggcggaggtggtgacagctggagttgcaaattcccagctttatacaatttcggtgattcaaactccgacacaggagcaatatctgccaccctctcacagattcttccacctaatggcgaaagcttctttggaaagcctgctggaagagcttgtgatggtcgtcttgtcatagattttattggtaagaaacatcttaaaaggttgaagagttaagatccttagaacagaagaaattgttctcgtctttttctttttctttttgaggggagaatacgacatgtcgttttgctatttgcagctgaggcattgaggttaccttaccttagtccttacatggattcacttgggactaatttcagacatggtgccaactttgctactggaggttcgtctattcggaaaggagggtatagcccatttcatcttggggttcaaatagcacaattcatgcgtttcaagtctctttccaatcgactcatttccaatagtagtagtggtggtgagcttgaacctctactctatttaattcaatcacattatagtactaaaaaaaaagctttatactaaattatggggtttttttttcttaatgaaaaataaatcctagtctcaaaaggcaggcttccaagagcagaggacttctcaaaggctctatatactttagacataggacagaatgatttggccattggcttacaatactctagtgaagaacaagtcaaagctttcattcctgatatacttggccaattatctcaagcaatacatgtgtgtagtagttaagtgacaaaactagtttcaaatgagcagaacttatagcttttattaataattactattctttgattgccacacattacagcaactatacgaggaaggagccagattcttttgggtacataacacaggacctattggttgtttaccatacagtgttatatattacaaatcaaagacaggtaatctggacaaaaatggatgtgtgaaacctcaaaatgaagtggctcaggagttcaataggcagcttaaggacacggttttaaaactcagaagacaattccctcttgctgtgtttacctatgtcgatgtctactctgctaaatatgcaataattagtcaagcaaaggaccttggtaatgttcttatatttaaccatacttgtagttctatgaacaagcctttgctataacactcatttatggttttgtaggttttgttggtccaatggagttctgctgtggtagctactatggctaccatatagattgtgggaagaaagctatggtgaacggaacactttatggtaatccttgtaagaatccgctaaggcatattagttgggatggcatacactattctcaggctgcaaatattcagattgctaaccaaattcttaagggtaagctttctgatccactggttccaattggggaagcttgtcattatcccaagagtaaggctagtggttcaccatagtttctatgcttgaaaactcttagctagagttaagaagatactgcttctagcattacaatgttatataatgttagacaatagggtgcttgtttcatcagcacctaagttgaaattacttaatcagaacaataaagcctaaggcatctcaatgggaagaaaatagtctcttgttgtattcttcttcagagttcactctttttctcatttggtttgataacaaaagttaatataagggtcgacttagttaaaaccagctatttattatacagtacataacaaatttggaatttcacttcccattgtggaatgtttttggctctgatagtttcttgtagggctttaca

SEQ ID NO: 260956 - DNA, 1790 bp, Cannabis indica
aaaaaaaaaaaaaaaaattccttacatatacaaaatgcatgagaaaattatggaagtatttcaagttcttcacatgaatggaggagttggagaaaaaagttatgccaataactctctagttcaagtaattactcgatcctttatttatttatttattttatgcattattaatatataattatatatagatgatcatgatattttattttattttattttgcagaaaaaagttatatccatgacgaagccaattactgaagaagccataatcaatcactacattagtgggaaattctctacaaccttagctattgcagatttgggttgttcttcaggaccaaacagtttgtttgtggtgactgaactcataaaatcagttcacaagatttgcaagaaactaaaccttgaatcacctgagtttcaactctacttgaatgaccttactagcaatgatttcaatgcaatttttgaaactctgccaagctttcaagaaaatctcagaacccaaatgggccccaatttcggcccgtgtttcgtcatgggtgtccctggttccttctacggcaggctcttccctcccaatacccttcattttgtccactcatcttacagtctccaatggctctctaaggtacgtatgaatattacaattttaattctcaataatgatatcatcacctattctatagtgtagtggtaggaatatttttattagtctctttctttattgggaaagagttcgaatctcaccataacttttcattggcaggtattatgttggtatgcttactaataagtagtgggaatcaatgataagttaatcattcttttacctttgtttacttacataattaaaggaatgtcattaagggtaatgaattttaattatttttattttattttttaatattaaatatataatgataattttttcttttaaaatataccttacaaaataactaccgtttaactcaaaagagcaatttaatcaatttaagcattccgattatgttttctaataaagtaaacaaaataaatcacaactattccatttctaaaaaaaattaataaaccacataatacaaatattgattccgattatttttcatttattccattatatgtctccattaatttattattctgattctgaatattctataataaatatgtctttattatctatggttgtttgagagactaatttgttgtgcagtactatcttcaatataattaagatttgacagtgacatgacttataggttcctgagggagtggagaataataacaaaggtaacatttacttggctagtacaagtccaccgagtgtggttaaggcttataaggaacaattccaaagtgacttttcagtgtttctcaagtgtcgatccaaggagttagttgatggtggaagtatggttctaactattcttggtagacaaaaccaagatccaactagcaaagatggttgttacatttgggagcttatggctatggcccttaaccaaatggtctcagaggtatttacggacatcatataataataataataattattataatatttgttgtgtgttgcaacttattatacaatattatttaattttatggtgggccaggttctttattggtgcaaatcaatatttatacattttaatttaataaataatataaaagatcgctaactactcataccatgttacatccatactcaggggcggagccacagccaaggaaaaggtggccatggcccccccaacaatttaaatatccttttatatatatatata

SEQ ID NO: 260957 - DNA, 1029 bp, Cannabis indica
ttataattttctcatatattgtgtaatttttacataaaaatgcataagatgctaataaaattatatatcatgtcaataaaaatataatagaaaatagaacttaaatattatttcaaaaagtgatataacgtataacaaaaaaatatatatataattcaccaaaatatatatactaacaataataataagaaaaatatatattactaatgtatatatgtgtatactatactaaccaaattatataccacaattgaaatgtatataccacgacaataaaattatataccactattgtatataataaaataataattaaatattattcaaaataaatatatactctacaattgaaatatataaaaaataataattaaatatatgtagcatttatacatacatttaaatatttgtattatgttaataaaattatatttcactattatacaaaacaaaacaaaaaataattatcatctaagaataataatatactatacaacaaaacagaaatatattgtacaacaaaatctatataccaaaaactcacaacaactcataaaaaattaaaaaaaaaatctacataattttcaaataaaagagatttttaacaaaacttatatagatataccacaatctttaagtaatttgcttctaattcttgaaaaaaaaaatatatgaaaaaaaattatttttttatgtggtaaaagacaatataaataataaacaacctaaaagagttattttggtacaagttttgaaatgaaaacatttactagcatagtcttataatttggggcaatttattataatttccctaaaataaaactaactattgatattaaatgaaataatgtgaaaaagaaatttcaaaaaaaaaatatgacaggtgatttttaataattaatttaagttaataattttttagtattgcggtgtatttataattttatggggtgcaaataaaatttctatataaataataatattaatatcaaagaattaacacaattgcccgtctagctcagttggtag

SEQ ID NO: 260958 - DNA, 809 bp, Cannabis indica
aataaaacttaatgtaagcccaaataaaaagtctaacagctgtttgattttttttagcaccctaaattatttgggttatcttgaaaatttatgaatgattcctggtaattaatcttatgtcttcttcatataaaacaacgatgccacaatttattcatttatcgaagatactaaaatttcttatagattgtgaaaatatatgaacaaattttcatatatatatatatatatagttatagttatagttatagttatagtagggttatattattgaaaattatagatgttatttttttaaattttttcctattttaattgtcaacatttataaattccatctaaaaattagttgtagttagctaagtatcctggttcaatattcgtaaatatatttctatgcaaacaccatatatatttaaaatagtatccatttggctcaccaatttttagttacaagactacaagtgatattttcttaaatgtgtattgttggattttcaattgagtaatgggatttcaagaggcttgttgtcagccgcttgaaatgaaaagacacttgagattcaaaaatataagaaaaaaaagttgtgatataaacaagactttcaagattaacaacaaaataacttccatttttaagggatattaaattatggtttctccggtgatttttaagtgggttgctatatgaattttggtgtgatttaaatttctccgttagttgtaatagaaatttatatgtgaaattccgtaaaaaatgaaaaaaaaaaaaaaaaaaaaaactaaattagaactgtaaaataaaaaaa

SEQ ID NO: 260959 - DNA, 556 bp, Cannabis indica
aatagcaaatttttgtaaagtattttgtaaacgggatcccgaaatattttgtatgtaatattataagttttaaataaataagaaaattttaattaatcacgtttttcattaatctcgttgattagcaacgagctgcacaacaagtttaaaatcacgttaacacgcctaggctagttagctcgtttcatggttaagtaagcttttattgctttagtagtttattttaataagtatgatttaagaaaagccggttaggaagcatgttagtagcctgatagtagaataggtgcatgtttttaattttcaaataagcggcattagtaaattctcgttgatcatggtctgaccatgctagctcttggttacgcaggctgttcagactagatggatgccaggcgaaataccaggagctagggcaattcggttggatctaatgctggtcagggagcttagaatccctcaaatgtccgtggtcgaggtagaggtctcaggggcagggcacgtggttggggtgatgttaacccgccacgaggttgcccaagctgcccaagatgct

SEQ ID NO: 260960 - DNA, 539 bp, Cannabis indica
ccaaacctagacctgggacccaaaactgaaacttgaaccagaacgtgaccaggaccctggaacaggaccgagaccgtgacgaggacatagacctacaacgggaaccaaaactaaacctgaacccagcctcaaaactcaggctcaaacccagtcctagacccagactaggactgagactcgaacccgaactcaggactcgatcctagacctagaccaagcccctaacataaactgggattcagacctggacatggacacgaaccagacccggactcaaatatcgacccatacccagactggcatcgtaacacgggagctggacccagacgtagacctagacccaaacctaggacccagatccaggacccaaacctggacacggactcagacctagacccagaccgagatcagaaaaacccgtactcggactcgaactaagactcggaccctgacccaacctggacccagacccaaacctggaaccgaacctgaacacatatacgaactagaactgtaactaggacccaaagctaagataa

SEQ ID NO: 260961 - DNA, 847 bp, Cannabis indica
taccacacacctcagcactttcccgcacttgtgttggtatcactgtactatactcacaaacaatactcactataccaatgcactctgtactataaccatacaagtgttggtggtgcaaataataatttaagcatccatatacacattacatatacatacattcagatattcatatcacacattatattcagttcttaccttatttcggaatacaaatgtgctggccgacctgaacagaaatcttgtgctagatggatgccctaatcacattttaaaaccgggtaagttacatgattaaaaccctaatcccgggaaacccaaaaccttaaccctaggttctgttatgctttctataggttattctaactctgaaaatggggaaacacccaaccgaggcaccgcaaagatgaaaattgagaaaatgaatggcctggggaaccctgccaaaaccggctagcctgttttagaggctctgcaaaccggctagccagtttgcaccagttttcccaaagcttttcattctttgctcaattctccaccaaatgcaaccaaaccttccagagtacctaattagggtatacacaatatattccagccagtatttcacagaaaaattcaaagaaactcaacttgccattaatgatcaaagctttgagttcaaagctttaacttgcacaaaacttacaacaaaccttaaaaccagctcctaggaactaaaatcaatccaaactaaccctagaactcgaactgaacaagcatcaaacattaacagcccccaatttacaatttcacaaattcaaactaagcaaaaacctaaaaactagagaagggttccactagggcttac

SEQ ID NO: 260962 - DNA, 712 bp, Cannabis indica
gtgaattatcatccacttggattattaattctggacctactaaccaagtttattttattttcttcttattacagctccagctgcttgaactcgaatgctatcttagcgagttgaattggatggttggacagaagggtggagatagtccaagatgaaaaagaagctcgattttttttttgaattaattgttttagtttcagaacaatttagatttcaattattagtttgaggttttattctctatttttcatattgttgcagacaattcctttattttggagaatttcataataaagtctcctagttttgaaaaatgaattgcatttatgaattgagcttcatcttgtgtatgccaataccagctatatttatttgttttaatgcttgtgtatgtgtttttattattgacacaaattccatagtatcttcaactcttcaaggagttaatgctacataaacacttagaatttcatttctatgtttatgaataattgttgattctaaaacaattattaagaatttgtttaatagaaagatcttttgatctgataggggtggaaaagttaagaataatatgcagttcaacgatcctcataaattcctaatcctcataaatgttttaatggtatctctattgattacttaatctctagtaagtattttacacttcatttaaaatactaagattgctatgttgatgacttagtcttaa

SEQ ID NO: 260963 - DNA, 1135 bp, Cannabis indica
atatttaattgtatcaataataatatgacattgagaagaatactaaacataatacattttagcatttctatttcatgaattctagtttcgttttaatttatttatttattatatatatgtagatataaatttttgtgtgtgtttttataatgcattcaaaaagagtgcaacaatacaaaatttttagttcaattttttaatggtcatacacactatagttatttaagatattttgtaaaattttgagaaatttgaacgaatgttgagaaatttgaacgaatttatactattagaagcaaccatattttcagagtataaaatatttctgaattcctctaaattttacaagatattctaaataactacaatgtatattaccataaaaaaattaaactaaaaaattctcaataatattaaaagagattgaagtgcatcattgtaatatagaagttcaccatagaattttttatattattttagagtagttttgtttttgttattattgttttttcctatgataaatagtatggtttattttagagtagttgaatttgcatttttttatttatataatttattatagattttatttaataaaattattgctaataaaaaaaatagttagtgggaaaagtttatatattttatttagcataaatatcgatataaatatttaatgttttatatttgtaagcggcataaatttaatatttttataatggtataagtactcaatgttaataaatgtgtaatattttcacaatagctaagatccatgaagttagagaagtcaaatttatgactttgcatttctcatttccaacatgagaaactcactcgaaaatgaagagtttcgagtctctcattttcacataagagcaatatctccgagaattggtgaccaactttgtcagaacatagaaacaaactaaatgattacaacatatcacttaagcatcctaaagtacatcccctggatgttttttcactttcccagcgtctaggttgacgtcatatgtcaaccagagagctgggatgtcaacctgggcgctaggtcatgaacaacctttagtaaaacaaccataactcactcaatgttgatccaattgacacgattcaacttgcgttttgaagc

SEQ ID NO: 260964 - DNA, 665 bp, Cannabis indica
tccagccatcagcacaactgaactattgcatcatactggccaagaacctccattccacccagtcatatgctttactcatgtctagcttgagtgccataaatcctcttctactgttatttcttttaaacaatgaatgaattagttcaaagctaaccataatgttgtcatgtatcgagcgctctggataaatgcactttggaaagatgagatgagggggccaaggacacttttcatcctcagtgataaagcttttccaacaattttatacagtacattacacaaagcaataggtcgatactctttaactaatcttggtttttgtacttttggtattaacactacatttgacttattaaactattgcattgaagcattgtcatttaagattgcaaggcatacttggctggccctttcacccacaatattccaatatatctgaaaaaataaagcatgatatacgcctggtcctggagctttaatggcattaatgaccataacagcctggaaaatatcctcctgagtaaatggtgccataagacgctcatcatcaaccactgaaatgcgtgaattaataacttctgtaccatgctgaattttctcatttatcgggttggctgtttgagaaatatctataaaataccactctacttcaccaacaatctctt

SEQ ID NO: 260965 - DNA, 1054 bp, Cannabis indica
tgcagattttatactgttctttttcataaattatagtatcaatagcagaaacacatgcataccattcaatcacttgtgggtttgtctccttgaacttgattatcatttgtcacctgctgttatattgagtagtctttttgtcgaagctgctgaatgaatttatgtattttttttttgctttaactttcagattcaatttattcttgttagaaaatgttttatttttgatgcaaaatgatattgttaaaatgttgattaggatagctgctgttattaaacgacataaattttttctctagtttatattctaattatgttcttattttgataatatgaattatgacaaaattatgttgctagcttgtagcttcaaatttatcaattagttgctagcaagctaagactatttatttttttcatttctaagcatccgagctgatgtttatttatttcatcttattgctggtgtttaaagggatgcttatttattacatctgagttggtatgtatttatttatttctgcattgtcttctttattttctacagagtcttgatttcttagtttgattatggggttttggagaagaacgttgttttaggtttatatcaaaacatgtttctttgttggaatttattaaagtgtactgtaaaatctcccagtgaagtttttatctatttatttttatttttcctgaaaatgatgaagtttttgtctattagtcagtcatggtcgctcctattttagctgcagttagttttgttttttggggaacctaggcagtaatatgggaggacctactatcaagctttttaaaaaatgtgaaaaagaaacttatattacttgtcgaaaaaggaaattacaattgagtacaatttatctttggctgaagcataagtacaaactaaaccaaagaggaggaacaaatagaaacacaacacaaagagaatatttacagaatgtggaaaatacctaattttttttcaccattgaaccccaaatagaatctagcaaattaatttttcctgcaccaaagacatgtccaacggttctct

SEQ ID NO: 260966 - DNA, 763 bp, Cannabis indica
ttttgatattaagattattaaattttaaaataaaataaataaatgtaatgcatttgggccctccacgtgtccatatttatgagttaacataagtggtagtaatagtataagagaattgtaacattaggtatttttgcctccaaaaataaacattagatatttaagtgtataaaatttgaaacattaagtatttataccgtaatttaccctaaattttaattataattttcttacacaaatactcaaagtgtagtctatttttgttttaataaaaagagatcaggtagcaataatatctatatttcttttaggctaattaggatttttaccttttgaactttgacatgtacaaaatcatgtctcctgaacttttaaggtcgttagaaatgtctcctgaactattgagattgttggatttaagaacttttgtctaatttcattgaattttactatttcagtgattgtttatatactaaaccatgttcctcagactttgatatctaccaaatcacgcccttcgaactttgacatgtactaaatcatggcccatggactttcattcatgttagacttttttactaaaattgaaaaaaaatccataaatccaacaatcttaatagttcaagaagcatttttctatttgtattttatattttttttgatttttattattttatacttctaatctttcattaaaattcttttatattgttaatttttttttatcaaattatatttttatataaaaattaaataaattatt

SEQ ID NO: 260967 - DNA, 526 bp, Cannabis indica
tttgagttaaaaataaaagaatatgaggcagatttgtgtgttaaagatgaaaaaagtcactcttttaaataaggaacttgaaaattttaagaaaaatgttcaaatgcttaatcctggatcttctatttttgaaaaagctcaaaatgtcggtcaaagaggttttgttggcatcggatcaaatggtatggagagttctggaatcacaaaatttgtaaaatctagtgttccaacgaatcttcatgatgttgcaaatttgaagtctgtggcaagagcttcaaaacctgccgtggcaaaagatgtttctgctgacgcaaaatccccaggatttacaaaaagagtaagatctgaggtataaagatttgttcctacttgttatttttggggtagaaaatgacatatcagacctaaatatttcacgttgcaaaatatgtttaaaacaaattattttggtaatttggaaaaatctcaaaagaaacataaaggattgaaactaaaatggattaagaaaaagtgtctaactggtttt

SEQ ID NO: 260968 - DNA, 762 bp, Cannabis indica
aaaaattaactaaaacttaaataaaactaatatttacgtggcatgccacgtaactttcatctagtatatatatatatggcataattttgattagattatggtttatattttttccttaataatttttaaatggatttattatcgaagcattgacttgattttattatactagtatatatatatatatatatttacataaaatactattttccttaaaaaaaaaattatatttttacgttttaatttttttatatatatatttttacaattttttatagaaacaacacaaaaataataaaaaaatttatatacaagtacaggaaaataatagcaaaaaataacatacagataacaaaaaatcaacaacaacttaacgagagtaaaacataaaaagactgtattttctgtaaataaaatcataaaacttgtaagaatatttaaaattctattttttttattgtttttgtgtatttaaaaaataatcctaaaaaaaaagtcttgaaaaatgaaaccttatgtaacagcccaaactacctaatacttaagccaaccctaataataataataataataataataataattttatttatatatttaattaatttaggggaattaccccatataatattttttaactttatttttttaaatttacggtttgagtttttaaagtggttaagttaccatagaggtttctatacgattttttgttgcaatttaagttgcagcgctagttgcaatagagatttttatgtataa

SEQ ID NO: 260969 - DNA, 1266 bp, Cannabis indica
agattttttataataataatgattagatgtacatatttttggaaggccatatcttaacactgatatatatagaagaatttgaggatttgaacatgaaaccattaaggtaataatgttaataattagctatttgaatattattcttataattattattattgttattattattattattatatatgtatattgcatggttacttttaaaaaattatttgaataagatatattaaagtggcccaatcacataacatgtttaactttttgggggagatcaaatcaattgaatatacaccactacaacctaaagcattcccctcctccatagtcccattccatacaattaatatttttttgaaaggaatagaaatgaaatagtctatatatctatatatatcaactcccataattgacaattaaggatttactttttggtgaaaaatatatgactattgtgtcaagcactacaatatatattaagtctatcttttttcctcaataaataaataaaaatctaatataagcttccattattactatagaaattaatactatttttctacccctaacaaactactaatatataatgtactagctttggttttatatatgacaatctaaatcatacataagtacatcacctaacgataaattaatttttatattatttattaaattaatatatatatatatatgacataccaaaatatgaaattatgccaatagtaatattacacatgcattttatatataattttttgttgaaagatttgatttccaaaaacaaaattattgtatcatgtaattttgttatacatataagctaagaattgagtatagaagttcaatatataaaagatgaaagaaattgtgaagaaataaagtagaaattttgtgtaaggaaactttttgagttaatagtttattgattagattattgaaatttgtttaagttattagatgtggtcacaagaatcaatatatagggatatagataattagatatggatatttaatttatatatagttgatgagatgttttaattaaagtccaatcattagtcttaagtgtaaacattataaaatgtttatggttgttagctcaatgcattgctagctagctaataataataaaaataataatatgcatatagctaagtcctctatgcgtcgttttgttcataggtcaacacccacaatttggaaaaccataaaaggttgagaccatatctaacatatgggaccccattacttaaggaatgacaa

SEQ ID NO: 260970 - DNA, 3810 bp, Cannabis indica
ggtttgctccatacacactcctcaaaacttttggtgctctccatctttgtacagacacccacaatgccacaaaccctgttcttgaagccctttgtttcggtccctcttcataactggaggtttgttatctaatgccgcttctttctgttaaacccttgttaaacccttttcactacaatcaactgtacatattttttgggcaaaattcttacttctctccccattttgaggataccatggagtgtgggccttagaattgtagttctgcaaatgggatgttctgggaaagttccttttttttctgtttctgcatccaatcactccaatcatatgaatgaataatgccttgttttgagttcacatagaggggaatgaatttatgtttggtttgtagtttgggttatagggggcatgtatttcttatctacctaattgcattattttgtcatttatcttatcttgaactaaaattttgcagttcgggtttagttttatggtttctagtagtagataatgtttctttttttttttttggcagtgaagaataagatagcttagttcaagtttatttggcctttatgattttgggatactgtaattatttgttttcttcaccacaggaaatcgaatgtacacacaaattgtatagatgccaacattaaaatgcagagaaagatggaggttgtttgtatgggaatgctttcgccgaggaagttcttgcggaaaagaaagaaagtagaggtttttaaagatgctgctgatgaaattgatcaaaagaactggaggagactgatgaatgaaattgaagagacgggttccgcagttgcggtgcttagaagagaaagaatgaagaaccaggagataccaaaggatcttgtgctaggtaccttggttaggtttaagcagctgaagaaatggaaacttgttggtgaggtatgtagtacagatgcactatttggtcctcgagttacatatgatctgatggatatattttaattctatagatcaaaagacttgttgtttagagatactgcaaataattagtcacttgaccattttgttatagacataacccactttcaagaaattcctcaacattatcttaatagaaaaagaaaaatagaaaaagaaaatgtcttagtgaaaggggtctttttggctctaaatctattgattgttagtgtttggattcccttatcagttgttacaagcttatttcttttgccttttagatccttgaatggctcaggactcagagctggtggaactttagtgaaatggatttcttgatgcttataacagcttatggaaagacaggggatttcaaccgagctgagaaggttttaagtttgctcaataagaaaggttatccgccaagtgtgatatcccacactgctcttatggaagcatatggtaaaggaggccgctataataacgctgaagcaatatttcgaaggatgaaatcttcaggtcctgaaccgtcggctctgacttatcaaataatacttaaaatatttgttgaggtactgttttcactttagatgttagtctactaaagctttaattttcatccaaatcacttttacatatgatataaacttatgcagttcggttttgtaaagaatatgaggtgcctttctgaaaattcaactcaattagctcagtggaacttcttatataaatctgcactatacatattattttcttacaagcaaagttcaaacagccaatcggtgacggattgtggagcttttttaggaggctaactgtgtattaaatatgctattattttctgcattttacacaaatatttttttctcaagtaattaaaaaattacaagggaaaacaattgacagggcttgagcccccaaatcactatgtggctccatcattatagcaaatagtataataaggaaaaatctatagaagttatcaaacttagaatgttgcagttctgacttaaataataagtttctgtagccatactaatattttttactgcaccatgatgcttttcttggagtgtctctcttccaatgttataactgtaactggtgatactccagggatgcaagttcaatgaagctgaagaaattttcgagacccttttgaacggcaagaatccaccactgaagccagatcagaggatgttccacatgatgatttatatgtataagaaggctggaagttatgaaaaagctcgcagattatttgcagtgatggctgagagaggagtaccgcaatcaacagttacttacaatagtctaatgtcatttgaaacaaattacaaggaagtttccaagatatacgatcaggtaaggttgaaggattatttatttatgcattaaggtaggttgctaaataataattcttatttttccgaactactagcttgcagcaatagttgcctgaccagtttttcaggttcattaatctattattctaaatgaatatctttctatttggggttccctttgctatttgaataatcagtattttcatttgtttgtctagtttaaaacttctttcagttcttaccaaaacgaatgagctgccttctgctcagtccgattctttttgtctaatattcaacattgaatagaataaatggcaccacacgtgatgatacttttatgtttttattactcggctttatagtcttggaatagcttaaagtctagcatcattaatttgattttcatgagtacgaaaggatgacagtctcatttattttgtatgaaaccagtataaatttctgacattatgaataaaatattcaaattatagatgcaaagagctggcctcaaacctgacgtggtgagctatgcctcactgattagtgcttatggtaaagctagaagagaagaagaagcacttgctgtgttcgaggagatgcttgatgctggtgttaggtgtgtaacgctattgttttgttttggttatacatacattggtgattcaaaagatacttttctgacatgaactggttcatttatttactacaactcatttgattcaaaactaacaagttaatagaagccaacttagtcatggggctcatgctacattctaaatggtaaatagtgataaacttatgtggaatatcatctacatacaagttctctttattgctcttcagtgttacataatcactgctaaggcagtgaggtaagagagcaaaaggcatttgtttgtctaattggtatattcattttagatattaatgttttgatatattttgtttactccccatcacttttccatgaagggaggtgttggggggttgctttggataacaagtgcctacaagattgattgcttttatgagactatttgctaatgaaaaccgattaaaaccgaccaatggtcattgattgttttgatttcttgtctccatttcttagaagtgcaagcttccaattttcttacttctgtttgttactacgaaagcttgagatttcaatttcttgttataactttcaaatcataatggtgacgctacaccttttgtgtctcttaccaggccgacccacaaagcttataacatattactggatgcattttcaatatcaggaatggttgagcaagctcgaactgtttttaagagtatgagaagagacaggtaaaaatctagaatctacattataattacttcatatgtgacaaatgttcattgtaattgtttaggacattctgcaagttttcaggaaattctaaatttgtagggtgttgaaatcagagtcataacattttattgcacggtgtgtctgtttttttttgtatgcgtgtgcacatgctgtttggactct

SEQ ID NO: 260971 - DNA, 570 bp, Cannabis indica
aatcaggtgagcttgtgccacaatctagcaccaatctatcgcatcgtctaattagacaagctcgtacctacgcccagtacttatcatatgtcacttacgcctgtacttacacctagtacgtcgctagaaaaattgcatcaactaattaagtgagcccgtacctacactcggtactcatcatatatcactgacgcctgtacttacgcccagtacatcgccagaaaaatcgcatcacctaatcaggtgagcccatatatcacacacataatattatcacattatcaatactcaaccagtcagtcttttcattacataacaatatttcttatatctcaatattaatcaattcataacaatactaattatattacataacagactatgcagtacaatatacttttcttacctttaatccaggtcatacaatttcagccaacccaagtggagaactattcccgattatctcggccctatgtcacaacaacgttaaaccaataagtgtttatcccaaaacattgcttaatattcacataagacaatctagggttttctaccaaaccccgtggtata

SEQ ID NO: 260972 - DNA, 999 bp, Cannabis indica
atcagttcaatcacattatataggcgaatggattgaataaacataacaggaagaataacgttttctgaagtggggtgagttggtttttgaacgtgtcccgttaacgttacactctttatacccttgtaaatgagggttcatatcccatgtgggactctttccaactcacacacactaagacacttatatattttgttaaaatattcacaacatttccaacattattatttgagatgaaagcaaaattattttttgagttaaaagcttcatcctcttgagtctctctcttaagattagcattttaaagactaactgaaaacctagattttatgattggattgggatcaatgatctccaaccccataactcattcaaacgtcaacttctttttttttacgatcatctgtgttgagggaggtgacatcgatcagggacagcccaaaggtggggcaattggggcctaggccactattttgggaacccaaaattaaaaatatatatatatatatatacaatacattagtttttttttttgagatatacataatttaaatataagtaaaatagttttcactatgtacatcaaaatttacatagctcaattggtaaatagctattgattccctttagaggtgatgagtttattcatcaaagtcacctttaaatatttttgaaaaaattaaaaatttaataagtaattaaaagtaaattggcatagagattatttcattttgtggatttatgtggttcaaatttttggaagtcaatatttttttttcttataaacaataagcaagccattttttttttcaaaaaaaaagctaataataataagaatgaatagtatatataatatttgacacaaaattatattttacaatattaatactaaatattacaatacattaacattttattagaaatgattttagttaatcaaatatcaaaattaattattaaaaagagtaatttgcggcataaatatttaagtttaaattc

SEQ ID NO: 260973 - DNA, 505 bp, Cannabis indica
attaattttttaagttataatatcctcattagttattattttttaaaatatttaatttatttattattatcgtggtatttttttttttatcaatttgcatataaaaatattactgtacactgtatgtttgagtgatctctaaaaaaaattatactaaatataatatttactccttataaaatatatataataatatttattctttttaaagtaatttatttttatttttatttttttttcaaaaaaatcccaacatctccatataaaaaaaattaaaaagatataaatattatattatattgtttttagataatgcactcaagatattttaaaatattatattctcatcttaaaaaaataaaaaaaaaaattataataacctctataaatttaaaccaatcactatgtacataattatatatataattatttattataatataatactatatatatttatataaataaatgtaacaaaaaattaaaaaaataaacaaaacaaaaa

SEQ ID NO: 260974 - DNA, 666 bp, Cannabis indica
aaatatatgcgacttactaagcgcgagttgcatgttcgtattctcgcacaagctcccaggcttttgatgcgtttagtattttctaggtggcccatgggcctgttgttagatgtctgcgttcacctatgatcgcatagacagacatctcgtgtgttgacaatgtggaacttgcgagttcttaacgagtcgtcgaacacgtggacctgtttacttaagtaggctatgaaaaaatgacagcctacttaatattttcgttaagtaaacatatcatgtaatggaatttgtccaatttaactattaacaaatatttttgttttcctttttaaaaatataaaaataaaaaaaaatatggagttaaaaaccttgcgaaaaaaatgagttaaaacttggatttttttttctttaaagaatttcttttaaaagaaaagagcattgttattggacacgagtgatgcccaataacttttataggtggtacttcacaattaattagtgatattttttaaaaactattttgagacctaatacttaattacaataatactattatgatgacaaaaaaaattacaaaaatgtctattattttttggctaattagcaatttattccccgaactttgacatataccaaatcatgccccctgaattttttcggccgttaaaaatt

SEQ ID NO: 260975 - DNA, 841 bp, Cannabis indica
tttgtaaataacataactttataaaaaaattaaaaaaaagtaatccaacataaattttacgtggagattgagaaataatgtaatatacaggagattgtaattctcttccaatacatattttggatatttaggatttttgtcccttaaagtatgacatattatatgtatcattgtacctctaaatttttcagtccgtaactattcacaatattgtaaattggccattctctattaagttttgtcacacataacaaataaaataattacatggatgcttaactaattgccacattgaaaacagatgtatagcaaagtgtaatgaaggagtccgtactgaatattctccgtacgtttagcccctcatgtgggtttttgtgcctcctctgggtggcctagggttattccctcgttttctattctcgtttctgcgctgccttttcgtgttctcttctcgtagtgagctgattgcagttggtggacagcctttctctgttctgctcttgttttttttacggtttccttcgaaggtctgtcatggaagaagtattgccgattcccaatggtgagaaggatttttctaaggcttctgaggtgtttagcggggttgaagatctttcattagctctggaagctaatcttgacttgggaaacgaagctgcggggaagtcggtggtggcaagctcatttcaaggcgccccattttcaatggtttgcttcggtcagttatggggtaagaagtggaaactggcctctgggtggaagctccagggaggtgggggaaaaaactcctttatactccgattgacaaaaaagctgaggcagagttcattgtcaagaatgg

SEQ ID NO: 260976 - DNA, 882 bp, Cannabis indica
attctcaaaactcattttcaattctattaatacttttaagaaaaaaaataaaaatctattactgcttattttatttatttttttctaaaccttttatatttatttttttcttatctattttttttgttctattggaatcaataataatttttataaatagttagagtttttttagtattttgtaaaatatatagctgaatgataatatttaaaaatattatttataaattatatttttttatagggatccaaattttaatgggtagtattatgaaaatttgtagtttttatgtttaatttttctatctataaaaaaaatctatcatttttacattagatgagttgagattgttccatcagttgaaaaaaaaaaattaagaaaaaagtttttcggcaaaaaaaaaagttaaatttgacttaagtattttgtttataaaaatatttttgatatagtgtaaaaagtaatatttttttatttttttttaattaagtagttaaatcaagcatagaaattcaaatttctctttttattatttgtcgttggatcaaaatctaatagtttaatatttttaaaattaatatttatagttaaattgtttagtaaccatcaataggtaatactcattaagaagtgttccatatatatatttaaatggataagtggagatatcactttacttctactttacgcggacatttcctatttctcgtactttaagaagctttattctattattttttatatggcgttatatgtagttggtgataaatatctttcatgttttaaagttttttttgaataatttagaatgttgaaaataatctcttgcataagtatatgcatgtaactaattgtttgaatcctatttttattataaatta

SEQ ID NO: 260977 - DNA, 773 bp, Cannabis indica
tacattacattgaatctccaaacaaggaagaagaaatcaaaaccccagaattggaaaaatcgaaaaaagggagtaaaagaagagaaactaaatcgaggcaatattgaaaagaataaacgaaagagaagaagaagtagtacctgaatgacattgacaataaggccagagacgagaaagagcaatcccaatggcacgatgacggctgcggcagcaatcgccatggccggccagtgatactagaaactataaatgagattatacccagaaaaaaatgaaggatttgaatacacaaataaattgaatgaattaaggtttttgaagttttagagtgtggaaagggatgaagtgcgtgtggagtttgacagcgagagatgagttggagaaattgtatgaatgagagagagagagagagaagaagagaagtatgtcagtagagagagagagagattggtctgtgttggggaatgggttggggttcctcttctttcagtctccagatttaaccccgctttaaacgccgtttctcttttcaatgaaaattgagtaattttcttctttttatttcaataaaatcatctccaatgataaatattaaatttagtcttaaatcaacacaaaaataataaaattttaacattaaattttttttaaactaattaataattttttcttctaaattttgacatatagtaaatcgtgtcctttgaacttttttggctgttaaaaatcctcccgaactattgagattgttaaatttaaggacttttgtctaa

SEQ ID NO: 260978 - DNA, 1856 bp, Cannabis indica
aagactatattattatctaagaattatatattcagagatactgttgtaagagctataagaaaaggaattttcttctttgttcttaagtcaatacaaataacgaggattaggctattaccaaactgctcggggctgaccctttataaaattcacgtgtcttattattgttttattatatatttgttactacatatcgttttatcgcttataaaatagactcattgtcgttggctaaaagcgaagtcaacaaatttaaataaaattagaattttttttttttgtattttaaaggattaattaaaaagttttgttttataacattatatgtatgatatatattgttataaattaatgttatcctcgttttcgacagtggacacgtggaatccaaatcagcattcaaggcccatcagtgggtccctcaatgaaggtaaagtgggccaagctcatttagacaagtccttccaggaatgtatcccagcgcagtaaccatagagccttccactattggcgaagtggtcccaaaagttcgatactatgagaccggaagagtgagacaacgtgttctcggaagactcttctagttttccttttttattcctgcaacaaataaggaaataattgatgtccagattttgacagagcatcgtaccagattaaatgtggaaacttcttaaaatgaatatcaagcaattaattcacagtttattgtccacaatcaaagcacatggtgttgactaaatcaagccaaatctgatctacctagttaataaatcctctccttcgtgggctagacttcacaagacagcccaagtgtgttattcattgtaaactctccaattgagagaaaagggaaagtaaatgttattctaaaactacattaaatacccatcaaatcctataaattaagggttgagttctcttgcaacacttgctcaggaaaatttgaggacatatattctttttattcctaaaggcttttcaacctaagaactactgaataacactgactcgtggactaaggctaattaacgctccaaccacgtaaaaaactatttgtctctttttactttctctcttttaattattttatttccttagttctaattatttaattagtttttaaaaatttcgataaatattttggtgctttcattgagagctgaaggaagcagtgagaccacttataaattatattcaagtaatcatggccctcacccgaacaaagtctggtcctcgttttactgatcctaacaccaaagcaggggactccaatgatctacatgaggtgagtagacatcacaaaggttgccaacataaagatcaaaattgagatgataccatcatcaaagatgcaaagtcttggtaaaacaatgaataatttatagcgtatctatagaggatctttgattatttaaattaaaacaatgaataatttatagtgtatctattcttgacgaatagagcgttctatgtaatcagaagtgcgattctaaatctatagcggagtcaggaagaattaataagatagagaatttacttggataatattattaggagcttgattatgtaggcccatgtttcccgcactaactgagataatattattttgttgtctcaattaattaattttaattaatcaattagaattttaaataagactatgtcttgtttatgaattttcactaaacaagggtttatttgagaagaaaagagattttagggtttgtttattaattaagagacttttaaatgtctaattaataaataaattaaatgatatttttatttgataattattaaatagataaaattgacatttataaagatagaggcatttgagaaaagaaagataa

SEQ ID NO: 260979 - DNA, 671 bp, Cannabis indica
aagattaccaacaatggtaaagttttacaacataaaagcagaaaatggagtgagcgataaatgttttactcaatttttagctgcttttaaagatatcttaccatttgccaactgctttccggaatctacttatgaagtgaaaaaaacgttaaattctataggattgaagtatgaaaaaattcatgcatgtccgaacgattgcattttatatcgtaaggaatatgcagacatgaattattgcccgacttgcggtttatcccgccataaagtaaacaagagtaaggagaataggaaacttatcccccaaaaagtgatgtggtacatgcctttgattccgcgactgaaacgattatatcgtagtgcagaacattctgaaaatttgatttggcatgagaccaagagagtgaaagatggaaaacttagacatcctgcagattcccaagcttggaaaaaagtaaactacataaatcctgaattcaaatctgaaccaagacacattcgtctcggtctgtctgcggatggagtaaatccacatagatctctaagtagtcgtcatagttcatggcctgtcttcctagttatgtacaatcttcctccctggttagtgatgaagaggaaatttaacatgctttctttaatgatatcaggcccgcaacaacctggacataata

SEQ ID NO: 260980 - DNA, 682 bp, Cannabis indica
cgaagccaagaaatcttgctaatctgctgaatgtagctcgtgtactgtttattggcagcaacatagaactcctttgctgtattttcagcagcttgaagagttctgtcagctggattcaaagacaacaaagattgagcttcattgtacttgtttttggcatcattgaatgtcaaggtaatactaccaatctcagcattgttaaatcttttcaggcagtgcttcagacgattaagcttgcccattattcttgaaagaccctctcctttaaccggcttgttccaattaagaagcacctcctctttgaaccgactatgatccaaccaatggttaaaaaacctaaaaggttttatgcccaccttccttatttccaagttcttgattaaacaaaaacaatgatcagagtaagtttcccattgaaataaagcctctgttgaaggaaacaaagaaacccaactatcatttttgaaggctctatcaagcttagaatgaattctaataccgggatcatgtttgttggaccacgtaaactcagccccagagcttttcataggagtgacctggcctatagatagccaagtttgagcatcattaatctcattgcgcttcaccaatctgccacctgatctgtccccaaaatgaaacattgcattaaaatcacccattatgagccaagggtgattta

SEQ ID NO: 260981 - DNA, 551 bp, Cannabis indica
tgatcatcttttctttaagtgtcttttctctcatgaatgcctatattagctgtgttaggatttttttacccttttgccctacaccaacaagacctttttaatatcagtatcaaggtcaaaatcgacctttccaagtctaacttaagcttttagacttaaacggcaccgtatgaccaacacgacactcaatcctgtgtcgtttgatcatcagagttttaaatactctgagaagggtctagaaaccctaacactcaatcactcagcctcacaaactcacaaatcgaaaccctagcagagcaagttctctttgagaacttgctcgattccaaacccagaaaacccagaaaacccagattcaaacacacacacacatagattttaggtttaaacaaatgaaaaacaagtaataggaaagaaatcaccagatttgtttcagagttcaccccaaaaattagggctacgtctctgtcaagctcgtctcagagattagcttgatatccactatgatcaaaggcaaaatacagacttttggagcttcctgtcacaagatc

SEQ ID NO: 260982 - DNA, 539 bp, Cannabis indica
tttccgaggtttataatgtaaacctcatcgtttatgcgcttaaagacataacactccatttgacaatcgcagttcttggtgacaaggtgaacttcagcaatcaacatcatttgaatatcagcttctatctgagagagttgactcgacggagctgtggatctcattgaaagatgtctggagctgattagtgaaggtaccatgagcgcgccttcctataacgagatggatgcctcgctattagttgtttggattcactcgactattgtacttagtttgtataatgtgtattctacgctaagtgccttaacagtcaacatgtctcgtctatgtctcttcatgcgtagcgaggttgatgcctcaccttgcactactggtgtcgtatggtttctcgttaatgtacgaggcaacagtttgtatatttttatctcgcgtaagacctaacaattagcaagttgtaaacatactttggcagttttgcatttaatgagttattccattttcaaatataaatatcattatatttgttggttcgtattctc

SEQ ID NO: 260983 - DNA, 705 bp, Cannabis indica
ttcatggggctggggggggcttgataagggccgcctcctcgcccataataaaattttgagaactttcaattggtacatcaaccaggttcagcgtgtcaataagatttctctgtgcattgttttcacaatcagcattgttattggtgtttcgattcttcttggcaattgttgcctttgaccgagatcccttcctacgccttttgtcattttttgtggatgaagaggatggtccggaacccatcttgaacgtggagtttggggctggtgagaattcggccatagggggtatctcttgagaaaaatccatagtgttttcagccgtatgttgcacatatggaattaaggtaagacttgctttcctttttcttggttgagggcattgatggattaaatctgaaacatctattgggtcatgaaaaagggtaggggtaggctcaaatttatcaataggtgcagggcccattagttcttctgctagaccaatctcatcagcatatatgggccaagggaaatgagtgggctcagggtgtttatgaggttgtctagattggcataactcaacatgggccttttccaccatctggtcataagtgggcccaatattggccataatggtggtaaggatcccattatcagctgggttaggtggaggccttgaggaaaatttatttaaaaatatcaatatcagatggtgtactattatta

SEQ ID NO: 260984 - DNA, 1301 bp, Cannabis indica
taaaatcaaatcaaacattggctggacatcatagaggatccaaaagagaggaaaaagctcaaacaaatacagtttcataccgtgattatatcagagataccacgaacaccttgtcgaagaatatcatctgccaggttaaatgcttctgttactggggtagactgagaaactgctgtcaataacttgtcatttggaatgactatcagtgtatcgacattctctcttaaagcagcaattccttcttgtgcttgaactgccctcctccgcccctcaaatgaaaaaggagttgtaacaatacccacggtcaatattcccatcgactttgcaaccccagcaattacaggagcaccaccagtgccggtacctccacccattccagcctgcagagcacacaaacaaggtgatttactgacaaaacaaactcagaaattcattcctacagcataatcaccaaacgcggtctaaactgagaacttagaacgtattagaactgaacttactgtaacaaagaccatgtctgatccatgaagtgcttcctctattgatgttttgctttctttggcagcattcatgcctatctccgggtttccaccagcaccaagacccctagtaagctcctgaccaatttgtagacggttctcaggatagacaggagacattctcatggcttgaatatctgtgttaacaatccagaactccacacccttcattgcactctctatcatgcgatttacagcattcgacccgccaccaccaacaccaataaccttgatctttgcttcattgtaactagtcgtactcgatgtgtctgctaaactctcagtaacacttccactggaactatcttttcttggattgttggaagtgttgttaccttccctaagcattgaaatttcagggtgtagattcagaaaagggtctttattctgatatgaattaacattgtgagacttggaagaacacttgatttgaggcaaatgtgatttttggcctatacccaaatatccattcttatcatcatacagtttcccactgaaacttcttccaaaatggttctctgcttgaactctcctctaagtacagtaagaacccctgctgggtttcgagcatccgaaagggtaacataggctgaagtatatgtcgccatcttaaagtggcaaaactcggatctaagagagaaaagggaagataataaatgcagcaaatttaaacccaaaagtgtatattctaccacaaatctatcctccaaaacctgttaatcaatgccagacagcaaacgacaattagtaaaaacgacgtat

SEQ ID NO: 260985 - DNA, 548 bp, Cannabis indica
cattttcatactcattcccattccactagcaataatatttaaccattcatcatagcataacaaaagtgaaactcaatatagattctttcaaccactagatattcttaatagttctggtccttacaatcttacatattaaaaaaatgaaaataacactgcactcggaagtagaaacacaagaaatttgtctggtacatgtaacataaaatactatcaaatcttcttatataatgtatagattcagtaaaagtgagtacacacacaatcctcatcagatgagggatagaccttgacctatcaactcatcagcaagaattctgttagcagcttcagatggatggacactgtcaaaaaatacatactgagtagcatttgaacaagttcctactgagtgaggattgcacaaagctgaggttgtctctagagtcccagttccacagcagcctcttgctgcttcagcaaagcctataacaataaattcagatcagagacattaaataattgtatgcagtatgggaaaattgaaaagaagaaagggtttgattgtg

SEQ ID NO: 260986 - DNA, 697 bp, Cannabis indica
tttttctatatctcttttttaaaactgaataattatttttgtatataatgtattagttataaacacctacttgtcttttcacctcgcaaaactcttcaaagaacgaagagtattcctgtatttaataataatgactgctctaacttcatcagtttatagttctaaattattcgagcactaaattattccaaaataagttgattgtatcatgaattttaattacttttgtcattctataaaaagttaaaagttttaattgtatttttagacatccttataactgcacaaaattggtaaggtattacattttattctttttttttttttgtgtttaaaagtgataagaaagatagatacatctttcctataatagtttcagtcaaataatgttcatcacatgttttgaaattgagattaacttactatatgagtatgaatatattaagattagcttatatacacatggtatacttatcaagtcgttcaaataataattcaaaattagttaccaaattctaaaataaaaaatcctctgaaacttaaataaaactaatatttacgtgactcgacactaccatattcaatttatcaacgtaaaatagataactaaattatatgcgaactcgactagaatgaaacgtgtaaaatataaaaattacactattgtctctgtcgaagattaaaatctacccatgag

SEQ ID NO: 260987 - DNA, 642 bp, Cannabis indica
tatttaaacataacacttctcatatataccattaagttttcctttaatataattctagtactcacattcttaatatcctctctctctctctcaagatcaaactccatggctgacttagtggttgttggtgctcttctttctggttttatcaatgtcctctttgataagcttgcttctgaacaagtccttgacttttttcgaggaagaaaactcaatcccgagctgctcgaaaagttgaagactatgttgatatccactaatgtgttgctgaatgatgctgaggagaaacaacttggaaacaacaacgtgaggaattggcttgatgagcttaaacaagtattgtacgaagcaaatcacgtgatggacaaaatcagtactgaagctctgcgacgagagatggagaaggataagctcaaaagcacaacaagtaagtccttgagcttagttaaagttttataatccatttgaaatagctgtgaaatctgaaatagagaggatcattcgtagattgaagttgcttttagatcaaacaaaacaccttggtttacaaaatgttgaccataaaacaactttacatagaccacatgcccctttgttagatgattcacaagtttatggaagagagggtgataaagaggctat

SEQ ID NO: 260988 - DNA, 2181 bp, Cannabis indica
gctccagcaaaataggatagtgattcgaagtagacaatgcacggaagtcctttcccgattgatgttgcttaaagagaaaataggggatattgaaggataccatatctcgagagataaccccaatgtctcacatctgatgtatgcggatgatacttttatttcattaaggcagatttacaagtggtggaacacttgtaggatgtgctacataagtattacttatggaattgaggcaatgtattaaattcagaaatccaaaattctcctttctaataattgtgacatgagtttaggcattgctatctcggattccttaggattcaatagtataagtggcgatgaatcttttttaggcaacccttttttttatcaaaggcaatagatgcaacaattttaacttcatcatcgaggaagttaaaagtagaatggatgggtggagggctaaacttctttctcatgctgctagaacggtcctcattaagaatgttatttcaaatattcctatttatacaatgtttgcttttcttctccttatgaagattacaaatgcacttgatgctttggttagcagttttggtggacagggagtatggatgaaggccaatttctatctttgttgaattggaattctatttgcaagctaaaaggcaataaaggtcttgatatataaatctttcgtgacattaatattttcttaatggcgaaacttggatggtacattgctaaaaaatatgatacactttgggttcatctttttttggccaagtattgccacaaattaagcttttggagatgccctcttcctcgtcatgcttccccagtggtcagagggatatggaaaacccgtgagttcattagtgaaaataatgactggatgataggaaggtactctagtgtggaggcttggttcagtaattgaatttgtgtagatgagagcattttgggccctccgtatcttaatccaggtattgcttctggtttggaagtgggggatttattggataatgatgggactacttggaataattctcagattttgtctctcttttgcccaaatgcggctaagaccattatgacttgcaatattgctgagattcatggtaataatactctggtgtggatgtccaattctaatggtctttttttgctcaaggctgcgtaccatgatatgcataaggagacttttaagaggatgaaatttgttcagtcttttggaaatcatgtcttcatgatagactaaaagtttttctttagaagattattaagaattgttttccttttggctcaagattggggaatttttttggtaatcaagctagtaattgtgttctttatggctctactgagggtgattctgctgcccatttcttctgccattgccctgttactaaatctttggttctcgagcaattggtatgtttgaatcgatgaggtctctctgcactctatagcagaggtgatttagtgtatttttaattcattgttttctctaggtaataatttttaattggatagagaggaatttgctctctttggagctgttctttttcatgatctctaatttttcaagaactcaaactttcacaacaatggacaatggtggctggaagagatgaagaggaagattcacttggactttttacagtcactaaaaagtggttactggcttgcagactaattcgagtggaaggaattttcagttggtgagatggacacttccgaggcctggacgaactcgtgcttatgttgattttgctaatatggaaggcattggagcaataggtgtggttgtcagagatggttttggtggtattcaggctctttttgctgctaagatttcttacctctctattattcatggagagttgatggctgccttcaaaagcctagaaaaagctgatttgttctcggattgtcaatgcctagtttccgctttcaaatcctcttccaactatgaatttgtcttttattttttaaaagtttttggatctgttagcttcctcttatgtgagcactttttgggtgcctagaaccttgaatcaatcggcttatatgtttttgctaaataagatcttgataactatgtatatgggttttttttaatttttgggaggtgagtccccatgtgctcaccaagatctttttagcaaaaaaatttagcagttaacaatcaaaattata

SEQ ID NO: 260989 - DNA, 1055 bp, Cannabis indica
atataagtaataaattgcaaaaaaattgattaataaattataattaattcaattttaaaatataattaatcttaattaaagttttataaggaaataaatgattaaggttactttcaggttagaagttatttattctttatttttatttaaatttctaaattaatacacaaccatttaatagtaatctaatggcttaaaaaaatgtaaccacgatggttacaataaaaatgtaaccattgaaacctcttccatataaaaaaataggagtaattgttattggtattaatagtggttaatacttttagatatctggccgtgtgattagttaatgatataatctaaaatttattatattaaactatataaaattcaatatttaattaaattaatagtgatataaaaatactaagtagtaagtaacactataaccttgaagtatttctcatatataaatagcgcctaagcctctaattatataatgactgaataaaaggaataataagtagtaatgaacagcacaaaaaataacaataaaatatttaggtaaattagaaaaacaaaatacataatttacttgtactcttcatgcatgtgaacacaaatcattgcatatcgatctgccggttcctcatatttccaagttgtcattacttttgtgtgaatttctttagctaccacatattataatattataatcacgagttggtctagtcaacggaatattattattattattacataaaaaaatataattaaaagaagaagaagactctgagatgaaataattctccaacgccatacaagcgctagatcaatttatattaatctgactttcatataaactttctaagcggtgttgaaactatatatagcttgagacacgaagtttctgcgctacaatatacacatgaatgaaattgaaaggttcaatataaatatatataataatagactaatggaaaattttactattgcatgtacacttttaaaagtagtgcacagatgtctttctatcatttgtggtaatttatgaaaaaatttagtctaatttgttt

SEQ ID NO: 260990 - DNA, 1580 bp, Cannabis indica
ttctagctcagaattctcattcagcatattaaatttttaaatttttatgtttaatgtttatgagttttgaagattttgagtaacataattgtgttgctgagatgcaactataagatcattcttaaatgatgtaacttgcataaataaggcttgacaagacttatgaatggccttactggtttatattagacacaaatgacacatagtttttaaattatcttgaatgtattcagctttttaagttttaattattgttttatttttcttaatatgttcgttttgattttttcttgcaggtatggtctaagctttgccataacagtgatgcaatgtaagtgcctattagattggtaatagatttcaagggccttatagaccttgtgcaattaaaaacttactactttcatggtactatcgggtatgttttttgaagttgataaactttcatggtactgcatatggatactacattcctttcttattacctatttttggttcctgataagttaaaagctttttagtttcgagtctaaatatgaagtaagacgtatgaagtatggtggtaggctgaaacttaatgattgtccagtgcaggtatacaattttactcacctatcatgtggcttccatatggcacattctacaattcagaaaaaattaagaagatacagaagagtatatgttttttggcttacaattatttttccaagtatagatattcatacctctgagatatatttttctaggtagagataaatcacgcctctaattttaatgaaacatttggtgccataagctatagaaaaggtggttcttttatcaggaagtcttaggtgcctaaagtttttagattttctttcttttttcacttatgttaattttcaactgtaaggttattaaatatagactaccaacaaagtggcaagccaaaaagcaacatacaaaatagatgcatatttgaaataatgtcatgtcgagcatcaatttgcatatcagtatctgtacaaaattaaatttgacatattgtaaaataaatttcaactttggtgcagattcgatcttagtcacttagtccgagacttagagaaagtacatttggttccaataatgaactttatatataaatatatatatatatatatatattatataaattgattacacaacataatataaagtgggtgagagccatttagattctatgttaagagaagttttgactgcccttgcagttgcaatgatgagtcatgactaaacacttgatgaagcaagtaggcattttcatgcattcttagatgacagaaatacacatgatatcagaaagattgtcaaatctattgcaattgttaatatctattcctagctacttttaaatcctcacttagtatggtcattattatatttattgttggctatggtatgcaggggacatattgggtgtaatgcgagttaagggttgttcattggatcacattcaatggatttggacccaatcgattcaatccaattatttattggatatataattttgtcatccgatctaatcccatcaaattcagtcatccgatccgatctgatcc

SEQ ID NO: 260991 - DNA, 804 bp, Cannabis indica
tgttaaacaatctcaaagaaggattcgatcagaattacttcccaaagtcgaggcagaaattgataagttaagagactgctggtttattcgggaggttcaatatcctacttggcttgcgaacatcgtcattatgatgaagaaaaatgggcaacttcgcatatgcatggattactgagatcttaatcgggcttgcccaaaagacgaattctcactccccatcacgaagttattggtagatgctaccattggttttgatgccttatcattcatggatggattttctaggtacaaccaaataaaaatggcacccgaggacgaagagctcactgcttttcggacaccaaaagacatattttgttatacagttatgtcatttggcctcaagaatgcagggacaacctaccaaagagcaatgaccacaatttttaaagacatgatgcataatactgtcaaatgttatgtcgacgatttagtggtcaaaagaaaagaaaggacaaatcatcttgatgatttaaaacgagtctttgacaagctcaggcaacacaatctcaagatgaatcctttaaaatgtgcatttggggtaacatcgggaaagttcctcgggtttattgtcagacatcgaggaattgaaatcgaccctacaaaaatcaaagcaattttggaaatgcctcccccacgtaatttacgtcaactacgtggactacaaggaagacttgcataaatttgaagattcatctcaaacctgtccagaagatttcaatactttttcgcggttgatgcaaaaaaatgtcccatttatttggg

SEQ ID NO: 260992 - DNA, 534 bp, Cannabis indica
tccattgtctcatcttcactgctacaaaagagacaagtcttatcaattccaggatgatatttaactatcctgtcctttgtcttgagtcggttaagcatggccatccacataacaaagttatgcttcgggaagtttagccgactccaaacaatgctcggccaatgctctttgttttctgtagcaatgagtttgaaataaccttgagttatcacatacttgttgcacatattcttcctttcctctgaatcataaagctcttttactctctctttcaactccacaatctttctccaataccaactatcattacttttggatttgtattcccaccaagattgatcttttatatgcacacaatgtacccattttacccacatattatcttccttttttgcaatttcccaaacatatttaaacatagcagcaatattccattcagttacctgtttaagacccaaacctccagctaattttcctttgcaaacattcctccaagctactgcagcaactcccttgggttggtggctgccactc

SEQ ID NO: 260993 - DNA, 2445 bp, Cannabis indica
tcttatttatttatgttaattgtacttgaaaaatgggggttgacagaacagatctggaactcagagacagaatccatgttgccattgtcacgtatggcatatgagccatcttcgtgtcgtatggtagtgatggaacattcacatatggaaacttattccttggaacctgaggatcgaaaaaggatgttcattttcggtatgggatttgtcggccactgttttgctcaacagctcaagagccaaggatggtaaagattcatatgatctctttgtttgaattgattttactgtgttaatatatttagaaaaagtttccgaatgttggagcttctgaagtggattatcagggatgtgtctggtacttgcacaagcattatgaagaagaagcagcttgcagactggggatttgataatggtatttaccattttgacgcaaatgagccagagtgagtgcatgttcacatttcacttcataagtttatgtgttaatttattgatttgtattgaggatttagtgattaaccaagcaattttagtagatcattgctgttaatccattgtggataaggtaaagtttatgtctgtggttcatatcttcttgatattgtggccttttcatctagtttttgtggtttgattatgtttgtgtttttgcttttactggttcagatggagcatcctagatgttctgaatagtcacacacacctacttgtttcaatccctccttttgcggatattggtgacccggtatgctaatagataacttgtaaataaattgggttgactatgcctttcaatgagctaatttgtcattctctgacaaggtagttgcttcagcatgaagagcttttaaagaaaaaacttatggatggaaatcttcagtggctttgttatttgtcaacaacaagtatgtcttatatttcatctaaggagccatattcacgtgggtcttgttcaagcttataaacttaaatgagtaagaatcatgtttgtaagcttatatttggcaggtatatatggcaattgtggtggtgagtgggtagacgaagagtgagtttatgtaaaccaactactttttcatacgaactgtttttcctttaactgaaatttgatgtctcccatatgaattacgctatgtaagatatcctgcttgcccgacaagtgagttggctaagctgaggctagccgccgagaagagatggttagatcttggccatagtcttgggatcaaatcgcatgtattccggcttggaggtatctatggtcctggtagaaggttgtgatgaatattactctcattatttggtgccttctgctttaaatttgcaattaatttattgtttcagcgtctaaacagtatagataaatataaaacaccacgacattgctttgcaaaatatgtattaacctgttttaaagtgctggctatatagtcttttgaattttcttgccacatcaaggtggtttttcctgagtctttgattcttctctttgatagcgctgttgatacgattatcaaacagaaggacttgtcagcaggtcagagaaggagaacgcgtaagttatacacatcaagagttcatgtagaggacatttgtcaagctcttagggccattactttagcctgtttccctgggtaggttttttagcctttttaccatgctagatgctacaattagtccatttttcttcttatacgtttccttctagtgttacaaaagtaaactacagattgtcaaaacattaatattcatgttgaaaactttccgatatgtttagatgtatccctctgcatttacatttttctttccggtgttttcatcttttttactttcattcatatccatttcttttcttttgttctttccattgacacaggaaagtgcacaacatcgttgatgatgacccagctgccagagaagaagtatttgcatatgcaaagtacttgattgagaagaaatggcctggtcagatcaaatggtctgctgagcaagaagaaggtttagtcactgttaagaaagaaagtttatttggggagaagcgagtttccaatgctcgtatgaagaaggaactcggagtaaagcttctctatccaagttacaggtctggattgcagagtattattgaccaaatggagaaccctttttaacaaagtttaagataatgctgaaatatgtaaatttgtgttaccctgcctatttctaattctgttctgtctattaattagttgtaactatcttctctatcagatattataaatacgaccagtcttagcttaagcttattagctaagctcatttcattcttcactatttcatctttcttgttttctttcaaagctttcttagcctccgcaaattagattatgtttttttggttaaaaagcacaattttgttcagtcaaccatgagatgcagcatacttcatcaaaaaaaaaaaaaaaa

SEQ ID NO: 260994 - DNA, 757 bp, Cannabis indica
gaaagtgatttttgttgtttttaaaattttgatttctaattataaaattgaaaaataaaaacagttttatagaacatgtttttaaaaaatattttcacttttctacttttaaaaattaaaaaagtagttaccaaacgccaccttaattaataaaaacacgaaatttggctgtggtagtggctgtttgagtttccagaatacgtttcctccgtctacgtcgaactgtcggagcataggagtgagtggaaaatgagagtggggtggagatggctgggaaccatatgggtgtattggatgattttagggcttcatctcctcgccattctctttttcaccaaaggatttcttctcactcgaactgagcttccctattacagtaattgctctgacgttacccaatccccttgctttttcaactctcacattgatgatgctaatctcaatcaaacgcatcaccattgttggaccaagcctgctgttacccgagtaatcattattgttctcgatgccctcaggttactccctattccgttcttcttcttctttattttttaattttttttatatatatatatatatttatatataaatgtatgtttcaatctcagatttgattttgttgctccgagtaccttctttccaggttagcatgtcgaaataaacgattaggaatagttaattatgttccacaaaactctttacatacagacgataatttttaattggtgtcagactcgaaaccatggatggacaaatt

SEQ ID NO: 260995 - DNA, 745 bp, Cannabis indica
ggagggcttggattttttccagattggcttcaattcctcgagcattgacgatgaagcctagaaactttcccgagctgactccgaaggagcattttaggggattcagtttcatgttgtattttctgaggactttgaaacattcgtccaggtcgtctatgtgccccccagcctttctggatttgacgagcatatcatccacgtacacttccatgtttctgccgatctgatctttaaacattttgttgaccagtctttgatatgtagctccggcgtttttaagaccgaatggcatgactttgtagcagtagagacccatatctgtctggaaacttgtatgttcttggtctggtggatgcatcttgatttgattgtagcccgaataagcatccatgaagcttaatatttcgtgcccggctgttgcatcgacgagctgatcgattcttggaagtgggaaacagtctttagggcacgctttgttgaggtctgtaaagtcaatacagactcgccatttcttgttcggcttaggcacgagtacgggattcgcgacccaagccgggtagaaagcttcaataatgaaattgttgttgcgcagcttttcaacttcgtctttcagggctactgctcgttctttatccagcagtcttcgtttttgctgaactggccgtatattaggatcgatattcaggacgtgcgaaataatagaaggatcgattccgaccatattcgcatgtgaccaggcaaaaac

SEQ ID NO: 260996 - DNA, 2569 bp, Cannabis indica
acgtgcctcgcacgtagcttttctctagtaattatatatgtatatacacatcatgtacttatttgattcataaattcttttgttaagttatttaccaaaattttgagaaactaaatataattattctaaagctaaagaaatagatcaaaataaagaataggacaagttttttttacataaattattcattctatataacacttaagttgctaaaattattgtaagagctttagagagatcaagaacttttcagtttttctctcacaagtcaatacaacaaaaatgagagtagactattaccaccattacgagattgaacctctatagtaaattcgtgttcttattgcttaattattattatttattatttctaaatcgctttaattgactcattatcgttggctaaaagtaaagtcaatatttttgtatttttattgagagtaaaagaacacaattattgttttgaatcttttcagggcacacaaagatggttgtgactataaggaggggtaatcaaaacgatacgactgatccgatggtcatagatcctaatgtgcaaactcttggaaattgaagagatctagtcagatggatcatgaccttactattcctcgacctcctataagtcctgaatcaacaaggctatgagtgacaacccctctggccgagttcactctaggcatgcaagaaattgggactaccagtactcatgctgagcaaattgcccctggtactgaaaaatccatttgtttgaaatcctcaaaggataattggtgattacaccaaattgtagaatttgcgagccactctagagcagatgcaagagcataccaacactctctaccatgatcatcaagatacctgtgcagctataaatttttctttcgaggagcaaaaatgttgattccaagaggatagatcagcagatggaaatcatgagagcccaaaaagaggcaattgataatcgttcaaggcaggctaccgtgctgattaggcgggcctatcaaataactacacaaaaattagtggtagacactttgattatacaagattcgagtcaaaggacaaatgtatacatcctcattggacctcaatatggaccaaaagaacgttcaactagaaacactcagcaaatccaaggaaaccacccaatccaaggtcatagagtcaaattgtgggccacatggtagacgagcaagtttttccaggtcattacttgggagggaatggtcagtatatcatccgtcctcaaatggatataccgaatcaaccaatttctaataacatccaaaaaagaaagtctccaagtgaattagtctttaaccaattaggcatcgtacacaaatagttattttcgactaaagatgtactaatttgaaatggagtgaccagggatgtcacctctcagcttgaaattcttgacattggtgagaagtgttgaaaacatgtattttaggaagccactgttcgcatatgatgccacataggttgtggcattattctccaacatcccacgcttaattacactactcaattcttgagtaaagtgtatccgtctgcgttgtgagtcaatttcggacttgataacttcataattgaactatggctatgagacacacgtagatccatcttgaaaatatgttttcaatgaaagtttaaccaagtcatttagataaaaattgagagagttatgtccattagactggagagtagtttgtgttgttttgctccagttgtgagcactaacacatccaaatggaagctctcagccgtgcatgttctcagacccctcggggtgtgttttgactaaggtgagtcatatcttgagggtctcgggaccccaaaatctcatttcgacatctaaaaccctaatgggagaccactatcactagtcagggccgaaaagtgacaatggtcggtcatggcttatgggaagccttggacagtatttcttacttatttcagtcatatggatgctagaaaataattttcgtcacattggtttttggtcaattggttaagagagcaccgccacaatttttaccaaaaaggtggcagtggttgcataagagggtaattgacccttgagtgacttttctcacttgtatttaatacatggatgttggaaatacactttgaacaaataaactctccattctatgtggtggccaaccactaccactatttgtgccaaaaatgtggcagtggttggccaagtggtttctataccacttggtggcttttctattggttttgatatgttactgataaaataaatacttgtggcaaaaatcttatccccattcaatgtggcctaccactgccactctttgtgccacaaagatggcagtggtcggctaggcttgatcattagtgagaaataatttctttcacttatgttgcactccttggcattgagaaaacatattttgacaagtttcctttggtacttaatgagtggcgagcactgccatctccttatgaagtgttccccatgtggcattgctctccaaaaagaaggagaaggagaacactgccatcttcatgtggcagtggttgcacaggccat

SEQ ID NO: 260997 - DNA, 601 bp, Cannabis indica
ggagggggagatcctcctctatccaatggatagaatcttagtgtggaacgtccagggaatcaacaaccagcataagcaacacatggttcgacaatttattaataagaataaggttggtttggttggtctcctcgagacgagagtcaagtctcctaggttaggagacttgtacctaaatgtctttcaaggttggtgcttcactacaaacatatcatggcacaaagggggcagaattgttattgtgtggaatccaagtagctataatgtaagtattataaagtgttcaagtcaactaatgcatgtgggggttgaaacaattgatggaaactataagtttgtcttaagtgttgtgtatgcttataatgacgaagagggaaggaaagagctgtggaaagagctaacgcaggttgctcaaaatgattcctagttagtcatgggggattttaatgatattctagccaaggaagaaagaatagggaatagagtcgaatatcgtccttcccaggactttattgactgtgtttccaattgccttctggaggatgtcaagtcttgtggcaacttttacacttggagcaataagcagcaaggagatgataga

SEQ ID NO: 260998 - DNA, 1418 bp, Cannabis indica
acctagtcatgcctttcggactgaagaacgctggagcgacctaccaaagaatggtcaaccggatgttcaaaggcctcttggggcgaaacatggaggtatacgtggacgatatgctcgtcaagtccaaagcatgcaatagccatgcggacgacttagaggagtgttttgaggtagtccggagatacggcatgaagctcaacccaaagaaatgcacctttggggtcaagtcagggaagttcctgggcttcatcgtcagccagagggggattgaggcaaacccagagaaaatccaagctctcctgagcatgccatcccccaaaaagcataaagatgtgcagagcctaaccggaaaggttgctgccctgagccgtttcatctcacggtctacagacaagtgcatccccttcttcaacatactgaagaagtgtcaaaagtttgagtggtcggacgagtgcgaggaggcattcaaaaagctgaaagaacatatggccaagcctcctatcctatcaaaacctgttctcggagaggacctatttctatatttggctgtctccgagcacgcggtcagcgctgccctagtccgtgtactatgttagcaaacgcatgataggagcggaaacgaggtaccccatcatcgagaaactagttttctgcctcctgatggcctcaagaaaattaaggccatatttccaagcacatccgatcaaggtactgaccaaccacccgctccggcaagtcctccaaaaacctgaagcatccggaaggctcctcaagtgggcaatggagttaagtcagttcgacttacactacgttccccgaatctccataaaaggccaagccttggcagacttcattaccgaatgcaatgaagccgaggcaaccgcaaatgcgccaacaccatcggtccccacatggagagtgtttgtggacggagcctccaatgaaaatggatccggagcaggggtggcaatgatatccccgaccggactgcgactccaggcagccctacggttcgacttctcagcttcaaacaatgaggccgaatacgaggccttgatagcagggctgaggctagcgaaagccgtaggggccaaaagagtggaagtctacagtgattcccagctggtcgtaaatcagatatcgggagagtaccaaacacgcggcgagcgaatggccgcgtatgtaacaatagtccgggagctgctccacgagttcacggactacaaagtagaaagaatcccccgggaaaagaacgctcacgcggactgtctggctaagttagcttcagatagtgaaatcgaagggctgggggtagtaccagtggaacgcttggcagagccaagcatcaaagtaaaagaggccataacaacggttgggcaagaacccagctggatggtccccatcatagaatacataac

SEQ ID NO: 260999 - DNA, 529 bp, Cannabis indica
atccagaactattcaggttagattttgaggacgaaattcttttaacggagggataattgtaatgattgtatttatattatggattagtaaaggcaattagcactaattattgatatttttataattattggtgaatttatttaactgtgggtcctattattaaaattgagcattagagttataatttctcaattccgaagattttattaaactgtacacatattatttgtattatgctatttttataatttttactcggcgacaacggaaaatgcgatggatgtctattttaatcacatgggtaagtctagaacctttttcttagtgggatatatgttggagaaaaatagaatatcgagtttgagcgggattatggtttttgaacattttacccctagactttacattgcttaagtttaagcttaaaatggtattttagtcattttaaatagtggattaggtggcttttattagagcatgacaactgccctttatttatgctgaatattgacttatgttatgcattttt

SEQ ID NO: 261000 - DNA, 540 bp, Cannabis indica
tagtgtggaagattgtgaagaatccagattcaagagaaggacattcgggctcagatcttggcgatactctgggacagaaaggatacaagggttagaaatctgagtggaaggagatattatattctgctacaaccactgtaaggtttctcatactttatatgtgttactaaatctaagatcctggtgaaatatttccaataatttccaactcactatctttcagtattctatatcaccaagacatggagcatccaagtccaaggccgaggagctaaaaatgcatgaaacaacatcacagaaattaacttgggcccctagaattttacctatcgcccaagttgacaacccaactagggtttcagtttgtgggactgtcttagtgaaaatggttcaaacattgtattgggacatgaactagacacgtcacgaacatattttaggcatcagaatcaaatttggagaactttcgtttttgagcatccggagcaacaggtgaccttgacatattaataacataggtcacttccaataagcataaaa

SEQ ID NO: 261001 - DNA, 1299 bp, Cannabis indica
agctgtgtaaaaacctcatttatttggattgatttgtaatcaaatcccatgattttagggataatagccataaatgtattttggttagctttgtaatttactaccactatgaaattataaatagtgatagataagatcaagaaaggggacgaaaaaagaaaaaacagactcaaaatctgaataagattgactcgtggactatgcagaattttaactgcaaaactacgtaaaaatccagtgttccttattttttctatagtttttctgtgtgaatcatatttgtgaggctcaaatttggttaacgaaaatttacgttattctaataagtccagaacatatacatatatatatattttcatgattatagtgtcgtcagcacagtagaatataatcatgattatatgtttaaaagtttaattcccatgatttatcagctcactggatttagactgacttgtaatcagcgataaggtatacttacaccttggataagtgttatgtcctttccaaggtattgataaagtttaccagtattagatgtatggagtatacatcggaagggatcgatattgatcttggataagatatcataaactaatcgttatatctttctaagtcaatatcaatggttgatcttaggtctatggatcttaatcctgatatggttaggttcagcttagttgtattatttatgttcttcaagttgtttgtggatgctaacaaattgttttggagattatttacatcttgggaacatggtagttcaattgagtgggagcgctgatcatagatatagaatctatagcttccataagtatttagaagtgaaacgatgatttcttttgagcttggttgaatagttttaaatgattgatgcctcatttcagtaattttattagtttactaaagtatcatttataggtagctaagtgttttaagaataaaatactttgaagggtagaacggtaaatttatccctattcagtgtagatcacctatagaggatctttgactattaagattgtaacaatggataatcataacgtatctatatcatggtacatatagagcgttctataaaaacgaaaaggccaatcaaatccaaaatctatagtggcgcaaggcagaattaataagttaaagaatttacttggtgaaattccaaaatctacttattgaaaagctcggttatatatgtccatagttccctcattagttgagataatactgcttgcagactcagtcaattgattttagttaatcaattataattctaaaattagactatgtattatttat

SEQ ID NO: 261002 - DNA, 498 bp, Cannabis indica
ttctttttgtataaagtttctacgggtgcaaaaattgatttggttgacatgatttgggagcaaattgtctctcttcgaaagggcaaaaaacctaggcttaatcttatttttccttgatttgtaagattttttctatttaagaggagttgattcttgagaatgaatctattgaaatgcctgttgttggtaccacttttaaagtcccaaaaaaacctcctcaaggaaaatttgctaagaaaaaggctcgatctgcttcccctggtgctactaatgaacctactgtagcatctccctccacttctgctccaacagaattggtagaattcaacatgcgtttgggaagaatggagacaagtcaagccatacttctcgggatgatagacaacatcatgaaatttttctgatccaatgatgatgcttaagtggtccttttttatctttatgatttttatctatgtttttgttgaactattatgactttttctaattttggttgtt

SEQ ID NO: 261003 - DNA, 736 bp, Cannabis indica
tgcggttttgaatttaataattacagttcaaaccatactacaatatatattataaaattactaatttttacaatatgatttttttatagaagaacaaatatatgtgtatattacactatttttcagaaataattcaatataatgacttaattattaatatatatattataataccaaaattttaataaaaattttcttattgttaaaactttatttgattgatttttgagttttcttttgaatgataataatgatagtataaacttttcaagccgcattatatttttgcagtgtgttttttacagttttaagatctcgagatacagttgcagtttgagaaactataaaaactacatatgtagtttggttttaaaaaaattacaattggcatcacgaacacccacccgtaaagttactacaaaagtttctaattataatatatagtagaacctcttattacacttaccaatcaaattatattcaaattatttttttataataaattaaaggttagtaatattcttaaataaagattctaatgtatattttatcgaaatagaaaatataaaaggtacaaaaagtagaaagatatactcccaaatcctacaaaagcatcttttaacacatttcctcaagctcggggataaagagtttactagaacaaactttaaaaattccctattatatatataaagagagaaatattaaaatgtagcactgtaacattttctttagt

SEQ ID NO: 261004 - DNA, 545 bp, Cannabis indica
aatattcttaaatagagattctaatgtttgtgtagtataatactttttttatatatatatatacatgtattttccaaaattatatatattatataagtattcaatttttcaaattattaatcttgtatataatattagataattaaatttgtaaatagctgcaaacctttccaaaatttcattccatttcactttcaaaatggaattcacattgttttctttttcttcatttattttatttgtttttacaattctcaccgtgtctcctaaggtccttcacagaccacttcaacccatggccatccaaacaactttgaagccactgccacaatggcacaccttataaagaaagacccgacaacaaggtcatcattgcaaagaaagagcccacaaaaaaagcatagaaaaaaattgcaaattttatgagattttatattatcaatgcaaaaatatgaaaaaaaaaaaaaaaaatgttattttatggaaaaatttaatataaagttgaaaatatgagaaaaaaaaaaaaaaaaaaaacaaaaaaaaaa

SEQ ID NO: 261005 - DNA, 913 bp, Cannabis indica
aaaaccaaacttaaaacagttaaggttcttagagtcttcagcaaatttagccacaacaaccatgcatttccaaatagtagccacaaaatctttcaccgaacgttcatccaccgtcataggagccacctttttctcgtacagacaaagggtagttagaattttgatagaggtatcacaaggggtcaaagatatagtggcatcattaaagggaacacacctactcttgttgcacacgttggaggcattaactaactccatcaccaaagacaacaaacaaacaaacaaaaccaccaaccacctaaacaaccactaactaattcactgcacgagaaaaaaaatagaacaaaagcaaccttaccaacaaatcatagcttcaagacccacaaggaagataataaagcagtgggaggaaaaggtaaccaacaaaagggaggggatagaaataaaaggaaagaaaagctcgagaatgccaacacaataaacaaaaggtcaaccaaagccctaaaacaaaaggaacaaataagccaacataggagagaaaacaaggcaaagacaggaaaagaaaaacaaacgagacacacaagaaaaaggaaggcacaacacacaaatagaaagaaaagaaagggatcacgaaaaaaaaaaatcagaggacaaataaaaaaaacagaaaaagaaaaccaaaaaagggctaagataggggatgagaatagtagaagaccattcttcattttttttaaggtgacatagtgacggaagtaatagaaatgtaacttaaagtatttaatctataaaaaaatgaagtagtatttaagtgtataaaactaaaaacttatagtatttatgttgtaaatattcctaagagagagtagaaaaagaaaaaccctgaagagggcaccctccaaactcgcaaaaa

SEQ ID NO: 261006 - DNA, 725 bp, Cannabis indica
atataaaatagataatttatattttgatattaaaaattttatttattatattgataatttgtgataaattatatttataaaaattaaatatgcaataccattaatcaacatgtattttagcataagtatagtcaacacgcaaatatgatggttgacatgagaacaccgagtcagattagggttgagatttcttaacaagaaatatataggtcgagttagggttgaccaattaaatatgttaacgtgcataacacgagcacgaatatgatacgataacataaattttcactcctaactcaaataccacttgaattatgagagttagtaaaatatgagattttcgttaaataattagtaattttatcctctaaattataataactataatattttatctcccaaatttttactaaaaccaacttatgcccccacgatcttattagtagaggtgttcgcggtgcgggtggtgcagtttttgactattttttcaaacaacccgcacatgcggttttttcaatttcccaaaccgcactcacaccgcgaaaattgcaccgcaaaaaatggtgcggtgcagttttggtggtttttgcaattttgactatcaccaataattaaactatcacaaatacaacaaagcttgagtaacacttgtcaaaaataccataagacttatatgaaaaaaaaaaaaataaagtttcaatgatacaataattagtgggctttgg

SEQ ID NO: 261007 - DNA, 1732 bp, Cannabis indica
ataaaatagattacattgaaatgagttttatttacggcataaaacctaacatttacatattatatgatctactattgggaaagcattaacaaccaatggttctaaactaagaataacctggtgtttgatgatagaacccacaaaagacatttattgtgtaggacaggtgtaggaagcctattatgaaaatagatagcagtcctaaaagcttcatcccaaaattgtaaagtcatagaggtttaggcatgcaaagtgaggttattttcaataatgttcctatatgtttcctctgctaggccatttttctcatgtgtagttgggcaaggatgtttatggattactcccaattggttaaggtagctagtaaaagacatgtattcacccctcccccaatctgttagcaaaacttttagtttaattcaacgtctactttgaacatttgaaaaacctttaaggcttcaaacttttggttcaacaaataaattcatgtaaatctagagtatataatacttatatccattgtaggaaaaatgtgtgggaaggtccctatagatcataaacaactagttgtaatggaccagtgtactcagtggcagaggccttggcaaaaggaaatttgtatatttttctaaggcagcaaacattgtgaaaatttttccttttattaataggaatattacatctagtaccttttgaacaatattatttgaaggatggcctaaacgataacatcaaattcacaaagtgctttattcatacaactagtacattgtgaagagacactagttacattgacactcactagtattgttgagttcaagtagtcatcacctgaaacaatagaaggctttttgaactgagttttgagcttagtggcatcaaaagtatataggttattcttgtgtgtcccacttagtagagtagcatgagtgtcctggttcttaacaaagcaatgaccatcatggaactcaaaataaaccttgttgtctctagcaaaattagatacactaagcaagttctttgtaatatcaggaacatggagtaaattgttaagtattaaaggtcgattagaagtaacaaaagaatgaccaatgtttttaataggtagacatgtctcatctcctacaatcatctgattaggtccattataatctaagttgttgtctatgttggaagcatttgttgtgcaatagcttgttgtactttagtcagggtaccaattggtgtcctagccaatattgttgctaagcacattagcttacatttgaggagtttggattgggtctatttggactactagaagttatacctgcactcgtgaagcttttgtcaaatctataaaagcaatttagtgcagtatagccaatcctaaaacatagttggcattgaggtctattttttaaagtagaaaatctacctcctcttctagagttgacattgcctttattataacctaataattgagagttgaagccctcacctcgggtgttattgccacgataagcacctctagttggctgaggttgagtgttgttgagaaattggtttccaaacctgttgtaaggttgctgagttggtgccctattgtaatttcctcgaccatatttggtgaaattagcttcaacagccgaatcaagttattctgctactactacattagttgtccgcaactgtatactctcagttcttgtattgtggatatgatgaatgtatcatatccacttggaaggcc

SEQ ID NO: 261008 - DNA, 534 bp, Cannabis indica
ctccgatagaaatactgaatcgtttttctaactgatatatcaattaacttggtatgtgattctaaatttaaagacaaacccaagaaaataagcacaaactatatatttaaattaaacggaccataaaacatacattcatgtatactaacagtatcataattaagttattagaacaaaaataaatatatcataaataattgaaaaaaacagacaagtttcaaacatcaagagctgagacaatgggagaggaagtgagggcaggaattttagttggccaaaatggatagacaatagggaagtgttgtaggcgaattccaaaagcatgatagccaggatcatctagaaactgataaaacttttccatcttgtcttccctaatatcatattggtaaacatgaatattgtcaaatagaatgaacaaaacatcaccattggtgggatggaaagccatcacaaccacatacttagacttaaaaccaattcccctcttctcaaactcatgcaccaaactccatgagctggtcttcccatcat

SEQ ID NO: 261009 - DNA, 557 bp, Cannabis indica
aggtgttgacaagtgtttgggcaaaactggaggtgttgacaagagaagagacctaaataatcgtctgtccattgaaactttttttttgccttgcaactcattgaagaatggtaggcacttgtcagttgaattcaagatgaatctgtttagagctgccattcttcctgttaaggcctggacttcctgcgattttgttggtgacggcatttctatcaaagccttaattttctcttgatttgcttcaatgtcactcgcgttgactatgaatcccagaaactttcctgaggagactccaaaggaacacttctttgggttgagtttcatattgtacttttccagtatctcaaagcactttgcgaggtctattgtatgatcttcactttttaccgactttaccaacatatcatcgacgtagacctccatgttccttcctatttgcttttcaaacatttcatttactagtcattattatgttgccccaacattcttcaaaccaaaaggcatgactttataacaataaagtcccatgttgattacaaaacttgtatgttcttgat

SEQ ID NO: 261010 - DNA, 541 bp, Cannabis indica
tccattccatttctattctattcacattcttattcctattcctatattttcattctttccaaccaaacgcctatcatgtgagtcaaaataaaaatttaggcccttattataaaaataaatgatatttttaaaaattattaaaaaatctatgtatattttttaaaatgtatttttttttatttaacgtaagttcaagaaatataacatagatattatattccttaaatcagtattgcttttaaagtaatttgaggacaatatatgcaacatgctaattgcctttagtaattaattaagtacaatggttgatttctctcaataattaagtataatcattataatttatcgaccaatttgtaacaatatctaattctctattatgacttatgactttacaaaaggtaaattcataatcatttttaaggtgaatatatacttgaaccactgtagatttttgtgccgatttcctctttgcctgaaattatattttgtaatgacagggaggtctaacagtttctaatctaatataagtacgcttttc

SEQ ID NO: 261011 - DNA, 3764 bp, Cannabis indica
ctactggccataaaattttggttcacaggtctggcacagttcacattaatactcatataaccctccataatgtgtcatatgtgccaagtttcaacatcaatcttatctccatctctgaatttgttaataataattctaatatcattgtttttcataaaaacacttgtgttattcaggatcctacttgtaatgtggtgattgggacagctgaaaaatatgaaaaaatatacttgctgcaacaagatgcaccagtagctaatgccacttcctttcatcttgataataaaaatgtagatcattggcacaatcactttggtcatccatctatgtacatttccaatcgatctctccatttgccaatcaccactgtcacatttgtcaattggccaaacaaaaccgattaccttttctttccaatcataactttgccaaaaacatatttgacttagtgcacatggatatttggggccctctccacatcacaagtgtagaaggccacaaatactttctcataattgttaatgataaatatcattttacttggatatatatgctgaaaaacatgtttgatgttcaaactgttatacctaatttctaacatggtttgcacttaattttcaaccaacattaagacaattctatcagataatgctaaggagttgaacctacaaaccttttatgcgtccaaaggcatcatacattaccattcatctgtggaaagaccacaacaaaaattggtcgttgaaataaaagaccaacacattataaatgttgcttgagcccttggttttcaatccaatttacctgtagtacattggcccttccttaggaaaactgctacttacctcattaataaaacaccttcacagttgttcaaaggcctcacttcttatgagtccctacacaacactgctgctcactatgagcacttaagaagctttcgctgtttagcctatgggtccacctttttttccaaaagatataaattcacaccacaaagtagagcctcttttttcattggctatccacaaggtatgaatgcttacatgcttatggatattgaaactaaacaagtttacatctctagggatgttgtcttttatgaacaaatctttcctttgttctctgcaacatctccatctagggtcaacaacttgtttccccaaattgtgcttcccacagtcagaccagtgcagcagatcaataggccaatggccaccaatcccatacccaaaccagttctaaatggttctcatatcattccacaaaaccctgttgcacctaacaccattacaccagtaccagtttccactgatacaacaccaacaaaagttattgtacctacatttgcaccccagaaacaacaacttcgtgctgcaccatcaaccactggtcgcaccagtaaaaaaccagcatacctacaagactatgtatgccatactgcctctaccatagatcccattgaacctttcttatcttacataaaactaaattccccatttcaagctgctgttcttgcagcatactcccacattgaaccaaaaaactatgctgaaacttctctctttcagcattgcttacaagccatggacaccgaaacccaagctttagaaaagaataagacttgggttatcaccaaactttctcctggccgcaaagccattggctttaaattggtctacaaaataaaatataaccaacatggggatgttgacaggtttaaggctcgcattgtcgccaaaggtttcaaccaaaggcaaggcatagaattctcgcaaacctatgcccctgttgcaaagttcaatacacttaaaatattcttggcacttacatcaatgtacaattggcatatccaccaattagacattaataatgcctttctccatggggacctccacaaagaggtttacatgaaaatacccctagatacaagggtccaccaaactctgtttacaaactaaactagaacatatatggcctgaaataggccttcagacaatggtacattaaactcggtaccactctcattcaatatggttttcatcaatccaaatctgacaactcattgttcatcaaacgaacaccaacagatttcttagccattcttatttacgtggatgatatcattattgccagcaataatgtttccaacatcacacaacttaacaactcacttgaccaaaaatttaaactaaaagaccttggaaaatttcgtttctttcttagccttgaaattaatcgaactaagggagtcatctctatctcccaacgacctttcaccatacagttactcattgatataggacaaataggtgccaagccagcctccacacctatggaaataaacttgaagctgagtaaagataaaggtgcaacactcacagacccgactgtatatcgcaacctcattagcaaactaatttacctaaccatcacaaggcctgatatcacttacgcaatcatcatcttacctagtttctatcttgtccccgggtgcatcaccttcaagccgcccatagtgtcttacaatatctcaagaagactccaggccaaggcatttttttccttcaaacagcgtccccaacatcactgcctttgcagaaacaagcctctcatctagtgatgttcaactttccttctttgctgatgctgattggggtagcatgaagacacaagcaaattgatttcagggtattgcaccttccttggtaaatccctcatttcattgaaatcaaagaaaaaagttgtatctcgatcctctgctaaagctgaataccgagctatggccaatgctacatctgaactgacttggatctttgccattctcaaagatttgggtgttcctgtttccacaccacctaagatgtactataaaaacacggttgcaatccacataagtgagaatcttgtctaccatgactgcacaaaacatgtggaaatcgattgtcacttcattcgagaaaaggtccaacaaggctccttacaattgatgcatgtctcctctcagaagaatttagccgacatattcataaaggctcttctcccttcccaattcaacaatattgtatccaagatgggtgtcattaacatttacactccatcttgagggaggctattagagttagttaatatagtttagtcggtaagttagttgttaggtgtaaatgtcagttagttaagttagttagtctttcgtcctaactaactgagttgctctatgcctatataaactcagctcatgtattcctgcaatatatcgagtaataaaacaatattcaattccaattgctctgtttttctctcatactcactaacagtcatgaacccaaaattaataaaatacaccctaatggttgattaaccttgatcacatttaaattcataaaatttgcaaataataaaaaaattactaaaccactaaaatcatcatcatcaatatctttaatgaatccttctattgcctcaaatccaccacataaattaaactcatatgaattaatataataaaaactccataaaattaatatcaatccttaccaaataagccttttaacatgtgtggatgagtgatgagctgcaccatggttgactcgtatgtaaatgagggaggaaatataatgacaataaaatagagagggaaaacgaattgatagagactgagcctctaatttttgatctattcaacctcaaggccaaacaatcgactccatgagcaaagaaaaatttgatgctctgttcattcaaacgagagagagagagagaga

SEQ ID NO: 261012 - DNA, 642 bp, Cannabis indica
aatatttcttgagttttattctagcttggaccaccgctactaatctaaatctaaatcgaagatttatatcattttagaatagaatttctggaatatagtcatttgcgtcattcaatttcataggagaaaatagagtgacatcataagcaaatgatttataaaccatttatccaatgatgtactttctaagcaatttcttaatgaaaaagctaagaggaaaaataaaggataattttgattaaaataaaaatctgatgtcccgtttaggcgagagtcaaagttattcttattttataaatttttcattatttcatattgtaaatactagtccaacttcatatttggatgaacaactaaatgttgcatttacaaatacttatctatcgagatctaacattattatgcttgtcaaatggatgtcaatcttttgggatttgtcccattaaaaattacaaactaagttagaccaacaatgaagattcgaaattttatactacaacaataataacagaaaataacatgattcaatataaattcatacacattcagaaattatcaaacatttaacacgtaataaagacatgtaaaaatataaaacaaatacatcttaaataatttttaaggtttctaacaaactgatac

SEQ ID NO: 261013 - DNA, 719 bp, Cannabis indica
caggctacccaagctactcaagaagcccagaattgggaaaataggtttgcagaaatgcaagccagaattgaggaacaagataatgagatccagcgattgagacagcagggtgctcctgcagtgcctgttccagaagttctagtggcacttgcccctgttgtccaggccgaaccagtgttagcggccaatagaattgaacctctgtatgaaaggttctgcaagcaggcacctccagtttttttggaggtctggacgtcatgaaagccgagcaatggctaactgtgatcaccaagatattgaatttcataggcgtcaccgggaatgatagagtggtgtgtgccacatttcagtttcaagaggacgctttggtatggtgggacatggtgtctatgatacacgatgtcaccacgatgacctgggaaaagttcgaggaacttttcaatgagaagtactataatgaggccgttagaagtgacaggagaaaagaatttactcacctgacctagaaagagaacatgagtgtcactaagtacacaacggagtttgatcggttggcgaggttggcctcgggaattgtgccaaccgatttcagtaaaaaggaaaagtatctggatggacttaatgcgaagcttcgtcatgatctgatgattactactgacgacaagaccacctatgctgaaaatggtggaaaaagcactgcgagcttagggtgcagttgg

SEQ ID NO: 261014 - DNA, 550 bp, Cannabis indica
gaaggcccatttgccttatttaaataattgtatttgttatcccaaatttggtactctgacgtcgcatcacgagaatggtgacacgtcgactccacttggagcatctgctcggaacgatatgccgagcaggatgcctcgctggcacatccagaatggaatattcaacgagccgtgcagaatgatcaacactagcaaattcagcttaacgcttcatcaccagctcaatccctacaactcaaggatcaacttacgtggatgtggcatacacacgatcccactatcggtgtatccagcctcaatcccacgatccttgcattcagcattgatcacacaatctttttgtttatgctcattgtaacgagagaggaaactcttacctcctcaagtttccagccctataaatagtgaggaatgttcactggacaaaggaccaaaaaattataggccgataagtatgctaaggctatattattatcaaagacttatatattcagagatactattgtaagagctataagaaaaggaaacttcttccttgttcttaagtcaa

SEQ ID NO: 261015 - DNA, 530 bp, Cannabis indica
ttaatacttatcatgcatgcattgatcgatgcacatatatattaattttacgtgtgattttttttttctaaatttttgttcaatgaaattagtgttgcatatatatattatatacatatatttatttgtactattatatatactgcatttgctttacttggtcaatgatgatgaattcttgtttaatttttgttcaatatactattatatatactgcttaccattttcagcctcaaaaatattggattaatggtcagttcttctttttaattaatacttatcatgcatgcagatgtgcttttttatagtggtgaaatctttaattttttctattaaagagagaaaatatattataattattactttttgtgtttaattattattattatttaaaatacagattagtttcctatatgattataaatgaaaatgaaaaacatgttcttttaaatctgaataaatttaccattaatatgaaatgttctgttattataatatgcattttctagcctaaaacacatagaaaatag

SEQ ID NO: 261016 - DNA, 1627 bp, Cannabis indica
aaagataagagagatgctaaggaaaacaccaacaagtgttactgttattattagtatcatttaatatcgaggtttatattttttgacttaatataaaaataatatagaaaaattgttaatcattctcacacggatatggtgttgcctaataaccaaggaagtgggctcctcacaccctctaaagtcaagtaattatgtgtatatataaatcattttgattctgtgtgtggtgtcaaatagtcaacagctagtaaaaggttttacctttgtttgtagaaagcatagaaaaagaaaagactattaattaattagcaccgttttagtaacactaataattatgattgttgttttaataataatgaagttgaatttgaaatttgcaggaatgtacttttgggagtgtacaagtgttctggtccaggagtaacagcactgcatgggacatcttgggccagagagcttgattttgatacggctcatcgctttttggtcaagagttttgtaaatggcagacattggattgcaccctctgatgcttaattatttcattaattatttaccgtacacaaaaattatattcaattcttttcaattttttcatgtgtaatataatataataacttgtatcatgttatgtatttctggcttgaataaataaataaaacacatatatatatatatggactttctttcttttcatggttttctttcatgccactcactcactcccccaaatcatttgtctctgattaaaattagaattacatgatgatgatgggatgagagaaggagaaaataccaagttgacaaattcttggtcaactaaatttctaaataaaacacttgaaaaagaaaggtgaacaatatatatgcaactctagtttaggtagcgccactttattataaacttgatgtaatgaatcatggatgctccggttgggtttgaccgacagaaaccaccaactacagctgctgcgaataaggctttgccggccggtctgtgatgttttcacattatacaacaatttccctgagattctagcatctctggtgatctgcagaaaacagaaatgtcttaagcttggtgctcggtacaatagaagagatattgaaattgaaatacaagaaaagaaatagctatgcaggccatgatgtttaataatgaatgaagaaaataataagaacaagtattcaagcgacctcaaactctcccaagagctattgataaattacaatagaattctcatgatccctctaattctgattctaatctcctgtatgtacccttctactgtttatatgctattactacatggggtcattatcatgtacggatgtacctttctactattgtctaaaaaattatgtaaattgttgagagctctagaaaatgaaagctcttaacaacgattgaccccatgaattgttatcagcctaccaacgattttgtgaatagtaatttaaaataattaatgcctatgtaagttccatgaattctatgtagaaaataataatgcaaactggtggatgagattttaagttgaaaaatattagaatacttacagttggccaagagtagctagatcaaaatcaggagccagctcatgcattatatcattgggtggtt

SEQ ID NO: 261017 - DNA, 1271 bp, Cannabis indica
ttttttttttataaatatgtatgaattggattagatcgattatttttatatgtcaattaatattcaatatgcacaagtgtaaattttgaattttttagtctaattaaatttaatctgtacaagtataaatatctgcattttataaattggattgaattagatcgtgtagattaaactaaaccaattattttatgaacattccctacttatgttatgcttataagcttttagaagattgttgagaaacttagtcaataatacaaaatacaaaagatagtagactataccataactcacttatgttatagtatgtgcatactataatagtagactatatcattgtgatctgtatgacaggaaagctcaaaccacccaaataatatatactctttctttggcctattgttattgtgatatttatgtagaacaagttaccaaataataatatccattttattaaacttcttaattaattaattattattttgttgttgttgtttttattatataatgtaatttgttatcacataaagaatgtccccacaaaaaatgctatagtctaaacacacaacttagaaagtgaagagaaaaattaaatattttggaggctaaattcttttgaattatttatgcaacttttttcatgtatgaaatgaattatgatccacttgtaagaattgggcacaataaaataaatatgactatttttttttatattagttataaatttttgtgttcattaattgatctttttctcttataatatcaaatagaggagtcttatttatgaagtttaatattaaattatgtcgtttgtaaaaaataaggagtattattaagaaaaattgaagttttatacttacttgtattgtctaactaataaatatatatatatatatataattcttaaattatataaattaggttagtttatcaatttttttatattaatatatttttaatatagtatcaaaagataattttttttaattatataactaaattaattaagcatgcaaattctattttttattattagtcaatggaataaaaatataatagcttaataatactaaaattgatatttatagtcatctatacataatttaaagcaaatgaaataatctaacgaccttgtttgtattaattaacaaaaataaaaactaagaataatgttaaaagcttaaaaataaaataatataaatattttattgcaagtgataatttacttgaaattgtggtccattgtgtgtcataatcccttaactaat

SEQ ID NO: 261018 - DNA, 1244 bp, Cannabis indica
aacaacatcttcaactaattaattggccgaaagtcaaaattgactgaaaatcaaacaagatcagaccaatgtaaaaacaaaaagttagcacaaaaataatacacaaacaaaattaaagataaaacataattaaaaacacgactgagagaatccccgccaacccaaaccagccacaaaaccctttctttccgaatgtgcaaggatccaatcgcagtcgcacgaatgccccaacaccccatcccgatagcagccaactgcacataacgacccctatccatcccacagaactggaacaaacagaccaccagaccattggacaaccaccagactagatctggagatccacaattgaagcctatcataccagatcgcacagaacaccaaaccaaatcccagttcccaacgaaccaccggaccaaaatccaaatcccgaaggggagaagaggaggacaccatctgaccagatcacaccgacgaactcgaagaggagccaccaaaccaaccaatgacaacctaaaggacctctcactcaaacaacaacagaccctcccgatcagacccccaaccaaccccaatccaaggactgatagagcctgactgggaggaagaaaatcagaataaagacccattctccaacggtgcaagagttaacaatggaaccgtaaaacaaagtgaaaaaaatactcttatgattattttttataattgtactaatcatattataaatttctaatttttagattcttttctatttaatataatattatgtacgagattattaacaaacataaagaattaaagaagaaaccacacaacatatatttgtatacacatgaatctatttatctcccatatggtgttagactacatggtctttttatgttggtgataatggtggtattgatgcttgtgcttctgttttttctcgttatgaagaagttcgattaatgatgtaaatatgggtcatattttttaacaccacacgaaaccagcatcagtccgagaggtataagtacgcaatacgatgttacaaactggcaaggcacgatattaaaaaatagacttaaagcatgacacgatataacaaactcaaagacacgatatataaacatgaataagctagcccgaaagcacaacacattaaaaattcttataataataataataaatatataaattctatttaattttttatgagtaatttttgggtaaatacttaaatttaacttttgagtacagtacaa

SEQ ID NO: 261019 - DNA, 837 bp, Cannabis indica
agagggaagagggaagagagagagagagaatacactttcagtatttttaaggtttttttttttttttttaaaaaaaaaaagggtaaaatgggaagttcatgtaattaatggactaaatttgtacaaattataaaggggtataaattttgatataggttgtattattagggtcaaaaattaaaatttcccttctctttttataaggaggtgttgttatacatgctgttagagaatcaaataatcaagaattttaacttgaaaaaataaaaatgaaaaagaaaaaaaaatgcattaaagcatatcttggtgtggattgggcagtgaaagtgagaaggctaaaggaacctagggaatataccctacgccgcattgcaggctatcctcctctcctctccttctcaagaagtactgagcgacacacaaagaaagagagatctatagactatattctctacctttccatattctaaatttctgtttggcttcgacgattcatcttctcaatctcatcatctcatctttccaaaccctaattccacctcccgctctgtttctaagaacaataagaatttgaattagatcttctccccaatttttctttctttcccagctaccaagcaggttcatttctcactttatcttctcttttctgttttattttaatattctttatttcagaacataattgatttgattagctatgatgtaatcttgtgtttgtatgctggagtgtcgttgccaatatattatcttgccatgattttgctatcttttattttaaatttgaaaagagcgcaaattagttgagtcaactgtgaaaggaagatttaactaagc

SEQ ID NO: 261020 - DNA, 741 bp, Cannabis indica
ttttgattgattccggtcatcttcttagatgaagccgccggaattaatggtggttctctttctggttgaattttatgtttcggttgcattgggttgatgcgtggttgcgggatagttgctcaggaagcatggatcatgggttgaaggtgtgtgtaagtggtatttctgtaattttttttatgggaaaatggtggcaaaacccccaatactttggttttggtttcgccaaacccccacaacccaaatttctgcgggtaaacccccagaaccactattctgttatcaaaaacacacttccgttcccctgaccccgttatgtgcctacgtggctcaatccaagtaagcagcagctcgacacgtcataaattattgtgacgtggaaataaaaataataggattaaggttttttttttttggtttaactaatggctaattacccagaattaaaagacaaaacatttaaaaaaaaaaacaagatatttaaattaaaatcctccaaacccagatctatattttcttagtcacgaagatctgggtttgcaaaggagggaaaatcctcagaccccattgtcgaagagaagagaagggaagagaagagaaagaaaagtgaaagttttgggtacctgtcctccattgtcgaagctgaagaccacaaaccagaaaaaaaatgataacatcctggacaagtaggaatcctggacgaaggttcattagatgcccatgccatgatgtaagattttt

SEQ ID NO: 261021 - DNA, 2160 bp, Cannabis indica
tagtttgttgctacccccgtttttttagtttgttgcccgagccattactgtgtcaccatctacctttcccattgttcctccttccccaatcactgctcctgttgccactcctccttccccctcaccctcgcctataaaccatctacaaatgcatcacatacatcctcgtctacaacttccccacccactattcctttggtggtagatcatcatggttcacatgagcttcccattgcccctactaatttgcatcctatgattacaaaagctaaattgggcattcacaagccccgtttgtttttagtgttgctgcatgtactctaattgaaccatctagttttcgtgaagctagtactaatcatctttggaatgctgccatggataccaaaattgttgccttaaaatcttaacgggcttgaattcttgttcttccacctcttggatatcacattattggctgcaaatgggtgtaccgcattaaacctaatgcgagtggttcggtcgaacgatacaaagcaagtttggtggccaagggcttttatcaaacctaccgcttggattaccatgaaacttgcagccctattgtcaagccaaactccatacgccttgttctttctctggcagtgtccttcaattgggttatcaaacagcttgatgtttagaatgcatttatccacagtgatcttaatgaaatagtgtacatgacccaacctgaaggttttgttgaccccgaccaccctcaccatgtgtgtaaactgtccaagtctctttatggattggaaaaatctccacgtgcttggtttctcaagttgagttttgctattgttgaatgggaatttcttgcttcacaggccgatacatcacttttcatttacagatcggtcactgtagtgattatcttgcttatatatgtcaacgacatcattgttaccgggttttcggactccaacattgttgccttgttgtcttttctcaacaccaagtttgtagttaaggaccttggttctctctatttcttccttggtattcaagttcatcgctctacttctggtctccatctatcacaaacaaatatgttcttgaccttcttactaaaacccagctacttaatttgaaactggtaaatacacctatggctctcacccatttatctctctatgatggagaacctcttaccgatgtgatttcctatcgaagccttgttggcgcgctacagtattacactttaactaggcctgatatatcgtttcttgtgaacaaattatgtcagtttcttcatgtccccaccagtgttcattatcaaggagcaaagagggtcattcactatcttaaaggtatggcacatcttgacattcttcttcaacctgatcccactcatgaacttcattgctttactaatgttgattgggcatcgtgtctcgatgatcgacggagtgctagtgcctactgtgtttatttgggtcataacctcatttcatggtcttcaacaaaatagaaagttatttctcgttctagtaccgagtcagaatactacgctcttgccaatgtcgcaaatgaaattttgtggctgtaaaatcttcttggggaacttggctttcctcttcaggttcttccaactcttcattgtgataacatgaacactcttaaatcttgcttcaaacccagtcattcatgctcgcacaaagcatgtcgaaattgattatcactttgttcaggaagggttcaagcgtgggctgctccaatctgcttcgctcctttagaagaccaagttgttgaccgcttgacgaagcctcttgctacacctcagttttagactcttcgcaccaaacttgcggtctttcccagtcccgttcgtttgcggggggatgttaaacaatagaaataacatttactattctcttttattcttgtactaagtctcctaaatatgttatttgctctctctattaggtaatataaatacccctgtactgtgtacatctttctttgaggaatatcatatacaatttcaatttcttctcacaatgggaaactagcaaccgcctcccatttgtaagttttaatcactgccccaattccaaccttacttttttgacatgcatagctgcatcaatatttaatttaattaaatccggtggtagtagacttcaactgcctttg

SEQ ID NO: 261022 - DNA, 5913 bp, Cannabis indica
agagcttcaagcttcttcctttcgtcataataaagactagagatgtcttctccaagcaaacgcagagagatggatttgatgaaactgtaaaaaaataaattatttattttctttttctttttgtaattttttattattatttttatttatgtttggttggttcaaaattaggatgatgagtgattacaaggttgagatgatcaacgatggaatacaagagttctttgtggattttcatggtcctaaagagagtaatcgtccatacccgtctccaattttcatcgctttcttacgatttttctctatctttctgtattagaatttgggattaaaaaccaagtattcatatttcagcttatcctgatatttcctttctgggttttgttcattcgtatatgtatatcactcttatgtatgttttgttttgttttgtttttgtttttgaaatttctgttcttattacttttgctagtactatgtgaaaaacgttgtagctcacactcttaacttcttttagctagcagtttagcaattgtggtcataactgggtttggcttgttatattttagactttgaatgccttaatttttttctctacttaccttctctttcttaaatgaaacctgtttcaggtccttatgagaaaggtgtgtggaggattaaggtggagctgccagatgcatatccttataagtctccttcagttggctttgtcaacaaaatctatcatccaaatgttgatgaaatgtaataagttcatgagtgttgaacattcaccatttttgctttttataacttttttttttaaaaaaaaagaaaatagagtaattttttgtgtatgaatttatttctaatataaactccaaattttcatgtttggctactttggtatcattcgaatttcaggtctggctcagtttgtttagatgtcatcaaccagacttggagtcccatgtttggtaggctattttattttgaattctctgctgtgtgaattttctatttggttttttagaaagctgtgatatgctactatgatattctgttcctacattatgaactcaagacagttttaagttttacattcttaattttgtttcagacctggtcaatgtgtttgaagtatttcttcctcagctccttttgtatccgaatccatcagatcccttgaatggagacgctgctgcccttatgatgcgtgatcgtgctgcctatgatcaaagagttaaaggtaaaatctttttaaaacttttgtgacctttaattctgattagcatacacgcaactttcttcaattcccatttttcattcacaacttttttgttgcatgtcttgttagattgttttcttaactcttttgttgtctaagcaactttttttatttgaagtctatgcaatgtggtattatgtgacttccctattcatttgatgttttgttttatgttctcaagtgtatggacttcttttctgtgtaaaaatttcaaatagttttgaacctcaccataataactcaataaaacacaaattttttagtttgattctcctctgccttataggagattggttttataaataacttgttttgcagtagagttgccttttccacaaagaccaatgtcatgggcagtcatccattagaaattttcaaataagaccttaaagttttttgctttattcatttaatcatattattacaattatttatgttttttgaacattagaatttacaatcattagcactaaattgggctatcactagctgagtaaaatttttcatgtttagaatagataaaactcaaatggttcaagttttgtctggattttggtttggcttcaaatatcagaacttctctttttgaagctgtataataacatctgtgtcaatacttgaaaaaaaaaaacagaatattgtgagaaatatgcgaagtctgaagacataggagctgttgaggagaaatctagtgatgaggaagatgatctgagtgaagatgaatatgcttctagtgatgatgatgatgcagtggttggaaaagctgatccttagtggcaatacaaatgttcaatttacaatttttttttaacagggtgtctatctgtacattattataatattctcctactcctggaaaatgcaaaaaaaaaaaattaaaaaaaaaataaatagagaatttaagcaaaaatatgaatgccccacttgggggatttgccccttttctgtaaattagtgacagttatatttctgagtgaaataattcacctaattgtgtttttttcctctttttctttgcaccaatttcagttttcacacaccagaatggagagtcaaactagaaccaaatcaagttaaatttccaatgtgcattgctaaatagagttcaacaaaattatatataataaatatagaataatgtaagcaagaagcccttatagctcagtggtagagcgtcagtcttgtaaactgaaggtccgtagttcgatcctgcgtgagggcacatcattttgttatcaattgtatttttatattttgtccttattgggacaagaaagtaagaacagcagttatcattgaaacaatcactgcttactgcctagccgagaatcttgacttttcttctgtcaactttacacgtgtcaatacttgattactgttacatattattatcagcagtaagataagatgtcataattttttgtgcagtatatctcgaaataaatatcagcctgtttggtacgaggagtcataaatttaatttcatttttatataaatttattattaaaaaaaaaaagaaattgtcttataaattgtaatacttatgaagtgtaaagaaaaaaaataaacatacaaatttattttcgaatgataacaaggcatacagttaagtcaacatttaaaatttagtactctatagtctatacgtttacgacttgttctgagggattaaaatgagattaaagaaaagaaaggaaaaatcatacaatgaaaaaaaattatttcgaagtatgtggcattgaaataaataggccccctctggaaatggtataatcaatagttttatttgagacatttgtatgatttctgagtaaaactttggttacaaaaaaagatcaataaaaaataatattggaaatctatattgaagtatggttttgaacattagcaaggagccttgtgattttgctgagagtttctcgagcagatatggtggttggatgatcttcaccacagactgaatttctaataaagattgtctttctaatcaaatcatcgctaatatcaaactgtcctcctcttagcattagtttggctctagtttctaacactatggcccttgacagtgccagctcctgccaaaggcatggatttaactgagcattagtttggattggtctccaacaaagtgatttatccaaccatttctcaactggggcaacaaaagcttgctcggctgcttccaaggcgctggtgcacaagcgcaagagctcaagtgcagcgctgcaacgagaaaacatgaagaaagttcgaatggcgagaggcaataccacttctttgacgaggtacaataagtctgacaccttgagatcaacaatcacagggtcgcgaccgaatccaaataagaggaaacatgctgcccatatatgttcagggtgtttggatatcgatccacggctgattacagcttgaaccatagcttgtggagcgcctattactgctctttttctggcatatagtttgattagctcgttgacttgtatacaaccttgcttggtactgcttcttgcaatgttgaaccttatcaacatggaagaagcctctgcttctgatcttttagtgtatgatgaagcaaggccacatgttaaagagtgcagcagttttctccatagcagtgttctcctatgcttttcggggattttgtttgcagcttgggctaacagggatactggaattgcacaaggtgcaaaccaaccacttgcctggatcattctggtagccaagctccttggtccatcagcatgatcgaatattgaaaagcacacctcgaaaagttgtaaaaggaaagtgtttcgcctcaaaggatgagcttctctaccgctccaagaaaagtccttcaagggcattctgttagtggtctccagtaatctactaggagttattgggagctctgataatattgcgccaacaatcgccagccccaatgttgacctgcctaatttctcctctataagcctcagaacatcaatttctctaattgaatagtctttcacagctccttgcatcaacaccattgcctcaactccagacaagtatgagagtttcaaaggttccaaatttatcgcacgagaaaggcgtgtcgatattaatatgtgagtctctccaccaaagcgagggagaagatccattaccagtttgtgatcccaccaatctttttcactttccaagttatcaatcacaatcaaaaatggaatgttcctcataagttctttccgaattcttgaaacagccgcctcttcctgctcttcaaaacttctaattctgcttttctctgtgcaattttcaagccccacatcaacttctaaaaatgaccagagattcaaatagttttgcctaatgtacctgctctcacctcccacccataacaccatcttgtatctctggtgatatctgtaagcaaattcaagaagtagctctgtcttgccaatgcctgcatctccagacacgcaagcaatccctttcccataaagaatctttgttgatctttttctccttgggtactttccactactttttgacctgggcagttgcggtttatgaggagcatcagtgctttgcatctcaatctccttttctgattccttccacacaacaggctcttttcccttccttctactctcgtgttgtcgctcccttcgcctttcgtcaaatgtactgctcttaccccatccaatcgtcaagtttttcctcctaggccgagccttaagctcaaagtaatctcgttctgaatctccagttacatcaccaaaaagtataaattctaactcagatagttcttttttcctaccaatgaaattttcatttcgaggaaaagggaactcctctttctccactttctctcgccactttgataaccgctctacaacacttcgtctccctaatttcattgctaacaatgcgacagcctttagtatgcaatctctccaattaccatcctgagcttcgagcttccattcatcaactcgagaaaggccatgaacggcttctgtccactctttctccaatcctccatacaaaacccataactctcctccatgcttttcccataactctcctctcttctcaattatatccctgaccagacaatcactaggatttagatcaaaaaatattgggaccaagttctttttgtctgaaaagaactgcagctcctcaatcgtatatggatttctgaatgacttgttcgtgatgataaccactccaaaagaagaaacatccatagccctctcaacaactccatgtttatgggagcttttaaggcgagctctatccgagaggaagcaactcatcccttgaacctccaactctgcctgaagccaattaacaaatctcatcaaagattgcttgcgtccatgaaaacctatgaagatatcatagcttctcattctgttaaaggagagtgaaacaggcccaggcgtagatgtaactccatagtgcctcccgtactttttcagtctttctctgtgcccagaataactgttgtcctgagcattgctgtaactagaggctgctgtattagagataccagttgacgaagatattcgatcaaacttttgaaaactactagaaccacaagcagctggaggagctggtgacatgtctgacaacagatacccaacatttgctagagtttcggggtctg

SEQ ID NO: 261023 - DNA, 922 bp, Cannabis indica
aaaaaaaaaaaaaaaaaagtattactaaaggttgatttatgaagaaagccttgtgatattactattagggcagcaaacaagctccatatgttaagaggtgtgtatcaacttaaacaataagtctttagatctcatttgcgagctccccaaagatcataacaatgtcacgcaattgataatttgacgaaatggggcaaaaatcgattctttagcaacctataacattgaagaagctgggagattttgtctatcgagcttaagtttgtagagatttggtatgctctacaagcttatattaagacattggagggagcactccccgctaattccaggtaaaatataatgaggtagttgcattaagaaaaaagtaatcagcaaaatatacatgtactcggcgaaacattgtctcaaaagtgaacaaaacgaacaccactgctgggagacttcaaaccaatttacaagcgacgctgggttggattcgagcacagcaacttctattcgcccttgttgtataagttatcaacgacctcggtggttcacagtttcaaccaccggagttgttccagttgccgaacttattctttatgaggcatgacatgcacttagtttcgtgattttataactaaacatcacacaggaatattagtcctcaatttgaactttatattgaagcttttagatccttatgttctatatttaaatttatgtacaataaactcagaaaacattaaaaatattgatgtttagtctttgaaaaatctagacttacaatgggtcttcaattactatccttttttctttcaacatatcttactttgttcgtacaagttcaagggcaaagtctccattgctgtctggagtatacaaagaacagttaggatggcgaaatgttaccaattgatttcatttatttaagtataac

SEQ ID NO: 261024 - DNA, 1076 bp, Cannabis indica
tataaaccctccactaaaagcatacacaccataagtttagttttacaattttcaactcaaagcccataacaaataaccagtagaacaaatcatttatagcagttctatgcatctcattattagtgtacattttattttgtggtattttttataacgagctgcatggactgtacatttatattttgtgatatttttccaattactaattatgtccaattttgtggtattttccatcaaaagaatacgttgttcaaagctacacaaaatcgatgaaattttattcttataagcaaacacaacaatatatagaaatcttcaacaagttcatatcaaatttatacattttcatagaagaatctcattgctatgcatgtaaagaggaaaaaaaaagtcacccttctttcagataaataagaacaggttcatgattcatgaacaacatgtaaagaaacacgcgatatatttagataaaaaaaaaatctacaaaaagacaatatagagagaacaaaaacaaaaagaaaaattaaactaattgttcttatctttttctgctattgcagatgacttgaaccaaggtatccaaactgatgttgtcttctgatacaacctgtaagcttctgctctgtaagcttgtttcagcatccgatcttccacaagcttagtcacataagctaaacacatagtattaatgagagaaccaacaaaggtccatccttgtccaaggccccaagcaaagataactagaccccaccaccacaattgctctccaatgtagtttggatgccgagaaaattgccacaaacccctgtcaagattggccaccactggcttcccaagcttcttaagcttctcatttcgagtcacaaactcatggagttgtgtgtcagcaaagaaggcaatgactatgccagttaggcaaacaacaatggcaacaaaatcccaaatgttcactggtgcatccactgagtggattgcatacaacggaagacatataccaatgagaaacacctacaaacacaattagaatcccattgggaacttttatcaaacactgggatgagtatttagattttaac

SEQ ID NO: 261025 - DNA, 624 bp, Cannabis indica
taattataaaaaaaaagtgaagaacggtttggacgggttaacccgaccaaaccgacgaaatcattgggcgggttgaactttctctaatttttgattgggcgggttatggttaaatatttgcaacccgatatttatattgggttgataaaaatatgctataacccgactaaaccggccgacgtacaccccttgaaatctatttacaatcaggttttttacaaaattgacgatataattatttctattacaaaatatcacataaatttataaacctaatgaaaaataagaaaattaaaaagataataaataaatataactacagtaataactaatagatatcttatttaaatttaaattaagatatttttcgtatgaatttgaatatcaaaataatagtttataaatgtgaaattaaaaattatgaaaataaatgttaatttatatataaaattcatatattatataatttagagaaatacttaaaaagaaattaataagaaaatactgaaacttatctatatattgttaacatattaattaattaatagaatttgatacaaacaaaaaaaatagaaaaaaaaagaagaaaaatggatcaacaatataccttatgtcattctcttt

SEQ ID NO: 261026 - DNA, 552 bp, Cannabis indica
cttcttccaattgccccaatgcaacttgtgtttattcttggttgatccccaccaaaaccgagctattaaactttctatttcatgaataattcctttggttattctaaaacaactcataacataacaaggaagcgcttggatgaccgctttaattagaatttctatccccgcttgagaaaagagacccattttccacccttgaagtttggcttcaaccttatctctaatgttgccaaaaacttgttttttattcctccccacaaaggtaggcatgcctaagtacttggtatgatttttgacaagagtgactcccaaattagatgctaaagccaaggccgtagtatcactaatcttcccaccaacacacatttcggttttgtcaaagtttatacattgacccgagagtctcatatgttgccaaaacttccttcaagctagtgctttcttccatagttgcatcaagaaatattaggctatcatccgcaaacaggagatgggacaacctttgttccatattaccgaacctcaacccatggattttcccagctcttt

SEQ ID NO: 261027 - DNA, 1261 bp, Cannabis indica
tcccagcacgtgagagatatttgatttcccatccttcgactctttggcggactctttcttttaaatagtactggtaacaactttatatatatatatatatatatatatatattaacatacatatagaataattaaataatatcaatctagcacaatataaatttactaacgtattattctaattaaattctaattaatattttaatctaatcacacgaattagttagtaatataatatagtactaattattcacgtggttatattattttactataatttgatcgtctcatatataccttatctatattttattttataattgtgaaggttagttgtttatttttcaaattaaaaaaataaagttgtactaattaatatataatataggtcaaatcaatagaggaaaggaaatcattctttccgacaattattttctcgatggaagccataacgtaatgcattaattaaatggtgggtcatagtcatggccttcaaaattatttatagacatttattaacattgttttattttcatttttaatttcaacttgcctatctttcccccaaagtaaaaaaaaatccatacaaacaaactcataatatggtatgtggtagcatgtttggaaaatatttaggcaaaaaaaaaaaacaattaatacaaaaatattatagaaaaaaaaacgaaaaatacttagagagcaaatagaatagttttctcccttttttattttcggttttgctcttttttttttctttctttttcctctaattataaaaaggaaagagatgaaaagagtacaacattatattgaatgttataaaaatttgatgttgtccaatacttgttgatttcatattgacttttttttttttttgagaaaatgctattatattaaaacagagttaaaatacaataggcattagaggaggaggtatttcctccacccatgaacaattagaatccaccgagagagcatagcgcgccagtaaatgcgcagcattattagcagatcgatatacatgagtgatctgagctccaggggaagttggatactaaaaagagaaatattgtgcaacaaacaatgaagatcggacactagctcccgagatgagtgtaaacctttaaactacagatagagaatctgtctcgatatagtgtaatggtagttgaaggtctttaatccattgaagagcatgcattagagcgagtgcttccgtaaatttctggcgtaaaaacatccacaaaaaaggtgtgaacat

SEQ ID NO: 261028 - DNA, 714 bp, Cannabis indica
catttaaatggttagaattggaaaaatgacatttttgagaaaatagaaataaaattgtggaaactgcaaaacccaagtgaggcccaagtcacaccatggccggccactactttgtgtttcccaattattattttcaattttttaattgccaagtaattactaacctaaacctagcagttatctataataggaaagtggtggatcacaccaaataaggcagttaatcaattactcagtaaaagaggaaactgtttattttggaaagttgagcttcccttttccctatatatagcagccctcctctcttcctcttgcatgcttattcatacacgaaatacactgagaaaagagagagagagataattttaaaatcctttgtgagagagaagtgcccacacacatcaaacagtacctcaatcatagactggaagactgtgaaggatcacctccatctgaaggacattcgggcttagatcttgattatactctgcaacagacaggaatcaagggttagagatctgagtggaaggagacacattattccgatgcacccactgtaaggtttcttaactttttatgtcttttatttatcgttttagaagttcatgtaatatccgctaactccgaaagggtatttttgtaattttatttagctgagagtattttttttattttacatatttatggatttaaatatgtatgggattattttta

SEQ ID NO: 261029 - DNA, 525 bp, Cannabis indica
atgaagagctcaaccatggaggttagaatgaggcgcagcgtcgaaatgttgagttagaacgagaggcagcttcggtcaggccggcgcaggggatgaatgctcaaaatcaacctgaacttggagtgagaagaccacgagggaaaccacgttgctcacgaactaggagacaggaaaaggctcgggaagaacaacccagggaaaatgagacactcctgacaatcaggatgaatagctagaaaggagacaactggaaattgatgaacgagaaatccctcatgaaaatgaggaggatcttggaactcaatcgatagaacggagatcacctgctaggaatcaccaacattcttcccaaacccataaagcgaggactcatacgtaccctgatgggggaaatacgacaaaccgctctcaggaggaaagaacagagcgtgaagaagcaagtgtgactttgaggcgatccagaacccatagctgatcaacttgaagaggaaaaatactcaatgagctaatgatcaggaaagtatg

SEQ ID NO: 261030 - DNA, 413 bp, Cannabis indica
aactctccgccaggtaatagggttccaaaccctgattcataactatcatgcggtctatcgaatttattaaagattctggctgccacataagaatgtgtggccccagaatcaaataatacggagtaataagaattgttaactgagagctgacccctcaccactgaagggctggagcatcagcctgcgtaatggcgaacaccctagctggagtgggtctcgccggaacccttggtgcttctgttcggagctgaggacaatccctcttgaagtgtccgggcatgccacaatgaaagcacccctgcccccttcactcacccagatggtgccttttacagttggggcactctgggtaggtataacgggtctcaacacctccctgacgactgcctcgactctagttccctcggaacctc

SEQ ID NO: 261031 - DNA, 618 bp, Cannabis indica
tcaatagtgctacgtagaaaaaatatagtcaaggagcggcgaactagtaattgttgagcctcagttggcactgggagataatattgagctggccaggctcagagaatctataggccaggtcactcagaaaggagaagaaccacgcactggtggttgttatgctttcgcccagtagagatgcgaattcctaagaggacaagaagaactgttgctggtggtgatactttcgcccatcagatatgtgaattcctaaagtagatggattactatgaatacaccctctacacctgccaagcagaagtaaactgtcgtaatcaggaggacaatgacctgattcccgccaaaactttttccagcgcgttacatcacaggcaaaacatcgtcagagacacatcagctggtggacctattacccacgagtacgttataccggcaaacaaatgtgctggtgtaaatacttttgccggcgcaagtctttatgtcgccgacgaaaggtcattcaccgacgagccattgccagcagcttttgtcggtgaaaaatggcaccggcaaaagattgccggcgagttacacgtacttttgccagcaagcttacgcgccagcaaaagtagcttttct

SEQ ID NO: 261032 - DNA, 5751 bp, Cannabis indica
aatacacaagaagtaaaaaaatataatattattattgatcatcatttaatattttattaaagtatataaatatcattatttttttattttttcattacttaaataataaaaatatggcaaataaagaaaataaaattatgtgaaagtgaaatgaattaataattaatagtactataataaataacaaagtagaatttattgtgatctaattatcttttattcctataagtgtgctaagatataaatagtgcttgcattcagttctccatatataaatggcttttgctttattaggaaatgacaggtgcttcatatataaattaaaaaaatttaccatgacattttgctacttcaacttagattcaaaatcccacttctcttttttctgtatacatgacaatgtttaacccccattttacatagttctaattacagcaaaacaacataacaaaagaaattgtacaccaaagttccatcccaaaagaattcaaaacacttttttttaggggggtcttgttttcttggttgcttcttttaaaggctccctggatgctcagctactcattggcattgattttgacaagagtggacccatcacaagatgcctcttcacacaacaatgacaataacaatcacaaaagaagaaaggaattgggaaataaggtaaaaagaaaaatttaagatgtgaacattgagggaattttccattagtgctacttaattatagcataatggtaaattaaaatgtatgtgtgacaaattttgactattttttccaacattcgggagttaaagaatggtctctcttatagtctttgcaatagttgtacaccatgtggtaacgctggacccatctcatggtcctgtactgctgccgggtcaagccgccggaccgaaaaggcgaggcggaaactgggtgacacctggccggagcataggctgagcagccaccagccttgaaattggtgtactgagcaacaaatggttggtatttataatcagctttgtatttaccatcttctgtggcccatgatgaggcatcccatattgaaccatataaccacattggccttaatggaaaggtttcagcactcttcttagggtatctccttattggcacatcatcaacaagaaatctgcaataataataataataataattaaattcaaaaagtttggaataatagacaattagaacagtctaaaaagctcttattgcacctactataaatagtacttgtatatattaattaattttggtatactaaactattgtgtgttacttagatactagtggccatcaagtggaacatgtagacaagtttcttataaaatcaagatttgttaactttatccatttttgtacatttcttagatttttttttttcttttcgaaaagtgttcctattcatgtgatcaaattattctatttataattgcccttgtcaaaatcaattggctcctttattttagagaatgattaaaatagtaattattattattatcattactattggttaacttacattatttcctttggactccatagaatggcataatgatgaaaagctttagttggatcaaaccaaagatgaaacttcatttctcttccaataattttaccatcaccacttcctctaatgtatacatttgtttgaagtgtataaggcttcccaaatgttgttccaaggaactcaatgtccacttcatcatgaaaccccggatgagcttcattatttgatagctgccatatttcacccccaattcaatttaggcatgtaattaatccaatatttataaaactataataaataaatatatatttccaaaaactaaatatattttctcacatataaagatgttataactcctgctgtataaccaggttggagcttaatagaggcaccaaagtagccagatcgaaatggacgaaccgatttgaacccacttcctgaaatgcaaaagcaaaccaacctttttgttagaaaagtgatcttttaaatgcccattaagagattcattaaaagaaaaaaactaataaaaaatgaaaaaaaaataaaatataatgacctgtagtactgtcaagccagattgttaatgcattctggtctgttctctggtgtgaaggaccccagagatttctaaagcctttataaaagctcattggcctgaatttactacttggccagtagccaggggaaggtggccaggctgcattgcttgatggagccataagagttagaaggaagattaggatgataaaagccattaaaagagaaaggagtttgtgatgagatgagatgtgagaaaagaatagagagagagtgatgaaactatatagagaaattggaatgattgtctgtgcttaaatgcaggggagagagtgtgtgagtgagagtatagaaatatgagtatggtcgtactgccttgaaataaatagaaaagattactgggtccctcttggagagttaattaataaggtaagaatggaaatgtacgagcggttaaaaactccaaaaataaatgggaaaaaaattactaagaaaaactaaactgatgtatcatagaaaaagagggaagatctcttaaagagtaatttttttttttaattattgacattattttagtctttctttcatcacaactactttctttctcacccttaatgagaaaacctgttggctttgtttttcattggtgaaaaaacttgaaataggagttgtggtgcagaggaggtagatgtgtctctattaaatgtgttttttttttctttttctttctttcccctctttttgggtatatgttttgtctttgtgactccacaggaacttggacttctgttaaaaaggccttaactcttttatggccttatattgaaagctgcattttcatctttattatataaactattatggcattattgttggatttacccaatttgtatgatgttagttctcccacatccaatatttgcggataaaaatgtgaaaatattggaactaagggtcagattctgatatagtcaaatcttaaaaagaatgaaaactaaataaataaatagattggtttctaatgacatgtttgtatttgtgaacttcatcaatgtagtgggttatattgtctgtatatatgggacccttctttatttggtgatttgatattaccaagcaaaaaccttgtgactttgatcccatattgtgaagtgtttgtacggatgacacattattatataggcccaatgtttatataatttaaccaaggtagagtctctatatatttcacaacatatctttacttttcacataaagaatatcattcatatatctatattacatatatcatatatgtatgtataataaggatttatgtaaataaagttgcattaattatattcatttgaggtaaatgtatgattcattaaagtcaatgactactgctggatttctttctgctaccaattcagatagatagatatgttgtacttgagattgattttatgcatgccattggatcaccttatgtggtgctctacttctcgtttgattcttcttaatttatcttgaaatagaatatgcagcattgatgatataattacctgttttggacgggaatcttataactcagatttttctttgcagaaagataagacttctttgatttgaaaaagttcttttgtacacacacatatcaaaaccattaaaaaagaaaaaagaaagagaaatccattagaattgtagtgatttgttttattttattcgttaataataaaatgtcaaatttgggctgtatataccacaataattatttataagttcatagttttagagcaatattggttgctcaacatggacgcaagaattggtgctgtctcaactccccaaccaaataatttggttgtcttttgtaagtaagatagagtgacccttccacaagatttattcaaactttttgatttgagggaccacatctccaaaacatagcaatctaaaacaaaatcttcattcaagtatattatatatatatatatatatatattattactacactatatatggaccccaaaaatacaaaaactaaggttcacaagctcagcatgatcaaccgctttgaattcacctcccaaaaacaaatttggtacaaaaaccaggaagatctacatgtgaaaaagaaaacatatacatatatagattcagaaagaaaaaaacaaaggaacgaactcgtctagctcatcactagatatttttctttttgttccattattattcatgagaatagattatttccacacttttatatgtgctgcattgactgatgaatatatgagatttcattttgtcatgtattgacaccaaaccttttatacatagatgcttaatgcagggttgtattttctgtattagagcctcttttcttttctatgacccaaaaaaatgcgaaagtcttaatgtatactctttgatctcactattttgtcggccaaagaaaagtggggtctctagggatatggcagtggggcctgcatggccgacaaatcaagaagttcacgtaaccctttattatttttcttattatataataatatatatattaatgtctaagtacgtatatatatctacctatctatatctatcaatctatttaacagctactttagaccaatgtacgtagtagatccacacaaaaatattgatgccctatatatcttttatctatgctttgttttgtttttgtttaccagcagacaagctaaattcaaagcgaaacatcaaaagtcttaataaataaggttagaaacttagaatagagacctagtagttgtcactactagaaaaataggtttagaagtcttttttagagcttacagtactcattttagcgaaatttactaccgacgctatttcggtaacacaacgactattattgaatattactaaaaaatttaaaactattaataacaaaaaaaaaaaaaaagtctaaaacaagataaaacaagcgatgcgacttagataatttctaatcattattatatttgtcattaatattttaattcgaattttatgagtcaagtgttttttagaataatagaatttaggattctagttctacaaatataattatctttactttagtttaaattttataatacatcatttggtatgtttaaattttatgtgacattttattcatccttaggtgttctaaaatatcattctaatataatttgtgaggcttacgccttgaggcttacgccttgagacttacgaaatttctaactagtaactaattataatatactaaatcactagttagtaactaattatagcatactaaattattaactagtaactagtaactagttttaattctactgaaattttaacagcataacgactttaattgaacgttttcaaaattttttaagctattaataacaacaaaatacaattcaaaacaatataaaataatcacaataacatttagcaatacaaaaatttatcacctatttgaatacagtacatgtattcacaaaacctacttcactatgaatgaatatttaagataaacaaactctattaagcattcataatttattaataataaaagtcaataaatttataccttgagctagctagaaatcgatcaacactaaataatccagattcttgtaaattgatctcacaacctacaacataaagatcaaaattaatttttttttttatttaactacttactagttatataatttatgag

SEQ ID NO: 261033 - DNA, 1018 bp, Cannabis indica
ccctatgttattgaagcagtagtgggaaccggggtttataaattggctcgacttaatggctcgctgataaaaaactactggaaaaatgaacatttacgatcttattactagtaaagttaaaatgtaaatgctgtatttatctctgtaatatgtaaattcttattattaataaagttaaagtttgttcaagtaattacaaagttttctttaaaattatttgaggggcatatatatatgtatgttaactggaacttatctagaagtacatattatattgcaaacccattttaaattttttccattacggaaaagataattgattaaaattttctgtggatattataaagtcatagaattgaaaaacttttcctctagaaaagaaggaaaaaaaaagttaaaagtagcagttgtgtatgatatcaactcataaaacaaaaaaaagctacatgtgaagctgaatacttaacatctcgcattattctggcatgtactataaacgaggcataaaaatgccttgaaaaaataatacttaagctaaaataagaatagaagacctaactattcatatgagcaatcaaaaaatatacaaaatagttcctaaagtaaattattcatagtatttttaagtttgctctaaattttttttatgtacggtagattaaaactgttcatacaatgtctggtagattataaactactcgtgtataacaagacagactgaaactgctcatataaaataaagcagatgaaaaatgctcacgaattgagactatacagagattataactgttcgcgcacatacaaagtagaccaataactacttaaacgcatcaaagaaaaagcgagtacagtggaaatacttcctagagtatcttataagtcgaatcaaatataaatgtctaaattgtgaaataaaacgcaatgaacaaatatattcaattcaaatataaggtacgaggcattgaaagtaaagataaatgcataaaaagaaaagttggccatctaacaatgcaaaatt

SEQ ID NO: 261034 - DNA, 514 bp, Cannabis indica
tatgcaaataatttgatatttaccctgtataatgtaaatttctctaaaaaatatgagtcttgttatgctatgtcaacattttaaaaggtagttccaacaaataataaaaaagataactaaaacatattttaatttattttcaaaacaatattaaataaataagaaaataaataacctaaaatcttcatcatcgtctccgactatccgatcctagccccaaccgcttgtgatcccagtcccaactccgagggcaaccagcgatcagctactccccttctctcccgacggcgatcagccctagcccagcgcagttccgacggcgtagcacccctggtactccccccttctctgtctcgacggagatcagcctcaacagcccacgtagctccgacggcgcaaccccaggtactcccccttctctctctctcccgatctcacaccatctctctatccatctcattccttctatggttttttttttcaagttcagtcagcggcacgagatttagatctc

SEQ ID NO: 261035 - DNA, 580 bp, Cannabis indica
tagtcataaaagtagagaggagcttgcaatgacgcacatagatactatattcttaatttgtagttaagagagtgtgattataataaagtgtacaaattatgagaaacatatacatatcattaatcatttttaaaataaaaagatgtcatcaaattaaggtttaagtatatatatatacattttatatatagatgtgattattataaatgaatgtactttttatttttaaatataattaaattaatttatatatataaaatatttatgtaattattattatttttattttaaaatgtatgtatatataattaatttttatataaaatatttatataatttttatttttaattatatataataatattataaaattaataaagaatattctatttagtaattgagatattctgttaaagttaacgtagaaaattaaaaaaattgaattttgttacataatcatgttttatataaaatagatatatacactagattagtattattatatttaaacatatttttagtgatataattagtttttttaagttattcaataatcaatagtttttattaaaaaaaatt

SEQ ID NO: 261036 - DNA, 539 bp, Cannabis indica
atactgcttgtaagacttagtttattgattttaattaatcaattataattctaaagttagactatgtctactttatgaattttcactaagcaagggcgaaattgtaaaaaaaaagagattctaggtttattaattaattaagagacataatatgtgtaaattaataactatattaaatgacaatattatttaataattaatttttagttattaaataattaaaattggcatttaaattgttaaattggaaaattggcatttttgagaaaatgggattgaaaaatgacaaaatgggaaagttacaaagtgaagcccatttcccttatgatggccggccactatgcaagcttttttaccatttatatttttcattattttaatgccatacaattctaacctaaacctagatagaattctataaatagaaagtgttggcttcaggaaactatgacttgcatattgttcctttcagagaaaagccatagccgcccctctcttcttcttcttctctttaatttcgaaataccttgagtgataga

SEQ ID NO: 261037 - DNA, 1046 bp, Cannabis indica
gtaaaatgtcttcttacacatgcgagcaagtcaatatatagccttagaagcacacaatttaacatactctcatgaatgagccacatgcatatcactataaaagaaacatttactaatccatccaactaatgaaataggaataaaatttactatcaaaatcactctttctaagaataacatgagaacaaaaatcgcttaatccaattctcatatacatttttcttttactcgcttaatcagataccatttgtaacgccctcgcttcaagcctccattgggtccttacacccatagaatgaatgactcttatacacgagtacgctactctggctactggttgtaccaatcgatccatttaacccctctttaactgtgtagtcccatacctacacagtctcaaaatcatctcacttgaccttccccagacggtgtgggattgcacaacttacccaatatatccccttacggatcacaggactactgactgtcacaatctgttcttctattacaacgtaccttaatgattagatttcacccttaaccaaaattcaacttaattatttctaataaaatagtagagcttaaaattatctatccattcacacttaaataaaaaaaactcaaacttaagaatgtaccaataactctatatatgcctaatttattaaacctaaaacatacactctcgttagaattgctaatataacgactaaacttgtttttcccataacatactcaatttcagtcacaatttatgaaaataagtacaacctatcaaaatcaaacttaatttatgtaatataggtacaccttgaatcatttccttaaatttttaaaaatatctcattgataaaatcctacccatcaaattctaagatatattattctaaacacactataaaatctctagtcatactaaattcgtacacactatgtaacgcaacataaaacatataaaactaccatgaacatattgactaaaacttacaatacagtgaggtgagctcgtctcgtggcaatgaactttacatgttagggctaaccac

SEQ ID NO: 261038 - DNA, 494 bp, Cannabis indica
tgataaattctagatctgcttattgaaagcttgtttatataggcctatggtcttctcactagttgacataatactgcttccatactcagtcaattgattttaattaatcaattataattttaaaattagactatgtcgtatttaagaattttcattaagcaagggcttaattgtgaagaaaagaggttttgcggtcaaatttgttaattaagtgactttgtatggtctaattaataaattacataaatggcaattttatttagtaattaattataattgttaaataaatagttttgacatttataggattggactggaaaatatggtattattgaaaagaaaaataaatggttgaaataaagtggcaaaaatctaactagagtttggccctttgaagtgtacatccaacaagtgatttattgcccatatattttattcttttgtaatccatataattcaaccctaagccctagttgaaacactataaaaggaac

SEQ ID NO: 261039 - DNA, 2035 bp, Cannabis indica
ccacacatttaattttttgagttggatgagaaaatcgagttcttttggctctttaatttttgaatggattttcagttagatctacccacttttagttgtttatacttcaaattgaatccacatatagagtagaaattgaatcccaaaatccttcccttttctgtcatttttgtgttgttttttgggcggatttttgtcttcgacccaacaagagaaaatcgagtcgcgctataatgactgcatacttagaatatgaattagtaaggtaattagaactaattaatgttctgattatatgtgaatattttattagatgggccatattttcaagaaataagcattaggttataatttattaattctgaaaattttaagtgtattatgtatgacatatgtgaaaaataatttttttttatatattttttaaacaacaaaaaaaaaaatgcgaacggttaaccaataaaagcaaaacgaattgttttataacctttgtaagttaatttccaccaaaaacgagccattagtttctcaatatcttgacttgtcccaatcgataaaagaaagacactcatggcatgagttggaagcgattggatgactgttttgagaaaaacttctttactagcacaagaaaaaaatttaccatcccaactatttatctgttagatgaccttattttttagaaaaccaagaatcacggacttgtctcgaccaataatattaggcaatcctaaataaagagacccatcagaagtttcagttataccaagagtagaacaaatataagagcacaaagagatgttgatatttgggctaaaaaatacagaggatttggcaacattcaccatttgaccagaagccaattcaaaatatcaaagcagagtagtcacacttttagcaacacttgaagacgcctgacagaataagtagctatcattagcaaatagcatatgtgtgatcgatggtgcaccacgagccacacggaaaccttgtaaaatgcgattagcttcaaatttttgaatcaaagatgaaaaaccctcagcatagatgacaaaaagataggtggagagtggatcaccttggcagataccccttgtaggaataattggtctcatgacatgacctccatggagaatagaatactgaatagaagtaacacagtgcataacaaggtttattcactttttagcaaaacttgttcgcgacataatagcccgtaggtaatctcattctacttgatcatcgactttgctcatgtcaatctttgaagccataaatcatttcttgccttttattttacgttttagataatgcattacctcaaaagccaccatcacattatcagaaataagtcgactgggtattaaggcactttgagtatttgagatcacatggtcaattaaaccgcgcatacgattcgcaagggctttcgaaactaccttatacagaacattacaaaggacgatgagacgcaattcacccatagagatgaaattcttcttctttggaatcaagacaagattggtattatttaaaccctaaggaaaaatccttgtatcatagaaacttttaaccaactgtataatatcacacctgacaatatcccaacgttgttgataaaatctaggacccataccatcagggttaggagccttatcagggtgcatttggaacaaggcccatttgatctcatcatcaaggattagctttaaaagttcttcattatagaaattttataaagaacggctgacaccattaaccaccatgtcccaagaaggagcaccagcacaaaataaagaaccaaaataattagtaataacttgctaaagccctgtgtcccaatctttccacaccatttgaatttcgcaaacatttaatttgattatgtcatcttcgagaattcgccattatatgggaaatacttgctattcttatcgccataatgtagccaatactgctttcacctatgcttccaatatatttctttttgagccaaaatctcaaaatagttattttgctcacaaacaaaatcttt

SEQ ID NO: 261040 - DNA, 846 bp, Cannabis indica
ctaccaaattgttcttgttcttttacttattattttatcatgaatatgagcatagattatttactctgttcttatgctatgcagtgtggtcaatgagacactagagagtatttctgtggatcttggcttcagtgggaatactttagctgaaggtactttatttaatagcagtcttaatcttcgctgtgtactttcaagctctcaaatttggtattttcttttcttctccaaagaaattttattgatatattctattcttatgttggtgtaggtctagtggtaagtacatgtttaggaggtgcttttgttggttctctatttagtgggtggcttgcagatggagttggtcgtcgaagggcattccagctctgtgcattgccaatgataattggctcagcaatgaggtcagcaacatattcaagcaattgttcattcattttcaaatgtgaccaattatttagttcatgaaaggcatttttttcagaaagatgtaattttgtgcaaatgtattacacggaaaaattgtgtgcaataataaagtgctcggcttgtacaaggtattcaatataaagttgaaagttttttagtttgaggttattagtgtatgaaagcttacttccttctagtgtaaactagaaactctgtctcaaacttacagtagcctggctttctagcacttgttgaaagatatttctatatttgtctagcagtgctgtagttcttctcttgttacttggtaggaatccttcttcttttttccatttatttataacaccgattagagtttgaaaaaagcagaacaggaggaagagaaaaccattaggaacgaatagcatgtatacaact

SEQ ID NO: 261041 - DNA, 603 bp, Cannabis indica
gaggatagcattcggtagaagtagaaaagaagaagatgaagaaatgaagaaaatgaagtaagttaaaaaagtaataaactgaaataactatcacatcaattatttattattattttttaaaaagctaatcgattaatgggtatttttttaaccaaatacccctactgcttatgtgtacaatattttattgaatctcaacccttaaatcaattacacacaagattgaacgatccacattgaatgcggaaccgtccatcaggtgaaacaacatcgatccttctcccgctacaaaaaatctcacttttagtcacaacaaaacttgtgactaaaagtaaaaaaattgtgactaattataaataataattcctatattgtgactaaatgtattagtcacaaaaatgtgcttttagtttggtcacaatacttattgtgactaaaattaaattagtgacaacttgtatataaatactatattttagtcacaagtaattatatatttttcgttgtgactaaatgttaaatatagtaataaaaaaattatgttgtgaataaaaaattgttattaaaaatagcttttcttttgtagtatatatagacagagaa

SEQ ID NO: 261042 - DNA, 919 bp, Cannabis indica
atatatatatatataaaaagttaatacattaaaagaaaaatataattattttaaattatattttccttatatataaataatataaaaataaacaaaaaaaaaattataaaaatatggcattttaaacatttttattgttttttttattttatttacagaaaatacggcttttttatgttgtaatcttgttaatttgttgttgattttttattatctggatgttattttgatgttatttttatgtagttttattgttgattttatattgttttcgtgttattttaaaaatgtaaaaaaacattctttaaacgtaaaaatgtaaataattttataaaaaaaaatggtgtcttatgtaattattcctacatttaatgttgtggaaatcctcttataagctcaagttatttacaatagttctaaataaattacaagtatgtccgaaggtcaaaaccaacaaaagactctcaactactttcacttacaacaaaaacaaaataacagaaccaagaacacaagagcaagaaaatacagctcaacaatccaaggtcctaactatgctaactacttctactgcttatacaaacccagatcagagctggagaggactacctgaagcatttacttcctttgtgagttgtgtttagagtaaaagagagtagagagaaaagctcatccgagctccattgtaatcacatacatacagtgacatcaaaaagaaaatcagagagaaaaaaaaaagattatcaaccaaaaaatgttgtgttttgaaatctgagaaaacacttgtaattacctgctattgtagtagagatcaaactagattctaataatatatatttatatatatatatatagacatgattttgtcccgtgattatacttttacggaatacattccgtgaaagtacatcacgagaca

SEQ ID NO: 261043 - DNA, 637 bp, Cannabis indica
aattataattaagcttaattaatcaataaacacttaggaaataagttaatagaaaaccctataattcccactatagacaaaaaggtaaaagacttaaaagcccttacttcactaagaagtaatttaaatacttagggtaaaatgatccataaccataaccctaaaatctcccgacatttcaaacgtttaaaactcttgccccgctaaaatcaagatactataacgtatctaagtgactctaatgaccaaatcgttgcattccactgttactagacataaaatatgaaaaacataaaatttcatatataacatatataatacacctagaatttaaatatatctctataattacaaaaataataatctaaaacctatttctaataataagccttaattatttactaagaggcaaataacgatagaagattcaaataaatccctaattatctgctgattcccatgacaaaattagccaatcattacgtattctttttatctattactttcagtttaatctatatacgtatggcgatctatgtaacgtccccgcttcaagcttccattgggtccttacacccacagaatgaatgactcttatacacgagtacgccactctggctgcttcctggattgatga

SEQ ID NO: 261044 - DNA, 569 bp, Cannabis indica
tcacatataaaccattagagccgtaaattattttttttttaaaaaaatagtatatacagtaattcccaaataaattccgtaaaattactcaaataaaactattttttatgataaacaaaacaatttttttttttgaaagcataaacaaaacaaaattttaatcaaatgtactttcgttaaaattttaaaataattataaattggattgtttgaagctacattgcattaattaaatttcaaattagattttcttttcttaaaaaaaaatgaattgcgtttaaaatatatatttttaaaaatataaataatctctttttaaaaaaaaaaaaaaattgctaactcaaacaaaaaaaaatctttttagataataaatctaatttgaatagtactagatcatgcactaggtaaccgagatagtccagcctataaatacgaactgaagtaatagataatcaaattttctctaattaagcactctaatctgataattaaacctaattaattaagagaatttattaatggcaatgccaatagggtacttatctccctcttgtgtccacaccaataac

SEQ ID NO: 261045 - DNA, 1074 bp, Cannabis indica
ataatttttccagttttattttattattttaatgagaatttaaaaattgtattagtttatgttaacacatattttcgttaactaaatttgagcctcacagtagtgatttcacgcaaaataaataaaagctatagaaataaaatatgaacacagggggttttttaaatggttttgtagtgaaaattctgcatagtaccacaagttaatcttattcagatttctgattatttttcagggcctctcttgtttttttttcccctttttaatcttatttgtcactatttataatttacatagtggacttaattacaaagttgactgtaatatgtttacaccaatcatccctaaaatctttgcatttgattacatataacttagtgtaaatgcggtttatgatttgaaaatcatatagctgtgattttcatgcttttactgggtcaaaataattgtgttttaaacacgactttaatttcagtgatctcaatagcgagctggggccacttttccttctgaggtcaacgatgtatgtcttgcgtcgatcgcgattcttatttacaaagagttcttcgaagctcatttgaatgttagtttcttaacttgctagggttgtaagcctcgctgacgataacaggatgaagttatatgagatccccataacgagacgagcacctcgctcacttattcttgagttgatccgtctgtaacaattagtttgtactctaaggacttttgcaattgatatttgtcgctttcgtcttctaatgtgtaatgtccttgatgcctcgcaatttgcattcaacgacatatggtttatcgctaatatgctaagtactagtttgtatattagctcctcacctaagaccttaaaatctacaggttacaaatatactctgatactcacttaaataatgagttattcgatataaggcgattgcatcgatccatattccccttatcatgacacgtgtcctctaatgagatggcaaccaaattttgggaataataattgccccttaaaaagttatttttttagtaaaaagagctttttaataattacagagggcattttcgtca

SEQ ID NO: 261046 - DNA, 1693 bp, Cannabis indica
aaaataatggaaaaataaaaaaaataaaaaagctttaaatacaatttttttattgggaagagtatatgatgtagataggtttttacaactttgttattattttttttttaaaaaaaataaaaattgttcatcaatgacttaaaaacatctatacaaggaaaagacaagtcgagtcgtaaaataggagaacaatttaagttacgatacacaggtttgacatgaacacaactcgatattttacgaatttgacacggcttcacgaaaattttgctacttatgtttgtgttttatcaattttttatgttactcgttatgtttgtgtctactatctaaaataaatttaaaaattcaacataacaagaacatgggatgatgacattcaaattaataatttagcttacaacccgacaacatgacatgcaattttgtaggttcgacatgacacgaacttattcgagttgtgttcgtgtctgtgttttataaattttttgtgtcacgtgtcgtgctcgtgtcagcaattttttaataaatttaagacctcaacaaaacaagaacattacacaccaacactaattgccaccccaactgtaaagcatgacgagcacaagaaagttcaatcatagtccaaatagcccatttaacattgtttatcaatgcatgattgactacaactatttgattgacatccctacaaataaaattcaaaccaattacacaatcatgtgtaatattaatttattttaatatgtatgaaaaaatgttttttaatttattttgagtaatttgcggcgtaagtacctaagtttgactctttattgtagataaatacctaagtttaactttatacggcaataatacttatgttatattttcggaacttccctagttacctggccattaagggtcaagtcattatctacgtgtcatttttttcttggtatatttaaattaatttttaaataaaaaataaaatttaatgatctggactaatctaggtctgccatgtggccattaacttgacacttaatgactaggtacctagagaagttctagaattttagcttaggcatcattaccgtaaaaaattaaacttaaatatttatctacaatcgagaattaaaaagatatttatacaataaattattcatttattttaatatgaagtacttgattatatgcttatttaaatatatgttaatgtattaatttatgttttactatgaattactgtgcttataattaaattttataaagaaaacaaatctaaaaaagacataaaataatccttagaaaacaatcaattgcgagtcactatagcacatatgatttttgactttcaatgcttgagccattcttagatcaaccaacaaagtctcgtactcggtctcattgttagaagtgtcaaattggaatcttaatgcgtagtgaaacttaaagttgtttggggagatcattatcactcctgcacccgatctattttcatttgatgctccatccacatataatttctaagtttttgtatcgtgattgacgagtggatcttcttcggagactatctcttcaattaagatattgccaaagcttgacctttgctatcaatcttcctgaagcatcaggttttgataaaacttgtcttaatggttgatccgtcaagacttttaaaagatgttcttggaaataaggtcgtagtttt

SEQ ID NO: 261047 - DNA, 1669 bp, Cannabis indica
tgtttgagaaaattcccaagtgatcaattttagaaaaacataataaaaatctattctttaatctttatttacagtaagaagagagtaccatcgccgtcttgggtcaaggtaacgactccttctacattggaatttcccttaagaacagcgacggctttcttggcggcggtgacagtgaagggtttgggagcagctgtggcggtgagattgaaggaacggaagtgagttgggcgatcgagcttgagtgaaacaccatggaaggaggaaaggagaggtgggttttgtgagtttgggagataggcgaaaagggtaggagaagaaggtgaagctgatgataggaggattgagtgggccgccatggcagccatagctgcagcttgcattgggattattggaaagagtttgattggttgagatttgaggtgtgtgaatgaatatgataatgtattctgaaacttttgagtgagttcttttctctgttatctctctttggatgagagagaagcttctggtagtgagagagtgagtgagtgtagagagagaaaaacgctgtgaaaatgactatggttgagaaaacgacaactaactaaataaacgacaattttcaagaaaaacgacaataataaaattaactcagaaaacgacaaatatcgaaataaacgacaataaacagagaaacgacgataaacgacagtaaactgataaaaacgacaatcataaactgagcaaacgacaattattaaaataaactctgcaaacgacaattatataaataaacgacaataaactaaaaaaacgacagtaaactgataaaacgacaataaaattcaaaatttaacgaaaattattgaaaataaacgacaattaaaattaaacgacaataaacttgagaaacgacaatgaacgacagtaaactaacgacaataataatctgaggaaaaacgacaattgaatataaacgacaataaactcggaaaacgacaattatcaaaagaaacgacaataaagtgagaaaacgacaataaacgacagtaactgataaaacgacaattaataaaataaatttcagaaaacgaccattatcgaaataaacgacaataaactgagaaagcgacaatgaacggcagtaaactgataaaaacgacaataaactcagaaaacgacaaatatcgaaaataaacgacagtgaactgtaaaacgacatatcgtaataaacgacaatggacgaaaattatctaaataaacgacaattactgagagaacaacaataatcaaaataatatctcaaaaaaaaacaataaatcaaaataaacgacaagaaactgagaaaacgataataaactaagaaaaggacaagtctgagaataaacgacaataaatttagaaaacgacactaatttagaaaacgaggaaacttaaaaaatgaattacggtgttagttatgaaaatgaattgaccaagatttataataactcagaaaatttcagaacacaaataataccgtagacaaactacactaaataatagaaaacgacactattttaaaaaaacgacaattattgatataaacgacaactgatattgctatagaataaatagattagaccttcaacgacaattcgaacctgtcttctttgtatagagagagaaagctctctctctctctctc

SEQ ID NO: 261048 - DNA, 1211 bp, Cannabis indica
aaatcgcatgagagaggcatgagcaaaggtgagatgtgtaatgcgaagactctctccagatttcagttcagcccgtgcaccagtgagttcagtgagcatcaattggcgatccatagacattatggcatttgggacattctctggcagttgcaaggcttgagatatgtctttttcagagaaggaaaaccaatgtcctctaacatacacttttcgataaagtcgagaattctcatcaagaaaatcatcagataaattagcatagaaatctttgacaatatttgcaatgtaccctttgaaaccagagagagtgttctcccattgatggtattgaatgaatttaacaattccatacaccctatgagcatgcaaatcataattcctttcactctcaaactttcgggttgcatacaaattccaatcacgctcattatcacgatagtagaaacgaggacaataggaaagagatgtaggaatgttaccaggagaggattccttcattggctgcttgcctttggcagcagcagaagcctttgctgctgaagaggatcgagcaggagtggaagcagatttggtcaaaggaggctctggctcgagttcagtttcctcactgtctgaggaaactccaatgtcctctggaatctccttctcagaatggagagatacggatttatcagaggagacttccattggttcttcttcttctgaactcgaagaaaccgaaggtggattcgtcttaagcttcttggctggaggtgctggcttgtcacgacttcgagaagatcgaagttccttctcgacagaagcttgctgggcacgagtgcgagtggaaggaccagttggggtagaagcaggaactgatgcagcaggaggagaaactgcagcaggtggaggagattcctttgaagatgaagacgatgaagtccaggttttgtaagggcgcacaagtttttgagccacttgcttaggaagtcgttttggatactcgggctgagattcacgctgaggaagcgatgaatctcctatttttgcagcagcaggaggcacggttgaagcagcaggaggaggattcgagggggttgcatcggtttcaaccacctttttgggatgccctaggttctttgttctaaccatggtgatctgagagacacaatgaacaacaaataaacaagagagacaaagaaatagaatcgggtaggtggtgagaataaatg

SEQ ID NO: 261049 - DNA, 1404 bp, Cannabis indica
ctatactccccagactttgatatctactaaatcatgcccctcgaactttgacatatacttaaatcatgcctcttaaactttcatcaatgttagacttttttactaaaattagacaaaagtctttaaatctaataatctcaatagtttatggagtatttttaacgaccttaaaagttcaggagacatgatttggtacatgtcaaagtttaaagggtaaaaatcgtaattaacctaaattttattaatatacacataaaaaaagttgatactaaaattattataatttttgggctaaagtggttacaaatgttactggagcgactttggtttttttgaataggaatttaagtcttgaagagataaataaaactctttttgtcttattcctaagatttaatatttattttcctatacgtcctcttaattttcaacttgatcaataggatgggagagttttgggctttattatttctgaggagcagagtactttcttatttggaagacttatatatgataatgttcttattagtttttgagtttcttaattctttaaaaaagattaagacatgtgataatggtttctagtgcactcctaagcttgatacatctaaatgtttgatttagtggaatgtaatagtaatagtaatagtaatagtaatgtaatggaatagaaatagtaatagaaattaattaagatgtttggtttattattggaataaatattagaataaatagataaattgacaaaattcattactttaactttaatatttatatatatatatataaaaaaaaaggatattagagtcattttagctttactttatttagtctttttaatgtaatcttcattacatagcttttctattgtaataggaattcctttatataatgtaattatgattataatgtaatctcattatatcaattttgaaaacaaagtaaacattgtaatggataatttgattacattacaattcccttcacaacaaatcaaacatgcttaaggtttatgactaagttaagttttcatgttgattggattcatagagtgatgaattatatttagcgtaaaaagatggcacatgtctctactctcaaaacactaaataagacttgtccaaagagacttttgtactaatttttcattttttttcactaccattttttccagttttttggttctttggttttcggccttcaaagatagagagaaagaattgttttttttctgtagaattttaaaaaatataatttttctatatttatttactaatttacgtacttaaactttttaattttaaaaatactcttgtaaaaattttaaagttagtcaaaaattacactttgttctaataaaatgtaaaaaaacaatcaaaaaataacgtaaaaatcaaatttcat

SEQ ID NO: 261050 - DNA, 536 bp, Cannabis indica
gaagattcgttcgacggttcagtaagttttaattattacattattagttgattacctgcctgtatgtttgtctgaattatgctagctgttaaaaaagagtgcaaagtttgagatgtttggaaatacttataaatattgtcattacttggaatgtgatcgcaggtgcatagattatgcactcgaggtggactggtagaggtaatcgcaagctagctgggcttagggttgctggtgagggtgagaaccctccaccaccaccgaactgggaagagttatatgtcgcgatgcaagagactatccgacagcaaggtgaacaaattcaagagctaagggagcagcaagctcagcctattccaaaccttaatcctgatcctccggcaactctggtagtgccactggatgcagggaattgtctggagttgttgtatgagtggttcagaaagcagaatctaccagtgtttgagggtggtgctgatccactcaaagcgaagcagtggatgattaagataacagccatttttgattttatgcgggtc

SEQ ID NO: 261051 - DNA, 797 bp, Cannabis indica
tattgaatggcttcaaaaaatcttatgttaaacaaaaaaagggtatttttccaaataaaaattaaataatttattatttatttattttgcagagtggtaaaagattgaactaaatgttgaataattgatcatcatctcgtataataaaaaagccctttgaaaacaaaatggcttcaactttttatcatgataatcttcaataataaaagaatgaaattaattaattttcagatatatatgaacgaatctattaggcaatagcagtgtaacatcctatgacggcttattaggagtatttattaatttatagtgttggacacatattatactactatatttactctatacaaattatatataagataacaattaagaaaaataatcaaattaatttgcaaaatcagtcttggtcttataaatataggtagatataggactaggaaagagtctttatgttaatctaattaaattgatatgatcagaagcgtaatacactcgtgtgataaacatagttgagtcaggtacaacgcttatggttcatacagatttgatctatcttaaatagtctgattatattcattaaaataatttttttttttatatttgtattaatttaatttatctctactatacaataataatattcgtttgtggtgggaactcgtgcataaaataagatgaatatcttacaattaatgtattattttataacgtgagcagtactagtatagtatctggcaacaacaattttgaaaatgaaaaaataaattatgtcttcttgtggcctaattattttt

SEQ ID NO: 261052 - DNA, 644 bp, Cannabis indica
acaggtattattttggtaatccccaataattttacagtgtttgatagtctctctttctctctgtttttctctaatttcagtactaacaattgtgcttctttctcttgcatgaacaaccatccactgagttgaatatccgaacccaagtccaaggattccaaggttacccaatgtgagcctccttcaactcagtctccatctgttttgctctctgtaaacagacattttatttgttgttcagcccttgagttttgttgttttattttctggtattgatctgaaattttctgagatgttgtattgataattgctctctgaaatgttgtcctgcctctgtcttattatttatattgctggaatatatatatatatatatatgatgttgttattagagcacaaagagaggagagttagttacaaagattattactaaactttgtaactaactttaactgctctgtctaggtaactagaggtcgaaggccacttttgtcttttcactgcttgtaatctttatatttgtaatcagaacagtgtgcaagaatatggggatttatttcaacaaacacattagccaatgacactcgtactccacctacacctatagcaccaccaaatatcaattcaatacctgctacaactat

SEQ ID NO: 261053 - DNA, 607 bp, Cannabis indica
ttaatgtcaacttgactatttttcaacctagatgagagagttccttccttagtgatttctcacctcctttattgttcttccatattcgaaccttgagtgaaagagtgacatgctcacacattggaggtcaagtacttaatcatagtgagtaagacggtggtaaccaaacttgaaggagagaaagagatccaggttcagatcttgatagtactctgctacataaagtaatcaagggctacagatcttgaacgaaaggagtcattatattccactacaatccatgtaaagcattgttttaaataattcatatttaggatgttaatcaacatacttgttaataaatctagatcattgtaaaatattcacaacagaacgcctatttttgtgggttgttgaagccaatttgttacagagaatgtctgcccaggttcaaagctacagaggcaccaaaagtgactatcagaggagaatctagccagatcatgctttgctagaggttgaccggccttcgctgcaccatggacagtaaagggtggtctggccagatcccctggttggccaatttgttgtctctttgtcctgcttaagtatttggactcttcgtcaa

SEQ ID NO: 261054 - DNA, 701 bp, Cannabis indica
attaagacagtctaaaatagcatcagtaaaatctctacctaaaatagcccaattcttttggtagaaataagcattaaacccatctaatcccactgccttatccccagacaattgaaaaacagcctttttaacttcttcagcagtaaaatcctgctcaagaaactccacatcaggagtttccaacccaggacccaaagcatcaaagattacagcagcaacatcaacattacaaccctgggtactaaaaaggtcagaaaagtgagagataactaagttagctatcccctcttgactattaaccacattaccctcattatctttaagatatttgatggcattagttttcttcctaagagtggcttgtttatgaaaaaatttagcgtttttatcttcagctttaagccacctcacccgagccctttgtttctaatagacttcttctttgtagagaagagcgtccatcattgaattcaatctactcagttgaagtctatcagcttgagtaagcacatcttggttttgaagagtctctatttcctgagttaattgctgaattctagatttaaaaagatgattatgagtcctattccaatctttcaaatggctaacacagtgggcttgtttatctaaaaaataactaaaatgattggaaggtgaactatgagttaaaaaatcattccatttattcttcacaaggtgat

SEQ ID NO: 261055 - DNA, 1379 bp, Cannabis indica
atttaatagacaagggtaggtacctactatgttgcggtccctatggattttttcttttgagttaattaattaattaagtcaatcaaataaatatatgaattggaaaagtgattataaatatttcaaatttattgagatatcttctcaagtagttgagagattccctcataaatatcgataacataattcggttatagatatttatttatttaaataattaaatatgatttaattaaagatcagtctttcattgaaaaccacatctctactacaaatgacctttttgtttttatcatcccaaatacagtagacaaactcatcccttccatagccaatgaaagtgcatttcttagattaaggatcaagcttattcttgccttgatcactaatatgcacataagctacacaactaagaacttttatatgtgataggtttatctcttttccactccatacctcctctagtattatgtactctagtagactttatgggcctcgattaatcaagtaagctattgtgttgattgcttctgcccataattgctttggtaaacctaactgtatgcgcatgcttctggctctttctatcaacgttcagttcatacactcagcaacaccattatgttgaggtgtgctaggcacagttctctccattatgattccatgctcataacaaaacttcttgaatgtgttctcttcatattctctaccattgtcagttctgagaattttaatcttcagacctgtctcattttcaaccatagctttccatctcttgaaatcctcaaacacttcggacttatgcttcaaaaagtaaacccatacctttcgagaaaaatcactaataaaagtcacgaagtaatgtttcccaccaatgtatgaagtagttgttggtccccaaacatcagagtgaacaagctctaagcttttcatctttgaggttttgccacttgtctaaaagctgaccctcttttgctttctaggtatgcaacctttgcacatatccataataattgactgtagacttgaaagttttccttttggatgcatacgttttatccctttctcactcatgtggatgaatctctagtgccacatattgaaattttcattccctattgcaactataattgaatagcacacaattgttgtgatgtaaagagtgctactcttttttccgtgatcaaacgtcgttgcaccctttgacatcttccaattatcaccttggaagtttgtagtgtaacctttcctagccaactgacctactgagatcaagttctttcttaggtcaagaatatgtttgaaatccttcaactcccaaacagacccatttaacttaatcttcactacacctttaccaacaatatcacaagattggt

SEQ ID NO: 261056 - DNA, 1320 bp, Cannabis indica
cacttggagtaataagcaacatgcaagtgatataatctattccaagattgatcgggtactagctaatcaatcttggatggttttattcacaagggctgaagctctctttcttagtgagggaacttttgaccatactccagttgttctgaacatatatcctgctttcccttgtggaaagaagccatttaaatattttcgtatgtggtcctctcatcctagctaccatacggaagtcaagaaaatttgggaggaaaagatagttggctccaaaatgtttcaagtggtctcaaagttgaaagcattgaagattttctttaggaaattcaatagagatcactacagtgatattcaggcagcagagagaaaggttaagcaagatttagacgaaatacaagggctctttcaccaaaatctgcttgatgtcaatctgtagaaataggagcaagaagcaagagaatttatatgggaaaatccgaaaagattactcctctttcttacagcagaaatctaggataagttggctaaaggaaggggatgaaaactcagctctctttcactcaagcatctgagaaagaaggatctgtaatagcattttgtcaatctgtgacactgcaggaagaagaatggaggaacctgatgagattacaaatgctttcttgatatttttatcagaaactgttgggatctaaaactgaaaatagaagagttgtagccaccaaattaatcacacaaggagcttgtgtaacatagcaacacactcagattttgatggctccttataccttggatgaagtcaaagaggctgtcttcaatattcctgcaacaaaggctccggggccagacggttacaatagttcattttatcaagacaactggaaattggtcaaaaatgatatcttcgaagcagtcacttcctttttacatacatgccagttgctcaaggaattaaactcaataattattacacttgtgcccaaaagcaaatgcccaaatgttgtcagtgactatagacccatagcttgctgcaatgtattatacaaagtagctactaaaatgatttgtagtcgcttgaagctgattcttctagatattgtagctcaaaaccaaggtggttttataaaaggccgctatattgctcagaacattatgatttgtcaagatttaataaggcactatgggaggaagaatgcaaaggctaactgtatgataaaactcgatctgcagaaggcttatgacacattggaatgggatttcttagaagaaatgatgcatgcccttaagtttcctgctttctttgtcaaactaatcatgacttgtgtc

SEQ ID NO: 261057 - DNA, 590 bp, Cannabis indica
acatatataaatatatatatttgttcatgattatagtgttgtcagcacagtggaatataatcatgattataagttcaaaagtttaattcccatgatttttctgttcactggatttagtccggcatgataatcggcgataaggtatacctacaccttggacaagtgttatgtcctttccagggtattggcaaagtttaccaatatcagatgaatggagtatacatttgatgggactgatattgatcttggataagatatcataaacttactgttatatctttctaagtcaatatcaatggctgatctaaggtctatggatcttaatcttgatctggttaggttaagcttagttgtattatttatgttcttcaagttgttcatggaagctagcaaatggttttggcggatatttacatcttgggaacatggtagtttaatgagtgggagcgttgatcatagatatcgaatctatcgctcctataagtatttagaagtgaaactatgtattccttcgagcttgattgagtagagataaatgattggggcctcattttagtaattatattagtttactgaagtatcatttatag

SEQ ID NO: 261058 - DNA, 1468 bp, Cannabis indica
ttaccttttctaatccaaattacaaatgcagtcattacaattactcccccgttaaaagaatttcgtcctacaaaataccaataattaaaaattacaaattttatttatgtttaatattaaaaaataaaggagatttttatttataccacaaaaatttataaatgcactccattttaataatttttattttgcataaaatacatatatttaattatattagtttcttctttccaatttatattcttaaaaaatatagctattaaataaaaataaattatatgaaatttcgttaaaaaaattatatataatttttgttatcccaaagtttacacatctgacctggcacttacacgtggcataatccagccaactcttaaacatgacaaggaacttttgagaagaagtgtgcttggtaggtcccatatggggcttacatccataagttgtagatggatttccatgaagcatctggccaggcgatcaacatgtcggtcagggaagataagagtaacaccttgcaaaagtgattccactagtaatcccacaaggaagacatgtcttgagcaaggcctgaccaggtgaatgatacgaaccacaccaacatttgtgatgaaacctgatacccattatggcagcctctaagaattcttgaaatttggatgtggaaccacgacccaatgcttagttaaccatgaaccttggtatgaaggaagacgccacaaacggtagtggaaattcgcttgataagtcaggttgaacgccacaaggaatactccttgataagctcgaatagttctctcaagaactcaagaagaaaacctatcaaaattttattccaaaatattctgattttttaaagtgtttacaaggctttatatagcaaacttacaaccaagaaaaaaggaaactaaaagaaagacaactttctaactaaaacaaagacaaaataaaggaaacaaaattaaaaaggaaagctcccaattgccttgaaaaacttgatcaacttaatttgggactaaattgagtctactttgatgaggaacacaaattttcgctctccttcagtgttgaccacggtctcctcttgttttaaaattctgttgactaagttgttgagttcttctttacatttcttggctcgcgccctcgtcaccgggccaactggaactttacttgtatctttagccttagtgttctcatcattcccccctcttgaaaatgatttgtcctcaaatcttcacttgcatcaaaagggcttatatcagaaacattaaaagtagcactaacattatattctccaggtaaatcaagtcggtaggcattgtcattaatcctttcaagcacttgaaacggaccatctcctcaaggtagcaatttggaaagtctttgggctgggaatcgttctttcctcatgtgtaaccatacccaatcaccgacctcaaaaacctgcttgtgacgacccttgtta

SEQ ID NO: 261059 - DNA, 646 bp, Cannabis indica
cctcctaatctctctaatcttagcgtatttggtgtgcaatatgcacaccattgggaaattagaacctagagctatgaaatgtgtttttttgggatatccagaaggagttaaaggctataggctttgggtttgggaacaaagagggtttaaaacaattaacagcagggatgtaatatttaaggaagatgtttttccatgtttgcctatttcatctaaccctagtgcaggtacaaaagacactgaaaatgcaggtaacactgcaaatgaaggaactggctctattcaggtggaacaaacagtgaacacaactgaacagaaccagggagaacgggttcaggtggaacctggggaccaggttcaggtggaacctgatgaggacaacactgacattattgatgaagggacccaagatgacttgagggattatcaactggtcagggacaaaggcagaagggtactaagacctaatcctaagtacagttttaacatatgggatgaagacattgcatatgccttcatgagtgaactggaaatggtcaataatgaacctcaatcatatgaagataagagcattgttgactgcaagtggttatttaaggaaaaagaaggcagaactaagggataacctataaggtataaggccagg

SEQ ID NO: 261060 - DNA, 1260 bp, Cannabis indica
ggcaagttcttctagagattgttgaagccatggctctcaaggaagtgttatcctggttgaagcgcgatctttcgagtgttagtattatcgaatctgattgtctggtgttgatacaagctgttagaaatttggaggttttgtcatccactcttggtggtgtcattgaggattgtaaataacttttatcatcttttaagaatatttttttacgttttgtcaaacggtctgctaatcaggttgcttatcttattactagaacatcttgtttatatgttgatcgtattttttaagagtataatctccattttgatattgctaatattattgaggtcaagttggtctaactgaataaaaattatacttaaaaaaattaaattttttaaattgatatttaattatacttattttttttttcaaagttcctatcatagtgttcataatatatatatttccttgaattgagcggttgaactgtcaatggcgtacattatccatcgttgcctagcagaacgccatgtttgaacttgaatgatttcattataaaagaataaaaaagattctattatagacagccaaagcattacacacgacccataaaagtctaattggccatattagtaagcatcgttaccaaatgcttactaatgtagcaaaaattcaaaaatagaaaagaaaaattataacaaagtccaaacagggcaactgcagtgcaattaataattatttgtcctgaatttcaagataattttgtttgcttatggattttctttcttctctaataatataattaattagtaccactgttccctatagttatatttacatttagttgctgtacagagaaaagtatactagtgttgaaagttagatcagaactaataaaaattaaaataattagtatttttgtcatctaaacttctaatatattacctaatttttttccttaagatatacactttgtaaaaaatttcctttaaaattatattccttatgttaagtttcgtttttttacagttaaaaattagtatttttactctctaaattttgaccaatacaaattttacctcattttaataaaaaaataatttaactttagtaaaaaaacctaacaaatatcaactttagtttaaaaaaacttaaattattcgtaaaaaatattttcaaactttattttatttacagaataggtattaaaaaaaacaaactaaaattattgaaaattcattaaataatttagacaaattaagatttaggattttt

SEQ ID NO: 261061 - DNA, 718 bp, Cannabis indica
ctaccattgttgttgtcgttgcttaattactgaattcttaaacaaaaaccactagaatttatataaaactaatatttacgtggctcgccacgtaactctgatctagtgtatatttaagagtttgaatatcttagatattcatctatagtaaagtaggttcatgtgacatttactgcgttcgtatatgtagaaatatgtattttgaaatgttattttgttttaattgttatttttgtaagttgttttaattgttagtttaatctttaaaaaaaatttgggaatgtccaattatagttgttatgttgcccaaattgtagtagaaaaataaaaataaattataaattaattttaaacttagtaaaaaattgaaatattaaaatttaagtaaataattcacaattttattaggtttgtatttataggattatataatttaatgaatatataatttatattttaatttgtatatggtgaataattattaattaactaaaagcctaatttttcataatatgctattatttatttataatgaaaaaaatgtaagatgtaaaatacaaactaatttattttgttaaaagttttattattataaataattgaatgtaaaattaatttataattattaaaaatatgaacaattaaataattctccataatagtcattataatttatttaaaatgaaacatgtatgatatgttaattaatcaacttaaa

SEQ ID NO: 261062 - DNA, 916 bp, Cannabis indica
cccttcttactcacagtgagtaagaagttggatatgaaagcatggatacttagaatagaatttgatggtgaatctcactcaaattcaatgtgttagattccattgataagtacataatgaatgagtttttgttagaagatccaacgtgaagaccacatgagcgcaacatgcagtcgagctaacaacataaaaaaataaacttacgggagtttttctttacccttttttttattttcattttccattgatgttatttgattgagccttgtggataatgcttatactaagtgtgggagagaaaaattgccgtgtctgttcagtgtttttttttttccttagttgtttagttatttattttattattgttttttagtttatattagttttgtttttctaaaaaaaattagacgagcatggttttactgaaattttgttgacaataattgttcttgtttgatatgtgactctattttgatgtcttgtgcatggtcttttaaaaaataatttggttgatgataaattttttgattgtgtgatagttatgattctaggaaaatgataagctctcataatttgtgtgcttaactcgtaattaattactgctcaagtttaattttttttaagctttagcacaccctaaggactagcaaaccagacttgtctacccaagggatataaggaaaaaatgttgggattttatgccctaaataaaatttaattttattgtaatctttttactttcaataaagatcaaaatcacatcttgacattgtcatatgctttgttcatatgttttatacatgattatatgtttaatatataagttctattaaatctcaaacatatagttattcacacagtgatgtcatcatagtggaatttatgcttcaaatataaagtctcacgatttatcagt

SEQ ID NO: 261063 - DNA, 546 bp, Cannabis indica
aggggcatgtgttatagtgagatttctctcacctagaaactcgagaccagactcctatttaaaggacacgtatattcagatttccaatgaaagctgaaatgtccatgagagacttctcgaagtttagacctcgcccaggataaaaccagcaaggtactgcgagtacgacctaagtcggatcgcatcatacaggatggatccaactcgcatgtgtcaggacatatgcgagtatcctctctatacttctgcgaaagtatagagatcaactctctatgatgtgatttggtcccaacgacccaatagccttgataaaccggcatagactcgcatgtctaggttctatcagctcgacatgcgatgtctacaagaggcgattacctaagggcgcagacgttccaaacgtactgatgaccctgcgagctcaacaacggaacatgaacagtcaactcgcagatgcggaagacgcatacgttgatggacttagtaactgtcgttcatttattaatgttaacgttgcttgggtttaattattgcaattcaatatgt

SEQ ID NO: 261064 - DNA, 976 bp, Cannabis indica
attcaagacctccaacacacacaactttctatagccacttaagctaggtttaagtagttaaatttttatttctaattcgtacctcaatagactaaacataccacaacattattaacaatccctcaagtttttactagcttttaagtactttaagtgccgaacattatatcaatactaattttttatattatttattgaattaaattgtgcaaaatataatattaaaatatatcaataacaatatatctcaagaaattgcccttaccattctcctcttagtaactctcaaactcatcatactcctccagccaatccacagtcacctactcactcaaatttaaatgttgcaataactattaagaaagaaaaataaggatttaagtatatgaatatctctccctcaaattctacctcgtttcaccaattaaatttttgcccattttgcaaacgaaaaactaaattacatatttatgttgattttcaagaaaaaaaatataagaaaatattagttgcggtgaggctcccttatcattcaagattgttggttttctctgacggtgatgattacgcctcctacttggtgagtcaagatcaactgtgacgttagagttggtagtgattcaatgtatgtggtagcgctgactagagatcataaggagtcgattttgtgggtagatagcaacattcttccctgatctgctcgttggagaaactgcgacttgcttgttagccctggaattagctatcagttggagacactcttttgtgattctgagacagtgatcaacacgctgaagagaacttattctgtttggggtattggtaactatacgcttcattgtaaacacctctcaagactttttattagttgtaattttttaattattcctagacttttataatttttgcagcccataatgtggccaggctttttgtctgtagtaatgtacgagtatggtcgatctattctctatcc

SEQ ID NO: 261065 - DNA, 690 bp, Cannabis indica
aaaattatgttcatatggacattcttgattaattatgttcatatggacattgttgtgcacatgtaagttgaattgaacaaattattgcatcagatgttgatatattccacaataataatcatatgatatcattatcatttgtgttagattgattttttagccaattgatatttagtcataattaataagaattaagaataaaaaatagtaaattctaatacataaacaccgatctctttttgagtgtaaacatagcaaaatttctacttatataaatttggatgccttttgaggtcatgtttgacctcttatatagagacggatatggtgcacctctcttccttggttaactttaaactcatacatggttacataaatatttcaacaaattcataattatttttaaaatttcagaggtagttgtactccgattttatagaagtatcctgttattttcgtgattgttagtttacaagttggagtgaggcatctccgcaatattgatgacaagaatggggtacgtggcctacggagtaagaggtagtcagagccgtttatgggcataaggcgggctaggcctggtggctaggatccacctagtccaggaagaccaaaaaaaaaaaaaaatcccttttaaaattacacaattttttttgttgattttgaaaattacaattttttttttccaaa

SEQ ID NO: 261066 - DNA, 933 bp, Cannabis indica
agtacgaaggtacactgagtgcaagtggtaaatggtacatggtcatatactagttagaacgttcttactcatctgttaagccttgtaaataggtgtatgggcttctagatacaagtcagtagtatatgatgtgttttatgcttttattactgagtctgtcgactcacagatttgctttcatgtgtaggaaaaggaaaggcagaagctgaagaggagggagcctagctgagatgaggttgtacatgtcatggcggcatgacctggagagttcggtcttgggacatctggggatattattttgtagttgatgtgcgacctgctatgtatttttgcatatattttataaaagcctagaaacgggatcccggtgtttgtaaatgattatgtaaattatgaagtttaatatttattataaaagttttaatttgacacattttttgagaaaattctttgattagcaaagatagcactgtaactgaaaaagcactatagtgtgccttagcattatggcgttacaatgggagtcttcctcattcgtgtgtcctcaccttagtttgatgtttagccaagtttcctcttagttaattatttagttatttatttatttatttttcatatccaagattattgttagattatcatattcttagaaacttttagtattgttattttcaaagtttggatatttttttttatttattcaaaagatagttacattgccaaactcaaaaacatgtcaccaaggataataatcaaaccttagttacttggggggcataatggtatgaagttgactatacttgtttctaatcctacaatttccattaagaaaataattttagaaaagtggtgaatttcttaaaatcacaaacacttagactaaatgttataatggatagagaatggatttaatcatatacatgataagcactt

SEQ ID NO: 261067 - DNA, 1121 bp, Cannabis indica
ttacccatgatccttcaaagtcaagcacacatgcccgtagcatgtcttctagaatttgaatagttctctcagatcgcccatccgtgtgacgatgaaaagatgtgctaaactttaactgagtagcaatagctcgatgtagactctcccagaatcttgatgtaaacttcagatctctatccgaaataatggactttgggacaccatgaagacgaacaatttctctgacatataactcagcatactggtcaatggagaaattcgtccgaacaggtaggaagtgcgctgactttgaaaaccagtccactatgacccacacagagtcaaactatcccgtggttctaggcaaacctaccacgaagtccatagcaatatcttcccattccactctggtatgttcaatggctgcagcaaccctgcaggcctctggtgttcagcctttacttgctgacaggtaaaacacttagcaacatactcatcaatgtcgttattcatccctggccaccaaaacatggctttcaggtcttgatacatctttgttgaccctcgatgaactaagtaaggagtcgtatgagactcatccatgatctctcttttgatactctcatccatatgcacacaaacacgatttccgaatggtaacattttcgtttcatccactgaaaaatcactagctttcctagctgaaaccctatctcaggttttcaccaactctggatcttgcatttgtatttctttgattcgctctataagagtagattgtagggtagtattagctaactgccctacaaccaattcaatcttagctcgggtcatctcatttgctagctgttgggagattatttcatagtatagatttgactctaaccctttctacttaaggcatcagcaaccacgttggccttaccagggtgataaaggatctcacaatcataatccttcacaaactctagccagcgtccccgtctcatattcaagtccctctgggtatttcaaactcttgtgatcagtgtatatctcacatttctcgccatataggtattgccgccaaatctttagcgcaaataccactactgagagttctaggtcgagagtagggtacctctgctcgtactcctttaact

SEQ ID NO: 261068 - DNA, 1394 bp, Cannabis indica
tagatgacggacaacagcttgctctctccaagcaggcatccgtacggggactccattctggaacgagctacaacaagaaggagcttcaaaccttcaagacttccagaagagagtccagaaatacattaaccttgaagaggcccaaatagtggcctatggaggatattatcccaaccgggatggcaggatatgtgcccggagcccagctctcaggcactgtgccagcagcagctcccccgatgagcggcatacagttttctgtaactcccggatatagccaaggccaggcgttggcccccgcatcttcacatttcggaaatccctcagggataaatggacaagccccctcgcattccgcttcgacagcaagtttagccggtccttcccagggctcaaagagtaaatggtcctccaaaggcaacacccggatggaggataagcgacaaaaagggggtatactccccaatatactcagtatacggagttaacggactcccaggaacgtgtatatttttctactaggcaaaatacgcactaccagagactgcctcctttgtacaaagacagctcccggagggatcccagtaagagatgcaagtaccacaacgacattgggcacaacaccaatgaatgcaaaaatcacaaagatgagattgcaaacatgatccgattgggacacctctacgagtggatcaagaaccggttgccccatctcaacccgggtcaggcggctggagctttctcgcaagaagcaccaggggatgcagcaggagtattggctccagttgttcccccgggagatgcccaggatatccccggcctgccacctagacccaacgggagagtggctatgatgtcgggaggacctcacatcgggggaattacccgcaaggagctgaagcggtacgcaggggccgtgaaacacgatgaagtttgggaagttactcaactcccagctcaaaggccccggctaatggatcaacccattacattcaccgaagaagacgctaaaacagtgtgttttcctcaccatgacccatttgtcatagagaccccaattgccaataacatcgtggctagagtcctgatcgacaatgggagttccgtgaatctgttgttcaaagaggccttcactacaataggcctaacggaccgagacctttcactaagtggttcccaactcacagggttcaatggaaccacacttattcctatgggaaaagtgaggcttccagacaccttgtgaccggacacacctcagcgcactttcaagtactacacgtttgtggtggtggactgcccaacagcttataacgcaatcctcggccgaccggccttgttggctttggtgcagtcacgtcaatacgacacttgtgcctgaaattcccaaccca

SEQ ID NO: 261069 - DNA, 620 bp, Cannabis indica
ttaacactatatataattgtgttttgccacactcttgtaatcacctgaaaacctttctaattcaataaacaattttttctctgtttcgtgttaagaatagtatttattcactttggctctttccacgttttcaactaaggacacctaactatttattaactctactctatacttaattattaagctaataaaatattatatataacaaacaacaacaacaacaacaataataataataataacaaaattaaatggatgaagaagagaacagagaagtggctctgttaagaaatgaagaagaagaagaagaagaaagatgcccaggttgtgttcttgaaaagtttaagcaatcaaattcttccattcctttcaactatttcttctttgtttttcttcttgcccttgctgcaggtaattaattaactaattaatacataaatttataatctttttttcattttaccctttaatttcatcatttttgtatttgttcaaattttgcagctttaccaatatcatctttgtttccatttctgtatttcatggtgagttttatatattagtgtttttgtttatgatgatgattatgatgatgatggtgtgtgatttgaataaatgtt

SEQ ID NO: 261070 - DNA, 1119 bp, Cannabis indica
agaattgagccatatataagaacatgggctactccactcattgccaattggttttgagttggaaccccatgattctcaacattgatagacgtgacaaaaaataaattctaaaactcttgaaagttgaaccgtatctttgtaactctaatgcaagttgacttttgagccaaacttatcatttaacaatctccaccttgacaaaaaaaccaaaaaactagttttaatattgtgaattttatttatggtcctaaaactgtaaatgttgttgctaatattttggctaaatttgctctatcaacatccgctaagaatattcctcttgtatcagaaatattattatgattgaggccatctattaatgatatctcctagctctcagccccttagagctatttgctctttggtggtgtttatgaaaatcatatcaagaatatacatataacttctatttacatattagtttggcgatcttggatttacgaatttctaaccaaatttatatacccctaactataggattatcatagtgtaacaatatgtgagtgtgtgtatgcatttatgtttgatttaatactttgggtttaggggaaagggtattaatttatgcctcttttattacactatttcaaggcttgttagtaatttaaaattagtatgtaaaacctataaatatataattagatagtatagttattaataaatatggaatgagaaaagaagatcgacattgttttagaaagtgcatttggaatatttatcctatctcgaagaaaactattatctatcatttttgctgtgcttccatgagtgttaaatgggaaatgaatgttacagaattaacattattcaaagcaagtaacatcattattgtaacttattagagttgacaaagagtttttgggcttttttcatgtttgataagcaaatattgtaagaagccccgaaatttggcacataacgagtcacaagccttttcttattgttatggttagaaaaccttctagccattgcagagaacacaaagaagatgaaagaatgaaagaacagaaagattggaaagacagagagaaagaacagagcaaagagagtgaaagaatgattgaaagattgtattgcatt

SEQ ID NO: 261071 - DNA, 1421 bp, Cannabis indica
agagagagagagagagacttatgaaagaccaatatctcaatagtgtagaaagccaacattaattatttagtattcattaatacaaagtggtataataagtcgaatatatgtatatatgtatatttacggatgtagacaatagacatatgttattgaatgatgatttgaaaggatggtattatagattaagtattaaaagggtaattaggtcactttaaagactaatgaagttgatctcttttgtgagtgattaagtgaagagttgaccaccgcttggcgcgtataggttggcaaccatgcagttgtgtagtttccacgttctagttttgactacccctttttattaatgtgtacatttctatatatttatacatatatacgccggcccacacattatttataattttatatatgtgatcatgtgtacaaataaatatgagatgagatgagagagagatttaaatgtaataaaaataattaacttgcatttctatatatgaccgtttgaaaatgagatgaatatatacaaatatagcagccatttaattaattaattatatatttgtatgggaaaatagaatgttaaatatattagagaaacaatggagaaggggccacaattattattaattgtggtgaaaattaaagaattgggttttgggttttagggtttttataattataacacaaaaggaaaagaatgatatatatgtgaaaccctagccgagagaaatggggctctacaacgtgaatgtttgttggcgaacatccacattgaaacgaacatctctctctctcttaattctcaattttgacgcacaaacaccaatatctagagtagtagtactatactatactatactgtgttaattaattagcattgatcagcgctacatatgctacgtgtttaagaaatcagcttataatataaatatttttaaaaagaaaaaacaaaagtaattgaatagtttttaaggaaacataatctagaataatatatatgccaattaacttccccaagggtaacagctgtatgtatcgatcacaaaaattccttcatcatcatttaaatttaaccccaatattgttgttgttcaatttgcagagtacaatatatatatatagatatatatatcatcatgatcggttttcacaaaaactcatagctcagaaatatactaaacatatacacataacaaaacttaatcttacacggaacatacatatttttgttttatttatctatctattagtactccactttttctaactacttatttcaccacgctagaaataagtctttaaaaagtccgataccaacaaaaaaacatgtttttcttcttctcttctcttaataatgcaacgaaaatataacgtggcattgacaaataaaaacaaaaaaaaaaagaacatttcccctc

SEQ ID NO: 261072 - DNA, 2300 bp, Cannabis indica
gttcgcagagctcaagaagcagtcatcaatggccggcccttttctgagactcttgttgaggttctgtacgacattaatgagcggcttcagtttgaagacatagacgttcctttgacaaatgttagacccgtgaagaaagttgcccttgtatccattacaagtgaccaaggtctttgtggtggtttcaacaatggaattatcaaaaaggtcgagaatcgtatcactgatttggagaaacttggattggattacactgttgttagtgttgggaaaaagggcaactcttattttagttgcagacctaattttcatgtagataagtttattgaggcagggagttttccaactacgaaagaggctcagactattgctgacaatgttttctcgctctttctcagcgaagaagttgataaggttgagcttgtttataccaagttcttgtctttgattagatttagtcctgttattcatacattgcttcctttatcaccaaagggaaaggttgttgatgtgaatgggaatagtgttgatgcatttgaagatgagttttttaggcttacaactaagaaagggaagttgagtgtggagtgggataaagctaaaaaaggaagcaaaggattgtcccctctcatggaattcgagcaagaccctgctcatattcttgatgctatgatgcctttgtatctgaatagccaaatactaagggcattggaagaaagtaaggctagtgagcttgccgcgaggatgactgctatgactaatgcaactgataacgcagctgacttaattaagactctttcaaccgcctacaatcgcgcaagacaggcaaagattactggagagattttggaaattgttgcaggagctgaaggatttagaaatatggactaaattttgaatatcctttttcattgtattctctttgtaccatatatacaaagtcatcacttggatttttttttttttgaacaattttgtattcatgtcttgattgattgagtatacaccctttgaattaacttctgaaatgaaaacaaaatgatgttgttttcaatcatattcattattggtttttactttggatttcctcaattaaaatggttcagattagaataaatggtttaatgaattcttggaatggtttgttgtatgtgatatatgatcctgcagctttattatatatttcgttattgaaattatttgatattgttcacctgttttcagtgcttcatcttttcttctctttatttttgttgttgtttctgatgaaatgtgtaacatatgtgaatatttttccgataaaaattgtaaaatatattttaaatctttaatttaatctcttttcaaatttagaatatatttaagaaaagaaaatttttatcaaagtggaaatgtatttacattgttttttgaatgccatacacattttttttttttgaaagaactatatacaacgtattgaaatggagtatttaagtacacactaagggatgtactgtattgacagtattgtattgtattatgttggattgtattatattgtattgtattagtattatttaatacaatattatgtttagtattgacttgtattcatagatcgtgtaaagttataatatatttttaatacactcgatcccaacatcaactacgggtccgggtcccgagtctcgagtctcgggttcgggtccggatccaaaattaggttcgagtcagggtctgagttcgggtctaggtcccaagtcagggtccgggtctcgagttcgagtcctaggttatgagtccaggtctgattctcgggtcgcagttctctggtctgggtccgggtcccatgtctgggtctaggtccgtgtcccgagtcccgagtcccgggttcgggttcgggtttgggtcccatgtctgggtttaagttcgggttcgagttccgggtcctgggtttgggttcgggttcgggtcagagattggtgttgaccccgaatcttttgtagatattataatacaaactaatacagaccatttgttatgtattaaataatacaacatacattgattaaaaaatttggtcgtaataattaatacaatacattgctttatccaaacataatgttatttattatttaatacaatacgaccctttacacgacataccaaacgagctatactcctttaagaaaagaaaaagaaaaaaaaaataacttccaagacaaataatgagatattaaaaacgaaaccaaccaattcaaattgattacaagctaaatggtcaaatatttgtcacaccactatactctacctttttt

SEQ ID NO: 261073 - DNA, 501 bp, Cannabis indica
ctacagcagagaagaaattagtcaacaactttgtggactcattgacagaaaatgtaagatctcctaaatttttaagttgaattacggtttcttaatagtttattttctgttttgaatacataattttataaattgacttaattcgcaggtaaagccaataaacgacactatgttcgaagtcaaagaagtaaccagatcatggggcatcaaccccaaggagaaaacatgcagttgcaaccgattccaacttgataagttaccgtgtgctcatgcgcttgctgttataaaagagatgaacttgaatgtttacaactactgttcaggttattacatgacaagaacatggcttgaaacatacagcagctcaacatatctggtacataatcacacaacatgggatgtgccacaaaacataaaagatatcattgttctgccaccaaaccagaaaataagatctggaagaccgagaaaacgaaggtttttatctgaatgggatacaaa

SEQ ID NO: 261074 - DNA, 1098 bp, Cannabis indica
aggcttacaatcctggcgagccaaaagatagcattcaaatgagcctcgaagaattctttgaggataagaacctcgattgacaccaaacatacatcgtcgacctcagaaggaagaatggtcccagctcgctattgagatcactggaatcaattttctgtcgagacatctccagatacaatagctaaagacgtgtttaatacacgattgttttgacccagtaaaagcagaaaaatcacagctatatgattttccaatcctaaaccgcatttacactacgtgatatgtaatcaaatcccatgattttagggatgattgttgtaaacatattccggtcaactttgtaattgattgtccactatgtaattataaatagtgacaaacaagatcaaaaaagggacgaaaaactcatacgggagagttcctaaaaagtaatcagaaatctgaaaaagacggacttgtggactatgcagaattttatctgcaaaaccacgtaaaaaacccctgtgttcatatctttattactataacttttatttttctgtgtgaaattactactgtgaggctcaatttagttaacgaaaatctgcgtagacagtctggtgctttcattgagagcctctatgaaaaagtttagaaaaaaaaaacctcccttcttttgaagaaaaaccacctccttcatggttgaaaatcgagaaaatgttaacaccccacatgaggaaaccaatcatcattcacgaaatcccatgggctccagaagatctaccaacccgcaatccagaaggaccacccgttttaggagggctcaacctgagagtggccacagtgcacggaccacacgttcctgaagaattcgacccgacgttggtcctagtatgcagaccacacgcttgaggagaactcagtgtgggaatggtcagaagcacgggacgagggatgaagagctcaatcatggaggtgcctaatttgtgggagaagtatcttatgaaatcgaaaaccgccgcttgagacgtcgtctgggagaggcacagcgtcgaaacgctgtgttagagcgtgatgcagcctcgaccagggcggaacaggggacgaatgctcaaaatc

SEQ ID NO: 261075 - DNA, 555 bp, Cannabis indica
atccaaatagaatatcaacacttagcaacttctgttttggcatcgtgaagcacaaaagcaatccctataaatctaggatcgtatcaatgagctatggcaagctgtccaaatccctcaatcagtgtactctatatatgtaatgtgtaatcttaccaattatagacattgtaaacaaaagggaaaccttccctcaagcccatagccgtaaaaatagtgatttattctcactgggcaaaaggttgacaaaaattatctaagagagcatactcagaaaagtcattgtaagagctttaaaagaagaatctttgtattctttattcttaagtcaatacaaatcaaggggagtagactattatcgaactgctcggggccgaacctctttaaaaactctgtgttcttcatttatcttttcatattatatctaaaatatatcacttatcgcttacaattaagactcactatcgttggctaaaagcgaggtcaacattttggtgattttattgagagccaaaatcatacaacttaaattagatattttttcaaattttgtggaaa

SEQ ID NO: 261076 - DNA, 2295 bp, Cannabis indica
gatcctggttaaataatttccaacaatatcatggtcaatagcacaagcagttagaacgttcctgctcatctgttaagccctgtaaataggtgtatgggcgcctaattacaggtcggaaattatatgatatgttgtatgcatttcttactgagtctgtcgactcacagttctgcttccatgtgtaggtaaaggaaaggcgaaagctgaacaggaatgaacctgagctcggatgagattgtacatgccaagccgcacgacatggagtgttcagtcacgggacatctggggattgtattttggtagtcgctgtgcgacctgtaataaatgtatattttgaaatgttagctttaaaaagtttgaaaacgggatcccgatacttgtaaatattttttttattataaagtttattaattaatataaaagttttaatttgacatgatttttgagaaaaattctttgattagcaaagattgcactgtaattggaaaagcactgtagcgtgccttagcatttgggcgttacagaaagtatcactgtttttataaatcaacagttatttacaacaatagtgaaaataagatagggaatttatcctagccaacaaacgtgttgatccaactctaaagcatgtttagccaaaccatgcgcaggatggttaacatttctcctaacatgagagctacgtgctttagggaaaaagaataaaacacaacgaacatctaagattaaatcagagaaactagacaaatctgtagatgtagtagttaaagcatgaaaaattctaagggcatcaatctctatattggtgatatttagttgttgctgcaacgcctaatttagactatgaaaaagcgctttgcttccatttcatctgaacgaaagcaaccttgcaccggcttcaaaagtgcagcaataacttgtccaaatcgttccgaacaatggcacccactcccaatttttcgctgagaattacaccagcgtcgacgtttagcttaaaaccagcagtagaagggagctaccaatgaacctcagcagtatcgttattactgctggaagaaggaccagcagtgtcgtagtctctttgagaagcattactttgcttccgactggacgaaagtttcaacttttccaagtaatctttagcaaatgtagcagtttgtttcccatacaaagttttactgccatgtaaggatttgtttctactccaccatatagcccacttgatgcatattataagctcaaattcaatttgggaatgcagagtagataggtggaaaaggtaatcaccattgtacataagttgtgctttcttatagtccatgataaaaccagagtatttccaaactgatttcgaatgtgggcaattaaaaagagcatgcgcaaaggattcccatgcactggtacacatcaaacaggcagccgagtcaagccctttttgtcgatgcaaggcaacagtagttggaagagcattttgcataactttccacacaaatattttgaccttggaaggaagagttaaatacgaaaaagttttccactaggaactatgcaggtccaaagatgaagaatgttgttgctcatccaaatttccagccaaataaaatcctgagttgactgtgtaccctcccgatgtggtatgatgccaaactaaacgatctgtagaagggaagaagcgcaaagaaactcagacaattctatcaatatctagctgaccaaaatagttgttgagaaagtcaaggttccactcccttttatatgtgatgaaattagcagccgacatggatggaggaaccgtgtaagtgattggataaaactctatatgccaaggtatctatttatcaagcccacattgaatgtgaaatccattccctactttatatcgaaggcgtttaagaagcagttccggaacccagtggatgctttgccatgtaagtgagagggagttgccaaatctttctttaatgtaatcttttccattcaattatcaataaagaaacaaaattattttcattacttatttactatgtcatttagttcatgtgatcatttatatgtttatttgatttataaattcatcaaaatccttatcacattaatattcttgtttattgtgccgtcaacacagtgaaaagtgatcaagattatgtgattaaatgtattcctagatgtatcagttgacagggtttaactgataagataatgtacaccatagtttacttgcatcttggataagtgctatgtcctttccagggcattgattaaggtaaagtttaggttggatgcctggagtatgca

SEQ ID NO: 261077 - DNA, 807 bp, Cannabis indica
aattacacacttaaattttaatattaacttaaaaatataaagaaaattacgtaaaaaactaagtatcactttttatttaaattcaatacttcataaatatactattcttacaagtgtattgtaactaaaagttttaaataattaaaacaataacatttctaagtaataaaatagaacaaaacatcatgaaaataaatacactaaacaatcaaatgttacaaattcaacatacaaaaaaaaaatctaataaaaatataataagtatttattatattttttaatattttttattatataaataatttttttaatatatataaatgtaattggattggatcggtttttaattggattttgagattgacatccaataaccaatccaatccaattagaatccaacttttagcatccaatccaatccaattgtaattggacatccaactttttgtaattggattggattgaatcggttcggttcaattggattggattggatgatgcccacccctatcgtgcaatgtactagatgacgtatcccactatgcttagtagttagtagcaatctagtgttccaattaaaaatctcaaaacattctcaactctcttgcaataaatgtcaatgtttaaaaaggcatttttgaggcgcacctcaagttgaggcgtttaaagattacaccaaggcgtgcgccttactgaggagaagagaggcgtacgccttcatgggtgaggcgttgaactgaggcgtaagaggcgtgcgcctcaaattttgaaagtgaaatgggctatttgagccctaaaaaaaggccc

SEQ ID NO: 261078 - DNA, 639 bp, Cannabis indica
tttatctatcaaataaaattaaatatagaattgttagaacaataataaaaatgatgtggttcataaaaaaataaaatgatcgtgtatgtgattcatttattatatttttctaaccaatgttaaagtaatgaagataagttatcgttataattaagtctattagtcaaataaattatagattgatcgatattagaaaaataaaaaaagagttcaaaacattgacatttattttatactattttgaaatatgaaatggaaataaaaaacaataattataaacgagctcaaatgatatttttttgcttaattataaacgagctcaaatgacatttttttgcttaatgcttgtaggatatatttattatagcaaaataaaatccttcaatgattgattttgcgaagactttctttctcttctttctcctcgtcaacaaacttaataagtgttacaacccagtagtgctcctccttctcgactgcatggagaagcttttgaatggtgacatgttgcttttgaatgtcgatcacttctttcaaatttagctttgggatgcatcgcgattcaaaaagttggttaagcttaatccttctaaaagtttgtaaagcgtatataagtacaaaataataatatgttaagat

SEQ ID NO: 261079 - DNA, 3432 bp, Cannabis indica
cattgtcattcatgcagttcccggaaagcaacaagagcagcactagcgcctagtcctggaaagccatacagagtatgtgatgcttgttatgtgaaattgaacaaggtgtcagaaactaattctaataataaaaggaattctggacctagactatcaggtgagaacaaggacagattagacaaggctgagataaggttttcgaagtctgtcccttctaacatggatctgataaaacagttagatagcaaagcagccaaacaaggaaagaaagcagagacattttcgttagttcgatcatctcaagcgccttctttattgcaattaaaagatgttgttttgtccactgctgttgatatgcggcgaactgctccgaaaccagttcttacatcatctggagtgagttctaggtctgtgtcacctttctcgaggaggccaagccccccgcgttctgctacacctgttcctacaacgtcaggactttccttttcaaaaagtatttctgatggtttgaagaaaacgaatgaacttttgaatcaggaaatgctgaagctacgagcgcaggtaaattgaaaaatttctctagcttttattatcaattagttatcttcacatagaggatctttcgttgattgataaatgtataatcaaatctgtagcatactgatcatgattaaaatatggagataggttgagagcttgagacagagatgtgaacttcaagaattggaactacagaaatcaacaaagaaagcacaggaagctatagcagttgctgcagaagaatcggctaaatctgaagctgcaaaagaagttataaaatcactcactgcacaggtaatttcctctatgtatgattcttgtgttgcatttaatgttttcttaagtctatattattgcagcattggacaaaatatatgccgtttagtcacttcacataatcttgaaaagctttccccgtagaaaatatgacaaatatttgatgaacctagtgaattgtttatttgttcccgatcctaattcatagaagggattgaagcaatttgaatattacagtgtttatgacttcctgttttagcttttttccgtttccttgcttgaaagtttgaaatattttcagtcttttacatttttcttggataataaatgtatcatacaaccaaagaagaatagattaggcaacatgcctaaagctagaagtacacgatattaactttccccagatgtaatttatttcattctccagcctaattgccccataatagacacacaccactataccatattaactctctccccccatcaaatccttctataaactcttggaccatgattagaaaatcatcatatcataatccactgtaatctaaattctgccagatacttggtccacaactccctgttaactggcaatatagaaatgatttgacctattgattttcatcatgtcttacaaaaaaaaagcaccatgatgggaaaattatttggtaaggactttgttcctgtttttatccatcatgtttatttcattcagaaaccctttttttttatattagataacactcgtgtcacatttttgctgttgtatatgtgcggattttgtttatcttatgtgtacttatcactttttgaaataatttcagcttaaagatttggctaaaaggttgccgcctggtgtttatgataccgagagtttgaagcttgcttacctacccaatggtttggatcaaaatggactgcattaccaagatctaaatggggagcgtcattcaagatctgattctatcacttccacagggactgattctacttttctaaatgggactcatggctttaattattcaccgagagattcaactggaattaatgaaattaatattccacaaaaccgtgagcatctgagttccaatgggacagttgaccattcagacataagactttcaaacggtggaggcaatcagacagatactagtagtgtctctgaagctcttgagggcagggattctgggcctctccaagatggggagaatggtatgcgatctaaaaattctgcattggctggcaacaataaccaagttgaggcagaatggattgaacaatacgaggcaggtgtttatataactcttgtggctttgcgggatggagctagagatcttaaacgagtgcgcttcaggtacaatttattttctgaaatgtatttattaaaagttgagttgctcataagggtaactctattggggccgattgtcttgagttcgatctgatatttgtgcactcgtgatttccgagtcaggtgttggagtagctaatgcatttatactttagatgaaaaattcacaccaaaatttactataaagaaaaaaacatagaagagttcagaatgaatctcacaactaaactattcaagtgcattgctagtccaacaaccattcccatcacagattcacatattgtttgatgggggatccccccagcaaatattttccttcttattttgttatttgttaacccgataaatcccttttgagtgcaatctgacaccgaacaaatgtgcagccgaagaagatttggagaacaccaagcagagacttggtggtcagagaaccgtgaaaaagtgtatgagaagtacaacgtccgcagctctgataaagcatcaatttctggccagactgcacgtagatccgaaggagcactctcaccttcttcccaacacgcctagctgtagcttcagtggagtaaacccctccattaacatattttgtaccattaatcactaaggcggtattgaggcaaatcaagatttcggtattcagggaaagcaagtaccatgtttttttttctttttttttctttttctttttttgggtcacttgtttagtcctgttcttctctcttaattttttttctctcttcccatttctaaatttattatccatttaatttctgggtcgccaccctttatacacctgttgtattgtagtgtatataaaatcatcaattatcagttagtctctgagcaaaagaaattttttcttcttgctttcaccttccttaccaccttatgctctaatagatctactgtctggcctcactgttagttttgattatatctataaatatatatatgttaagtagatgcaactttttagccttaatatggaaaatgcttgttaatggcattagaatgcaactaatgtgaaaaaaaaattatgtcattttggtcatgtgtatcaaatcaaatctttcttaccttaatgatttcaatgctattcatgtttgtctcagtgctcatcatgaaaatcaccttatacatatgtattttcttatctctcgtgtgtggatagaaatttaagagcattgtaattaacgattttatataatttttaagggcaatttacaaaaatactgaatttggggtaatacttttcaatttta

SEQ ID NO: 261080 - DNA, 934 bp, Cannabis indica
tgctcgagcaaatgaaaaagaagttggagagattattaagtgcctctcaacatatgaagtgtggtctggacaaacttgcagcaagcataagtcttcggttttcttttccaagaatcttgatatgcatagaagatcttcaatactaaaacatctaaatgtctcaccagttcgtggagatgaaaggcacttagggaacccttttattttcaagagaaggaagaaagaagaatatgatcgtttgaaatagaacatgaccagaagacttgaaggctggaagactaaacttctctctacagcagggaggttgactttgataaaatcggtattatcctcaatgccaatttatgcaatgtcgactagcaaaatcccggttaccacttgtagagagttggatggaattctgagaaaattttggtgggttggaagtggaaagaatgatagattcttggctcttcgctcttgggataccatttgccaaccaaaagagtcgggtgggttggggttgaggagatttgaggatgttaacaaagccctcatatcaaaactgagttgggatctggccagtaatgttaagaagccatggacttcttgcctcttaagtaaatactgccgttatgagaaattctgggaggtgagacctaaaagttgtgattcagccctttggaaaaacattttagagactagagatgtgataaggaagggttcgatttctcttgctgctgctggtgagcaggttgatttctggagacaaccatggataccatggatgtcttttgctgagtttcaagagtaatggataccctgagggatcgtggttttacagtcaaaacgttggccgatatctctattggtcatgagtggaatgaggagttagtgagacaaatctttggagacgttttgggtgaccgagttcttaccattaacagaattccct

SEQ ID NO: 261081 - DNA, 691 bp, Cannabis indica
attgcattcttacacatgttatacaagcatccaaactaatccaaagagttaacagaattaagcacacagttattttgcaattttagagcacattacaataaacagtagcacacaattatcttctagctttttgcccattcataactaaaaatagaaaattaaagcagaaaattaaaaataaatgcaaattaaaatgcagaaaataagatttttaaatccctccccccaaactaaagattcacattgtccccaatgtgctattatattcaaggtgagaaggacttacctgagcccccatcagaaggggttgggcgaattggggtttttattttgctgaaggagggtcccgtcgcgacgggcatgatgccccgtcgcgacgggaattggcagaaagtttcaaaatttgttcgtggtcttcccaatcgcgacgggcaatgccccagtcgcgactactgtagcctggtccctttttttttttttttttcgtaagaggcccagtcgcgacgggcaatactcccgtcgcgactactgtagcaggggatcttttttttttcacgattttcacggttttaatatacaaatgcaaatccaacctaaatgcaatgaaacaaattaaaatgataccaaacacttgtaattgttttctaaaaaatcaaaagaaaaataaagtaaaattaaataaaagattggg

SEQ ID NO: 261082 - DNA, 607 bp, Cannabis indica
caatattcatagaacactgagcacaactaggtaccatataatatgattgtatgcagtaagaaaagctcacctgtagttcagatcggtcaccgtcaccacctcgtatgactaagtgatcaatagctggatctataaccctattccatggcctcattgtaagaattccagcaaataatgcatacaaatcctctccagcacccagtttcacactgttttcctttatggatttagcatcagaaaatatcaatgcctgtagtaaacatgaaaacagaaggaagacgactaagggtgctgcttcattcaaaagattgatgcaataatggaataagaattttgtcaggtataatattaagtaccttccagagtgaagcataattaattcttgtctggaagtcaagatctttgtacagtccatggtctagaagaaccaactgtggttctctcttacctgttcacatgaaaggaaaagttagtttttggcacatatgaattactagtagccacagaaactactagaagatcagaaaattcatactggacatgttatttgagtttataaaaataagctctagatattaactacatttttctttattactattttttt

SEQ ID NO: 261083 - DNA, 790 bp, Cannabis indica
ggatcacttagcatacgtatcttctagctggtttcttccctcgggcagttatcttggggatgatgaagccaacgtcatgattcgagactttgctagggtcgaattagaaagtcaggtaggactagttttattgttttttcgctaagtgtatgctgttctcatgaatgtcctaatacttaacttatttctttgttgcagcagccaggcccatggacgacctcttggctactcttgctgaggcttacagccccgatgcttctctgcctccggctgcttcccagttggttactcctgggaggtcctcctccaacgccccctcaggcacaatcgtcttggtggacgaggaggaggaagttgaagaaggtgaagtggcggacgcggccgcccttgagcgtaagcgaaagggcaagatggtggaggcagaaccttctaagcggacccggaggggggacactctggcacccagcaatgactccgggattccttccgaggcggaggaatacactgtgccacacgacatagtgttgactccggtgcctgcagatgaggagaggcaaaatctccgcgtggccaagcataactacgccctcgacgagtacagtcgggggcatgctgaggtggaggctttgcagaggattttatgggaggagcagcagaacactctccatgaggaagcctttcggaatccgtgggacctgaaaatggatccgctgacggactggttcaaccgattcgtcgggcccactctggctccttttgcctcggagatgactagccagttcgtctccca

SEQ ID NO: 261084 - DNA, 522 bp, Cannabis indica
atataattggcacatcttttgttgttgttgttagttattgaaactctttttctttttcatcatattcttctctggccaccattgctcttcatttaagcaaaagaagtatttattggttaatagttatgttgtttgtcgtttcaagtttgtcttaacttctctttttttcttctatcatgaaaagaaattcattaaaattttcatgtgtaggctctggtggaccatacagatcaagggagtggagcacttcttcagtcaactactccaccaaattggactattcatgtttcagatgtgagaacagaacaatctttttcttattagaatctaagttgtgacctttttaggcaaaagtttcacaaaataccaattcttgaactaggaaaagtgaaagtaataactaatatggtgtttcatatgagttcttgttatgaataaaagattgttttttcagaatttcagtttgaatccacgatcagcaattatggtcagaccaaagaggcattaatttagtactacttc

SEQ ID NO: 261085 - DNA, 525 bp, Cannabis indica
ttaagtttttattttttataaatcttaaatttagatttctttttaatattttatatggtttttttagaaagaaaaaacatattttttagtttaattgattagataataccatatttagtgggatttactttttatgccatatttatcataatcataataatttttccaatatttttgaaaataactcataaaatacaataacaaaaaataatataaaaatgtcacaaaaccactttttgtcccaaatgagaagttatgtccctattgttttcatttgaggaggctgatgttgataacgatttggattatgaattcaaagtttgagtagtacgattcatcaactcaattcatgtctcctaaactattaccacaaggtttaacaaaaactaattgaaaaaatgaaaaaaaagtcaaagtgataagttcttacactccaaaacactaaagcaaaaagcaacaaaagaaaagaaaacatcgatcgaattaactaacaacggttggaagcctttgttctagtcggaggct

SEQ ID NO: 261086 - DNA, 1238 bp, Cannabis indica
gcccgatagcccgattgcatgtgaaaaaaatagaatttaatatggcccgatgggtccgatgggcacgatgggcccgatagtgggcccgatggttggcccgatagtgggcccgatggggcccgatggtctacagtgtagtgaaagagagaagaaaagagagggggtaatataaatgggggtattttaggaatattataaaatgtgtcatatcccacaaatatcaaatattatgagtttaaagaaaaaatttaaagaatatgtaagcataaaaaatcaaatttcccataatattaaatagagtcctgaattaattttttttttgtaaaataaacttttgtataacttttgtaacagaaggttgaatcgataactttaataaaatatgcaaggtccaaaatattattaacctatttatttattattattataaatatcacccatttattaaaatttaatgtataaataataaacaaatacatataattaatacattaatatatattttataaatattttcaatgaatattatttaaaataagagttaataattatctacaatcaacttactaataaataaatacataaatattaaagtactcactacaaaaaaatttatttttagtcacaacaaaatttatgactaaaagtgaaaaagttgtgactaattataatttataaatcatcattcctatgttgtgactaaaatgtctgtgactaaaggtattagtcacaaaaattataattagttatgattaaatgtatatttagttacagttattgttgtgattaaaactaaattagtgacaacttgtatttaaatattatgttttagtcacaagtaacattttgttgtcactaaaaattacatttagtcacaaaaaaattatgttgtgactaaaaaattgtcactaaaagtaacagttttttatagtaattttatatcccaaatatataaaaaatatgattactaaaatttaacggaaagtgtatgtatatcaacatttacgtaggtatatattcatcgaaattgcaagatattcaaggtaataatgattaaatttgaatttaattaaaatattataaaattataatttatatatcactttaataattattgaaaaaatagactttattaataaatttgaaatatttaaaagctaaacgttattaagtaatcgttatatatgtacatgacactttaaaatttactctaaagttatatttttttccttccttaa

SEQ ID NO: 261087 - DNA, 1059 bp, Cannabis indica
tgggaacgacaagcttagccaagtcgtttctttacacaccatcgacacaaaatgcctagacgctctcaccgcctataggacgtggagattttccttgacgacaacaagttggtcgcttcgaggcaagaaggcactaatggtcacgactctcaagtaagagaagaaaatgagaacgttgtccagcctcaagtaggaggagagggcgtgagcaggtgggaacctcaagcaagacaaggagactgtcgccgcgaaaagattctagtggacgaatagcgcaacagagttactgcttccatcacaaccaaaggtgaaggtgcgaggcgaaggaaggagctcccgtcatcacctaggcaccctccaccaccaacaccgtgagatccaagtacctcgcaacattgcccaagaaaggagaagcgagctaactctatgggcccaaaatcccaaacttaccactatgaagatgaaataaaaattcttctcggaaagagccaaaggctagaaactacagtggccgacatgcaaaaagtactgagcaccattctcaaaggcaaaactcaaaccctgcactttttgtacaaagaccactggcaaaagtgggagatctcaaccgcacacggagacgggaagagctccatgtcatcgacggatggcacccaaagggtaagagcaaaaaaggcctatcgcgaaataagaacctaagaggtcgctcagagcaacatgaatctatccgctggggtaagaccataataggggaaacatcatgtagttttatgaagggacttcagccaaagaatcttgtgcaagggaacaccgtacttgcacctccctctcaagagaaaagaaagcagaaggtgtctccccttattgcccctgattttgcccaatatacgtggaccaactgtacaatgacacgtggaaggaaagggtttagcatttgaattaaaaggctaagtctttataaagagaaaggttactgtggatatgcctcccggagaaggtatgcaaagtctcatatgctcccggagagcaagatggcatcaaagcatctccgggtggtgt

SEQ ID NO: 261088 - DNA, 716 bp, Cannabis indica
agggcatcagccactacattggctttcccaggatgataaaggatctcacaatcgtaatccttaaccaactctaaccaacgcctctgtctcatattcaaatctttctcagtataaaaatatttgagacttttatggttagtgtaaatttcacacctctctccatagagataatgctgccaaatctttaaaggaaacactattgcggtaagttctaggtcatgagtcgggtatcgctattcgtaatctttcaattgacgggaggcataggcaataacccgttcggcctgcatcagaacacaccccagaccctgtctagatgcatcacaataaactacaaacttctctttgtcagaaggcagagctaacactagagctgtaattaacctctgctttagttcctgaaaactttattcacacttattcgtccatacaaaacgctgattctttttggtgagttcggttaagggtgttgaaattttagaaaatccttcaacgaaccgatgatagtagccatccaaacccaagaaacttctaacttctgtcactgttttcagtcttggccgatccctgacggtttctatctttcctggatccactttgatcccatctttactaaaaatgtgtccaagaaaaagacacctgagacaaccaaaagtcgcacttcttgaatttggcatacaacttatatgttctcgaagtcgctgcagaaccatccg

SEQ ID NO: 261089 - DNA, 655 bp, Cannabis indica
actcgaaactaaaagtttccctatctatgaatagcatagcaataccctaaacaatacaaaaatggggaaaactagggttcccaaaactgccccaaccagtagaccggttcccaaaccagaattctgattctgtggggtttcctggggaccaaccggaatttcggttcctacaggtcccactgaaccggaattccagttcactgcgggaatcaccaaaaattccatatctcaaccaaattaatcccaattcacatgaaaccttccagacttgttctaaacatcctaaagatcattttccaagcaacaaaaccaatgcccaaactcagaaacaagaaatgccattaaagctccacgtttgagttctaaaattcaaaacttgcttaaaccttcaaacaactacttattcatgcttaactcaacataataaatcatattttaactacagaattcaacaactaacaactacatcaaccacaatagcaataacatcatttcatgcaaaaatctctaactaaaaactcaagaaaaccaagaaggagttagaaggagcttacctaaagcttgaaaccacttaaaccttgctgaaaatcacttgaatttggagagaaaatccagaaccctaaatggttctctagtgttcgaaaagagagagaga

SEQ ID NO: 261090 - DNA, 661 bp, Cannabis indica
ttcatatatgtctgtgtgatacagacttgcacattgtacttacatgcccatttatgtctacgtggtgtagacctatgtgttgcgctcacacatctatttaaaatctatgtggcgtagacctacgtgttgctctcacacgtctaaatacaataaggccttagaatggttcatctcggttatgattaccgagtccaacctaattatgcattaagcgcataatctttgaatctcattacatttaacttagcatggcaattacacaaatatatcactagagtaataaccctaggctattagaccgttcctattatggtaataaccctaatcccggttactaaataatcatacttatccttttcaacataagcgccacagtgcatactctacgtgctaactactgtcttacatgttgtcccgcaatagtagagattccgaatccccgggtgctcctgatcaggtgtcggtaatcctagtcacacaaatctgggattttcacacctagggttaacccctgattccatactcataaaattcaatcatggcatttaaaattcagataatcatacagatctcggaacgagctttccaacaatataaagaactcccaaatcgaaattcggaatcaaaagttatgaattttcaaagttcgaactcaaaactg

SEQ ID NO: 261091 - DNA, 2906 bp, Cannabis indica
cttttcccattcataaatattgtttggtccccataaatatttttgtatcaatattttttgaagatggagatgatgcttaaaagaattcttgaaaactccatttttttttgcctaggttggcaaattataaacctaggcgatgggctctgttatttatgccaaggaattactattttccttcaaaggacatgttttctatttttatgaagaaagattcaacgcaaaatttgaatcttcgatcagacaattggaaggtgcctcgattgatagattgtcaacttcggcactgggtgctcggggcccaaggttctcaaaaatcaacttgctccgaatcatattctgattcctcaaacatgttagtgtgtgcctagtttatgtatcaattcatgttttgaccactttgcactaagactttcctagaaacaaaaaccctagttaaggatgtcaaccttggcaccgagtgaaaccctaggtgcctaggtgggcttttgggttgcaggttcattcatctctaaattcttggattaggttgctccatgtattcatggtacaaaatactaaaagatagtgagttagattcttgttattgaagtacgaacttcaattcggagtgcccaaagtcaacctgggcacaaggttagggacccctccctggtcgatatgctatgacttgggactactcaacttcgagatgccatctttcttgtcaagtgtcaaaaatttatttccatgtcatcagggctactcttgttataaacatatgtcagcgaagtaaactttacatttgtgtgaggttgacttaatgacgtgaacaaagctcgtttctctcaaaactacccaatgggcatcaattttgacaatctcagacaattgtttctattcatcaagcattcccactaagaggaggattttgaatctccattccctattgaataatagatttttaaaatttaaggtgatgatttcttgagtgatttcctttgatttgagatactgtgaatcatgcagatattggaatatcaacatttactcttatgttcagctattgtcttagtattaactctcttatccgactatctatttatgtgaatattgatgtagtttgtcttttgttaagttgtagtcttgttcatctcctctgtttgatagcaaaggaggccttaatcaattccttagctttatagcataggaggccttcaacatccccttagctttgtagtggaggaggccttcaacatccccttagcttttcagcggaggaggtctttatcatatcattagctttatagcaaagaaggtcttcatcatctcctcatctttacatcaaagaaggtcttcttgacgactgtcaacgatgtgtagtaattggtggctgttcttttgttcaattgaggatgtgacaaactctagaattaatatgccaaagatgggggtgatgtcttccctatctcgtgtgccccttagagtggttgtaagtgtagtctccattttgtccttggtctttaaccttagaggtctttgtcgtcccttctgttctattcacaacgaaagaggccttcttcttctccttggctgtcttgacagcgaaggaggtcctccacttcctcttggctattatcacagtgaaggaggtcttcctcatccccttgtcatagtcgaggagttcttctaggcgaatgtcattagtgtgttgtaacattcacattctactctttggttgccaatgagatggtcgatactagtcgttgtcaagaacttgatagacaggtggtagataagtgagatggcccagaggtcattgggtgttgaccttccaagaagacttggagtcgatcactataaaggtagtcatagtgacattttccacagggaagtttcgactatgagtggtgaatcaattctaccacaaggagagatttttgctcacctaaaccaatacatgagctgcttgcttggcttcaactctttttaagagtgacccacacttttcaagatctattttgattagaatagttggcgatgcatgactattaaccatcatcattgttgccatgatgtttgaaatttcattgttactatctaagttttacttctcttgcccgcagtgttgttctctttgtgtttagggtgtttaactttgaagtttctatgtttaagctaactaatgtgagtgagatagaccactgttgaagtgtagtgggttattgcttgtgtgagtgagatagaccactattgaagtttcaagtatgagctcactttatgatcataagtgaatagtgcagaaaaatccgctagatcttttgtataagggagaaatcacaggttactggagaacctggtttgatgattttaattcatagatccatgttaatgaaaaatatacaggggaggaaaaaaataaagagtagattaaacccgtgctaagtactgagtctaatactttggaggagtttagtaaccaaaagaataccacaattggggcatcatctaactcccagagggtttccttcaatcaattagaaaatgcagcatcctgcttccagagagctttctataattgatgatgcttttcttttatttttaatttttgtgattcgaggaggaacactgacactagcactttaggtttataaactaagttgttatattcttgtgagacctcatgcatttataccataataacgctgaattctgttgtgcaaatagtatgtacgtgcgattgttcaacttaatgagcccaccagtaattgcactagccctttaggattaaaaaattcagttataagggataacataaacatttcattaaacaatagaaatactaactcaggtgtgcaaaatgtcactgaaacccttggctctcgtgtaccaaggtgtttttaacatacatggctatcgtgtatcat

SEQ ID NO: 261092 - DNA, 538 bp, Cannabis indica
atataaaagtgtgaggtaaaatagataaaagtaagattttattgatgtatttttaaaaagggcaatttgcagcgtaaatacttaagtttaatttctggttacagataaatacttaagtttaatttttgacggtaataatacctaaattacatttgcggaacttctgaaagtacctcgtcgttaagtgtcaagttaatattcatatattattttctcattggtatatttaaatatatttttaaataaaaaaataaaattttaatgaatttgaccaatcagcgactgtcatgtgactattgacttgctactatggtcaagtatctctaactctaagagtactcttaacaacttctctactctattattcaaaatacatcaccaaaactctattttttctattttacattataccatacaataatttctctatttttttgtttctatatcatttaaataataattttttaatatatataaaacacataactagcacaagaataaaatactatttatatattattaaaaaaaaaaattgaaa

SEQ ID NO: 261093 - DNA, 421 bp, Cannabis indica
tgttaatcaacatacttgtgactagatctaagatcctggtaaaataattttcaacagttgctagtcgctataggcgttttctataagagataaccgagggtaaatttcgttacttacgagatgcagcctggcctgaacctttatcattatcatctattcctttggctaagcccttatttttacccagagtcactattacttttgacaaggtgaccttgattttgtaattatgtcttccaagcctagtaaacaaaagaccctaatgtcacattttggctgagctcatcgagtcaagaataagagccataggagattatgttggtgccgttctaacaacttgtggcatgaatcaaaggcgaggatgttgggttttatgccctaagaaaactccatttcaatgtaatccattttattcaatatc

SEQ ID NO: 261094 - DNA, 568 bp, Cannabis indica
atgtttgttaattaaaaacattccgaaaagcgaattattttaaactgtaattgtatgtaactagtatcttttaaataagagaaaaatcaccaaagaaaatcacacaagaaaaacaatggagatcaacacaaggcttcaaaaaacctctccaatctctattttacaagcaaatgagttgtttgtcaaaaaaatcctctcaagaagctcttccattggagaaaataataataataataatggtttatcaaatttcaacactgcagctaccattcctttcaagtgggaatctcggcctggaatacctaaagatcttcctaaggcgccctctattgagctccatcgagatcacccacctccaataatcgaggcgaggagtgctcgagtagtgttgtcctcgacaacgaggggtggcggtcggggtggccctaggagattgtggaagctccccaacaagacaaatgtgcttaagaagtcaatggtaaataataataataataaggttgaagcgacaacaaaggaggatcagaatgagcggtcgtattattatttaatggattataattataaa

SEQ ID NO: 261095 - DNA, 459 bp, Cannabis indica
tatcggtcccattcgatgtatactccatacatctaatactagcatactttgccaatgtcttggaaaagacataacacttattcaatgtgtaagtatactttatcgccaattatcatgtcagtttaaatccagtgtactgacaaatcatgggacttaaactttgaaacatataatcatgattatattccattatgttgacaacactataatcgtgaataactatatgttctagatttaataggatttatacattaaacatataatcataaagtaaatcatgtgaaccatgcaacataaaatgatttttgaacttttattaattagtaaatctgattatattgaaatgagttttatttaggacacaaaacccaacaggttggccttcaaatggttattaaagtacttgaagggcacttgggattatggttctgacctatgagaaagcaaaaggagaactgg

SEQ ID NO: 261096 - DNA, 2163 bp, Cannabis indica
gaactatctgaagggtttcgattcaacatgtttacgtgcaacaattcaaattcgtacctctcattttctcgaacaaaacactagtttcatccttggcaggtgtcttctctgctctgtcagttacaagttctacccctaccattaagcccctgcctcttacatctccaatgactgaaaaagagaaacagtacaggaaaacacaaacatataataatcaaattgccacaaatcatgtaagaattagccgatttgcaaaataaattagggaaaattagatgtgcagaaagtgacaaaaaataagataatcctaaactatagaatctgtgcagaagataccttttagaataaaaaggttaagagtgattgcctttgcattaaaaaaaaaaataaaggttctagagtaatactttcatgtctttgctgaagagctctcaaacgctcaagcaagtgagaaccaacatcactacaatgagcttgccgcttctccttatcaagaactttaagcacggcaagtcctccagcggaacaaactgggttccccccaaatgtgttgaactgaattttctgtgatagtacacttgctatctctgctgttgtcaccacagcacccaaaggtaaaccatttcctatccccttaagagcaaaacaaaaatagaaaaagcaacatagaaatataatgaaattaccaaacaaaaactacatgaaatttaaaacactttgctgacattgtaatgcatttcttaagtaaaagttgcaatgtaaacaatgatgaacctttgattataaactgatgagaaaaaatcgcatggttcataaataaaataccttagccatggtaactatatcaggaatgacaccctgtgtctcaaaaccccaatagtggcttcccgtacgaccaaacccagtttgtacttcatcagcaatgcaaacaccaccagcctttcgcactatgtcatacactaatttcaaatatccaggggccaattcaactgcacctccaactccctatagtcataagtgagtgaagataagataaatcagaaatattggtgactcagcacatacatggatcaactgtaagtgtagtgaacttcaataccgacctgaatcgtttcagctataaatccagcaacatttcctgaactaccataatctaagtgatcttgaacatcttttgcataaagtttggcatcagagccaaaaactcctcgatatggatctggattcacaacatgatgaatttcaccctgcacattgtcaaaatgaatttcacatgagtaattttactatgtccagatgttaattttgcttaaatgtaagtaattacacaaatgagtgtacttgtgagaatttttagttagcatcaaattacgtcaataccataaataaataagtaaaattaagtgtttatagtcattaaagaagtttgaaaacaattgggtctcaaaacatgtcagaaaaaatggataaaacacacttcttggcagtgtgtttggcgatatatcaccttgcacgaggcaacatgctccaagaccaatagttgccaccatctgtcaatcgcaacatgttgcttggtatcaggcggcatgccacctcacggtgaaaggttgcacttctacactttatgggggcaaccaacaagaaatgataaacttgtttcaatgctcaattattatgaatgtttttcctaaaaaaaaattaattatgaatgttttggggagttcattggaactgatcatccttggatgcgctctaacaaagcactcactaaaagatcaatctattatcatttatttccttcaatgaaattgccttcttgaaagaaatcaaagacttgataaatccatattctatttcctttcataagccacactaaagtgacacaagtgtgatggacaacataaaattttgacaaagtttctcaaacgtgttcaactctattttgttcttataattgtgttctatgtttcttccattagtgtggtcatactgccacactaacaatggatgcatatcagataagaaaggaatcgtgaccagaaagagagtaaattgctgcactaaatgtcacaggtagattcatatcatttataagggtaagtgtaatagggtattggtattttatatatatatatatatatatatatatatatatgagtgagt

SEQ ID NO: 261097 - DNA, 666 bp, Cannabis indica
tcgagtctttactttttaatagtatccttcaaggtcttattaacagcttctacttgtccattttcctgaggccttgacactaacgagaagctcttaataatcttgttcctctcgcaaaactcaatgaataattcaccatcgaactgagttctttcatcagatactatcttaacgggtattccaaaccttctaattatgtttttgacgacaaagtcgagaaatttcttgtaggttatggaaactagaggttcaacctctgtctactttatgaagaaattgatagccacaactgttactttgctcctccttgccctgtggggagtgccccaatcaaattaatcctccatattgtaaatgggtagggcgaggtcatcattctcagttccgttagtggtatgcgaggtatatgtgaaaacctttgatacttatcaaatttcttgacaaattcgtgcgtgtctttattaattgttggccagtaatatccttgtcaaattatctttttggacaagctttgccaacctgcatgatctccacagaagcccttgtggatttctttgatgatctcgtttgcttctgtggggaggacacaccgtaggagaggcattgagtagcccctttgatacaatttgccttctactatcgtatagcgaggcaccgtatacaaga

SEQ ID NO: 261098 - DNA, 1350 bp, Cannabis indica
tattatcgttgtgactcgattattatcgagtaaaagaaatggtcattaccgttatgagtaattactcctgaaaccgtagataggtttcttacttatcgtttcctatattgggcaacgatagtgacatatgtagctcgtggttaacaagtggtaagtgtactttatgaaatacccaaattgtgtggttacgatgttgtcaaacgatcaagcgtgttattatgtgatgagttgtaattgaatacattttgttatggtatgattgaatgaatattatattgctgatgaaattagtttcttttcttgaagtctcagtggcctagggatgtaagaaaacatgtttataatgatgcgtgattagagtgctttatgaagcactgaaattgtgtggatatgataatgtatgattaatgtgttttatgaaacactgaggttgttgattatgtataggtataaatactcttaattttgtaataagtttgctcgtatagacgttgaattgtaaatgtacgttgaaagagtattatatactggtatgtataatctgttatcactttccatagttttttttatctagtagcttttcttgttgggtcactgtgactcacgtgtgcttcgtggtgtaggtaaggaagttaggagctgtgttcgaccatgagttggagattttccagttatgtacatatcagctgtggtgtctgtggcttctgggaagcaggattgacttcttttctttatgtttggaaatgtaactttattttggtaataatagttttgaaatttgttataaggaaattttataaacaggggatcccacatactttagtagtattttaaagaaagaaaatttatatattatattttaaattatcaaattttatttaaaccacacttttcttaaagctagtagattagtgataataagattgtaaaagcacacacgtggcgttcctgaggttcagagcgttacaatgtctgtctagagtttgctaccaatgtggagctgcaggccatttcaagaataactgcccgcagttacaaaagcccgagactaagaaagagaatcctatggttcctgctagggtgtttcctttgaccaaagcaaatgctaatgctggcccttcgactgttacaggtgagatatctattagtggtattatgtttactattttgattgattctggtgccacacattcatatatttcgagtagaatcattgagaaattaagtagaccatgtgatatcatgtctagttgatttggtaccttgttacctactagagaagcggtattctccaggaggtgggtaaggtctctcccagtattagtagaagggagagaattgtcagtggat

SEQ ID NO: 261099 - DNA, 672 bp, Cannabis indica
aagtatatcacgagacaaaatcacatccctatagagaaattttgtttacaccccaaacacttttaaattacaccccatttttaataatttttattttatataaaatttatatctttaattgtactaagttttttttttcttccaatttataattcttaaaaaatatacctaaaaaaataaattatattttaaatattacgaaaaaataaataagaaatgatatgaaattttcgtagaaaaaaataaaaaaaatatatgatttagaaaaataaaaataaaataaaatcaaagtaagtattgaaattaacataaaataatatgaggaaatttgttttaaaaaatattaagagtaatatttaaaaattatttaagtttatttttttaataatagggtatacttatcattttatcaggtgcaaatagaacttccccaatgtatattatatttatatttatattttaataataaaataatcacctaaaaaatattattacttttaaattcttaagttttaaataatgttaacaaaaatttcaaaattttctgatgataaataattaacaaaaatatttacatattaatataaagtaatgcacacaaagtattctaggtggcatcttatatgaagtttctttctaattcttgcttatctccgtttttcacatttattt

SEQ ID NO: 261100 - DNA, 1450 bp, Cannabis indica
acttcggcaactttgaagccagagaactctctttttctctggagtttacttaacaacgaaggtgataaaaggggttatgtgaaagtcctatgggtatttataggcaaaaaggtaactgtatcaaaaggaacctcagacgccttggcttcctgcctcaaaaacgaatatgggaaatcaaaagtaatcgagtgcaaccgtcagccatggagagagaaaatcgaatttcaaaatattaattgtgagagcattaattagccaaaaaccgaagggatgcccaatcagcttcacatcgagtctcgaacggtcatgctcgacacgtgtccccatccaaaggcagagccagctcgaaagaagtctaccgcaacctcagaggtcccatacagacttggggggcaaatgttatcccaaatattacactctgacgtggcatcacgagaatggtgacgcgtggagtccacttggagcatctgctcggaatgatagaccgcgcaggatgcctcgcttgcacatccagaatgagatattctgcgagccgtgcagggcaatcaacacttagcgaatttagctcttgcatcatgagtcatcagctcaatccttacaacttagggatcaacttacgttgatatggcatacacacaatcccactatcagtgtactccgcctcaatcccatgatccttgcattcagcattgatcacacgatctttctatttatgcgcatggtaacgagagaggaaactcttcctcctcaagtttcccagccctataaatagtgaggaatgttcactgggcaaaggaccgagaaattataagttgatacgcagctaagctaagactatactattatctaagaattatatattcagagatactgttgtaagagctataagaaaaggaatcttcttccttgctcttaagtcaatacaaataacgaggattaggctattaccgaactactcggggctgaacctctataaaattcctgtgtcttattattgctttattatatatattcattacgacatatcgtttatcatcgcttatcaaaaagactcattgtcgttggctaaaagcgaagtcaacagaaatattaaccgcatttattttgtgtgggacgtaatcaaatcccttaatttcaaggaaatattgttgtgggatattaatctgattgtaattaactgccttcctatgtaactataaataggggcaaaatgcagtgaaaaagggatggaaaatccttaagggaaagaaccgtagtttcgtatcagagaaatctaataagatagactcatgcattatgcagaattttaactacaaaaccccgtaaaaaaaaacctaaggtgtgatcttttcaattgtctttcttatttttatttttcttcttattttcgttgctaatactatcacgaaaaactaaggctgatatcgttaacaaaaactactgcgttaac

SEQ ID NO: 261101 - DNA, 426 bp, Cannabis indica
acctggagtgttcggtctcgggacatatgggatttccattttgtagtttctgtgcgacctgacatttgtattttgtatattttataaaagtttagcaacgagatcccaacacttgtaaatattttataaagtttataaattttcatagttaatactaaaagttttaatttgacacgattttcaaggaaattctttgattaacaaagatagcacttcatatgaaaaatcactttttataacagggatcctcggaacacgctttttatgtctttataatgtccgtattcagtcttttatttcagtcaaatttttaatattatcacgattttaaaaatttaattaatctattagtattaaattaatttacaaaatcacacatgtggcgtccctatagattaggacgttacaactgttgggttttgtgcc

SEQ ID NO: 261102 - DNA, 3251 bp, Cannabis indica
ttcttgatgtctaagtatgtaagaattttgaaaagcaactgaaggcaatgtcatcattcttgacttttgatcattcttgacttttgatgtaaaaattgagtgtgttgttgatggcagggactatgggaatagcaagtctttgcagagcattatgaaactgtaacaaatatcaatatccctatatacaaatatgctgcaattatcattatcataattattattcgtttttttggcttgatgaacttcacagaaaactaaaactttcaaatattatatgaaaacaaacacaaactcatttgaaactacattgatttctttctttttagcttatatgtcaaaatttaaagaacaaatatgattttttccacctcaattataaccacattcaaatcttgttctctaaacttttcatgttcataaaaaattttctccaactacttctgtcatagagttttgtctctttatttacacgtgttttaaaaaactaattatgtagtattttttgaactgaggtagtagtcaatatgtaattatattgaatagaaaaagtatttattaagattctatttttaaaaatgatattttttaaatttaataaatattttttattttatttaattacacacgtgatactgaaatgatattgttactaagttctaaaaatgctatacaagtagcttttcagccgcatatgacttaaggggcaaaattctataatggaaatagtttggaaggtattttcattaagagaaaaagtttagatgacaaaatttaaatatgataatagttgagggaaaaaagatcctatgtattcaaatttaaacatggtcaagaaattagaaacatatcttactgtactgtaggtcaatgtgttgctctatgattttcattaatatcgttgaatcactgtttcttgtggggcgtgtgcatattacaatgctataaatgttgaagtaaaggggttgttttgtttccatattttgaatttctggaggggtgttcaaattttaaaacttaccaccatttatggctttaaagagactgagagggtttcaaatagtctttgtaaacaataaaatcatgacactgaagtcaaatctcagggtgacattgatagaagactagcagtagccagttttggtcccacacaacttgcagatagcttggtgaagagaggcaatctcttgtgccagtatggtgctgtgttaatgcagctcaacatttttatcttatttttcaaataatggttttgctgttttgaaggattaattagccgacaagggtagttgttgcttactctatttatgctattgtccttttttttcttcttctttagatatgtttgattattgttatgttgatttgggttttagtggctctaaaggttacatgaaatacaaaagagaattgtttaatgttgttggtagtggtctcagactctcagctcttcaatattacttgacttttgtaattgctgatctattggaataagatttcatcttttaaaaccagaaagaaaagttacaaactatagtaattatacagaataaatatttcgagttaaaaagtagtaattattttattttctctttattaaatttcctagtaacaattcacacaatcccggataaacgatcttcacaaacacaaccagaaaaggcaaaagaacttaacacaaagaagaaagaatcaatcaaacaaaataaacacaccctcaactaacacatgaacactgcagaactctacaaaatctacatagctagctgcctgtcatcctaaagaaaaaaacaaccgatttttgtgacgaaatgagcacgtccaaactgaagtctctgaccctcctgagtcctgcccatgaaggatctttaggttgataaaacaacacctaaatgcccatgactcctggttctttgatgtggcagattctgtacagattgattcattacacgaagttaaaagaaaagcttagtcaaactatatccaggatgtttcaggtaagcctctcttcttatcagatcacattagctgtccatcttcccagtgaacaaaattgaattgcacttttgacgcaatgcgggtcagtttcaaacttcgagtatgaacaaaatgctagttgttttctacaagtcgacagttcttgcattttcctctaactctggaagcaaatcatgttcactttcgcaacttatatttacacaacttaatatggtgtcttccatcaagtcttcgagaatggtttcacccagatcaaaaccaatggtttcagcatcaaaccgaacgtccaaccacgttccagttcttgccatatctttcctgataatctggtcaagagtatgaggcaaaggaatttgaagaagatgccaataaactcctttagaaaccacaagagcaacatttgtcatgtctgggatcggacatacactaggtttagcaaacgatagccaaggagaggaaccaaaatagtattgacaaacctccacaaggacctcgtttatacagtcaaagagaagcttctgatcacagcagagtttgttggagaaaaactcaatctcatcaaccaatgatggttcaagtagttggtctgaggaaaacagctttatacagattttatcccaattcaacccagatgcttgcatcaaagcttttgcataagcacatattgactccttgtcatccaataatctttttccgttgcatgcttcatcagaagcaggtggagaaccaggatcttcaaattcaattcgaagtggttgtattgttgagttggctgaagtccagtgattgaattgacattagtcaataagggttgaacaacaggaaaatcaaaatatctgaagagaataatcaatgagggtgtgtatgcttaccagtttgagatgtggagcttgcagggttaatatcatcctccccaaaaagaggctcaagaactgaaacaggactcggcctttctggtatgtccacagaactttctgaatcggcaacctttctggaggtgaaagagctggaaggggaacttggtggagaagattggacttggttctcttcatgtgaatcctaataaacagccataaatgttgattacatatgaatatattttatgctcagattctctggactagtgaacagcccattgtatagtaaaatggaagaccttccatgaaaacaaaaaaaccttccatgaaataatgtacaggaaaatggaagacctgatatgaatataagcttatatgcaccgaagaaaacaagtgaat

SEQ ID NO: 261103 - DNA, 764 bp, Cannabis indica
tagatatctgcttaatttaattaatttttgacatttattatcccaccttcccaaccactattttggtctataaaagcaaatttctacttcataagttacatacttttcttatgttttaaccttagagtgttcttatcttaaaaattctaaatgtctactaaagagaacaaacataaacttctatctactgaagagatcaagtaggagcctagtgatgaaattactcctgaaatgcaagaatatatagacaactttaaacgttttaaaaatgaaaggttgacgaacgagtggaggtacctacaacttcaaaaacaatttcacaaaaaataaatgaatgactgcctccaccaccagggtcccttgaagggtgtcgtcgttgcagattaagttattttaatggcgaatcggtgaagcttggatctttatgcccgtattgcgagtctcaccgatacagcaaagacttttaaattgttatgttatgattctttagtagtcagttttaatgttggtttagtcttttacttatgtttaaaaaatttcacttgtttcctgtcaattgtaatcgtgaaatgttgcaactgttatcgtaataatgtcgtaaaatgtcgatatttttcagaaaaaattatgttccaacaaaactatttatgtttctgtacgtcgcaaagttaatcgtgaaacgtcactacatgtcgatattatgacaaattgattatgctctactatgtcgcattttatatcgctacatatcgcaaattgtcgtg

SEQ ID NO: 261104 - DNA, 683 bp, Cannabis indica
aaaaataattattcaatgttcaccttaatcgattgcatgtatatagatctattctatataaaatgtggttatataacagaattcttggtttatgagaaattattaggtgcctttttttttaataaaaaaataacaaattattagatgttgtcacttaaacggttagcatccatgtagttagttaaacctaaatataattaatccacctaaagtgttgcaattaataataaatttgttcatattgtttattttttaattaaaaattattttcaaattttgatatttagaattagttaaattttaaatattattttaaattaaatttgaatgttgtgatagtttaaccagatcagcatttttcattaattgcgaagataaaattttaggacgaataataattttttttttaattactattagaaagtataatagtaatttttgtttttatctaaatcactattaagctttcgaatttcaatgattatcactacattgaatattattaattttaaaataatgatattaaaaaaaattaaaaactaaaataaaattaacatacgtgacttggtacgtacatctatctggtataataatatacacacataaattatatatagttatatatctattaggaatacttcttaatgggtattacccattagtgggtaaataaatttaactat

SEQ ID NO: 261105 - DNA, 835 bp, Cannabis indica
cttcgacagttaaactagatgtcgtttttaagtcgttttggtgcagctcctccaaagatcgtaacttaggaatgagttcttgaacttcttccttggactctccaagatccctcctggccgcgacaataatctaatccctggccgtcaacacctcccgatggtttttctccatgagggcctccttcctttgggcttcatcccggattgccttcttctgctcctttgactctcggagacacttcatcacctcctccgtgccaccaaaatcggacatggtaaacctgtggtcgatcaaagtctttgaaagacaaccgacctctgtagcaatctaacagccaacagggaaaagttagagccttgtataaaaaaataaaaagaagaaaagagaaaagaggcataacaaattttaaaggtgagaacttactacagtaagggccacactcatgtcttgaatttgatacacagggttggtagaagcgtaggccgcatatcttttcttttctgtttttgtttttcttgttcgtattctttcacccgaccatgagagctccaccggagtaccaacccaagatctcatgacacaccacaaaatcacaagacctagagaggtcatccatggcctccgttttggcatgtagtgacctgagctcgcacgtcatgcacaactgagaatgagagagggagaacgacggacaaccaaggagctcgagggtggaaggtcggtgtttggattttgagttttttgggcttcatttcaagcctggaggactaagaatggctagcttcgagctaggacgtggctgttcaatgagaatagagagagagagagagagag

SEQ ID NO: 261106 - DNA, 845 bp, Cannabis indica
tctccccaggatgataggaacattgctatcttcttccatatccagaacaatgaaatcagctggaaagatgaacttgtcaactttaactaacacatcctcaatgactcctctaggatgagctagtgatcgatccgccaattggagagttaccgtggttggctttgcttcacccagctgcaatcttttaaacactgacaaaggcattaagtttatactggctcccaaatcacatagtgcatttattccttcaatttttccaatagtacaaggaatagtgaagctccctggatctctgagttttggagggagtttcttctgtagaatagcgctgcactcttcagttagagccactgtctcataatcctccatcttcctcttctttgacaaaatttccttcataaacttcacataacttggcatctgctctaaagcttcagcaaagggaatgttaatgtgaagtcttttgaagacttctagaaacttggtgaactgcttgtctaagcttgactttctgagcctctgagggtagggtattttcacatggtgatcaatgctaattggtggagactgttgtggttgtgctgggctatcagtagccttctctgctgttggtgttggtgttggcactggttgaacttttatctcctcatctacctcaactggttgtggtaactcaggcccatcatacttcttaccgctcctcagggtaattgccttgcagttttctttgggattaacttcagttgtgctaggcaaatttccttgagggcgggttgctacctgagttgctagctggcccatctgagtctgcaggtctttaattgaagatctagtttcagtcatga

SEQ ID NO: 261107 - DNA, 2148 bp, Cannabis indica
caataaacgaatcaaactcaactcaaatttttgcacaactgtgtttgattacactaacaattacttataaatttctaatatcttaaaatagttaataattacaaaaaatttattgcaaatttccattttctcattaagattggcgctaatataagaatagttggcacaacagacatctcatttgcattttctataagtagtatcattgaattgtttttttagtactaataatgtcttttaacaattctcattttgaagttattgattactaaaattgaaagtttttagtaattattatgagtataaccatataattactttcaattagacacaattccaattccctcccacccttacaaattttttaaaataagaacatgagcaacgaattttaagacaaatctagttgagaagattttggacaagtgatcatttaccatagttgattttaagaatttgagattgtttgattatgcaggtgaataattagtgatttcaaaaacaatctctctactactcaacaatacaaaaattatcttatgccattaaaacaaaattgtatttagaataatagtattcaaaatataattaaaactaacaagaattcgaaacctcttaagtttttaactacttaacaaaacatttccattggtagtccagaaaacaaaaccagaaaccacagagaaaagcattgagaaaaaaaatatataaacgatctaataaccgcctttaaggtcattgaccacatcatatggaatgggggtaactgtctccaattgagcaccttcaaccatgaacccgggtttggggccctctggttggcgcttggtactgataacagcacccttggcctttgcctcggccttgagcttgtcatttctcaactttctgttcctgaattcctcggtgcatcttgagggctggacatgctccacacgaacatgaatcctcttcttgatgatacggttgccaacctatgttcaacaaaaatagggttaatttaacagagcaatcattaagatatcaatttagctcactaaaacaagattttaaagttaacttgatactatttagggcatgagacaaaagcacacaacagaaatcagacatagcaactaagtaatgagtctaaagctagaagtttgaaacaaccataagcagcaatataaacatctattggtagtttaaataaagctcaaattattttacctataaacaaaaccaaaagtaagtaaatttaagaactaaaacataagttaaactttaacagacactaaatacttcgatacgtactgagctaaatgatatatgataaagaagtaaatgatattttcgatgactacagctaaaattattttacctatgactaaaaccaaactctataatttttagagctaaaacaaaaagttaaattttaacaggcaacaaatattttcataattactgatgttaaaacttaaaacataaacagatataagccattgaatcaattaacgcttgatattatgataaacagagaatttatattttagatgaaaacagctcaaaatattttgtttatgaacaaaaccagattcagtagaaacttaagtgctgataaaagaatatatatacacatatcaaaacaaacctacccataataattagataaaaaaaaccactttagtcaatgatatataatctaacagtaatcaaaatttcataactacgaaaaaaagcttagcctttttcagtcatttccagtaaaaataacaaaccctaagcaataatcattatacagtaaaagtaaccctaaagaaacagatcagaagctgaatgaggaataaatatacctgtttgttaacttcaacaccaatagcgcgcttggtgatgttccagacacgtccagttcggccatggtagaacttgtggggcatacctttgtgaatggctccgttcaccttgatatcgacatactcaccggtcttgtaagtcttgaggtaggttgagagaggaatgtaacccttcttcctgaatggacgtgagaagagatcacgtgtacgggacctgagaccgtgtccggcaggcattttcttctacctctctttctacatgatatcaacaaaatttcacatatcattaataaaacaaatgtaaaattgtaattga

SEQ ID NO: 261108 - DNA, 752 bp, Cannabis indica
tctctcagatagaagctgacacacaaatgctgttgactgctgaggttcaccttgtcaccaagaactacgatttttagatggagcattatgtcttcaagcgcaggaatgacgaggcttacattatcaaccttagaaagacatgggaaaagctccagctctctaccaaggttattgttgctatgattcccagcgagacgtcccagaacaacgcaatttacaacgtatttaatacacgtttacattgacccggtaaaagtagacctatcacatttgtgtgattttcaaatattaaccacatttattttacttgttatgtaatccaatcccacaatttcaggggataattgttggaaaatgtcagtcaactatgtaattaactgcactcctatgtaattacaaataagagcaggttatactaaaaagggacaaaaagttcataagaaaaaaggcctgagagctatatcaaaaatctaataagattgactcgtggactatgcagaattttaaatgcaaaaccacgtaaaaaccttggtgttcttatttttttatttactacttttaatttctgtgcaagtctatcacaatttaggctcaaatatagttgacgaaaatctacgttaacagttaggtttagactcttaaaatggatcaagaaagataaaaaatagctttttataaacaccatactagaattcattagatgtccatgggtttcaaaattaccaatttatgtcaagatttatcttttcaaa

SEQ ID NO: 261109 - DNA, 553 bp, Cannabis indica
atttaaagtttaaaatatggaaaataaataaataaatttgataaaacttgtaataataaggttcgctggaaaagttgtcgggaaagtcatcggtgccggaaagttggcggtaccagaaaaagtcaccagaaaagttgtgggaaaagtcacagtcgtcgggaaaaatcactagaaaagtcatcagaagtaaatgtctcagacataaataaaaatagaaccggttctataacataatgaataaaaataaataattcaaaccggttataattgaaatataaccggtatcataacataatgaatataaacaaataacacaaaaaacttcatcccagttataattaatatagatccggttctataacattgttataatgaataaaaacaaataacacgaaataactcaaaccggttataactaaaatgaagctggctatataacataatgaatacaaacaagtaacaggcaataactcaaactgattacaattaaaaaataaagaggaaatcagttcctaaaagactgaaacataaattaaaagcaaaactagttcca

SEQ ID NO: 261110 - DNA, 891 bp, Cannabis indica
tttaattttaattttttaaataatattataatagtatcgtacaaaataattatttaagacatcccattaatttgtcaaacatttttataaaaattcacacgcaaaaaaaaaattataaataatctgttgcacaggtattttttataaatatattttcaattttatacatttgtaaaataatttatttaaaccttatttttttattataaattatttttaattttttaaaattttataaaatatcttaaaacaaagtattaaaaataaaattaaaactatttagatatcaaaattagagtgtccacatccatataaggaaggatgttgaaatcattcattcactttaattatattttggcatatacatgctttttttggaatgatagagttagaaaaaataatgatgttgatgatcaatttttagaagtaataaatatttattaataaaggccacccaataacttgatgattgtgatttgtgatgatgaattagtgtatatcctagttatacatgaacacactttttgcacaagtagattgataaatacaattaatttaatagttatatatgaacatatatatatttagatgaaaccctaattatatttaattaagaagtgaaagagtgatgattccattaatcacttttacaactaattagtgatgataatatggacacatagtacatatgatatgaaaaatattgaggcccattttaattgggactttgtgagaaggcccaagctgcctagtgtttgggttggccatgccatcaagtgtccaactagtgtacaacaaagttagcaaattagatttctaaaccaaatgaacatatgataaatttaagggtaaatatcattttggattttgtattttctaaaagaccttcta

SEQ ID NO: 261111 - DNA, 677 bp, Cannabis indica
tttcttctattttaaaatctgcaaaaaagaaaaggtaagcattcaattgctccaaaaaatagtagaattaaattaaaactacactaaaaattaacctaaaaataatactaaaaacaacctaacaaattcccccaaactaaacatttactcgacctcgagtaaaacactaaaacgaagaacaaaagttaactaactcactctcccgaatatgagtaatttttaagtagactcaataacatgattataaaaaatttcacttatgcatacaatccaaaattttagttcaattacgcccttgacacgcttcaatttattttcattcagctcacgaaactatagaatgtaattaactaataattaaaccagtttatacatgtcaattacaaccattaatctactaactcaaaattccatatgcttgcaatacttactattctccactgatataaaccaatgcacaaccaagaatcaaaaggtctttctaggcttgttgtgtcaggcttaggtaagggtagatgaaatggtcatttaggcttgtctataccataagcttctccaatcatgtcaccaaaatatttcacacacaatcccaatacccgtatttttttttttctaattacatgagagaaatttttcaacaatattgcaacaactttatatttatttttttctttttc

SEQ ID NO: 261112 - DNA, 4843 bp, Cannabis indica
caagctcaatctttactgttctcctgtttctcctctttgggcacctagactgtccaatagggcggctctcatgtgctggctcattagggattgaataatgattgtaatggctttctttaacttttggaaggtgagtccctatggacttaccaatatcgttaactcggcttaatggaagcagtgttttcttagcaacaaaaaattttgatacacatttccattgtcaacaaaaaattcattttgtattgatttttatgtccctcctacaaataatttaaatcagattagtagcctatatggcacatactgcaacctaaaaaggaacaaacataacatctaagtgtaaaattcaatgagtatgtaatagctaaatactaatagctacaacttcggtaaataatcaagttctcttggaaatgggattgagtggcagttctcttgcaccgtcacacaaccttgtttctttcaggtgaaaaaaaggtagctgttagcagctagactagacaacaaaactaccattgtcttctatttccaagagggatggtatttgatccggatatcaaagatctattgccaaagccaccacctcgtcctctcgagcggaagtttcctcctgaacctagcacaacataaacaagaacagataagcaagttgcaactttcaattgtatagcccagagctacactccaaaagagagtcggttttagcaagtcacctccatggccagaaccagatgatcgggccaaagcagacaatgcaggactcactgtctgacctgcttcctgcaggatctttatcaattcccgagcatatttcacattagctagtgtgaaaaatgtgaaggctgttcccttagctcctgcacgaccagttcggccgatcctgtggacataatcctctaggcttgaaggaaaatcataattgatcacaaattttatgtcctttacatctacaaccaacaaaacaaggggttaggaataacaaaagaaaggctttaaatctcaaaaaaggagaaaactgcaaacaaccttatccctgcaccctaagatctgctcaaatttaagataacacattcatcacacaaatgtgcccaccttaactttgcagggataaggagcagcttcaccaccaacaattccatatccaaaaactcaataagcatgtgtgagtcaaccgggctgcagaaataaccagctccaaacagtggatgggcaccacgaagtctattttatctaaacactttagtatcaataccatccaggctcctccggaaatagacttaaatcaaattcataaaggcagccacatcataaaccatcttacaacaaccgactttccttatggcaactataactatggtaatatatggcctcaacattgctcaatgcagaaaaatcaaacatctccatcaagggcaacatcaatgaaacataagaacacctttagatatgttagcactggagtatgataaagttcctaaaaaaacaggagaaagtcatacagcctccaatggaactcaatagattgcttgctcaggttaaaagcaaggtgccatcagatgaacaaatatataagcagtcagttgtcgtatatagataccctgccttcgcacccaaccacaatttatattctcaggaaactggaaagcagccggcgactcgcttatcttggaaaatcaagacttaaatgaaacataatactcctaaaacacattgatcctaccaagaccccgcgcagccacatcagtggcagtcattatagggcttctgccattcttaaattcagcaaggacccagtccctttctgtctggtttttgtcaccatggatggacagagcaggccacccatccattctcaattgccttgttacttggtcacatcctttctttgtctcaataaatatcaaaatcttacttccatccacacttctttaagaagttttatcaacctgcacaaatgagcaagtttccataaaaactgcaaagcataaaacaagagccttttttattgtgaagtagtgccaggctaaaagacaaacctattgtatttctccatgtcggtcataacttcaacaatttggttaatagactgatttgctttcaagtgtgtcgatccaatgactacctacagaattagaaaaaaaaaaaaaaaaatcaacagacatcaaagaagaatcaaaactagtacatgtcctgcccaagttaaaatcaacattcaacagaccttataaggattacgcagaaactgcctagctaggacttcaacctcccttggccatgtggcactccagtacaatgtctgtcgatctggccggatctgtggtaaaaaggttaactgcagtttagaagatgttcacgtcctagtggaaagtggcacaatgatctacgcctatactatgaattaatataaaaatattttagagccatgcagtccaaactatattttcgtgattctgatttcaattagtttgatcacttcatcggcaacatggatctacaatattgccactatagcagcattgaaattgtttattacatactgaaaggtaaaagaagggttaagatagatttctattttcagtccatagattaaggagaggaaaaaattattgactcctatgaactatggtaatgtagataagacttaaaaaaactcttaaaatgcaactataaaaatgaataaagccatacttgcgccacaattttccttatctgaggctcaaatcccatgtccaacatccgatcagcctcatccaatacaaggtaagtcactcttcgcaaatttgtgtgctgagcttccaacatatcaattagtcgcccaggtgtagcaatgacaatctcaacccctgaataatgttaagagtcattatgttcaactaagagtaacatttcacaagttccataatctgcaatatgttagtgttacctcttttaagatcacgaatttgaggtccttttggagcaccaccatatatgcaagtactcctaacattggcacgtaaactgaacttcacaacttcttcttgaatctgaacggctaattctctagtaggtgctattactaacacaataggaccttcaccataagctgaaaaatgtacagaagaataatcaaaacatataataaattacttagtaaattcaaaacgcatatacatgcacaagattatgtaatgaattctttacccaatcgaggttgagcgctgacatgaaccaaagctggcagcagataagccaaagtcttaccagaaccagtctcagcaatgccaattaaatccctgcccttgagagccataggccatccttgagcctgaattgcagttggttccgcaaagcccaactttgcaattacctcaagacaataatctgacataacaaaaaatatacatatcaatatataagccaaaactataatcacaaaaaagtcgatactagcaagaaatataacacaatggtattcaatgatagaaattaccaggaatattagcctcctcaaacatccgaattggcttcggaatatcgtgcccttcaacagtgatctcccgcctcgaacggtagagcattacttcatgctctgacattgccctgactgaaggactctcaatgtagaaattcttctcaaacggaaccaagtctccaaaatcctgtctgggaagggccacgttatccaattccccttttgaagaagcattgaatctgcctcctcttccaccaccacggccttcgaaacctctcccaccaccacgcccaccagaaaacccatatctttcaccacgaccaccaccatagctcttacccccagtcccgttgccatcaaaactcctacttcctccaaatctatcatcacctcgacctccagagtcaaaacctcttccccgtcctccgccacctcgacccatatcaaaccgactgccaggtggctgaaacggcggatacccattgaaatttccggcattggatcctggtccagaaacccctcttccagccgaacctccgtacgacaatggacctccggggcggccatagcttggtcccgttcccgcctgagtcggtccaataaggtcactacacaaaattcaagataaatgatttaatattgtacatataatttaagataaaagagtaagcaatttgaaccgactaccataaaaaataaaaggaagtggaagatctgactcaaagctaggttcatagtaacacgtaccttcgccggtctctgtaggagctcggatctgcgagtctgtgatcgtaggggttcatcgctttagggttttggctctgctagggtttcagaaacctttatatattttctttatttctttctctttcagcaagcaagttctacaaaaaaatttcttaatccccaattacgtaatcttatatgtaactagaaacaatgaaaatatatattacgaagaattgaagttaaatcgtatcaaagataggtattttttggtgtgtttggttggccggaaaatagtttcccggctggagagaaacgagaaaaagaaaaagaaaaagaaaactaaagggaaggaaggctgttttttgcccgcgcatttggtgcttactgctactttactgttaatgggcctcgtacataagtcggttgcccaggtccggcccactcatcttcagtccagtccagatccttttgtcaaaatgacactgtctacattcggattggactacaaatttggtcacattaccacgtgtgttttagtagggtttatgaactagaaaaacccaatgcaaaccgaaaaacatgccaatttttttggaattatttcaaaaaatacataaaaataacaaaagaattacaaaaatacgattgtacgaaatt

SEQ ID NO: 261113 - DNA, 1237 bp, Cannabis indica
tggtcgcgaccatggtcgcgaccatgaaaaagggttgcgactagctcgaaccctggtcgcaaccactggaactaatttttttctcgtggtttctgtaatgtccaggtcgcgacccaagaacctggtggtcgcgaccactgggttcccagtcccgaaaagtaaattttttttcacgtttttcacgattcaactggaaaaatataatgtctggtacttaactaaaaattcaaaatacgaaaaatactaacacataaactaaaaaacataattaaaaagtctgacaaattaaagaaaacacttgggttgcctcccaagagcgctgtctttatcgtcatctagtcagacgctctagagaggcgccagaataatggcggacttggcttggtcaatttgacctcccaagtagagctttaaacgctgtccattaactttgaaggttgttggaccttcacctttcaactccacagctccatagggaaacatcttgaccatggtaaacgatccttaccaccttgactttagcttaccaggaaacaatttcaaccttgaattgaaaagtaacactttctgcccaggttggaactccttcctaactaagccttggtcatgccacttcttggttctctccttgtagatcttagcattctcgtaagcctcattgcgaaactcctccatttcattcaattccagtagtcttttctctcccgcagccttcaattccatgttgagagtcttcatagcccaaaaggccttatgttctaattccatcgacagatgacaagcctttccaaacaccaaccgatatggtgacatcccgatcgttgtcttaaatgtgtttatgcccacagtgcgtcatctaactttctagaccagtcttttcttgatctctgcactgttttctccagaatcatctttatctcccggttagaaatttcagcttggccattactctgaggatagtacggtagagcagttctatgacggacaccatatcttgaaaggagtgcttcaaactgtttgttgcagaagtgactcccttcatcgcttatgattgctcggggagtaccaaaccgagtgaagatgttcttttgaaggaagcggaggactgttttaccgtcattttgtggtgttgctgcagcttcaacccatttcgacacatagtccacagccaataagatgtacagattgctaaaagatgaaggaaaaggacccatgaagtctattccccacacatcaa

SEQ ID NO: 261114 - DNA, 902 bp, Cannabis indica
tatttttactttttattttattatatatatatataatatataattaaaaaaaaaagtcccaaatcctaaaattctttctcaacctctcaataaaattctttctcacatatattgtgtatttatgtggttaattttattttagttgaaactaaaaaaaaaaaaaaacctcttatttcggtttgggcgggttaacccgaccaaactgcccaaaccgtcggtcgggttaagattttattttttttaattgggtaggttgtatgcagaattttacaaaccgatctttacgttgggttagaaaatatgtagtataaaccgactaaaccgactgatgtacagccctactttgagctaccatcaggtttgttatgatctttaattgaacagaaaagccaattgggcaatcaaacataaaggaaacatattataatgaattaaaacaagtctagtttgaaccccaactgccgccgcgcgacagcacaaccaccgctggtaacgtctaagactctagtgtttgattccacaagcacctcctcaatgccaacgctacctactgaaaacctccaatccgttcccaaaaccttcgtctccaattaactcacatacaaccagaaaatgaaagagagagagagagatactggtgcaacaacagtgaaaaggaagggaatagctgaagaggaatgacacgacaagggctttaccaagctacattttggagagatgttaattttccaggtaaataaaacacgggtttttaagagatgttaattttcccattgtgtaaaggtaagggtagcccacagtaaaatgaaaactccattccaaaaaattaaaaatgcataccaaacatgtgacagtcagtattcccgtgatccgtaaggggaaataccgggtaagctgtgcaa

SEQ ID NO: 261115 - DNA, 586 bp, Cannabis indica
ctgatgccttttacaatagatttgggtcctttttatagtgcaaatttgctcctcaaatatggtattttcatgtaccatttagtgggataaatggcacaaaaagctgaacacaatggagaaaatgggaccatgcgtgtaaggaaatgttggagagaatgggggacgatgggacaggtggcgtgagctagttacttccgtcagatggaatgacgttggcaaagaaagagacacgttattgttgttgcattctttgtggtagtcatatgagatagtcaactaaaaacttagttgatatggactatttctccacattaggcattaactaatgggccttcaaaagataacgtgcaaacatccagcaccatcttttcatgtgaaatagatattgggcttttgatcaatcatccaattgggttgaggttctattataatactttgctcaaatctgaaaaataacacaaatttaaaataaattaaatatttccaactaaaataaatttattattaaaaccacagaatacttaatttatattaattatatatgcataaataaaggcttaaaatgtacaaatttgagccttaatca

SEQ ID NO: 261116 - DNA, 721 bp, Cannabis indica
ataataataatcatggtgaataaaaactttgtattaagattatggagagaatattacatcatgattatgattcctgtagaaaaaaaaaagtgtttgttgcagtacagagaatgtggcaaaggggttttatattgtgtttaaacggctatgaaaaatcattcttttacttcatcagaaacaatcatcaattagtgcagaataaattcatagtgcacgaagggaaaagttctcttaacttttttttttttttatttatttaatttttttttttttcacttatgttgttctactttatacaacctggtttaatactattaagttgataagctattttcacttgggcatagagaagagaagagtagagtaaaagtgtttaataaagtgttgtgtgttgttactattgaaggtaatgggataaagacaaggatatatcgatctttgtgagaattgatgaaggttttgaaatgacagaagcaggtgcagagaaggtaaagaaagactcaaaagacaaggagtgtgtgattaaaatagagttaacttttccttgatatatattatatggcatatttttatatttatgatgagtttttacttttaagtcttttgtgtccttcaaggacttaaaaagctatccccatctttgaccatagcagtgactactcacttcatgggttacatctctctctctcatgaaatcaaacaagtattatgctatgcttat

SEQ ID NO: 261117 - DNA, 1646 bp, Cannabis indica
tcctttctttcagctgaatttcttagccacacttaaaaaaaatgactgaactggcttaagtatagaccataaaaagaaataatcatcaggtcattattaggagaaatacaaaaaagacagaaagaaatagtgcatcctggtattctaatcactataacaaatgaaaaatagtcaaaagtagaagccaagatagatatctcaagcaggtgataccaaatctccaattcaaaattgctgccatatttcaatcttgcagctgaagtggaagttttctccaagaatcagtacattaaattaacataaaaggaaaaaattatcttcactgcccttcaaaatttcgatatcaactcaaaaaatacatatgttacaattctccatatctgaatttttcattcaaccttgtcctgatggctgaggctgaccccaatgaatcgtattcaagtacttgtttcagttaaatataatatcgtatcataatcaccatcataatcggatatgtgatattgtggtgtgcggaccagtctgaaaaacttctgcatgtatgatcgtccatcagaaatccaaagatccacactgcttgctctctatactttttgtaacagatttttcattcacatccttcttacgatcattatttactgcacgactccgcccaatgccaagttttggcagaccccgattcaaaccatcaagtaaaacacaagctttacaccatttctgcaaaataagttgtaaaattcaaagctcagatgttaagctaaatttaatacacccacaaattactattcccgattttatgttagcaaaaactatacaaatagacagaaggttttaaaagtatctttttttttttttttgaagatcaagaatgactatttacgaatccatatatattacaacaagacatgagcatatagtttcctatttagtaaaacaaaacatcgaaattgcacacagattccaacctcctgtaacaccaagtgatcaagaggctgccacaaatttatgtgctaatagagatggtgacggtatcacattgagactaagcaggcacttatttgaaggacaaaaatatttaagtttgtcacaaaagcatcaacacgtgattgctacaacgccaaattatatatctaactcattaaggtacttttgcagattccatcactgtttgatgcagattcaggactggaataaacatacctggcttgaaatgtaaccgcagcgttcacatgtcccctgctctggcatttttgtagtagtggaaatcctaaaatcctctcctgatttgataatatcaagtattgctctgggcctgcatcagcaaatatatagaatgctcatctaattccacagtaaatgctccaaaaattaattaaattgttccagacaaactcttaatgttcaacttgcaatagtaaagaaccttattctctccaaatccttgatgaactcccgagcaaaaccacgatatgcattaggagagtaaatgcctgttatttataaacaaacaatcaataacctttaatttgacaatattaaaataaatacatcaaaatttggtgacattcaagtaaaattatggctttttatatgtatgagatttcatgcaagtgtttgtgcttgaccaagtgcatgcatttttcctt

SEQ ID NO: 261118 - DNA, 639 bp, Cannabis indica
cttttagactttctctccatagcgcaaagtccccagttccattgaacttctctaattcaaatctcgccattgatgacattcaaagtttcttcgagaattatagccgaaagaatcttaattatgtgttcttgatcgattacttagctctaatttgtgggaaaattatgaccaatagtgtagaatcaaatcaactaaactttaaacaatcaaataattagcaatgacaagattatcaagccaaaaacaataattgatagaaaacagggaaaaaaagagtatctaataactacataaaataaaaaaaatcaacaccaagatatatactagttcaagtctgatagatcaatgtgatctatggctctactccagtattgggacaccactgtgacagtcagtagtcccgtgatccgtaaggggaaataccgagtaagctgtgcaatcttacatcgcttggggaaggtcaagtgtgatgagtctgaggctgtgtaggtatgggaatacatagttgaagagagcataaatagattgattgatactacctatatcaacaaggtgcatcttatttttcggtagcccataacgccttgatttcctgagatgtcacactagctagtccgtttaaaaccatttaagataaag

SEQ ID NO: 261119 - DNA, 531 bp, Cannabis indica
ataaccaattctaagaatcaatagaaattcaaaagttattttctcaaatctcgccactcacaaaaacatgaacacttcaacttggtagcttttctaagtaaatatgtgctacaaccatcttaccacaaagtttggtatgtacattttgtaactctaaaaaaattctaagtaacaaagatagcaaaaattggcttgaaaataatattctacaagaataaatgagtagtttttgaaaaaattgaccatgaaaatattaatatgacaaaaaattaagaaaaacgcttgaatatgctcactacccccaactgaaattagacaatgtcctcattgtttaaatatatatacatgaaatacattgaatgagaacacttagagagtgagccaatgtaaagtgacatgatattgattttgagaaaaataaaattataaaaagcaaaggaagaaataaactaacaaaggttaaaacatagcaaaaataaagaaatcaaggaaagatagaacctgattagtctcggcaaaccggagacaagt

SEQ ID NO: 261120 - DNA, 1465 bp, Cannabis indica
tttcaaaataattctaagaaaaattgggcagcacctccccttaattttctatatcccaaaaatttacaatccacaccaacaaactcaatatcaacaactataccacaatacaattccaataaacccaatatcaacaacaattctatcacaatatgcactattaccacccaaaatttataaacagtaaatcaaattccttaatatggtaggaagtgatacttacaaacccaaagaagcttttactccacctccattgttgaatgtccttgaaagcttgaggttgaagatgaagaataaaggtattttcggatttggggtaatattgatgatttttggtatgatttttgatggaaagtgaagattgatgagtgaaagtgggttttgggatggattgggatttagaaatttaagagaagatgagaaaattgaagaatggggatgagaaaacttgatttttggctgagaatagatgagagccagctgaggagagtttgaaaaaaatttgaatttggtttagggttgaatgggggggaaatagggtatttatagaaaatctgttagctggtcgcgataagcccaagggctggtcgcgactagcttaaacttgaaaattcgatggctctggaaattggggtggtcgcgactcgggtcgcgactatggaaaagggtcgcgaatagcacaagggctggtcgcgaccactgggagttgaattttcatttgtttttgtaaagtcccaggtagcgaccagggtcgcgactaccaaaaagggtcgcgacccaggaaccaggtggtcgcgaccactgggttcgcagtcccgaattttttttttcacgtttttcacgattcaactggaaaaaataatgtctggtacttaactcaaaatttaaaatacaagaaatactaaaacatatactaaaaacataaaaaagtttgaaaattttaaagaaaacactagggttgcctcccaagagcgctgcctttatcgtcatctagccggacactgagttgttgtttagagaggcgccagaataatggcggacttggcttggtcaatttgacctcccaagtagagctttaaacgttgtccattaactttgaaagttgctggaccttcaccttttaactccacagctccatagggaaacaccttgaccacggtaaacagtcctgaccaccttgactttagcttactaggaaacaatttcaaccttgaattgaaaagtaacacttgctgcccaggttgaaactccttcctaactaagccttgatcatgccacttcttggttctttccttgtagatcttagcattctcataagcctcattacgaaactcctctagttcattcaattgcagtagtcttttctctcctacagcctttaattccatgttgagagtcttcatagcccagaaggccttatgttctaattctaccggcagatgacaagcctttccaaacaccaatc

SEQ ID NO: 261121 - DNA, 944 bp, Cannabis indica
tggtaaagatattattatcttaccgttatatctttctgagttaatatcacaggttgatcttatatcaaaaagatcttaatcctgacatggttagattcaatctcaagggtgttatttttgttcttagagttgttagtcaaagcctaccatttggttcgggtaatacgtacaacttgggaagatgatagttcaattgagtgggagcgctaaacatagattaagaatctatagcttctatctggatatataacggaaatgatgatttccttcgagcttggcttaatagagataaatggaagagctcttattttagtaattatatttgtttactgaaatatcatttataggaagctaagtgttttaaggataaaatacattgaggggtgaaacggtaaatttatccatgttcagtgtaaatgatctatagaggatctttaattattggaattagaacgatggttaaatttgtatagcgcatctatattgtggaatatatagagcattctatataattgagagtgtacttccaaatctatagtggtgcaaggaggaattaataagttaaggaatttacttgataaattttagatgtgcttattggaagttcggttatattggtccatggtccccatactagttgagagaatactacttgtaagactcagttaattgattttaattaatcaattatagttctaaattagactatgtcttatttatgaatttttcactaagctagggcttaattgtggaaaaaaaaagattctagggtttatttattaattaagagtctttgttaagcctgattaataaatatattaaatggcaattttatttgataattatttcaattattaaataaatagttttggcattttaagtggcggaattggaaaatatgatatttgtgaaagaataggataaatagttgaaaaatagcaaaa

SEQ ID NO: 261122 - DNA, 626 bp, Cannabis indica
taaaatataatatgatagtaatctaatttttttatgaccatacaaattacatgatagtaaccttggatcttgaacttggaccctagccccgaactcaacttcggcccccaccccgaattcaacttcgacctgacccccacccccaacccgacctttaattattttaaatattataatacaagttaatatatatttaattttagcatttgttaagtattttcaatacaaaatctacaattgcagattccttgaagatcaattttggttgtcttttatagatgaatagctgagagctccttctatattagagcaaaagaccatctgaattatgattttttttcagagcaaaattcgagtttttctcaaaaggttcaaccctattttattatgtgaaggtctctacgaaaggaagttatagtatcaatatcaatatgtacaaaactttgtaaagtgttgggatctttgaactgttttaaaatccacaaatttcccgacgtgtacacccatatatctacacttgttcatgcatgtttcactcacttttgcagccgtttcgtattgctatccatctaatgttgttgcttaaatgcaggaccaacctgagcgtgctgtgcgggtattggcca

SEQ ID NO: 261123 - DNA, 856 bp, Cannabis indica
ctagttccatttgcgattctgagtttgagtttgggtttgagttcgggtcggagttcgagtcctggttcgagtttgggttcgggtccggatttttgtctaggtccagatcaggctccgggtgtgggttcgcgtccggggtcttggtcaggttgggtgcgagtcccaagttccgatcccgatctgagtttggattcagttctgggtctaagtccttggttctcatactggtctaggttcgagtttgggtccgggtccaggtctagctttgggtctgattctacgtgtgggtttgagttcgggtccgagtctatgtctgggttagtgtccaattctggaccccgatctcggtctagtttcgggtccaggtccaagttggggtcccgagtgcgggtccaagtttgggtgtgggtcaggatctcagtcaagatctaggtccagcatttcgatcccagtctgggtcttggtccgtgtccaggttcgtatccggatccctatctaggtcaaaatctgtttttgggatcgtgtcccagatttaggtccaggttcgggtctcagttttggtgtgggtacacgattgtgtcctggcccgagttacagtcttagtttgggtctaaggctaggtcttttttcggttctaggtcttggtccgggtcctggtcacagtcctggacccgaacccaaccttagaataggactcgaactctgacccgaattcaaacccaaactcttaacacagaatcgtagatggaagtagaaccgaactaggaccaagaccagtaccaggacctaaaccaaaacctgaacccagatcaaaacccagagagagacctaaacccaaacctgttgggttttatgc

SEQ ID NO: 261124 - DNA, 1419 bp, Cannabis indica
gcccggctagtgctttgtcccacaattaatgtccccctcattgatttaagtaacgcagatttaccacaagctataatttaaacaagtgaacgagaatttgaaaacatccaaacttctcaactcacttggggggtactatgcctagtcgtgtgtggctcgaaaaacatgcagtgcattatgtttgcttacttcatcaggacttttattacacttttcatattaaaccaaaaaacgagatgtgttttcaacaaaacttcccaaggaaaagatgcgcttgaattctttctcgaggttaaaaaattaaaaattagcataagcgtcgaaatgagatgcgttttcggccaaatttcctaggaaggaaaacttcacctaaattcattctcgataatttttgtgggtttcctaaggtttaatttcttggtatttttcaaagtgagaacgagaaggcggcgtctgaacccctatgcgtttttagccttgtattgaccacaagatactacctaaaatccataatggttacctccaattatatatgtggccctaggggctaaagacttttgttgataagggctagagtaagaaaatctgcttgagtgttgtcacagttttaacccaattcttggacaaggaattacacctagaatctataacatttttaaccatttcttccagaatcctacttaacaaagcgcaagagtcagggaacgcttggaatatgaaagctcacccttctacaaagaaagccatccatgactagcactccatgagcaatggaatgaaagactaattaactatcctagacattcaaaaagggctaaggttccgcaactatttgatggttcagaaacagttcgatcgccagtttctaatgtaagaatatttaattaatcgaagtttgtaatgactaagaagggttataacaactacaatccaacctaaaaataggagataagagtctttgaatacttcgtaaatcagcagtggaattaaaaactgagtaaagtctaaggtttgaagtgttggccattggaaccacaaacttcaaaacaacctaaggtgacaacccttaaaatggtctagcaagctaacgaagcggaagtaaagctcataggaaaatataatgggataaagttaatataaatggccccgtggttagggcataattaaattatttctacaagttaaggaaagtaaaaaggaggaagaaactataggttgtggtcccaaaaaggctcattgcctcaaccaactgctcaatctccaagtttcttggtactatttgattattgcaaggagttttctctctacaatctctcaatggtctccctatgaagaccactgattattcttataccttccacgagacgagtttattgggagtagttattgttgggttttatgccctaaataaaactcttt

SEQ ID NO: 261125 - DNA, 648 bp, Cannabis indica
catatttaatctatatattatattattttaaataatataacaataatcgtattagccccaaacacaatataaatacatgagttgtcaaccctatattagagaacaggtcattttgaaggaagcaataatataatgtgattgcataaatggatttgataattgtaaggtgttgaattcatagtaatgtggaatatcatagaaagtgagacaatactccataatcatattacctaaataagagacacaataacacaaattcccaccctcttataaattaatgtaggaattctatgttcaaatcaaactcatcaatcctatctcgatagaaacatgcgtaactcaccctaccatgccatatcatatattttcaattaataattaaaaattcattaaatctgtaaaactaataacaccaattattatttatgtcatattaaaactcctttaaaccaccaggaagaagagaagctataattatatttatgcatttgttaatttaaagcatttaaagaaattaattagccccttgacttgtcgctttttttaaactaccacctctttttaaaatttatatgttatcgggtactagtgatacctgtccaacaccttctatagatgacgctttatgatttagtttttttttttttt

SEQ ID NO: 261126 - DNA, 886 bp, Cannabis indica
ataaaatagattacattgaaatggagttttatttagggcataaaacctaacaaacgactactttatgagggatcacatcagccaagaagggataaaagattatatccacctaactcctaaaagatacctacggtataggtcatgtatttcctattttgcatctgctagaaatatgtgcccctattgaacctgaacaaaaagacaagtcattcagttctagggatttccccagaaaaacactataaataccccccaaacacactgagacaagggtcgagaattctgggctcataagaattaaagagagcgaataggagaaatatctaccaagaacattctctgtaataaatactctcataaataacaaagactcctggactaaggcgcgttaatgccccaaccacgtaaaaatctcatgcattaaactttctacaactttcttatatatattattaaatctgttgctgaaaatctcggtcaacattttggtgctttcattgagagactgaaggaagcgtcttcaaacaaacaacaaccttataagctaaagcaacaatggtggaagctcgcaacacacgtcagccccgtcctcctcaagacgctcaaaaccctgaagacaaagaagtggcttcgagagtcaacgtggattctgaggaacgataggaggccaacgatgacgagtacaaggaaaactttgacgagtatgacgcctacgacgagggcagttacacagagttactgcttttaaggcaaaaggctactgatcatgaagctgagatcgcagcccaaaaaaaaaaaacaaaagatgcaagaggtgatggttgccatgcaaaaagccatggagacagcaaggatccacgtacaccatttccaccttcttttggtt

SEQ ID NO: 261127 - DNA, 524 bp, Cannabis indica
agaatcatgatctttataacctttaggggtggatcataatctctatatacttaggggtggaatttaatccacaataccttgtaaacatattttctttaaacatggaagtaatataatgaattagctattatcagtataaatccttgatcttgattgtatgttccaatttagttttactgttgtagtaaataatgatacctataaaagttctttgataatgtatcacactaccttaattgagtgggagaattttaaaattctttacccatcttcatttggttgacacttgtgataggaacttaagaacactactgaaaagcaaatctaaccattcatgtggatagaaataacttatcagaattatgagaataagataaaagaattcttgcatagtctattcgaatgacttgagccaagattcttaatcctcataacattttatggtctcttaatttgattactcaatctctagcaagtatttttcacttcaaatactagtatgctattgtaacgccccaatattt

SEQ ID NO: 261128 - DNA, 524 bp, Cannabis indica
ttgctcaagcatggattacaaatgagtgagttgtgctgtctttgtaatgaagaaactgaaactgtgcaacacctatttttcgaatgtactgtggctgtgaaatggttgcaggacatcaaacaatggctgtcatggaatgtggtttctttgaatctttctatcttacttaggtggattgcaagggcaaagattttgaagtttcgaaagaaggtatacactgctgcaattgctggactggtttacaatgtctggaaactgaggaacaacattacttggcaaggggaatcgttaacctcaaactgaattactgaggagacaaaatggaatatcaaaacacgaattgctctgtttacacccaagaagactaaagaagtagacaaaaaatggttcaatgaactataatgtagataagatgtgatgtatagattgattgggcccgatttgggtgcctatagcttgtaaatagtgttttgtgcaatataatgtcctgatttatcaaaaaaaaaattagactatgtctagtt

SEQ ID NO: 261129 - DNA, 734 bp, Cannabis indica
ctttatcgctaactctcacatcagtgtaaatcctgtgcactgatgaatcatggggcattatcttttgaagcatataatcacaattacactgtgttgacatcactataattgtgaataactatatgttctggatttaacagaaattgtatattaaaccataatcatgaataatacatacaaatataaataatttataattttctattgacaacaaatcagattatattaaaatgagttttatttagggcataaaattttaacaatatgttagaaaaaataaaaagctatcatattagcatatcaggatattggtaaggtgtgcacataattgtactaagataccgacagatatatactaagcttttaaaaagtacgaactaatgctaccaacactagtacgcctagagtactgagtgcatgtggtattatggttagttgtacttagttaagaacgttcgagcctcagttatatgcgttggacgcaggttttagaccttgcggttaggtgtataggcgcttgatcacaggtcggttgtatgtttatgttttatatttttcctactaagtctttcgactcatatatatgttttctatgtgtacgtaaaggtaagacaaaggctgagtagcagtgagtctagaactcggtgaagattgtacatattaagatggttagacctagagtgtccaaatcttcaagatgacatagactcatatttggttagtcgtggggcgac

SEQ ID NO: 261130 - DNA, 599 bp, Cannabis indica
caatattagcacgcttcatcactagcttctaatttagatttagaaatggattttgaaaacttgttggaatacaaaacaaatggatgagaatttgggatcgtaatcaacagtatttatacacatgtaatacaaacaaacaagaaatgaagaagtgggacaagagaaagcggtggaggaaaggggttacggccctttgtgggtggagtggttaaaggagctttaaccttatcgaaaacgacaatattgagtaatgaatgcgcttggtttttctctcccactcaaaaccaaaaatatgtccaaaaatgacaaaaatggcatcttgggaacaaaaaagtttgcgaataagctgccccctctgcttttcttttgccaggtttctaccaccgcaacccttatcgtgaccaatgaccaacaacaatagcaataagaagattagaaaagtaactcttttactatttttcaagttatttgtttcaaaaaaaaataataatattatcaaagttcgataatttgatacattgtggctgtttagatgaattaacaataacaagttctacttaaatcttttattcttaactaagtagctttgttcaaacatt

SEQ ID NO: 261131 - DNA, 1430 bp, Cannabis indica
tcaagcatgtgggtccaaattatatgtcaatcacatttgagtagaaaatgatagatgcaaaaaagaaaaggcaatgaagattttttcttttcttttctttttattagttttagaataataattagtaataaccacaatagtccaataaaaaaacaaaataaatcgatcttaaaaaaataaaaattatcgaatttatctacttaaaatatataatatttttaaaaactactaatatatatctattaaaaggaaaatattttttttgaactcctaaattaagtagaccctaaatgcatatttaattcgtcttagctcaggccccgaccaccacttgcatcaaattaaaatactcattttctcataaaaaacaaaatacacccattttctcataagaaaaacaaaagacacccattttgtcttataacttgtgtagttagtttcctagtcttattctaagtaactatcacattgtcattgaaccaaatagttactatgtatttttggatttagttacaaagtctagcttacatttacttttagaaattaagataagatttgaaaaggataaaattttatcatgttttttcttttttatgaaattggaaaggtatcaacaaaaaatgagataaatcttatagaattttttaaaatactagtaatttgttttcttatttattattacttactttttcttttcttttcttaggtcatgctcttcaaactatattttaggtggatttttttcttatattttattatgatcatcaattcatttattttatttttattaacaatggaaactcttgagagacatttgtcgataaccaaatgaaaggaaaatttacacaaagtactcaaaattgcatttttttttcatgttttcacattaattttttttgacatttttacggtgatatttttttagaggagaaataacgttactttcatattaccgcaacattatactatatttctgtaacgtataaacaacgttttttttaaattaacctaaaaataatagtctataagtcaaaaaaattgtgtaactaaatttttttaaaaaaaattgtgactaattataaaaattattattattacattgtgactataaaaggtccgtgaccaaatatattagtcactaaaaattataatttattgtgactaaaagtatttttagttacaatatttattgtgactaaaaactaaattagtgataatttatatctaaatactatattttagtcataattaatttttttttgtgactaaaaattaaattatcaataaagtaatattgtttagtgtataactagtatgtgatttcgagatcatcaataatcaaaaagggaaagaccattagatcacataaaataataaggcaaggcaagtagatgaggaagcaaacaaatttaggagatatacaataaata

SEQ ID NO: 261132 - DNA, 993 bp, Cannabis indica
ccaagcctgcttggcaagaagagcctgattgtgtgaagtaagggaacgaaatcccaaaccaccaaaaaatttggaagccgagagagcaggccaatttttccagtgaatcttctgcttattcaaagaggagccccaccagaatttagctgttaagctttgaatagaggcacaggtggattttggaagtctgaaacaggacatggcaaaagatgggatggcttggatgactgatttaattagaatttctttgccagctctggaaaaaagtttttcattccaagaactaagtttagaagaggttttttggatgagatagtgaaaaatagagtttttgaccctacctatacagtgaggaaccccaagatatttactaatgaaaccttcaccatttaggagtaaggaagatcgaaaatttgattgagagtcaggggaggtgttaggggaaaagaggatggaagatttgtccatgttaacagattggccagaggcttcaaaataaagatgcaaaatatgatttatggcctcagaggattgggtagaaacagggacaaaaaccatactatcatcagcaaaaagaaggtgggaaaaagcaggagccccacgacaaattttaatgccagagagaagggcggcttcctcatgaagacgaatagcagcagacaaaccttcagccacaattaagaaaaggtacggtgataaaggatcaccttgacgaatgccacgagaggaagaaaacacgttcgataattgaccatttagggacaattgataggtgacagtggagaggcatttatgtatgagggaagtgaatctaggaggggctccaatatggtgaagaaaatgagaaatgaaagaccattcaactcggtcaaaggccttctccatatccaacttgatcgcagcccatccaactttgccatgctttctagaatgaatggcatgaatgagttcattggcaatgaaaatgttatccgtgatttgcctcccagagag

SEQ ID NO: 261133 - DNA, 1263 bp, Cannabis indica
taaaaataaaaaaaaataaataaaaatgaactttacagaacactactttttgttttcttagtttttaaaattagaaaaacaaaagtggttacaaaatgttaatttttaaaaaaaaaaaaaaaacaaaaattttactttcattttgtgattaaaaaatatataaaaaaaaaaaacaaagtgttactaaacagcacatagaaatttaaccgcaaattacacttatttaaaatgatgactatcaaagttaatgaagaaaagcattaaacattatgatccgagttgtaatgtacattgataaactatatatatactaaatatataattaataatattgaacaagaaataaagaacttgatcaaataattaccttattaatttgctagtgaaatatctttgaacgtattgatgaagactccaaatgaagaagcaagctatatgaacacaaaaaattgcaacattattattatattatacatacaaaaattaattattcatatatttaaaaattaaaaagagaaagataatatattgacaaaccagattaatcaattgtatgcaacaaccaaaatctttgaactacaaaactcaaagatgacatacattacatatatatatcattctttattttactgtgtagtaaataaatatatataaactccaaaagaaaaatatacttgtcttgccgttgtaaaagaagaaaagcatgattcttttttttttctttctttttttctgaatgaatctattttctttttctttagtaaaattaaatctatattcttttctttagtgaaattaaggtattttatttattttttgggttttttcatttttacattttaaatcactgcattttctaattttttttttttttttttattgtttttttagatttttttcatttttataaaagctctttccattttgaagttatattgtttctattttgaagttatgttatttttatttcgaggttatgttgtttctattttgaggttatgatgttttcattttgaggttatgttgtttttatttttataaatgaataaaacgtcaattataaaagtataaatgaaaaaattcttttttttttttccatttttacgaaaatccacataccaacccacattgtaacccaaatccacacagcaactaccgaaataactcaaactgtaaagaaaaaaataaataaacaaataaataaaggtaaaaaaaatagtatatgaaatccttttttatatatatagttttcatgcacttttt

SEQ ID NO: 261134 - DNA, 811 bp, Cannabis indica
aaaatcacgtaatatgcctatgctagttagggtgtttcaactcaagtagaggataatcccactccttcggttgaacctttgcaagttgatacaaccgagaaatctaccactaatgttcctattcagaagatcacgactcctcgtcgtagtgggagggtttccacaaaaccatctcgttttggcttggatggtgaaatcaatatggtcgttggtgacgtattgatgaggatccattaacctataaacaggaaatggcaaatcaggaacatgaacaatggtcagtcggcatggatttagaaatggattctatgaaaaagaataaattctgggaatatgtagacgcacctgatgtttatcatccaattagatgtaagagggtctacaagaagaaaagagttgttggaggtgaagttgaaacttttaaagctagactggtcgctaaggcttatacccaaagagaaggtgtggactatgaagatacttttagtccggtcgccatgctcaaatccatcaaaattcttctctccatagctgccgctttcgattatgaaatttggctaatggatgtcaagagagctttccttaatggaattcttgaagaaaccatctatatggagcaaccaaaaggatgttggaattattttaccaggatcttagatctacttacattgggtgcagcggaataatatctctccttcgactcaaatctctaacccgtgtatcctttctgtcgcaaagtattatcaagatctgagcccgaatgtccttctttgttgaatctagattcttcacaatcttccacactatgatt

SEQ ID NO: 261135 - DNA, 434 bp, Cannabis indica
tatgtcctttccagagcattggttaaagtaagcttgggttggatgtatagagtatgtatcgaaagggaccgatattgaacttgaatcagatataataagcttaccgtaatatctattcaattcaatatcacctagttgatcttagatcaaataatctcaatcttgagatagttaggttagttgcattatttgtgttcttcaatctgttcgtcaaagttgaccagtggatcttctcgtggcatatagattaagaacatggtagttcaattgagtggaagtgattatcatagatacgtaatctataccttctatccggacatagaagtcaaacgatgatttccttcgagtttggcttaatagagataaatggttgagtactcatttcagtaattatattagttcattggaataatatttataggtagctaagtgtt

SEQ ID NO: 261136 - DNA, 642 bp, Cannabis indica
gccaaaaattttctgtccaattgacttaggcgcaataatccaggtcttgtttttttagagaaaccatttcatttcccattgctctaccccatttgagtttattagatgaattcatggcttctttgtaagatcttggctcatactcaagcatctcagccacatgaagagcataattcacaatatctgcatatccatatcttgcaggtgctctcactgcccttctttttctatctctgacttattggtagtcaagaccctcaccatctgattcacttacattttcttcctcagttctgtgttctattagtgttttgcatactccagttgatgagataacaggcagtggtgacagcttctacccaaaaattcttgggtaaataagagtgaatcaacatgcatctcaccctttccataatggtcctattcattcttttagctaggtcattttgttgtggtgtccttagtactgttttgtgccaagcaacaccaacttatttgcaatgttgattatccatatccacacaaaattgaagtctattatcagttctaagctttttgattttcttaccagtttggttctcaattaaagttttccattccaaaaacaccttaaataagtcattcttattctcttcaagatat

SEQ ID NO: 261137 - DNA, 600 bp, Cannabis indica
gcctcgcacgtagctttttactagtctatatatatatctatagatatatctatataattgtgttgttaaggtaggtgacatggcatcttatatgaactttgtttcatttattctattttctctatttttcttatttatttagagtttctaacaaaaaaaaagttgtatattaattataatttattatttttcagttttaaattataaaactaatgagtgttgttaatgacactcagtgtgctgagccgtcaaatggttagaattggtttgtttgtccagttagttattttccgttggtctgttatttgccctaacggtttgtaaccaactttagtcttctggattcattgtatataaatctctctgtaacaaaccttttctcaatcaataaaaaatactcttcaattctttcgtttctctctttcgtttcactcaacatggtatcagagctctgtcgtctttagctatggaaaatcaattcgtccccaccaatggaggttcgtcgatcccttcaccatcgtcaacaacaaatccaggtcatactccattcaacaatgttcttcctaaaacctgtaacgccctaatgctaaggcacgctac

SEQ ID NO: 261138 - DNA, 914 bp, Cannabis indica
cgtgcacttgcgtagtaattaataattttcgcaacaatttgtaaattttatttcatttctcgactctctctcctccacgaccacgagccacgccgtccctctcctccactctctctcgctatgtcgcactcctttgctctctcgtggcagcacaaggtaagcacaaccttctcttatttgttgtttaaatttctattagccatgatttagtttgttgatcttgatttgtgtgtgttcaaaataaatccaaagcttgcaaattgaagaaagttttaaggatcgtcaagtgaaaagcattccgaaacttgtaaaagaaaattttgaggaggatgaagacgagcacaatgacgatggaggatgatgaagcttgtaaatgttttggagcagctgcgacatatgcgagaagtggttttgaagatgaagaagactttttttttggacaatccactatagcgacggtttaaaatcgtcttctatactatagacgatagttttaaactgtggcctatagtattgactatagccgacaattttaaactgtcgggaattcttttataccgacatttttttaccgttgccaactctaataagtattcgcaatgcttgtgtaggtgacagttttatagaccgtcgagaattctttacctgacagtgtaaaacttcaagttttttagtagtagatcatgcagtgagtgtattttatctgatgctttctttggtgatgatcccaaactccttgaagacaattacaacaccaaacatatactcttcataagttagggttttttttttttttttttttttttttctttattcaaatcaagtaaattcttttataaactttttttttgttaatctaattactttattaaactttaatttttgtttttaatttttgttaatttattatttta

SEQ ID NO: 261139 - DNA, 689 bp, Cannabis indica
gagaccacagacaagcaaatagcgatacattggagaaatagtaaaaaaaattcttggatattagaagaatacatataccaaaagacattgtaataggcacactatatgattatggagtgtcaatgggatatcaaaaggcttggagaccaagagaaaaaacattagaattggcgagagggagacaagatgattcttatcaacaaccaccaatgtacctacacatgctaaaagtatcaaatccaagaacaatcacacacttacaaacagatacaaaaaatcgtttcaaatacttgtttctagcattcgcaaatccaataagagggtggaaacattgtagaccagtcattgtcacagatggaaccttcttaaaaacatcatttggcgggacgttatttttcagcttctacaatggatgtaaacaacaaaattttcatattggcattcggaaaatgagactcagaaaatgatgactcttaggattggtttttcaactagataagagaaacatttagtgatattgaatgtacaatatcaaaaacttgttttatgttcatttatatatatatctacataatatatattttctgaatagtaacaagttacagtaaattttaaattcacaaaaaaaaatcattaataatcacttttaatcctgctgaagaaacaagttactgacataagacaaatat

SEQ ID NO: 261140 - DNA, 707 bp, Cannabis indica
tcttcttcttcattatttttctttagtttatgaagttttcagtcatattttttggaaagataagagtatggtttttttaatatgattttccaaaacttggcttgcaaatatagcctctattgcatcaagtgttgaggctgtgcagaagatggttagtttttttaattatttttttatttttttattttttttatttattttagtgttgttttacggttattttctataatttatttttgttttcactattcttgctccatctcgctggaattaatgattgttttctgggtgttctcgtggtgctgtggtggttctatccgtgggtgtggaagatggaggctttaaaatatatttcttcttccttctctataattattttgtggtttttttattctggatctcttaaaaatatatttgacgagctcactaaaaaaatgttttgaggtgtgtggtttttttatgttttttaagtagttatatatgcttattgttttacatttatttttgtattgttttagtaatttttttgttctaattttttaagattgggcttgcaaatataactgttattgcatttggtattgaggctatgcagaacattattatttttttaatccattttttctttcttttgtttaatttgttttagtattgttttacagttgttttgtcataattatttatttgacgtcgatttcactattttt

SEQ ID NO: 261141 - DNA, 619 bp, Cannabis indica
ggttaaagtaagcttgggttggaagtatggaatatgcatcgaaagggaccgatattgaacttgaagtagatatgataatcttaccgtaatatctattcaattcaatatcacttaggtgatcctagatcaaatgatctcaatcctgagatggttaggttcgatctcaagagtgttatttgtgttctttgatttgtttgttaagcctaccttttggtctgggtggtacgtacattttgggaacacggtagtacaattgagtgggagcactaatcatagatatggaatctatagcttctatccggacatagaagtgaaatgatgatttcctctgagcttggctaaatagagataaatgatagagcgctcaatttattgattatattagttcactaaaatatcatttttaggtggctaagtgttttaaggataaaatatattgaaagggtgtaactgtaattttgtccttatgcaatctaaatcatctatagaggatcattgattattaagattataacaatggataattaatagcttatctatatcgtggaacatatagagcgttttatgtaactgagagtgcaattccaagttctatagtggttcaacgaggaattaataa

SEQ ID NO: 261142 - DNA, 565 bp, Cannabis indica
tacggggagtacaacgaggctggggagccagtccatgatgatggagacgtcctggttgagggcatggacttcatcagtgaggagcttgctgcggcagttcctcatagaaggcagggtgcgttgggcgccaggtgggtaagccctccgtccaagattacaaaggcgcgccttcgaactcttgaccacagcggatatttgggcgagctggactgctacaaccccgcccacaacaatcgtgccacaaaccctgaaaaggggatgtgcgcctggtcaggtgcccatggtcagcaaggagcattgatgcctttgcatcatcaatacttcaagaatgtggcgtagactggggccgaacccaggacccaagaaccagacacggacctaggacctgaaacccggacccagactgggactgggacccaaactcagacccgaactcaaatcgggaccatgagtcagaccagacccgaacttgaaccggaacacgaactttgaccaagaccgggacctaggatccaaatatagacgggtacccagatctgggtatcgggcccacgaactaggacca

SEQ ID NO: 261143 - DNA, 609 bp, Cannabis indica
ttgctgagatgctagaattgagcaacaagaagaggagatccaaagactcagacagcgggatgatcctgttgaacttcctccgcaaccgcctactgcggttcctgtagcccctgtagtgccagctgagcaacatgttgctggtaaccgtatggagcctttatatgagaggttcaggaagcaagcacctccagtatttctgggaggtcctgatgtacttaaagctgaacagtggttgaccattatcgaaagaatattgaatttcatgggagtggtcggaaatgatagggtggcatgtgccacgtttcaatttcaagaggatgccttggtatggtgggaaacggtatccctaaccaaggattttgccagaatgacttgggaggaatttcaggatttattcaatgctaaatactataatgaggcagtctgcagtgcaaagcggaaagaattcgttgagttggtataaggtgagggtatgttagtgactgaatacacaaccaagtttgaccgcttggctaaagtagcctatgggattgtacccatagatttcagtaagaaggagaaatatttggcaaggttaaatgccaaaattaagcatgatttggttatcac

SEQ ID NO: 261144 - DNA, 511 bp, Cannabis indica
ctctttgcgggtagttcctccaatatggggtcctcctgagatcatggccactctcccattgggtctgggtggtagaccagggatatgctgggcttctccggtgggagcaactagagccaatactcctgctgcaccccctggtgctccctatggcaaagcccctgtcgcctgacccagattaaggtgaggtagccaattcttgatccattcatagaggtgccccaattggattaggctttcaatctcgtccttgagattttttcattcattggtgctgtgcccaatgtcgttgtggtactcgcatcttttgttggggtccctccgggagctatccttgtacaggggaggtggtctccggtagtgcgtattttgcctagtagcaaagtacacacgctcttaggagtctgttaactccgtgtactgggtgtactgtggagtgtaccccctcttttgacgtttctcctccgtccgggtgctgcccttggaggatcgtttgctcctcgagccctgg

SEQ ID NO: 261145 - DNA, 707 bp, Cannabis indica
gacggtttattagacattgggaatgtcgggattggccggaaatttagaatttcccaaaatacccctttagtgttagttattctattttagtgggaaggggcaaaatggtcattttgccccattgttattttgtcctttagtggactttatatggtgtaattatatgtgtatgtagcatttcttttggcttaagtaaagagataaaatagcatttcattttctcattatttaaaataatttcaaagttagaaaagttagaattccaagctctttctctctctctctcttttcggccaagcttgggggggctgctagggctctgattccttgctaaattcaagtgtttttctcaagtttagagtgattttagtaaaggtaacccttgtctagtttctcttcttttagtttcttgaattttgatgaaaagatgatgtttgcatgcttgtttgagttgttcttgctgttgtgttttgatgttgatttcagaggtttattaataatttaaaatgttgattcaagcatgttaggattggtgattacttgattttattgagatatgaaattttggctcaaaaactatggttttcaaagagaagtgttgaaatctgttgctgttgttttgttgatttttgttgtggtttcagaggttaaattatgcatgtttaagtaggtttgggctgaatcgaatgcatgttggtgttgtttaa

SEQ ID NO: 261146 - DNA, 1347 bp, Cannabis indica
ttaacttctcatcttcctctagttttaaatttgtgatctcctctttatgctttgtatcattcactgtaaatttgtatctatggtgtctatgttgttgagttgtgactcacttcaagtagttgtcctcttcattgtctcctcttcatatatagtctctcatccatgttttatccaataattgatagatgcgcctaatcgtcatttgtgcttgtagtcctgctaatgcccttatcagagtgttagccttaattgctattagattctctaaaacatcaaccatctctgggtcactggaataacacatccttagcccccacctttatttgtcgttcctctctcattgattctaacggatcttctagttgcatctataaacgcttacaagaatggttgatttaataggaacaaaagagtctaaatttagggagagaagattccatgcacatgtctaaacttaatgttgtcgaacataactagggcatatttttctatttatcaaacaaactcttatgaattctgaataatataaattctaaatttttgagaaaagggttaaatttctttccttcttactaataaaattaaaatgagaaaagcaaagaaacaaactaaatagctaagcaactaaaaactctcaataactaattgtcctccacgaatgattcaattacctactcttcaagtccttcttcttaatatgtttccattcccccatcctcttgaattggtgctggtgtgactgagactttttgtcctggggatgggtggtatgccaataaattttcattttctaactctgatccctggatttctacctcgaaatgataatctggtatatctccatttgacttatcatttgttgttggagaaagttctacatttttttaattcctcattatctaatgatggagaaccctctgattcgtctaaattttctatcgtctcttcatcttcagattctaagtccgatagaagttccatcatttctactatctcttctacttcaatttttcggtgggctctttatttccactactcacatattttctgtcacctcaaaatagtcagacctttttgtttctttatagtcccgttccgttgtagggtcaataaaatcgatattatctttcttactcttatcactaagtttgtactgtacagtcttgatgcatgtttcctccacattattgacttctacagtataagacttctcaaaagaaaaactatagaatttcattgctaactcccgtatcaacattgcgtcactagttgtctcatcaacatgctttatggtattatgccaaatgctatcgatatgataaagaaaattgggacgtgagacaatgc

SEQ ID NO: 261147 - DNA, 440 bp, Cannabis indica
ttttttttttttttcatattttcactatatttttaaagataaacctcattggagatggttttgacttcaaaatgagaaaaataaaaaaaaaaaaaggctttttaaagccatgattggagatgcccaatggccaatggggcttaagttgatattgaaacaattggacaataatttgtacttcttcactgttcttattggcattggtagttagcagttaaaaaatctaataaaagtatatacctaaatattttccacaactgttatggatactgtagtgaccataatcgctatataatctagctacaatatcaatatcatagaaatacatcattattaaataattaaatattatttttattttaacatatgagaacatttttttttgggaaacgatatggttaagtttagtactgtataagctatatattaaatatatattt

SEQ ID NO: 261148 - DNA, 503 bp, Cannabis indica
gtttcttagacttcaagaaactggtttctttgttaattttttcgtgatttttccggcgacaatgccaattccgacgaattttccggcgccgacagcaactccggcgacttttccggcaccaaccgctactccggtgacttttccggcaccagcagcatactacggttacttttccgacatcaatgacaaataaaacttcttgaacaaataaaaacattaaatatgggatttagaaacctaattacatatatatggcatattaaataccacaaaaaaatctaaaaacaaaaaaataccatataaattggctaaacttaaatgtgccatatttatcataagaacttttaaaatcccatactaagtgtaatttcctcctttggataagagagtaaatcaagaggaaattaaactctgtaccttttttaaattgttatctttcatttttaccctcttttttaaaacttatcatttttacctctttttctaaacactttaccgatttt

SEQ ID NO: 261149 - DNA, 524 bp, Cannabis indica
atattcggccctaagagtaagatttagctcaagtctttattccaagcccatctcatttaaacctaaccctatgtgaatacttatataaagaaagaattaaaaaatctaatgtcacttcttcctcttctcttgattttcaaattcaccatgaaatctctctcaaaaatattgctccataggtgtttgagtatcaacccacactattcaaagtgatactcaggcctttgtggaagactgtgatgaacacaatcgaaggaggagaaaatccaaggtcagatcttgatattagtttgctacagacagaaatcatgggctagagatctgaacggaatgagtcatattattctgctgtcatcaatgtaaggttttttataactcttatgtgtttatttatcgttttaggaatttcatatttaggatgttagattatagaattataatcaatatacatgttaataaatttagatactagtaaaataagtctccaacacttaagatataactctttcttggaagccagtcag

SEQ ID NO: 261150 - DNA, 576 bp, Cannabis indica
gatctaagatcctgataaaataagttccaacaataactatagtaaaagacttatgttcataataaatgttagtttgaggtttaattttaataatgttaacggtagggatgaaacaatactcatttttccacatatggtcaaagtaatactgtaatattatgtcaaaagtgagcagataaactaatactagtgataaaagttaggagcaaattcactaattgttctaaaagtaaatataaaagtaatgcacttattgtgatataaattctgcatcatgtcatattgtgatttaaatttggattaatttttggcacactatctgagtaaattttttacaagatgagctatattttagtaatagatcactaatttatatctctattggagatggtctaaagtaaaaatataatgtaaaatagataaagtagaatttttgtaatatattttagaaaataatgaattaaaactagaaatgcacatttttcctatggggatgggaccttgcgaggacccacccctaatgggagaaaaattctcccatctaaatgtggaacgaggcagggatgaggatagcac

SEQ ID NO: 261151 - DNA, 1329 bp, Cannabis indica
acagaagttcaatttttacactcaacaaaacccacataagtttcataaacacttgaacagagacttgaaaccctagaaaattaactacagtttagcaaattcttttaatttcaaaaccttaccagtgctgacaacaatcaagaacccctctatcaatgataatatccatgcaaataccacatctttcacctccgaaattagcaacatcctacacagtacagaaaatccttacaataatcttgaagatgtaaaactaattcctaacatatattcaaaataaagtaaacattatttcttttctttaagcaaaaaaaaaaaaaaaatatttaatcctagagcttacactattattgtaatcatcgagttcaagaacagcgtcttcttcagccacgccactcgcaatcaaatccatttccatcgcgtactcaaagaattgcttttttacaaatcagattctaatgaagaaaaatgaacacatatcaaatactttgaagattaattatacgataattacatgtataaatatacaatacctgagaatcggagtaaaagcgagtatattcgtctgtgcatgaagatgatgagatgaaggtatcgaagctaatgagctatggagtttggagtacaaaccgaaatgagggaaaatatcgtaaacgtttcgatcggatattgaatgttgcgtttcgcggcaaacgttttgagagtgaaacgcgtatctgtgtgcttttatttatgggcttttttgttttttggaccgcgaaacaggcctcgtgttgggctaacacttgggcccaatagttaagcttaccatgttcttcgtagacaaactcttatcccttaggcctatttacaaaaatactatagaaaaaaaaaacaaaatttgatatatatggcatctaaacactaaatataatatttaaaaaaaaaacttaaaaatatgagataaattatcgtatttaaaaaaataatactattaaaaatttaaaaactcatatataaaaactagtttctgatgaaaaatcagttaaaaataattttattaaggtaatgaattaagaaactaaatactatctaattaaaattagttttttaatgaagaaactaactaattacgaatatcaaaactcatacaatatttatttattatgaaactaattttttagtttaagaaacaattttttagatcattaactatggcagaatccgtttgatcctttgaagttttggtggtggagatcttgtatcatgtaataacccaattaatttgaaaaaaaaaaaaatatttacaataatataacagtttaaaatatgtgcgtggttatgttgtct

SEQ ID NO: 261152 - DNA, 868 bp, Cannabis indica
tatcacgctaagtaaatgcaatttttatttgaattttacagctgtgaatatctcgcttttactgggtcaaaacaaatgtgtattaaatatattgtaagccatatcgtattggaatgcctcgccgggaatagagtagagttaatcttgatagcgagctggagctcgtcatatatctttccaagattgataacgcttttactgtaaatttgacaaccgcagttactgattgcgagatgatctttttcgcgtgcatgccttcctacaacgaggtagacacctcgctatctctcgttttggttcacccatctgttgtacttagtttgtataccgtacattatacgctaagtgtttccattgtcattatatctcctccacgtaacaaggttagtgcctcgtcttgtacacatgaagttacatggtttctcattgaggcacaaggcaatagtttttatatttttatctcgcataagactattcagtcagtcgagttgtaaacatatcctgttaattatgcttttaacgagttatttcatttcaagtgtaattatgattacgtgtctgagttcttattcttcccagcttgacacgtgtcttcctctgatgtgctagctgaatttcgagtataacaactgtccattaaaaagttctttttgtttaataaaaagtgctttttaatgattacaaaggctatttttgtcatgattccttttgaaacgatgcatgtcctctgattttggcggttgtgtagtttcgaggtacatcagcattaaatgaccatctttccacttcctctttgaattctatccgtaggatcaaacattttcttgatccgacaaagtcgataccatgagtataaagtaagaaaaaa

SEQ ID NO: 261153 - DNA, 1504 bp, Cannabis indica
ctttttcctccgttcttaccagacctttggcattcggtctactctcctcgcattctttgcaagaatcatccaactgaacaatcccaagaagcgcaagcctcctagcagtgtagtataaccatccctctcttcgtataaagtgttcttggccactgtttacttaatgcaaaagttttgaggttgagacggtgtacactgtatgcaattcattattcagagaatgtttgtcctatttacacggtgttctgcgagggggagacttgtcgtctggttgtgaactgactcgcttaaattcacactcacaggtacttttaggtttgtcatggaaaaagctagttcttcaaatgtcatgggcgatagtgaccttggcagaaagagacaacggcaagaagctactgctggtacaggggtccactcctagcttcacgacccataactaaggttgggtcgactctgcccataccatccttcttcctttccaaagataccttctatggggttcgtgttccccacaaggacaatcccccttgacccgcacgccatgcatagggagaaggaaataaataaggctctgaaggagcgtctgtaagtggagaagggattcctgctgtaaagaccgcttaactttaatttttaaattagaagataattaggggttaattatgaaacttgcatgttagttatgaattatcagtttacagagatttatttgaattcaaaatgcattgtttatgttatatatgaaatttcataattttgcatgttttgtgcccgacaacgttggaacgaggtgtttggctatgagaatcacatcttagtatttttagtatagcggggctatatagctagacattaggaatgtcaagaatagtcgagattttaaaattgacaaaatacttctaagtgatttttatgacttttagtgtggacaagggcaaaatggtcatttttgcctaagtttattttatcttttagtgggattttaattaagttaataatctaaattttttcctcctttatggctgagattactttaataaaataaaacctatttttttcattatttttacaaaataagaaattggacaaaaaattgcattttctctcaaagctctctctctctctttcgaaccctcttaaaactagctagtgttctaattttcttcagaaattcttgtgattctcagctagtttttagtgatctcaaacctaggtaaagttcctaatgctcctcattttgatttcgtgagttttaaattggagatttttgcatgaattggatttttgagttctaaggttgcttttgttgtttgtgtttgttttttggagtttaaatatggttaattatgtcgaattaagctagttttgagggttgttatgttggttgagcaagctttgagttttagaactcaagctttgctctataatggtaatttttgattttgagcatgctatgttgttctgttgattaggatatatgtctattggggtataatatgcaggt

SEQ ID NO: 261154 - DNA, 708 bp, Cannabis indica
ctctatatttatcattttttatttcaaataaattaactctaaccctagtataattagtataaaaagaagagtaaggtctcataatccaactaatgactcttgacctagttttcattctagctatctggcaactagagagtttgagacttcttcttcttcttttctctcttctaattcgaaattcttaatcttcttcaccatcaaaatgcgagccttagtgataaagtacatacccacgcatagcaagttggtactcaatcatagcgcgtaagattgtaaagaatccaatcaactgaaggagaatcgagctcagatcttggtgatactctgctatagaaaggatacaagggtcagagatctgagcgaaatgagtcatttaattccgctgcaaccaatgtaaggtttcttgaactttatatgtgtttaaattccattgctgtagaaattcatatttaggatgttaaataacatacatggtagtaaacttagattctggtaaaataatccccaacatgatttctatcttaaacactgtaaaaatatcatatacgtctttaaggctaatagattggctcgtggactaggattaattaacacatgaaccacgtaaaaatctccatcttcttatttattattatttatcatttcttagctcttattatattagtttccgaaaatctctaatattaactattaagattttttttt

SEQ ID NO: 261155 - DNA, 498 bp, Cannabis indica
gaaaaagaagctatacactttgagatagaagaaagtaaagaactcagaagacacctagatgatttcaacaaaattgttcttaattagaacaatattggtgtaaaagtagatgagaaagaccaaactatcattctactaagttctttgcctaaagtgtatgaacactttgttgatataattctttatggcaaggacactcttacaatgttagaagtaaagtcagctttgaactcaaaggagatgcagaagaaatcagatgaaaaaccaaaaattggaggagaggggttgttgttaaaggcagacatgataagaagggatacagaggatccaagcactccaatgagaaagggaaccagaagtcaaaatctaatcctagaaacaacactgacaagaaatgttatttttgcaaaaaggaaggccattttagagatgaatgtattgctttgaagaacaagttgaagaaggaaaaagagaaagaaagaggtcaagttgatgtga

SEQ ID NO: 261156 - DNA, 964 bp, Cannabis indica
aaccactactccccctgctaaagcctgatgcaggaggggtaggagccccgccactcgccggagtactggccgactccgatatacaccaactgcgccctcagctcgcagtgccttctccaccatctcagcataggtggtcttgtcgtcagtggtgatcattaaatcatgtttaatctttgcatttaacccatccaggtacttctctctcttgctgaagtcggttggcacaattcccgaggctaacctcgccaaccggtcaaactgagtagtatactctgtcacgctcatattttcccgctgggtcaggtgggtgaactctttcctcttggcgcttctgaccgcctcattataatacttggcgttgaagagttcctgaaacctttcccaggtcatggtggtgacgtcgtgaatctgagacaccatgtcccaccagaccagagcgtcctcctggaactggaaagtggcacacaccactctgtcattaccggtgacacccataaagttcagaattttggtgatcaccgttagccactgttcggccttcatcacatctggacctcccagaaagaccggaggtgcttgcttccggaaccgttcatacaaaggttccaatctattggccgccacaactatttcggcctgagcagcaggggcaggtgccactggaactactggcacaggaactgcaggagcaccctgctgtctcaacctctgaatctcaaggtcttgctcttctattctggcttgcatttccgcaaacctaacctcccaattctgggcttcctgattgacctgggcagcctgtggcgagttgacatcaccccgaccacgagccctgcccctgggacctctacctcggcccataacacttggggaaaactgagctccttgaccttgatctgaacggacagagatgccctgactcctaatatttcgtcgggcgtccatctagtctgaacagcct

SEQ ID NO: 261157 - DNA, 750 bp, Cannabis indica
acttataaaaaaaagtgtcgccccacctcaacataaatcctgggtccgccactggctaatatacaaacacttaaagtaatgtaaatgtatatttatttaagttttcaatttaatttttatttatgtttattatatataatttatactcaaattaattatatgaataataaaacaatatacataaaaaattatgctaaaatacaaaattataaagctgaaaaaaaaaccataggaagacctatggcgtcagttattatacaataactgatgccatagagtccctatgacgtcggttattttttacccccgtgcctggaacagcgtcagtagtgaaatttgtcaaaaccgacgctaaaaccccttaaaaactgcctcttaagcctaattatgtaatagtgttttgaaagaaaaactacaaaatattaacataaagtattcaatctacaaataactttcttttaaaagaatataatgttaataaattatgtttaattatatttaatttataattaacacaaattcccacaaaaaaaaaaactagaacaagaattataaaatctcatattattatttagatgttaaaatttgttccaatttatataataattttatatgagatctaaataaaaaatataatatatattttaaaaaattattattttaaatttcagtgtaaaattttgttagctcaccctaaaattatatcataggtccgccactagttgtaggtggatggaaaagaaaactaaa

SEQ ID NO: 261158 - DNA, 935 bp, Cannabis indica
ttagaaaaaactggcaaacgaatggactgatattcctccaaagctgattccaacttgtcaaccccccacttgtccaaacagctgccaagaaccgctgcatcgagcagcgacatattggtgcttctcaaaccatgaggagtagtagggtgagctgcgtcacctaccaaaaccacattttcccaaaagagttgttttaaaggatccatgtcgtatatcacattcagaaaaggctcaactgtttcttgaattaccctacccaaagcaggaccccaggtcttctctgcttctcggtgcatcttctgaatcatgtcattacttactttcatagtaactgattttccctgcaaatttttaaaattccattaaaggttaagatacagctgctatgtacatcctctttggaaaataaagagtaatgatgtggctactaactaccttcaactgaggttctggttggtttatgtaccaaatccagttcaattttttctggggcagttcgtatatcactgcatgagttccagaacctaagtcaaagtacaagcatttgcccagatcagggtaggcttttcggatgcctatgatggtgtctgaattctcattccctgaaaagtcaagtacccctctccaggcacaataccctgagtacctacaaaaggaaaaatacattacaaatgcacaaaattgaaccttttagttttttttattttggaaatctgatggactaacctcaatattgattccgggagaaaagttctacggactagagagagacatccatcagctgcaacaagcaaatctccaacaatttcaatggtatcttcagtttgaagcactttagcccttactttcactgattttgtaccactacaaatggagaatgacagaaaaaggtgaccccaaaagaacatttctgatggaagatctttatatagaat

SEQ ID NO: 261159 - DNA, 1279 bp, Cannabis indica
taaaaataccaatattatttattttctcttttaattttgctacaaaatcaacaaatcattagtaacaaataataatgaaatatttgttaatcatcaaaacaaggagatctaaaagtttgagttaacaaaagattggtattgagtgtagcttttgcaaaccaaaagatcattggaaagctcaatgtcctaagcttgcaaatcgtgctctggaacaatagagatatcaatctaagggtaaccaaccacagtttaacaaccaaatttaacctccacaatttagtactgctgtgaacattccttcattttgctcttacaattttgttgctctgccagaatagttttttgattcatttctactcaacctaatgccatgtctatctcttcttaggtcaaccatccaataacacgttaggtatgtcaccttctaaataggttttggactctagtgcttcacactatatattttcgcattctgcatcctttatttccttgagtcttacatcgtttgtgcctatcatggctgctgatggtaaccccatgttattagctggtattggttctattgttagtttaaatttttcgcttcctaatgtttatcatattcctaatctttcattgaatcttatatcaattggtcaattgtgagattatagttattcaatatcttttccttctacttcttgtcatgtgcaggatccacagtctcaaaagctgattgggaccagtcctaggtgggggagggggtgcaggggggttgtatattttggatgagttgagattaccagtatttccaactcctagtgttgatttgtcttctttttgtttgtctctttcatcttctagttattatttgtggcactctcgccttggtcatgttttagagtctcatttaaaattttagcttctaaagaaatcttaggaaatttgcaacctcatgatatttttgattgtagtggatgtaaacttgcaaaattttttgctttactattcaataaaactacatctcgtttagttgcaccatttgatttagtacactttgatgtgtggggactctctcctattgttaaaaaatggggttcttgtcgggattttatggccaaaataaaataaaatttcattgtaatcttatttacttttaataaagatcagaaatcatattttgatcttgttatatgctttgttcacatgtttattacgtgattataaatttaatatataagtactattaaatcccaaatatatagttattcacaattacagtgatgtcatcatagtggaa

SEQ ID NO: 261160 - DNA, 693 bp, Cannabis indica
tttttttgcataaggtaaaatctagagtgatcgtctaagaacataacaaaaacgcatatccacccatgaatgtacatccatattcgaatatagatgatcctactttcaagtggatataggcatattgactctttgcaaagaatgatcttgtcaaaaccacaatgaacaagatgaaaatgccatagatatattattgtggtttaatgtagaatcctaggtctagttacaataaagagttcttagaatagtccaagtggatcctggtcacagaatacaaaattcataatccatacattgacatacagttcggatccattgacagaaaatggacattaataacttgtaaaagtcattctgtattgtccaatgtattctaggaaactgaaatttaaaaatttctatttggaatttaaatttaaagtcaaacacttaaatttataccaagtatttattgagttattattatagcttggaccaccactactaatctaactctaaatttggattgccttaagtaagcattaaaagtaggagatttctaagatcgaggttttatcttatttcgggatagaatgtcaggaatatagtcatctgcgcaattcaatttcataagagaaattagagtgacatcataggcagatgatttataaaccattcatctaatgaaatactatctaagcaaattctaaatga

SEQ ID NO: 261161 - DNA, 558 bp, Cannabis indica
tttgtgagtaattagttttataaattaatttccaattttcaatccatgtggagacgatactcgatttatcattttattacttattacaattgcgtacacttgcgtatacaattttattttcttacttgaatatgagctagacttttgaggcttgagtgactatgaacttctatgttgggtatgattaatttttaagcttactttagtatttttgcatttgttcattcaagtgagtttcattcttattgggttgttatcccttggccatgaataacaattagctaagctagatattgtgccggaagggctagatctagtagttcaacttgattgaagtaagtgaaaaattagatttaggtttttctttgtaagtggaataggaatatttcatttaccttgcataacttataaaattaatgtttaaatagtgttctgcttgctggtttgatataggaatatattgagctaaatggtagaagtaaatttgtgagtgttgggaaattctcacaagtctagaggaatttttgttatctccgtgcagaatgctggagtaatgct

SEQ ID NO: 261162 - DNA, 646 bp, Cannabis indica
aagaggagtaaacacattgagagaaaatacaacatcatcagaaagtatgtggcaagaggagatgtgctggcagaaaatgttgatactaaagacaacctagctgactcattcaccaagacattgacagagactgcatttaaaaagtacaaagagaatctaggattaattgaaatgtatgttgattgttttatgttagtgcaagtgagagtttgttgggtttttctgtcctaactaaaactttatttcaatgttatcttgcatttttttatcaatgaaggagcagaattattttattacttatttaatataatgcttagttcacatgtttgcttcatggtcatttgtttgatatataaattcttttgaattattatcacattgttattcatgattgtgttgtctatacagtgaattgtaatcaagattatatgattaaactttagtcccacaatttatcagtacacaggatatgattaatgggccagatggatttgggccccttgggattttgtacaataaatgtccaatgatggggtataatacattatttaatattataattttgaattatttgggcgtcggtagtttgaggtcctaattccaaggatcgagtctattgtatattatagtactattgacggttgac

SEQ ID NO: 261163 - DNA, 708 bp, Cannabis indica
tttgtaaactttttattatttttgggtatttatgaaaatatccttacaagtttgggataagttgaaaactaacattttttattacacattaactaaatataactctaaaataattttaattgataaataccctcttttataatcaaagtaccaaatataacctcacaaaacttattaaaattagacttcctaatgcacataatgggaatataacttataaaagtggatataaattaaagagtagtaaaaagaaggtaaaaattaaaatatgaaacaaaaaatgagtatagagtgtaatttcctctacaaagtgtttcaattgaagacctatataatctgggcctcaatgaacgaaattgggcctttatgttcgggaaatggaccttatcattagtagtaatatgggttcaaatattttggtaagaacctttttagctgaatttttgtaagaataaattcctcctttttatcagaaagggtgtaagaaaacctatgatattattaaaagtgtattaattaaaattgtggtcaaatgtccaattttttttttttaaaaaaaaaatcaactctttatatcccttttcattcaaacccttcaacttatttttgtaagaaaacctttgataattttttcttttttgaaagggagaaaacctttgataattgatatttgtaatcatattaattcaaattatgggcaaatgtcca

SEQ ID NO: 261164 - DNA, 589 bp, Cannabis indica
ggaatatcaagccttaaggttttctaacaatgtgtttttttgatagaaaactttttcttaatatgagcaccttagacctttttatataatgttgagaataccaccatttgaaattcaaactcataaccctcatggatgttatagactcaaatgtaactcatgcacaccataactcctatagtatgaatttcaaattaagatgtgtaacaccttatacacacttaatattgatgataaatgtggaggttactcatagtaacaactaactttcctatatattacaaaataatgacaaataatatatattgtcatatgttgtatattattagtttattacacacatttaatatatattatattatttaaaaataatataacaatcacccactagattaaatattatctctttagtaacaaatttttaactttgtaacatatatttaattaatcaaaaatattatatcaaagtataacattctcccactttaattgaataaatgtacacttttaagaagtcttgcttaggtgcattagataaaatgtctttcaacttgaattttacttctgtataattaccacaaagtttgat

SEQ ID NO: 261165 - DNA, 712 bp, Cannabis indica
tttttttattattatttttttttcagctgatggaacaatcccgacccatatgatgtaaaaatgaaaaaaaaaatctaattaaatagaaaaattaattataaaaactcaaaattttctaatagtacccattcatgggcaatatccattaaaagtgcatatatatatatatatatataaattttttcattaatttgcctaagtttgcttgacataaaatttctgttaattgtcaatgtcttacctagttaccttatttttctttatttttcaggatttattcatagaaactgtgaagaaatatagtattgacaatgacaattgaggtaggatcaaacttacatatgcttatgttctttgggagacattgcggtaaaataaccacaaacccacaaaaaccagccatcaaatatcgagtgtaatgcagatctatccaaaacaacagctccacaaagaccaacccccaacacaactacttttagccaacaaccaaacacaatagaaccatttaaaatttatgtagtacactctaaaaagctgttcttacatactgtttcgtcattttttttttaaaaaattagtctaattttcttaatgagcacgtgcattagaattatttaaaccatttgtaaatataaattttataaaaaattcttaataatttacagtagcaaaaattaaatttaaacaattactaccacatattaagaaaaaa

SEQ ID NO: 261166 - DNA, 1130 bp, Cannabis indica
aatatttagtgacgctcatattttttagtgacccaacttataggtcactaacactaaatttttaaagtcttttttatgtgtgttactataactcacccttaaccctttagtgacccacacttttatgcgggtcactaaatagttagtttgtagtagtgattttttctgtgttgaattatcattgtcaggcttaaatttgattaacgaaaatctacgttaagagtttggtgctttcattaagagcctttgtgaaaaagctcagaaaaatccttcccttcttttcaaagaaaaacattctcctttatggctgaaaatccaaagagtattaacaccccacatgaggaaactaaccatcattctggaaaagagcccatgggctctagaagatcaactaatcggtagtctagaaggaccacccgttccaggagagcccaacctaaggatggttccagtgctcggaccacacatccctggagaactcaacccgacgttggtcctagtacatggacaacgcgctcgaggagaactcaacgtgggaatggtcaggatcccacggatgagggatgaagagctcaaccatgatggtgcccaatctctgggagaaagagcttatgagatggaaagccacggcctgagaagccgtctggaagaggcgcagcatcgaaacactgagttacaatgagaggcaacatcgaccagggcagcgtaggggacaaacgctcagaatcaacctgaacctgtagtgagaagaccacgaggcagacctcgtggctcacaaactaaaagataggaaaaggcccgataagaataacccggggaaaatgagacaccccctcagaatcaagatgaacagctagaagggagacaaccgaaaactgataaatgagaaatccctcattaaaatgaggaggatcttggaactccgccgggagaacggatattacttgctaggaatcactatcgttcttcccaaacccaaagagtgaggactcttacgtaccatgatgggggaaatatgataaaccgctctcaagaggaaagaaaagagcgtgaagaggcaagtgtgacttcgaggcgatctagaactcatagccaattaactcgaagaggagaaagtactcaacgagcta

SEQ ID NO: 261167 - DNA, 1317 bp, Cannabis indica
tggtgctgtctatattacttaccatattccttcggctgtagacaaaggttagtggaggcctatcaatacccccctacaagtctcaccttgtcctcaaggtgaaagtgaggaaactggtcacggatgagagaaaaatcctcccaagtggcttcaaatggatacagatgcttccatttgatgagtgcttggggttgaacattgtgagtaccagggcggatggctaacaccacttcaggctcgagcttctattcgagatctgcagccagaccggaaggaagcggagtggcctgctgatgcggaccaagggcagcacgcaataacgagacatgaaaaaccggatgtatggtggcatctgcagggagctgtaagcggtaggctgcaggtccaatccgagccaccacagggaaaggaccaaagaatcgtggtgccattttctcattgatgcgcttagctactgtgcgctgtcgatatggcctcagcttgacataaaccatgtcacccacattgaaatgcacctcacgtcgcttcttatctgcctgcaacttcatcttttgttgagcacgctgaagatttgtcttgagtaacactagtgtagcatcgcgatcttggagctcatgctcaacttcagagacccttgtactagcttgttcaaattggagcagcggtggaggatcacgattgtaaagggctctgaaaggagtcattcctgccgagctatgataggatgtattataccagtactctgcccaagccagccgtttgagccatttagtcggcttctccccaacaaaacagcgtaagtatgtctccaagcaccgatttaccacctcggtttggccgtcggtttgtgggttataggccgtactatgcttcagattagtgccatgtaagcgaaacaattctttccaaaacagacttaggaaaatcttatcccgatcggaaatgatagagcgaggaaaaccatggagcttaatcacctctctcacaaatacttcagccactgtaatggcgaaataaggatggcgaagcggaatgaaatagccatacttggtcaaacgatccaccactactaagatggaatcaaatccatgggagacaggcagctcctctatgaaatccattgagatatcctccatacttgctccgaaatcggcaagggttggagcaacccgccggagattgtgccaaatacttgttatgttgacagatgacacattcggtgacaaacttttgaacatcttttttcattttccggccaataaaggtcggctgccaaacgttggaacattttgaacacacctgaatgtccccccgtcg

SEQ ID NO: 261168 - DNA, 592 bp, Cannabis indica
gtatgaaatcacataattgtcatgcattaatacaacttttgtttttgattgccattagatcagtattgcaaaaaaaaaatattcgagagttattgaaaaatatttgcatttttttaataagttatgcaagaaagaattagaaatagataaattagatgcattatataaaaatgtagtaaaatcattgtgcaaccttgaaaacttttatctgccatctttgattttttgatatcatgacacatttaatagttcatctagcgagataaacaaggttgtttgggccagtatgggcaagatggatatatccatttgaaagaaagataaaggtacttaaaaattatgtgagtaaccactatcgcctagaagcatttatggttgagtgctacatatctgagtaggctatggaattttgtttcagagtacatggttgaagttgaggcaatgggcattagcaaaccaagaactgacctagatgagattgatagagaattatggaggaaaggaacaaaggtaatcgtgtcaaagtttgaactagatcaagcttaattagttgtgatgaacaataatgtagagatttggccatatacactaa

SEQ ID NO: 261169 - DNA, 1342 bp, Cannabis indica
gagagaaaacaagatatgggattagagtctttgaagaagttgaaaatgaaaatggaatctttggtttaagagaagtagcatacctggtgagaatatgcatatgccattgctctttctctcttgacaagtgcctcaacttttctctgcatccttacctctatttcctcctttgttagcacactgtcatcccaatcatcattacctgtctccgactgtgccaaagtgttcccaatcaatcatttttagtgacacacacaaaataaacaagtatcatcacatatgacaaatcactgttttgagaaattataggtacatctgaacttacattccatttgccaaatgtactgtctgtttccttatcagttttatattgagcttggcgtcttgcttggttttctaacatttggattctccttgactgaatctgcgactgaacacgcaccaagagctgcatatatttcatggcattcatcgtttggcgctttacactctgtcccctcaccactccttgaagcctcaccaaccccttaagagctctaaagctccttctagcctgtaaaacaagcataacataaaatgatgatgatgatgccaattgcccatgaactgaaaaaaaaaaaaactgttcaatgtggtgttgtcctcagataaactcaccgtataacccctataggctgcttgaatcttagtagccgaaacatgatggtgccttagagtaggttcaggtctgtagctgatctccctatgatggtgtacaattctaggagatggaggtttaggagaaacagctctgggagatcgaaccctcggagaaggagctctaggagaagcaacccgaggtgatacaacccttggcgaagaagctcttggagtaacaactctaggaggaggcacaaaagatgaagtcttgggctgctgctgctgctcaggagataatggagtcctcaaggttaatctctgttgctctctttcgaaatctccaaagattttctcaatgctgctaggctctctgaaaagaggaatgaaggaattcgtgtctccatgcctaagttttcctccactcttcttcttcttttccttctccttgctggttttcttatcggaatcctgcaacatatatgattacattcattctcgaaagactcaatctataacaaaaaaaggctcaaatgaaccaacaagtcgcattcatttctacaaaacacacatgcccaagtgaatgcacttacatttactggcttctccttggaatggggagtaaaagccctcttgattgcagaaaaccaacctcctttctttcccatattcgtagcattagtgttactccaaagctagaacctgc

SEQ ID NO: 261170 - DNA, 1114 bp, Cannabis indica
tgagcaaccagacaaaatgaaaagacttggacaaagtacaagtcaactaaacctaagggtactagcaaaatatttaatgtacaaagttgtagatcagtaaagtacaagttctaggtacaaaaagttgaatgggctttgagtcttaatttgttaattgactaagatagacttaccctaaattatgccatatagagttcctacaggaattaagtattaaatgatggttaaacgagtttagaaggtcgtgaggaagtctttgctatagtcaaaagagggccaaaactgaccaatgtgctgggatcaacgccatatgtcggccagggtcccaagacacaaacacgtgtcgggtagggtcccatgaccaaagcaagcactggccaggttcccaggctagaagcctagaatcggccaggtttgaagattggccccatgtgctggccagggctataaacaaaccctgtgtgccgaaaagggtgttttatggattagaaatttagctttttaaaaactcgaacgagttctttgtgactcaaagagtaaagaatccaaagaaagctcaaaattcgatctttttcattaggaaatcatacattttgtatcctaaaactatcatgtggattataatgtgaaaaagactacagtctaacgtaagaatcaagtatttaaaaaacttgaactcaataatggaggattcaagaaacaatgagaaaatgagattttaagacttaccattaatggcatccactgtagaggctcatgggaaggtcaaatcgtcaaaacaaatcaaaaacccaagagaatggaagcttaaggcattggcttgcaagaggaaagtgaaaaggttttttcttctaatcttgaacagaattcaaaaaagagaaagagagattgaagtgaagaggagggtttgataaaatgaaccttatataggtctgataccctcttctttccatgaagtagtgggcggttactctccttacaaaatttccatgcaaaattctaagagtttgaaagtgggatcctatgcagcatttttttaaaaaaaaatccccgtaatgattggcaaaaaagtcattttttgtcatgaagtgtatatatgaaagggaaaatattt

SEQ ID NO: 261171 - DNA, 557 bp, Cannabis indica
ttcgacgagatatgtgaggcccagttttgaacagggttgaccagaagtcctgaacttgttgtacccaaatttctcaacaaagaccttcaccgaggccttgttgtctttctcggttgccatgggtggtggtgagtttccatgggtggtggtggtggtcttgtctgcaaatgaagatagaggaagaagaagaagaaagagggtgaaagagaaagaggaagagaaagaggaattagggtatttaggttttttttttaatttttttttaaaattgttttttaatttttaatttttaaagaaaaagaattttttttaatttttaaaataattaattttttattttaattttaaataattaatttttttattttaattttaaataataattacgtggatcaataaaattgtgacacgtgtacactgtgtacatgtaggcattccaacctggcagttaacacctaaaaatggatggaaatggctaactgctaacagaacttgggtttaggaggttttaccaccaaaattttagaatttggggttagttgtaaaaacctcactag

SEQ ID NO: 261172 - DNA, 535 bp, Cannabis indica
atctgagtggaaggaggcattaattccgttgcatcaatgtaaggttttcttaactttatatgtgtttattttatcgtttttgaaagttcatatttagggtgttaaacaacatacttgtgagtagatctaagatcctggtaaaaaatttccaacagcctgctgatgggtcatccctccaggaggtacccggccctctagcgttatcagaggtcctccttgaggcactaggactccgacttgggccgaatttaggtgtggcaacctatttttgatccacttgtacaagtggcccaatcggattagactttcaatttcatgctttaaatttttgcattcgttcgtggtatgacaaatgttgttgtgatagtcacaccttttgctaggatccctccgcgagctgtctatctacaagggaggaggtttctggtaatgcgtattttaccaagtcgcaaaatacacacgttctcgagagtctgtgagctcggtgtattgcatttattgggggtataccagttggaatatattttaccaagat

SEQ ID NO: 261173 - DNA, 1050 bp, Cannabis indica
gttccttgaagttggccaccgctttactgttgtcacagtggagaaccagtattttttctacttctaaaactacttccaaattagtgtagaatttcttcaaccaaatcgcttccttacctgcttcgcaagctgatatatattcaacttccataaatgaatctgccatactagtttgcttaatgtttctccagactacaactccaccactaagagtgtatactgacccaaatgtagattttctactatctttgtcagatttaaaatctgaatcagtatatccaataggatttaactctcaactgaaatatacaaacatgcgatctctcgttctcctaagatacttgagaatgtattttacaactatccagtgttcaaaacttagagtagattggtaacgactaacaattcctacaacatagcatataccaggacctagacccagaccccgacctagaccccaaacccagacccaaaacgggttcgagttcggggtccgggctcaggatccgtgatttgggttcggtctaaggttagatgggttcatgttatggtatggtgcaaaacaaaatattgatttttttttttttgtgtaaaaaaaacttaaaatagttttaaaaaacctgagccaaacactatctaatttttaaaatgataaaaactgtttataatttttatttttgaaaacacaattataaaaactaaaaactgaaaatacaaccaaacattctctaagtctttcctaatatagctatggattgatttaaaataatctaaatcaaataatttttcttaatattatactttcggcttattagctttgtataaagttgaaggtgggatttgccatgcacctcaattgagttttctaagatcgtgtcatttaggagcaaagtaattactaattagacatatcattgcattaccatttatgtttctacttacaaagcagacccatgaggcccatgagttgtataaagtaggccaggcctaaaacagcccaatcacaaaagaaaatgtaaaaattgtgctttggaaaaaaaaaaaaagtga

SEQ ID NO: 261174 - DNA, 1162 bp, Cannabis indica
aaacatatagatataacactcttttggaaaagagagaagatagaaaaaaggttggttaatttagagaaggtcagaataaaagataatcatgttgatgttgggattaaagtctcaacagtaaacaagttcaagcattacttgatcaatctcaaaagttagtatgctgagattcgtagaacaccaagcatgatggctgcattctttctttatcctcgtcacacttttaatttgaagtaactaggtagaatttgtgatatagttccttcaaataaaaaggtctccaagagtttcttggaaagtagttgactcgtgaatgcaggtccttaaaggctttcttgtacttatgggaaggatctttaggaaagctaatcctcctccagaaaggagttttggatggctagctattcctcctggaaggtactctcaaatagttgattctagctagctatttcttatccgggaaggtccttcagcgagtgccttggactgtgactccaaaagccctcatactcactcccagatgcactcttacttaggttgacgtggagacctcgctcaaaggagagttggttaagttagttattgcctaataaacttaaaaacctagcttcttgtagccactgactttaggattttaatactaagcctataaataccaccaacacttatcattttcatagaacaatcagattgagttgagagttagagagagaaaagattaagaggtagagagagaggtacagagaaatgagaaagattgagtttgggttttgtaagaagaatcttctattaattaagaagatattcttaggtaagagtgtgaaagtagaaacacttttagagaactcatcagagaatcaatctcagatgtattgtacctattcttgctcaattaataaaaaagatttggtggtgttccaaaactagagtagagtcataaatcaacatcaacctatcggacttgaactagtatatatctttgtgttgattttattgttttactgtttcgattggcatgtggtttttccatactctgttcatccctatttcttcaattattattcatgatttataatttttttttattatttgattgtctaaaatttaattgatttgttcatgcaccattagttataattttcttacaaaaatatataatatt

SEQ ID NO: 261175 - DNA, 2567 bp, Cannabis indica
tgtgttttcttaaattgaaaatgggtttactgaattttctctcgaatgtgtatggaagtgaataataactattttaaagtaatgaacatatatatatatagaaataaatgataacctacatataataggacacgtttaaatttaaatctgtactagatttttaataaaccgaataattatggaaatgtgaatttaaaatatacttgaatttaaaaattaatttaattatcattttttttttcagaaattatctcaataatgtttagaatttaatttttagaaaatgtaaataatatctaaaatagtttaattatcatcactgaattttctctcgaatattccaataaacacatttgcaatttataaaataatggaaatgtgaatttgaaatatatttgaattttaaaattatcttaattatcactttttttttcagaaactatctcaattaaataattgatcgataatgtttttaatttaattttgaaaattgtaaataatatctaaaaacagttttattggtcgtagatatttttagtaaattgattcaaatacttattgttctttcctttttttataacatttctaatacgttgggaatttaataatatattagaaagatgtataattttctaattaaatcaagtactatatatattatttttaaagtttaataaaactaatttaaaaaaaaaaacaaaaaaacgaatacaattgcaaattaaaagtagttaacaacattaagacacattattatcttcattaaaaaaaacaacattataaaacaacattattatatatatatatatattttatatttttcaccatataagcttattatttatatataacatatttcacataatcaaatcataagagagctattgtaattaggatacaattaaatattttacattcctaaatatatgtgtttatgaatagtcatacctagtaaataaaaatatgaataataattcaaacagtttatttcataagtgtgatataaagaaccgtgttcgtgtatatatcttaatttaaactgcacccgatcgtcgaatattatttgtgtgccctaagccagacctagcgcagtcactaattgccaacaccgggactcgggacagatctcaacactacttggtagctcttaggagaagttgatgagagcttttcttcatttgtttgatcctccaaaacaagatgatgatgatgattatgagtattatgatctttgatgatcatcttcttatcatgattttcagatggaataatcattaatatattttagcttcataacattgtatatagctacttattataattatcaaaccaaacacaaatacaaacaaattcaatgaagatgacttataattacacatattaaaagatcttataattaaacaaagctatatatgtagtactagtacataatacatatatatagtccttatatatgtattaggatattgagaaaaaaaatatatgcatatatatatatatatatattgggtgagagagagagagagttatgtgttttgttgatgataagaattaggtagtgaataaagttgggtttggtaacaaaaaaactaaagaaaaagccaataataattaaattacatcattatatatattatttattatatataattgtaatgtatatgacctccaaataccttggatgaatggatactaaccattgaaagaagttgacaattattttttcaaaataaagaaagaagttgacattttaataataatttcaaacaaaaatgtaataaattctttcataatagtttcaaattgaaaatgggaaaaatgaagtgatatatataaagtccattgtagtgacagttttcatttttatttatcctattaattcttcttttttgcgtgcaagaataacttgttgaccaactatatatatttatataaataaaaatttatgtgttttaacataaaattattttatagggtttcttttagcaattcaatatttgagagaatgatacatagaaaaaattcttagggattagataactaaaagggataaaaaaaaatgaaagtgtttatgctaaaaaccatagggtaattaaggagtgtttcggtagaccctttatttgtttcggcatacagaagagctttttagtttttttttttttttttttttgtagtcgtgtacgttatagttatttaaaactacttgtaaatttttaaaaaattctaagtagtttataatgccgaaaataagatctatatgttttattacacgtactgcttttttaatacgtgtggtaagtaactatttggtgttgtaaactactcaaaattttctaaaaatttacaattagcctagctacagtgatcatgaaaaaaaaaatagactaaatttatttttctaaatgtcgaaatagataaaaagcctactaaaataacttttttacaaatttagtacataaatttccaaaaccaccatttatctaaataaataaatttaagtgcttctaatgatattataggtcgaatgcttgaacaattttttttttttgaaagaagaatgcttgaac

SEQ ID NO: 261176 - DNA, 648 bp, Cannabis indica
atagcaatgcatttctgaattcaataataacagtataataaattatttaaattgctataaataatttcataattaaacgtgattaactgctaatttccaaattaaactaagcggtctttacatcacacctgggggcaacacctgcactcggcagtcaaatttggagtcagggaatcaaataacgaagctgagtatgaagctttaatcgctaacctcaaattagctcgggagatgagagccgaacacattgaaatctgcagtgattcacagctggtggtaaatcacgtatctggaaaatacgaagctctgggagaaaagatgatagcatatctgagcaaaatacatgacctgctcgcacaattcaaaagctatggtctcagaaaaattctaagggaagaaaacacaagtgcagacgcgttagctcgattggcaagtagtaatgtaagtgataagacaaacttggttcctatccagttcctcaaagagcctagaattactggcacaaaagagatcaaaatgattgatacttccccaaactggatgacaccgatagtagcctacctcaacactgggaaactcccaaataattgaaatgaagctcaaaaaatgaggaggaaggtcgtactgtatatcatagtagagggaatt

SEQ ID NO: 261177 - DNA, 1397 bp, Cannabis indica
ttcccaaaccctaatgaaaactttcctcaccagcacacatccatatcgtctccaggcggcggaagtggcagcaatggcaacgattcggtggcgactgacgacataaacaacatggaattgagtgagcgaaattgcggagaggatgtgaataacaacgtggtgaacgacacaagaaggctgaagagaatgatttccaacagggaatctgctcggcggtcgagaatgaggaggaaaatgcaaatagaagagcttcagtacttggtgagccagttacaaaccactaaccgccagctttcggagaagcttattcaattgctggactccaatcaacagatagtccaagaaaattctcagctcaaggaaaaggtttcttcccttcaaatcatattatctgatatgctactgcctgtgaggagtattgtaggtgaggatagcagaccccagcaagctccaactacaccctccgctactgttagttccatgcaattacttcattaattaataatgagtactattattattatttatagtacattaggttttgatcatcctgaaatccattgtttatgaataccattagctagctacctcaaaattatactatatttagaacgacgttaatttttcatttataacaactacgcgtataattaagctatattactattaaaagaaagaaacaaaaagaactatataaagtaacatgtcttttcttttagatgaattaatttatgctactttatctatcaaaaaaaaatgatgattctataatagtatatgtaggcttgcttgggattgtgaatttggtcgaatatatttatatttatatggatcggtgtcaatattcttacattgtcaattgtaccatagaaataaagtacatatagctgcagttgaaatgtatgttatagggaaattataaatgtacatatatgactgtcgttcaatggattttgtacgtggaaaatcagatataaaaactctatcagttattttgttttaggtgttgtgtgcacgatttgttttcttataatcacaatttttttttggtcggttataattttcttatgggttattgggttgtatgtttggtaggcagcgtattggattgggctatttataaaagtataggaaaaataataaaaattttgatatatataagatgcaaacttaattatactaatattttttaaaaaataaaacttaaaatatagaaaaaaaaaacaaaatgaattcataaaaattataaaattgtgattcctttttcttcccgtataaaataaaccagttatttatccaagtattgtaaatataaaagcttatttaaaaaaaaacatccaaaagttaaaataatatcaatatacttttagtaagacaataaattaataaaataattt

SEQ ID NO: 261178 - DNA, 775 bp, Cannabis indica
aagtgaaataagttgaagaattttttagaaaaaaaagggctacacttgttatcgattgactagcttgaggctccatacttagttcatctaattgtaacaaaataattaaatattatttaaaaataattaattatttaaaaatttattataagaagagaattttaatttgtgtaaaaagaagtttaatttttgtaaaaaaaaaaaaatttattgtaaatattataattaaatggcttaattgttaaaataattagaataaaaatttaaatataaacaaaaaattatttataaatattaattgctaaaagaggtcttgttaaatatttaattaattattttttaaaaatagttaattataattaattaattctaaaaaaggaatgtttaccaattagtaacctactattacaggtcaaagaaaaatgtaaccatatggttacaataaaaatataaccattgaataatgtaactctagagttatgttagcaaagttagttaaataattttaaagcaattgataacaatagataaatagcaattgaatgattttttatgcttacaaaaatttgtaaattctccactcaaattattttaagtaacttctcgtactaattttcgaagtaataaaattgaacttctcatactttttatcaatatatttttaaattttattattttgtgagaacttcaaattttatgtcaaaaaaaagctgttatatcattatttaaggaatttttgaaattctcaaaatggattttatttttcaaatattaa

SEQ ID NO: 261179 - DNA, 720 bp, Cannabis indica
gaccaggactaagacctagaccaagaccctaactgtaactggaccaagacccgaactcggagacagacccaccctaggattgggtccataacttgaatccaaacccaaaccgggagttgggacccgaacccagacctgaactcaaacccaaacattgaacatgactcgggacctagaactgggattgtgacccagaactggaccctagtcttggtcctagatctagacccaaacccaaaccgggacctaggacatgaattgaaaccagactcggacccgtggttcggatccagatcttgtcccaaaatccaagaaccagggcttggacaagacccatagtagatgtcttgatttgggactcagacaacgacccgaagctggaccagggcctggacccagacccagacctgggactaaaaattgaaacttgaacttggacctggacccggaactcgaccaaaacccagccccggaactcgggctcgaacctagtcccgaacccggtcctggacccagactaggactgagactcgaacttgaaccccaacccaaactcggaactcgatcctaaactcagaccaagcccctaacctaaactatgattcagacctggataaggacacgaacccagacccagacccgaataccaacccagacccaaaccagaattgaaacatgggacctggacccggactcagacctggacccagactaggttcc

SEQ ID NO: 261180 - DNA, 604 bp, Cannabis indica
tgagtgggagtaatgagtaggtatcagattaatccaggaaaggaacattggaagacaatcaagtgaatcttaagatcaagaagaggaactatatgttagtcgataagggtgtatttaatactcttagactacaccaaatcagatttctagacttgccttagtgctagaaagtctgctgatgagatggtgattactcttggggtggagtagtgattttggagaggtgtaaaaacctatatgaagtctctaagtgtactggagagactgaatgttaaaattgcaggaaagatacttattaagtctaaagaaagttctatacattttttccattgttccaatatttattaactactagtgttacttcttgactaacgcaaaagtagttaccaaaaagtaaagaatctaggatccctagaggagtacccatatagagagaaattttacaattttaaggtttttttgattaaggaaatgtcatggtggaagaaaagttgtattgaatacaacatgtcagatcctattacggagagtataatacatactacacttgatttggatatcaaggtgttgagattatttgaaatccacttttttttttttatta

SEQ ID NO: 261181 - DNA, 488 bp, Cannabis indica
taatcctatgtgttattattactcaaaaatctggctaacaatattatcagaaaaattgctacaaaaaaaaaaaaaagatattatcagaaaaattaatataatttgttttaactaaatatatatgttttaaattttatctctataaataataaattaggactaaagtgcattatgtcacaaaccaaaagtgattaaaagtgacatttttggttattattactacaaaaagtagttaataaataacatttttttggttataatgtatattaattaggcgcatgcagtgtgtatatatatacatatatacattcatatattatatatatatatattatgagtataagctaataataacaagattcattacgtcatgagtgatccacaataggaaattgatatagcaagagtatatttatatgattatagtgactgtatgatgccaacaacacgtacacatgcacatatatattatatacatacatatatat

SEQ ID NO: 261182 - DNA, 664 bp, Cannabis indica
gtggtggttgtagttccggtccccacttttggtggaaaaatcattgaatctcaacatccattaaggtataactataatttctaataattttattaatgtaaattgctttattttgaattttgtaaattttataagggtttttcttgattattaagattgtgtgcttgtagttgtgcgtggtggccgaattttagttggtattggtggtcagatttcagtaataaagtaaatatttaaactttaatagtatatctgtatgtattttgtgttgtattgaatatgtatttgttaatgcagattttcgttaacaaaatttgaaccacacgataataattcaacacaaaaaaaataaaagctatagaaaaataaaatatgaacaccgggtttcttacgtggttttgcagttaaaattctgcatagtccacagtcaatcttattcagatttctgagtattttttttctagggcctctttcataagagtttttttgtcccccttcttggatcttgtctgccactatttataattgcatagtggcagttaattacaaagctaaccaatatatgtttacagccattatccctaaaatcgtgggatctgattacaaatcaagcccaataaatgaagtttttacacaactaagagtatcccacttttattgggcc

SEQ ID NO: 261183 - DNA, 6299 bp, Cannabis indica
tttattttgacaaaaaaatcaattcaggatcctatatgtactattttagaaaatacagggtccattttgtcatttaacaaaacgcaggatccaattggtaacttttataaaacagaaggtacaagatagtatttaccccacgatacaatacaatacgaactaataccacgttacaaaccagcgctaaaagaaaacaaattagtatagtgaagagtatcaccttgtctttcattgggtccgccactgctgctggcgacggcgcccgagtttccattacactgtacttggaaatcaaagtacttatggctgccataatcataaaacaaaaaaatgtgactagatttcttcactctattatgatgtgtgtttttaatgtcatgatgataatctggattggtgtaattgcattgccaagtccaaatacgacgccatctatcaaaaaattctgcaccagggaatatgcattcagatttacacaagagtttgaaatctgaatcaaaagaataagagtcccagaattcaaccaccacgcagaaagcaaaacccaagaacttgtgattacaccaagaccagggaaggggaacattaatttcatctccttcattattatactcgaaccaatctggaatcttattccctggtaaacatatttcttcaattggaaagctattttgtccctgcaccaaccgcatataattttttcatttttacaccttaaaatagtcttttttttttattaatttttacagaaatctatataaaaatttacatagcaaccaacaaaacaatctaaatcgcaactaaaattcacataacaacccacgtaaaaattgcaattatcagagcaatagtaaattaaaaaaaaagttaaaaaaataatataagagtgatttccatttataaggaaatttttaaaaatattacatatatttttaatattttattaataattttacacttttaagtttttatttataaaagtacatttgcaaagtttaaaattataaaaatacattttttttctcaacaaaaagtgaaaaaataacaagaaatcaatctcacaataaatataaatcaattatatataaactataaaacaataaaaaattatcaaaaaaataatcttataacaaccataaaacaactaaaaaatagcttattatttttactgaataagtatttttgtaaataaaaaagttcaattgtaatttttttttaaatttttagtctactagataaatttttcatttatatatagaacaattttgagtaattgagtaaaacttattgatggttactaaaaaataactataaatatcaactcataatgtaaaaataagacattattttaattaaatagcaaaattacttgtaaaaatttaaatatttctaataatacccatttattaataatactcattaaatatatttataagataattcagaatttagacagggtaacatatctaattacaatattctcccttaaaccatcttctaaaacaatatctcatatttggcacaaaattaactttgtgatacatttgattttggtgaaaatttacatgataaatacatttgggatattttaatacaccattaaagcaaagcagatattttgtaaaatgagctatgttttagcatgtataaccaagttgcattgcccttgtatgacaaaagtttggggtagagaaagagagaaagtgatgagaattacttacaatatcttttgtcctctttgcactgctgagaattctaagttgtgcttcaaacatcaaattctggtgagattcatgatccaagttgggacaattataaaaagcaaatttcccttccttgtaattagtattagtgtcattattactcactacatgagtaagtaactttgaggtggtcatattaactttttccaacttttggcagcaccgagcatcaacccaagacacagatgaggaaagctttggtaatgatttaaggtttgaacaatgacaaatgctgagcttttcaagataatctaagcttgaaatggtttcagggagtacttgaagcaattggcacatattcaagcttaaaatttggagtttaattagattacatatggaggaaggtagttctttaattggtgttccatctaatataagaacagtcaaacgattcataggttttgagattcctgggaatctgctcaacttagtacaacccgaaaggttcacacactcaagttctttcatatgactaatgttgtttgggagtgtgtttagattttcacatcttctcatttctagatttttgatgttttttggaaatgttggcaattttccaagatttgagcaattgtttaggtttaggtaagtaagcttagaaagtttttcgagaagtgaaggcaattcaaccaatcctgtacaacattcaagattaataatctccatattttcagaaagatgtgaaatatgagtcaattgctctgagtagcttaggttgattttcttcaagtttccaagatgctgtaaaaaaaaaaaagagagaacaaattatgctcctaccttatcctaaaactcaataatttaaggctatttaggacttttatcccaactatgtctataataatgttttctgattttttcaattcgtttttgaactattcacattattgtaaaataattatctgttaagttctgtcatacgtagcttacaaaatgctaacgtgattgtttaatctatgccacgtgataatagtctaaacatttacgtcaataatctatttgtcacgtatgacaaaactaaacaaaaaaaaaaaaattactttacaacaatgataatatttcagagatcacatttaacaaactggaaaaaaatcaaacacaatatcacacatgttatagtatgggacaaacattctaaaaagccataattcaatgatgaaattacaataaacttaaaatccttacctcaaccaattcagatggccaaagtttctgcagcttgctatatggcatggtgagttcaacaagatgatttggagcaaaatttgatggcaatgatttcatagggtatgcttgccaatagactaatctaagtgaattaggaagtgattgaagtgcttgaaggctcactttgcactctctagagctagaattgtaaatcttgattaatctcaaattacgcatctttgagaaagctgtaggacttacacacaccacgttatcacaatccgacatgtcaagaaatattccttcaacttttgttgttccctaatcatatgatggaaagagatcaattgactaatataaatttgcttacaatataactaataatgtatatatcatttgttcactaaaatgcttatattcatttctgtttgtaactttataaatacatattatactaatacagttgtatattttttgataattaaataataaaattattttcgtttctgatcaattagctatgcatacttaatttttatatataattgttaatgtcttctaatttatatacaaaatttgtaccttatttaattttctaacctaccctagttagatataagcaaaccagaaagagtgagctaaaattagaaaagtgtgttttatgaactaaaagttcttcaagcataggagagttttgtaaggctttgagggtttagggtgtactctctttgttttgatagtggatttgactaagttcattgctatctttctttggattcaggtctaaccaaacttgcatatactaatataataaaggaatattttatggtgcaacccttgtgtttatgacatcaaagatggtttaatcttaatttaattttttttatatcaaaggcatcctgcaatttttttaatttaattcgctgaaaaataaaatttaaattgtttgaatttattttttatattgtagattattttttattaaaattttacaaaatattttaaataactataatatacactatcatataaagaattgaaattataactatttagatatcaaaagcacaaaaaaagcgcatcggtacatatattttgagagtacattatagtagcactctataataaatgtacaattaaatgagcaattgtgcacacataaattacacaattttaatacacatttatgtaacaagtcactattaacaagtggaaccaccctaatttcttgctgcataaatttgtatcaagtttgtgtataatttacctatgcaccatatcattagtcttattaaatatgattatatagaaaattaaatcattcttcagaaaaattagcaaaatttgaaaaaaaaaagtacagaatatatgtagtcaaatattcaattcgacaagattcaatatcatgatgctataagaattcaagaaatactaaggagcacataacaaacaccacaagtagtttcatatcgctattagtaaaatttaatattgaatctcatatattttggtttaataaataatataagaatctgctaactacttataacgtgtaacagaaccttaagatacttaataacattattcccaatgaaaactatagtgatctctcaaaagaaaaagaaaaagaacaataaatgcagttaatgaagttggttaccttatcattttcaagtatgtgacggatgtcactggcaatccataatctactgcgattttcgagctcattctcagattcttgcctaacaatttcttgacccatcctttgtagtaattcaatcatccaaagcttattcttgtcttcatgtaaaagagagttggcaataagtttcttgattccaatttccggaaacaaatcacagcctttaagtattctctcaacaaaatctctatcctcaccattgaagaaacaagcaatatcaagaaatattttcttctcagcagtatctagttgatcataacaggctctcatcttattttgcagattcaaatccggaaatgatctgaacttttcaaccgcgatttctttttcttctatggtggtgtgagaactaagactggaacacaaaagtaaaagtacctcaggaacaccacttgcacaatccttcactttctttctcaacaactctgtatcttcttctgatataccaacagagctttcaccagtagtacttgtttgcaaataataaagatgatctgcttcttcatcattcaatgctctaacatggtacatttctccagctttgatattcataagcacttgttcacttcttgaagtcacaattattatacttccattgctaaattgaatatctttaggggacaaaatatcattatattgcttttcattttcaacaccatcaagaacaataaggacttttgttctaaaacgccttaatttagcaaaagttgatcccgaagacgctgttgttgctgctcctcctcctcctcttccgaactttaggctttcttctcctaaaagcccagcaaagagttcatccttcaaatcagatgatgatctttgtgttttggccttttcactaacgttttcaagaaagtagtgatgttcaaactgggaaatcactcgattataaacaccctttgcaatagtggttttgcctataccaaacatgccccacattcctatgatttggtaatctttcttagtaggcttatcgaagtatagggatacgaaatttttgatatgctcacgaattccaacagtgttactaagatcatcatgataacttgaatgtggcatatggttcagcttaaccaaaagctcctcaacaatgtcgtcaatcaattctgcttcagggctaccatatataagaggaagaggtaaataatgcagtgttgttagttagtaattagtaatgttcatttatacataaaagagatatatatatgtatgaaaattaatattaaaattttacctttttttttggattagatagataccgtaaatattgaatctaaaatattagataatatgatcagtctaataaatactaattctaaaaagctaattagaattttttaccctgaatttgacttgtaacaaatcatatctcttaattattgagattgttggattttaagttatttttgtcgaataaaattggaacaaaaattcttaaattcaataatctcatttttaaccaccttacaagttcaggtcaaaattcattggacaaaaatcctaattaactattctaaaatattaatcgcctaaaaacattagactgatcaatgaagatccctaaaaatgatcagaatcacaataaaacaatttggagatgagatgagattagtcaaatgtcgcatgaaccactccaaacgagcataactcaataataataataataa

SEQ ID NO: 261184 - DNA, 479 bp, Cannabis indica
ttattacttaaataatattttaaagttttaagttttgtatccatggtttcttaactattatataaaactaaagaggaaattttaaattatatacatacattaattagttttaattttgtgaattaaggaatttttttatttttttaatttttttattttttttattttttattttttttttttttacgtttaattttattttcttaagttttaatagttgttattcttgataggccttttaaatagggataatgaatggtgctcgaaagttgaagatatgaccaagattatcacagaattttatggacagttattcacaacgggaaccccatctctaccaaaaattgaggagttacttgaagtagttaaacctgtagtaacagaagaaatgaactcaacaacttagaaaaccatttacacccgaagagataagaaaggcggtatttgccatgtctacagataaaagtccaggacctgat

SEQ ID NO: 261185 - DNA, 656 bp, Cannabis indica
atcacatcagaaacaactactgatttcgaatctaattttatctctgccataatctcgaaaagcaaaaaataattgaaagagaaaaggaagaaagcgaatatcaaagaatgaacacacagacacgaagaaggcaaaaaaatcaaactacaaaatgagaagaactgccggagaccgatgcaaggaggacgaggaagggctgggagtgtgacggacgttgaccgtcaccaaaaaggaggccgaatgcgccctcacgcaccagcgcatgggagtcggggctgcagtgatgggcgatgcgtggtgattctggctgccgaactttgaggttttgcatatcggcggttgggcaatctgtatatgtgggcggtgggaaagaactcgcactccaactagagtttccaaaaaaggaaccctaaactcaaaccctaatcttattattttttttatgaattctaatttcgaatttcgaatcacaattctaagtattgctctgataccatgtatagaatagtgaatagaattgtgggttgtattccatagaaatagtatatatttatatacaaatttaggagactaaatgggaaactactaaatataatttaccctaatttttacaattaatatacaactaatattctaacatgaacaacgccaaaata

SEQ ID NO: 261186 - DNA, 503 bp, Cannabis indica
atacatatatatataaaaaatatatatatcaatatatcaatcaatcaatttatatatataaaagaaaagtatgaagcagtgacatggcactctaaaatcattctaattacttttatttattttttccttaacttttttcttattttttaattttttattagtttcataaatattaattgatataaaatatatacctctatttattttatccttaattctctcattctttttattttttatttttctaaaaataataacattaaacctcacataccacattaccttttcggccttttttttttttcgaaattaagatatttaaaatctatatgtgtatatattaccgcaacaacccatccttattcatatttaaaaccgcataaccatcaatatataatttcattctcatcattcttaattacttttattaatactgaataacaggacccgccctgagggtaggctagactaggcgtgcatctcgggcccccgaacgctcaggg

SEQ ID NO: 261187 - DNA, 557 bp, Cannabis indica
tatttaatcttttaataaaaaaatatttaatttgtttatttttataaaactgtttatttaattttgagaaattgtttattttgagttttaataaacatattttattatttaataattaaaatgtatggtttcatgtaataaattttcaaaatgtataagtttttaaaataaaattttttttttgcacattttttgtaattatgtgtttttgttgtaaatttatgaaaaaagcccaaattaataatggactagaaaaataaatattacttatttactgtgacttatttacttattctaaaattaagtatcttaacttgtacttatttatcatagcaaaattggatattagaatgcaatcaaactaattaaaacagaccatatatacatattaagaagaaaaatctattcttttacttaaaaaaaaactaaactaaaatcttatttgaccttggaaactctacatttaattatgtgcccattttaatggatataataataagtaaaaggaagtcaacataacataaaacatttatgaaacgtaagtacttattatatat

SEQ ID NO: 261188 - DNA, 840 bp, Cannabis indica
gtgaaaagctctctctctttctctctttctttccttctttcggttttgagcagctgggattgggaatttttggttcaaaagctatggtttttcaaagagaaaatgtgaaattggttgctgtgtttgttgcatgagtttgggattgatttctgcagttttattatgcatgattatgtagtttaaatctagttttgaggcttgtaggtgagctttagccaagtttgagttttgaactcaaagcttggagctcacatggtgatttttaattctgtcctttctaggctgtgttgatgctttagaactgtttagaggggtatgtagaacaggtctagaagttttggtgtgatttgggtttgattggatcaagttatggaattttgtgttgttcctgcgaggaaccggaatttcggttgtgcaacccaaattctggatagggttcaggaattcccagaagcgaaattccggttgcagcaccggtctgccggttggggggtttttaggaactctagaatttctcgtttttatgttatttggggtaatgccaagccttttatcgatagggaaacttttagtttctagtttaagtccctgggaagtgatttagcgtatcacttatctagtgttgtgattgttataatttacgagcctgtaaattgccgtacagttcgtcccactcaggttgactggcacacctgaattcagaatcgaggtaagattagcataacagtatgcatatgtattacatgtttagggtgcatgtaggaagcctgttagattacattagatatgtatgttggctttgaaccatccgactgtgtgacatcggtacaggctagagta

SEQ ID NO: 261189 - DNA, 523 bp, Cannabis indica
ataatacttaatataaaacataaacgtaatactagtatacatatatttatataaagatttattggcgtgtggtgagggatgcgcgtataagatgcaatctatttttttcttaatgaccaagatcaacatatataaaaacgtacgattaaatggtataatatgtatattatcaatttttatcaaacctaattatcaaaaccctattatatataggattagcttgctagtaatataaatatataatatttggtataatattattacctacctttgatatataatctcacttttttttttttaatttttggaggtgtgttagggtcaatattgtggatcgattaattaacaaataacaacaaaagctactgagatcgacatagactttgtaaacaatcagtaatatatttcaaataaaaaaaaaacagtaaataaataagaataaaatatgaccaacaaaagttgtgcatataaaagttccaacaaaataaatatgaaccaataattaaaaaaaaaaatacaaaat

SEQ ID NO: 261190 - DNA, 3459 bp, Cannabis indica
cagctgagcgtattttgtatagttgctagcaagcgacagtttttgtactatgcactatgatattttgtaaagattttgtaaacgggattccggttttatatataagtatgttatttttatatttatcaatagttaaaaaaagtttaaattattcacaattttcaataaactcgttgattagcaacgagctgcataattaagttaaaaatcacgttaacgcgcttaagctagtaaagtgttacatattgtattttattacatgctgcaaagcaataatataaaaaggagaagcctaatgagagctattatgcattttactctttcttgaggtgctctccttttgccgatctcatatatggatgcaacgagctcgtaggcgatatgaagatagtgttccaagacatcgatgcttgaaattaataaagagaaagcaatggacaaatatttcaaattgtcttttattagttttgctagacattatatttctaaatgtgaactattattgtattattttgaacttaaaattattttatttggaacacatgtattgtacattattagaagaaatatattaaatttgatcaaattggacaaaaagatagataagctttataaaatatggcaaatttcactttgtaattgttatagataaggatactcataaaatagccgatccaatctaatctgcacgatccaatccaattcaatctgtaaagtgcggatatccacagttgtgtggattagattgcattagaaaattcaaaatctacacttgtgcggattggatgttgattgacatataaaagtaagtgattcaatccaattcacagctctttaaaaaaaattaaaaaaaataaaaaaaaattatatatgcaaataattttttaatgtaaagaaaatagtaatttaaaagtctaatacatgtaatataattatatttcaaaacttaatatatcaaatgtaaatttttattcttatgtataagttttttttctacatacaattaaaataaaattaaacatttcttaatacatacaatttttttttctttctttgaatttgttatttgttattttatatactttaatgtattgttggagacataaaataattataatttattttattttattttgttggtagctatagaaaaaaaaaaaagtatctctttcattaatattaaataattaaatattcaaaagtgaccaatttaaaacaaccgatgcaatccgtacttttgcggattggattggatacaaaaaataaaatccacacttagtgcgaatcggatgcactatgatcaaaatagtacggattggattggacgaacactcctaattatagataacagatgacattaacaaagtaatattattattacaaagtggtaatacctacaaaatgtaatattatttaatatataacaaataataatgtaattaaaaattatattattacattttaaaaatattataaattaaatattataatattaaacatttatttaataacatgtgaaaaatgtaattacatggtaacatataacaggcaaataatgttttaatattttatttaataacatgtgaaaaatataattaaatagtaacatataataccaaattaatgttataatattttgtttaatatgtaaaaaatataataaaatggttagacttttagtattacatgattgtgttaacagttgctaaagtgttataaaatacatttaatcaaactttcatagttataatatatattttttctatggtctattttactcattaccaattagttttgaaatagaactccataattctcaacatgttgcaatagattttttttttttggtaaactgacataaatttattctataaatattaaccaagaaaatcataatatttgcaatgctaatgccattgatattgcttgttagattggtagttcatatacagtagaaaaatattatacagataaacaaaaatcgttgaacgtagcttaacttttttgtttttctaatttattctttttttatttgattggttaatttaattaaaaaattatatgtagggtcaagcagtcaacgtttatatggttgcctacgttgatgatgccctaaacataaaaataatagcttcatcaatcatgagagagccaaatgaatttaggaaatgacaatcttaatttaaataattcaaggatcaatggtattttttcttctgagaccgacaatcaaggataaatttattaataaacagataatatatggtaataaattagaatatattatttgggtacgtacgtactacgttgaattttgcttataggtagagttgtaattaatcaaaaccaacaaggtgaaaactctggatcagtagcagtaggaacaagacaagactgttgttcagtaatataatttagatatctctaggagaaattctggagattaaaaagattcacatcatgatcctgcaactgtgtcatattattattagaagcgatgatgaaagctgtttgggctcgtgtttgagctagtttagtctctgccttgtgtatatggtgttgtaactcataaataatctttacacaaccataaaccttgtcttgcattctacattgtgcctcgaaatgcatagagttagctgcttcagttcggagatagaccggcacttgctgattaatatcaatttaactcaaatcaattttcaaaacacaccaattctcaaattcaaatatcgtatatttagataaactatatatatatatattaaatgagattataattaattgttaccttaagtatttttcccacattgttagcaccatagattttatgaacgtaagcaaatctttgaggattgttagaaggaaagtaaggagagaaaatgcaatctgatgggcatttccttctgtggtacttacaagcagcacaacgacccgaactcatatcccaaatcttgagaaagattcttagctttgataatagatttggataaaggatttctgttgttgctttaagaaatctcacttagattttcttgtcattttccttagatttaatattttggacttcatattatatagatccaatttgaaatatagtttagtcaccaacggctaattttttcaatttggtcatgttttgtactataattaagaatggcaagaaaaccgtcggtgattatggtaatataattgtggggtgaccaatttagtcaatatttgtagtgaaagagtgttcaatatatatgtatttttttatagagtaatttgcggcataaatacctaagttttatgccgagtagcacataaatacctaagtcctatttttggcggtaaaaataccttccgtcaaactcttggaacttctgtaggtacctctccgttatgtgccagattagtgtctacgtgtcacttgttcattagtccatgtcattattattttttatttattatttaaat

SEQ ID NO: 261191 - DNA, 661 bp, Cannabis indica
ttcatttttgatattgagcatctctctctaaaaaccaaagcttaaatacttggtctttttctgtaatgccatctcgtgagaaataaaaactcaaagtagacatagcgaggagtgaaactactataaattttgtgtgtctctctaaattatttacttaaaacttattattcatctcactaatctagcaaactggtgttgaccacttttcaacatcaatattttggtgctttcattgaaagccacaataccactcctggtagccatgccactactcaacaagcagcaggcattgggattccccataaggaagccaactttgagcgagcatccaaaaggacttagattagggaacttggatctatgggtcctctacctgatatggggtagtcacttgttagggaaacgagctatgagcaatcatccgaaatgactctaactcaagatcgcagacctaccggtccaccacacacagctgataggaccaaccacaattctgctcaaagcaatttgaacaatgtgagaaaccaatctcttcctgggactctcttcacaagtctaatgactctagaccacctcgtgaccctataaagggaaagtgacctatctaccacgaaagtggagagtatgagatttagagggtaaggattaatgaactactcca

SEQ ID NO: 261192 - DNA, 749 bp, Cannabis indica
ttttatgatgatttttaagtgtcatataaatgttgcaagaaaaagttatttatttggagctcataatttagtaagaatttgaaatatgccttatctaaaaattctagaagaattcgatacatgtcctaagtgatataaatccaaaatcgtgcgctatatgagaaagatctttgtataattaaagacatgtaagtcaattattagttaaaaaatacgtatggttgtctaatataaattcgtaatttatacgttgtgatagactcttgaagagtttttgagtatattataaatgattcaagaataaatttttacttctttttgtatattaaaaactattaaatgtatgtagtttgttcattagtatagaagtcctgaagtacttcatatgcatcaagaattatagatatattatcatttgatatggaaattaagatcatacaacaagaattgaacaaatatataatcttggagtaccatcattgtcacaaataaaaatttatattatcattaatatgttatggtcatattacttaaaattttacatgaatgattaaataagttggataaatactgatattctaggaactcctcatccataatttagaagtccacacatactctcgagaagttatagaaaatatacagtttaaaagtgatagcaataatcttatgagatatattatcaccaaaataattatggagcatatgtgcatgaggtagagacatattcatgttgcactctttttccc

SEQ ID NO: 261193 - DNA, 424 bp, Cannabis indica
taattttcataattaatcatgattaactgctaatttccaaattaaactaagcggtctttacattaggttattaccctcaacaggtattattttgaacatgctataatatgttatatgagtaattatttagtatgcaagttaggattattagcctaagattttatatattatagtatatattgaatgtacgcatatatgtcaagagttatgtgtataagacataactggattagacctgacatttatcattaggataaaccactgaaagaacgtaatgtatgaattatgtatatatgtatagggttatgcgtggtaggcataattaagttagactcggtaactataaccgagataaactctactaaggccttattgtaaatagatgtgtgagcgtaacacgcgggtctatgctacatagacataa

SEQ ID NO: 261194 - DNA, 735 bp, Cannabis indica
caagttgcctacctacagaaagtgttgaagaagtttggcatgaccaagtgcaaaccagttgcaacaccacttgcttaacacttcaagttgtgtgcatctcagtcaccaaaaatagatgtagaaagagccaagatgagcaatgttccctacgcaagttgtgttgggagtctcatgtactccatggtgtggtcaagacctgacttagctcatgcaatgagtgtggtcagcaggtacatttcagacctggccctgaacattgggatgcattgaaatggacaatgaggtacctgaatggtactctggacactgggattatgtttagtaaggagaaccagtacaaggaagaaatcactggttttgtggactcagattttgcaacaaaattagacactagaaggagcctaacagggtttgtgttcactaatcttgagggctgcatcagatggaaatctaacctacagaaagtagtagccttatcatcaatagaagctgaatacatggctgctacagaagccatcaaagaggctatatggcttaaaaggttaacagaggagttaggtttcaaaatctgtggatatcacagtttattatgacaatcaaagtgttttgcatctcatgaaaaatctaatgtttcatgagaggtcaaagcacattaatatcaagttacacttcataagggatattgtatcatccaagaaggtcaaagtgaagaaataagcacacatgataaccctg

SEQ ID NO: 261195 - DNA, 809 bp, Cannabis indica
ttaatctaattttaaaattgaaaaatttcgaaacatctgcatttaaaataaataatgcaattagaaattatgtgggaaaatgattattaaaataaaataaagtatattgtgaaaattattctaatttaagttgatatgaaattaaaaattttccaacttaaatatatatttttttaattaattaaattcattaaaatagaaataattaagtatcttgaataaaattaacttaattattaattctaatttattatttaagaaaatattctaatttaaggtggtaaaaaattaattttcaacttaaatatattttctattttaattaaatttcatgaaataaaatcaaataattaagtatcttgaataaaatcaacttaattattaattctatttaagttctaagaaaaatattctaatttaagttggtccaaaattaattaaaaaattaactttcaactttaaatatatttttctacttaattaaatattagaaaatataaattagttactagaaatttcaatctagaatatttcattaaactaagtgtatttatctaaattaattttaaaataatccaatgaaaaattaatttcatttatttgaaaattaattatgttgctaatcaattttaattaggttaaactagtatcattagcctaatacaattatttaaataaggcaaatggaccttcacaattggggttgttcatgtgagggaggctgggttcagtatgttgtacccactattattggccccctaactctcacacaaggcccaaaagagaggaatttaacctttcattaaata

SEQ ID NO: 261196 - DNA, 782 bp, Cannabis indica
tcttatggacggcaaataaataataaaaattaaaatgaaattttttattatataattaccaatttatttgtttatctaattaataaattaaatatggaataataatattggtaataaaacatatattctatagctacagagcacaattatgtaactacatctaatagtatatatgtgttttctgtttttttcttgatgttatatgtatatagacaagtgtgtatatagtactatatttgtaggagaaattaagctatctagtagctaattaagctaataaggctaattaggatttttaccccctgaattttgacatgtactaaattatgccccttgaacttttaagatcgttaaaaatgccccctgaactattgaaattattggatttaaggacttttgtcaaattctagctcaactgaataaataacaaagcacattttagaaaatggcatccctatgacgttgttatgattattcaaattatcaaaacaaagcaccgaataaacacaaagtaaaaattgaattaaaaagataaaaataccattatccccataaataattgtactaatcatattttaaacttccactaacaattcttaaataaaaactcttcaactaacaatatgcatttttaattaaatcgattgctccattaatcgcaacactccaaacaaatatctatctatctattatcagtcccacccaatcacaaaacttgtctataaatttaacattaattgctctaacgtacgatcaaaacaaaattaactatatatatatat

SEQ ID NO: 261197 - DNA, 1554 bp, Cannabis indica
attacacttgtgccatttattaaattattctactagttaaataatttgttcatttatttataaaaaaaaaatgaatatttttaagtgaaataatatttacaccccaaaatataaatatatcttgcataaaatatatatatataattcattttttttctttctacgttgtgaaaaaatgcacacatgtaaaaaagaatatattttgaatattaatacaaagaaattaaaaaacaaatatagacaaatattagagtgaaaataaaataaaattattatttaaaaaaagaagaaatatatattaaaaaaagtattaagtgtaaattttaaaataattttagttgatttattctattgggatgtataaataaatttgtagagtatagatataaagttttttagtttattttagttctcccatcttaaattgaacaaattaaattaattatcattatatatttttgtccaacatcaataaattactgatatgatacatacaattaaagtaaaatcaactttgactcaatatataaatatattagagcttattttcatttataaataatgactaaaaatttaattagttccataaatattaatttatcattagaacattataatgaaaataatgactaaagattctctctccttctttgctcctgtcagctctctaggaattggtgccatggcgaaaacaagggccaagaatgtgggaatatcgaaggttttgagcaagaaaatcaagaagaaaggatcgaattcaatagtagaggtgaaaaagacaaaatcaatggaagaaatccttggggtggaacccctggagtttactgatgatgaaggagacagagatatatcggaccctcttcttcgcgataattttcaaccacctctgtctcttgattcattgctgcaattgatgaaacaatacgatgagatagctgcagactttggcttcctcctaactgctaatcaggaatgtcaaagttctatctcaaaaggtcataatgttaacccaccgatgcttaggtttgagaatgtgatgagaagcttggactcttcctttgctagctcgaagaaggtggagaaagttaggataacgatggatgatatagaagaggaaatgtcctgctggagatctgcaatagtctactacgtgttgggtgccaacccacctctcttagttctggaaggttttgctcgaaggatctggaaagataaagtggataaaataggtatgatttcctatgccattttcttaattcgattctagtatcaaggatagagatgatatcctataaagaggttacattttctttaataaaaggctagtaataatgaaggcctaggatccgaatcttaatcttaaaaaagaagatgtcagaaccgttcctatttggattcaattaatggatctggagttgaaatactggggttagaaagcccttttcaaaatagttggacagctagggaacccgattatggtggatgaagtcattaaaggaagagacaagctcacctacctcaaaattctaattgaagtttctgttggaaattatt

SEQ ID NO: 261198 - DNA, 618 bp, Cannabis indica
ccctataaatagtgatgcatgctcactgggcaaagggtctagagattttaccctagaaatattatctaagaattcatattcagagatattattgtaagagctataagaaaaggaacgtttctccttgttcttgagtcaatacaaataacgaggattaggctattaccgaacagctcggggctgaaactctatatatcaattgttataaattacttatcgcttactaaataagacttactgtcgttgggtgaaagcgaggtcaacaaagacttaaggataaatcaattaatccttgctgaataattaataggccatgtgttacttcctagggcaaccaccaagcatttcccttaaatgactaaaataccctttaagcttataacttaagcattttccaaaactaggggtaaaatagtcaaattccataaccctgtttaatctcggtattatattttctctgaaatatttcccactaagaaataaggttctaaattaacccatgtaatcaaactagacatccatcgcattttctgttgtcgccgagcaaaaagaaaaaaataacataattcacatataaatcaaataatacccgtagagtttaataaaatctccagaatt

SEQ ID NO: 261199 - DNA, 691 bp, Cannabis indica
ttaggtcttacatttatcagttgtatttgagttttaattagaattgttttagttgcatatttattaagttttataattacgttattttttagttgttatattgttgttttaatgttgttcaatacatgatatacttgcagtattgcataattattaattgtatttttatcggttcattatttaataattttttcatccaaacattttcaggttgcgattagacctctgatgttgttgacaagttgaagcttccaaagaaaaatattgtaaaggttttaaatttttttttttgattttcttgtttgaaatgttctctaattgtagttcattaatttgaaaaaaaaaatcatggcagaaagttgtttatagtttgtttaatgttgttttgatgttgttttaattgctgcaggacttgatttctagtgatgatgaacttcaaagttgatcagagtagactagttgttcatttctattccttcggtagaatgaagtgagttgcaatgcatacattgaaagtgtacaagaaaatatttcaaagtcttttaagaaagttgaagctattgtacatgaattaatgattgagaagtgtgtttggttttggctgtatgcgctaaagagcaacattttttaagaaatcttgcttttgtaattttttaaatatttttctctttaatttcacatgtatcttgca

SEQ ID NO: 261200 - DNA, 586 bp, Cannabis indica
cctctaataatgacttgtaaatgtccgtccactggtggaggcattagtaggtcttgattattgtctgcttgggcagcccgttgattctaatcggccttgacgtatttttgcaagggcgggttatttatcctgattaagaattcaattcgcttcaagttgttgcactcattcgtgttgtggccctaatctccatgaaaacgaaaaaatttggacgtgtctctcttgcttacgtccttcttcatgggagcaagttttttgtatggggatcatagactgggttgccatgtaaatcgtctttaggtcatcaatctggttacaaaaagacagtgaacttggaggcattttctctaggggtgtgttcggctttgcctgcaaactttcccttgttcccgttgccttgcctgccattgttactagatcttttgccgctcagagttgagctgctcgtgatacgaaccacacaaatagtcgtgatgaaacccgataccaattatggcagcctctaagaattctcaaaatttggatgtggaactgcgacccaatgcttagttaagcatgaaccttggtatgaaggaagacgccacaa

SEQ ID NO: 261201 - DNA, 664 bp, Cannabis indica
ctttacaaacattccaaaagattacatttatttcgggatcccgtaaaaacttttgcaaaatgttacaagttatttttacacactgacctaagtggcaaaagctgagaataccaaatatttcttcttgtagacccaaccctcgtggtctagtatggcctgaacatgtacaatacactgttaagccctcaaactcatggctgatcacaaacagacttaccttttcctgcacagtagagcacccgtgagctaagcctagcaagaaaatataaataacagtatacattataatcaaagatcatttaattattgatgccactgcatctattgtctatatgacataggcctacgttttatgctcacacgctatttatgtctatattgcatagacccacgtcttacgctcgcacgtctatccacgtgtaacactcacacgtctatttacaataaggccttagaatgatttatctcagttcttcataccgagtctaacctagttataccttgcataactctttatatcatcatatataatacattattgcattctgatgtcgcccaattagttacactgcggtcgcgatagtaaacgggctatatgtcatatccacagggaggaaaaaataaactcaaaaggacagttggtaattttacgagaataaaataa

SEQ ID NO: 261202 - DNA, 760 bp, Cannabis indica
cggcccagattcattccaccaacagtttctttcttcttctccttttatttattttatgttaaattctgctttagtattgatatggatttgaacatgaactaaattcccaagtcagggatatgatgattgttagatgacgtttctctaattcagttaatgttattattatttttcctccctgattgtgtgatttgttcttatttgctttaattacatattttagactggccatcttaaatgtgacttatgatcctaatatgaaatctgagaagtgaatatcaggaatgctctaatagaacaaacataagttgatgtaaaacgagagtatttacatagctcatgtgatttgtatattatgttcttaatgcaagttgtatgttattctattgcatagatgcgagtagatgatatgtgatttaggatcttaatgatctgagaagagttagggttaaattgataatctgtcatcaccagtagggagagaattataattaatattagcaattgagaaactaaacaacatgattcatattcctaattacttatccataaataatcactcttagttattattttcttgttagcttttatttttatcacaatcataaaattgtagatttgtcaaacagaatcattgatttaatctagtggtattcaatccaattccctgtggtttgacctcacctgtgtgagttactacttgattacgtatacttgcgtactgtttataattttcataacagcaattgaaaaaacataa

SEQ ID NO: 261203 - DNA, 1743 bp, Cannabis indica
agacatttggatgtctcgtttaatagttaccgttagcgcgagccgttagtattcagctttatgcgctaatcataactttcaattttcctttctcgtcagatagattatgaataaaaaatatagttgtttgatccctttctcgtcagaatggtttgatcaaggtgttataacgattcgacccctcttccgtcaaaaaaggttcagtcaaagagttataatagttttacccctctttcgtaaaaaaattttggtcgagacccttttaaaaagttttcaaaaaaatttattttttttaaacgatgggtttgcattgtataatgtatttccagatcaatttctgttaatcacacatatattcccctcatgtaattttaaagagtttacgctttataattacttgtttaaaagaaatgattattgtattcacaactgagattcaaaatattccatcagtaatgtggtttacaatcattaatatcaaaagaactttcccagttcaattgcttattttatcaatctttcaggagcatctggttttgataaaaaaagttttgatgttcagggtcaatccctaagatactcacacaattgtttcaatatccagggtcactccctgatatatcctggggtttcaggtaaagtaatctttgttatagttttgtctttgactgctactggttaacgtccagctttccacgcggcagtttgatatggcaaccatagtgagtcgatatctattcatgtcacaattcttgtacacaatttctttaccgggctaactgccccttgtattcttgtgactcactcccttttgagataaccgaggtgtcccttcctcttccagaggagggttataatctcgggtcactcgagttgttgggcagatcgagctgatcattgacattgctctgtccctttatgtattgttgaaagtatccttgtgatatgagaccttctatctcatctttcagctgacaacactcttttgtggtatgaccaatatcttcatgatattcacaccgtttagttggatcccttttacgcctcgcatgtttcataggttttggctcgctaaaaatgacttcctgtacatgtgcgaggtagatattttcccgagtttcatcgagctcggtatattcatcataaagagggatatacttgttgggtttcttatccttgggcagccttttggaatcgtcttttctctttgatccttaggcttccgaataaagttttccaacagtatcgtgccctggttgtctcctgggtttcgtgactgatgcctcctgaacttactctcgaactcgtttattcgcaaatgaagtgaattctttttccttggactgagtcgttgacgaaggccaggcttcttcaagttcagatgctctcttgagtcactcgtgtcgtgattgcaggcggacctcgcttttcctcttatggtttgattcaccttattctccatctatgggtttgtgaaaaaatctgtatgatgaacctaaagagagggttcactactacaaggaaaggccttttatcccggtttttaaggctttttatcccggttttcgctaatatgaaaaccgggatgtatgccagtgggataaaaggtatttaaaaaactgggatcaaaggggtactttttatcccaatttcccttttatcccagttttaagacaaaagtggaataaaagggtactttttatcccacttttgcataaaatgtacccttttatcccacttttt

SEQ ID NO: 261204 - DNA, 494 bp, Cannabis indica
gcaacataaaatgatttctgatctttattaattagtaaatctgattataatgagttttattttgggcagaaaatcaaacaaataatataataggaatagtaaatcaaacatttttgaagcttcctctctatgaaaatcttcatcatcatctaatctttttcatacttattatgcttgaaatttctcttgttaatggatccagtcaaaaacttttggaaatttaaggctcaagggattttctttacgatagtaaaaactcaaattctttaagcattttcacaaacacgtggcagattatacatatatatattgttagaaattattttaccaggatattagatctactcacaagtatgttgattaacaccctatatatgaactttctaaaacgatgaaataaacacatataaagtttagtaaaccttacattgggtgcaccggaataatatgactccttctgtttagatctctcacccttgtatcctttctgtcgc

SEQ ID NO: 261205 - DNA, 535 bp, Cannabis indica
gagccaatgggcgagcgccacgtggcgctgatgtcagcaggggaagaagaacagggccaaatgggcttttgtccttttgtgctctcttttgggcttcaaaaataccacttttctcttgtttgggccacatttttatcatcctttttttatttatttctttcttttttataaatgctatgttctcaatcaaacacaaacaaaattaaatccaaacaaaatattctcaacacagacgtgaaaatatttattttaaaatctaattaatttgtaattcttttaataaaaataatacatttttttatctttttatttctttttctcaattatgccataaatattaattattatttataaacaaagataaaactaattttaaagaaaatattttcaatataaaaatatattgcattaattttatgaaaatattataaagaattaattttattttgtatttttacactataaaatatgtaatattttggcatttaacatcagtattttggatttacactgatgtgataatcagcgatgatgt

SEQ ID NO: 261206 - DNA, 639 bp, Cannabis indica
attggatcggttattttggattgattactttttaatattaaattatttaatatttatgaaaaaaaatatttttttttcacataattagcaacaaaataaaaagattatagttattttatgtctccaacaacacattgaaataaataaaatagcaaataacaaattcaaaggaagaaaaaaaaattgtatgtattaaaaatacttaattttattttaaattatatatagaaaaaaaaaattatatataagaatagaatatacatttgatctattaagttttgaaatataattgtattatatgtattagacttttaaattactattttctttatattaaaatgttgtttgtatatataatttttaattttattataaatatcagtgaattgaattggattggtttctttacatgtcaatcaacattcaatctgcacaagtacagattttgaatttttcaatccaatccaatccaatccgcacaagtacaaattttgaattgacatgtaaagtaaaccaatccaatccaatccgcacacatgtagatatctgcactttgcggattggattggatcatacggtattgaattagatcgctattttatgtaatactcctaaatgtatactcctaaatgatattag

SEQ ID NO: 261207 - DNA, 1116 bp, Cannabis indica
aaaagagttaagtgttagaatatctgtgaaagcagtaaacacttaaaaagcaatcaagctagtcctaccctgactctctaattcggccctagcaaagttccgaatcttaatactggctgcatcatccccgagatagctgtccgagggacggaaccagctagaagaaagataggccgaaggatccaagggaacgggcaccggaggtccagaacccatccgggaccgacctaaataatctcctaagttggagaaataataatcctttgcatgatccccccaccgggtcgagggcatcctaaacctaaggagacgttcatcgaaccctacaggcctaaggctagcatattcgcgaacagaagggacgtaatgtattgttaaaggggacttaccagagccggaagtgctggcatcaggagcccccgtattcggcacctggacggtaggccttggcctgggagccctcttctcaaccgggctcccaatgcgaaggggtctcccgacagccgcctgggtcctcctctcaaccggactcccaacgcgacggggcctccccgcagccgcctgggccttggtgtaagccttctcctgggccttccggtagagatactctcggtacttctcttctgcaatggcaatgatctcatcccggaaggtcttctccgcggccagaacccttacgttcggctagataaccttagaaaggttggagtcctccaccaactgatgccctaggatcagcttggccttggcccaagatccttcttgtcataagtggcaaaggtcttggcccattggtggaagagctgagtgggcgcggtccgctcatacgaagggatcctaacccattccgtgagaagctccaggtgctccacagctcagaacccagaggagaagaagaagcgatggcgatactccttgacgtgtttttgcttgttgaaagggaccgagccctcattcaaagggtgggcccggaagccgtaaaagccgtccttaagtttgtcccccttcttggggacagaaacgagttcataaaagtacaaaatctctgctagactgggagagccccatccccgggcagagtaaaaaataaataagcctgaaagcaggcggtaagct

SEQ ID NO: 261208 - DNA, 456 bp, Cannabis indica
tagtttagggataaaatattaaggtatttcatgcatattttacttacccagggtcggccctaggtataggcgggctaggctaggcccgtgcctagggcccacactttccgggggcccaaaataaaaaataaaaaatttattaggcttttatttaactaaaatttaagtgtattattagcaacaaatattcataacttagttggttgaggtggatgacataatgtctaaggtcatggattcaaatctcatagcactcttcttttgatattttttttatatatttttgaggcccaaaaattttaattcgtcttgggcccatatattttcagggccgaccttgtacttaccaaatacactaacatacagtttatttttataaaacaaatcgttcaaataatttattttagttaccaaaatctaaaaaaacaaaaattaaaactttaaataaaactaata

SEQ ID NO: 261209 - DNA, 543 bp, Cannabis indica
ctagatatctgaacggaaggagtcatgttattccgctgctaaaataatttccaacaatacttgcattcaaattcaaggtaagattagtataatagttgcatatatgtatacatgtttagcatcaatgtcatttgtcgtcaaaataacatattagggtatcagtgaggtgtacatagagttgcactgaggtaccgatagtgtaagtacctaggttatgaaatggattagcaaaactctagttagataattatgaataattgagaaattatattattatataatttaatatatgagcatttttatgatttatactatgataagaccccgttggtgagccaggggcattttagtaattctgacccgagatgggtaaaataatgaaattaatttactaacgtgcctatggaactatattattatatagtatgactgtgttgtcttttcaggtgtgttctgacaggttggtgcagtatatatagtcacaaccgagtattttcgggccgaacttggtttaggcccgaaatgcaatattggaattgattt

SEQ ID NO: 261210 - DNA, 1005 bp, Cannabis indica
tttttaaaaaaattagaaatactaaaaactaaatatgaataataaaataaaataacagtccccggcaacggcgccaaaaatttgatgcgtgtcgtaatccacaacaaatttaaagattattcgtcactctcatagttcctattaaagaatgtaattttcagtttctaatcaaactattaatcccacaaacaacgctgaagcattcaattatccaaatcttcctattgtatgtaatcaaggcgaagtgttcaataattaactcttttacctaagcagtaaattcacgaagcatgccatttatttaacttataaaacattgagttttatggagatagactaatctaggcaacaaatcaatgaagcatataattcatttaacctaggttatatttttcatcacaaataaaaattgtaatttatcacaaacacttaaaatcctagactattaggtgaatagtaattctaagatgaggtagattaaagtaaaacttaatttagtggccgtctaaacaagattaaaacaataatcatagcattgaacatagaataatagaagcaatttgatatattaaaaactagaaattaacattcaataaagaaactaagaattcctgtcttgagttttgaaataacccttaactaaaagaaaattactctgaataagacattataataaaagtaataatattcaataatagtagaaggagaagaaaagaactagaataaagaatacttcgaagtcgatctccgtctcttccttgctctctctctaatttgtagctttttgaattattaaattcgtagtctaagaggtcatatttatagtattaggaaagatagatgaatcttcttaaaattagggttccatttatagtttcaagatagatgagttctcttagaattaggattctatttatgaaatatctcactaaaagaaaagataaactctgttaggatttataaaacaactcaaaagaaatatataaatcaacagatccaaaacat

SEQ ID NO: 261211 - DNA, 609 bp, Cannabis indica
atacaccctagagaacattttcaaagaaacaaaacatccaccaaacacagaatcaaaatccaccattaaagctccaagtttgagttcaaaactcaaacttggttaaatataactaacatgcaacaaaacctgctctaatccattcttctgaacataattaagctttagaaaacaacaataaacacatacagtagctacagcaagcaaaacctcaaagcatgcaacttttacatacttacaaatcaagaaactcaagaaaacaaagtcaaaagcttacctagagcttaagcactccaaaaccttgaagaatcttgcttggaaagcagaaaattacacccaaaccctagctgttctaaggcgggccgaaaaagagagagagagcttgagagagaaattcttttcttgcttctttccttactatgaatttcttgaaaatgaattaatattctttgtgttatcccaaaattggcactctgacgtggcatcacgaggatagcaacacgtgaactctacttaaagcatctggtcggatcaacatgccgagcaggatgcctcgctggcatgtccataatggaatactcaacgagccgtgcagaatgagcaacactt

SEQ ID NO: 261212 - DNA, 459 bp, Cannabis indica
ttatactggtgttttttagttgttctactgttgttttgagttgttctcttttgtgttctactggtgttttataaaaacacagtatttttgaaaaaaattcgtgtgacggtatttttataaaagttaacctaaattctagtacttttgtaagtttttcaaaataaacacgaccttggaccgggcttatggagttgtggagagcattgctttgtatgggctacaatattaccattgtttttttcgttggggatcttcatttttatggtttttaaggtataagcttgtaaaatatataattcttttttttaaaaaaaaaataattttatggaaaaattaaaaatgaaaagttaaaaaaaatatggagaaaataatataagaccctatgcttaattactctaagaagacctagttacccttatctaattgcatcatattttttaaactttttcttccattttt

SEQ ID NO: 261213 - DNA, 583 bp, Cannabis indica
cttgactcgagattcgggtaacagggcctggaacagtccaatagtcggtgtctaggtctgggacttagactaggaccagaaccaaaacgaagaaccaaacccaaacccagacctagacctgggacacataattagaacctaaacaagaatcgccgaaccaggaccctagaacaagactaggatcgtgactaggacccggtcccggacatagaaccgaacacagacctagtctcaaacccaaacagagactggaaatcgggcccggacacggtcgtgtacccataacggagctgagacccaaacctggacctaaatcaaagacccagactaggatccacatgctggagctagatcaggacggagatcttgacccagacccatacttggacccgcactcgggacccgaacttggacatggacctgaacctagacaaaaattggggtgcagacctggacacaaacccggacacaaactcgcacccgaactcaaacccacacctggaacagtcccacacttgacccggacctggacccaaactcgaaccaagaccaagatcagagccaaggacttagacccagaact

SEQ ID NO: 261214 - DNA, 764 bp, Cannabis indica
atatattacaatacataactaaggattcgaacacaaaatttctaacacacacgcactctattatgaccacttaagctagcctaaatgatgtagttaagaaaatattgatataacagttttgatgctaatgtgacaatcgttaacgcaatcaatgttacattgtagactaaaatagctaatagctaaataatgtagttaagaggttaaaattggtgaaaaataatgctctattaaatgagctactttagctaaaaaaaaatagtttattgtgtttagttacatgtagagaaatactatttaaatattatattaatatattttttttgtagtatatgtgtgtgatattattatatttattaatttaatttttaaaataaataaatatattaaataaataatgtataaatgaaatagagaaaatatagagaagttgatatatgatgtaatataattgtgtaaggtaaaatagaaaaagtgaagttttgatgaaggagaaattttgtcccttaaaactttgaacactactaaattgtgtcatttttattcacaaaataatgattttaaaaaatgtattttttatttttaatttttttttaaaaaaaaaatcagaccttaaaaaatagaaaatatatatctttaattagttaagaaaataaaaaaaaaaaaaaaaaaaaacactataatttgtgattatttatatgttcggaatttaatataaatttttggctaattagcaattttttctcccgaactttgacatatac

SEQ ID NO: 261215 - DNA, 795 bp, Cannabis indica
aatgttatttctgatctgtattattaagtaaatctgattatattgaaatgggttttatatagggcacaaaacccaacacctacatcatgatcaggaagaactctgcgctgcgataaatctagcgttcgaggaacaatgatgcatgtttgccgagtggagggacaaagagatggaagtgttaagggctcatcatacagagattgaaaatcggagtcggcaagctactgtggtgatatgaaaagcctaccaaactgtcgggcaacaacccccgagtgtcatccccctaggtgagacataccacgatccagcgatgaatacttcccagactataaatggtcagccgccaaatccccaatcacaagttctgcttgtgggactagcggtaggtgggcaaaccttgtctagtaattcatcaggagaagtcatacctgatagttccaaccagtctaacggtgccattcaacctgtcaaccaagcaaatcaatcacagagacagccaggcacttctgtattcgataggttggggacgactcatgacctaagaagtgatctgaatagaaggagaggagtagacgatcagatggtcatgacgatagtacagcccggaactcgtgctcaaattctcgctcagaaagatactaacgtgattcaaatcgaccagaatgccgagcaggttagtctagttattcacacacagctagatgaactaaagaatatgttccaaggcatggccagacagagaaacaatgatctcaagtttgaccgagcatgcggaacccctttctctcccgagat

SEQ ID NO: 261216 - DNA, 809 bp, Cannabis indica
actttatgaggactcacatcagtcaaaaaggctaaaggactacatccataaaaaccctacaaagcctagggattagaccatgcatttcctatgatatattcattgggaatgtgtggctttactgataattatagaaagacatgtacctcaattctagggatcaccccacaaaagcactataaataccccccaaactcataaagcaggggtcgagaattctgggtttcataagaactagaagaggaaaaatccacaaagaacattctctgtaataaatactatcataaatacacaaactcgtggactaaggctcattaacgccccaaccacgtaaaaatctctctcttaattccctatagctctcttaactactattattatattggttgccgaaaaccttggtcaacatttatatattattattcttatcatatcttaatttttttttaaaaaaaataaaaaacgttaaggtatatttattgattgatattttatgtatgtatataaataaaatttacgattaattattttttatttaagttttaatattttttttggaatttattttttattttctaaattttttgaatattttatatttttatagaaaaattattaaaataatgataaaatatgaatttaagatttatgtttttttttatagaaaaattattaaaataatagtaaaatatcaatttgtagatttatgctttaataaaatattaaaattgagagaattaaggagagaagagaaaaataattttgaagtgattttaaaatgacatgtcactgtctcatacttcttcttt

SEQ ID NO: 261217 - DNA, 630 bp, Cannabis indica
accgtgaatgaccatctacaacgattgattcaacacaatgactgtaagaaccattattcgaatcctgagtcgactccgtctccgccctcacccccagtcagtcagaaacctcgtacgtttctaggtaaggctcctcccctgactaaaaaggttagtccttctctgtcgtcacctccttcatctgtgtcaaaacgagtcactcgttcttcatcgtgtctacaacctccatcaaaacctgtaggaccccctcgtcctccatctaaggtttctattccttccccaaccagtgaaagagttcaaccaaaacgaaagtcctcccgtgataccacgtatcaaccacctgaaaagaaatccaagatcaaacccattccagtaccctctacagacttatctcccaaatagtcatctagaggctctaaaaaatctaaacttcccaaagcacctatatcaactgtcgacccagcctctgtacaatgctttgttgatgcctctaaagcctctgtttatcaaagatggtttggtagtcgtgagctttggttcgaacaagtggtatcagagccaaatctcaaatttagccatgtgaatgtatccccggatttccaaacaaaaagaaggtgaagcttgctagag

SEQ ID NO: 261218 - DNA, 1089 bp, Cannabis indica
tgaccaaaatacccctaggtggtaaggatactttttggcttaggcaagggcaaattaatcttttgtcatttgagttatttgtcctttagtgattttcaattaagttagttaatctgcaattaattaatgagtgttagataaatattaggacttgtccttttattcaaaaaaaaattaaaaaattagaaaagaagccactttctctttctcttcaatcccatctctcgaacccttgagaaaccaacagcatttgaggatttcttcagctcaattcagggttttctagcaagattttggtgttttaacccaaggtaaacatcatagcttccttctctttatttttcctaagttcaagctaagtttctaggcatgatttttggaattagggttctgtgatgttaagtggtgtttgattttgttttcagaggttattttaatgatatttaagctagtttggaactgtttgggtgtttgttgttgtgtttgagcagagtatgaactttagagctcaaactttgctctcacatggtgatatttgtttgagtggttgtttcttggttttattgcttggattaggtttattttgagttgtttaggcactctaaaagtttttgtgcagtttggggtcattttgtggtgttggtgttatttttggggattcatgtattgaactagtcgatcggttcaatatgacctataggaaccgaaattttagttcatccccaggcagactcccttagaaccggtcttctgattgggaatcgatatatgttggggcattttagggcaccttaaattttcccgtatatacgatatataaggtatttccatgttatccatcgatagggaaagttttagttttgattttaagtcctcgaaaagtgatttagtgtgtcactcatcagtttacaaatattgtgatttaggggcctataaatcgtcgagcaacaattccactcaggttgaccgacacacctggattcagaaacgaggtaagattagtataaatgatatgcatatgtgtttactgttggatatatttttaccaggatctagatttattaccatgtatgtttcattaacatccta

SEQ ID NO: 261219 - DNA, 1466 bp, Cannabis indica
tttaaaattctcccactcaagtgtcagcgaggcttacaactctgtcgggtcagaagctaacattcaaatgagcctcgaagaactctttgtaaataagaaccgtgatcgtcacaagacatgcatcgttgacctcggaaggaaaaatggccccagctcgctattgagatcactggaaccaagcttctgtcgagacatctccagatacaaccattaaagacgtgtttaattcacgatcattttgacccagtaaaagcgatgaaatcacagctatatgattttcaaatcattaaccacatttacactacatgatatgtaattcaaatcccatgattttagggatgattgttgtaaacaaattctggtcaactttgtaattaattgcccattacgtaattataaatagtggcagacaagcttaaaaaagggacggaaatatattatacaagagaggccctaaacaaaagaaacacaatcagaaatctgaataagattgactcgtggactattcagaattttaactgcaaaaccatataaaaaccctgtgttcatatattatttttctatagcttttattttttctgtgtggaattattatcgtgaggctcaaatttagttaacaaaaatctgcgttaacattacccttatggccaaattcatttgggccatctcgaaaacgcaagacaacttgtgggttcgatgggtgaatgccacttacttaaaaggtcaagatttttggctgctcacttttaagaatgatgctagttggtacttcaaaaaacttctaagacttagaagtatcattgacaaagaagagatgctcaaggctagtagaaaaagaaagattcaaggcaaaaaacttctttactcagcttatctcggtttagaaggttcattatgatacaagagtgtggcataaaatggtcattctgaagcatcgattcatatgtttgcaagcagttaacaaccaattactcacaagggaccatctcagcaaggtattatttctcccctttatacactatcctgtttgtcataatgatatcgagacacatagccacctattcgtggagtgccccttcacaaaacgggtgctggttgaaattactaggtggctgggtactacagagtgaccgaagtgtcacattgagtggatggaatggttctcaaagctcgttaggtcgttgcaagacaaagtggttaatgcagtggtctcagcaacgatttatagcatttggatgaataggaaaaactgtgtttttgattgtaattgtgaaatagtgtattatattagtaaaatcattaagaacattgttatacataaatttttgagttgtttagatgagagtaaagacaagcttgaagcttatatatgtaatgtaatttttaactggtagttcctcagtcgatggtgtgtgcagcgactgttggtgtgggggcttttgttggttgtatttgttggttttttg

SEQ ID NO: 261220 - DNA, 1808 bp, Cannabis indica
gtatacataaattttttaactctattttttgcccacaatcttagtttgtacatctctatagtatatagtatcacaaaaaaattaaataaaaaaataaaatccgaaaaaaaaaaaaggagaatagaaaagtatcaaaattagagagagaccatccttattatcaccaatcaatctataatttcttctctatagcccaaaaatctaaatacaaaaacatgtttgacaaaatatcataaaaaaatatattaaatgaaaaatttataatatcaatatatactagatatgtagtgagaatataataaaaaaaaaattattatatataattataaacttacccaaattttctatgaaattaacggttgggaggagcggcggttgcgggtgctgtgcaggggtggctggtgatcggaggtcggcaattgatgatgttttaagatggaattaggaatgagattggtgctattttaaaatgggttagagttttttttatagtagaaaatgaaaaaaaaaatggggaaagaagaagagtaaataggcgtcgagaaggggaagtccctaatgccttgactgtgtcaggtggcaaggtattaggggcgacaattggggcgacattgtcacccctaatagtgtgagcgggaaaattaccgcctaaaagtaacgtttgattttgaacttattaggggggacatgtgtcgcccctaataattttttgttttaaaaaaaaaatattttttagggtcgacaattgaatgtcgcccctaatacccttactattagaggcaattttttgtcgcctcaaatgtttgtcgcccctaaaagttatatttgttgttgtgtctgctatagaaaggatacaagggttagagatttgagtggaaaattcattttattctgctgcaaccaatgtaaggtttcttgaactttacatgtatttaaattccattattttagaaatttatatttaggatgttaaataacatacatagtagtaaatctagatcctggtaacataatccccaaaaggctgcctccatctccaaaatcttgcctcttcctctgaaggttggcccccatctttgaagtcttgtctctacctttgaaggttggccccatctccacaagctgaccaccatctccgaagtctggcctctacttccaaaggttggccttcatctccaaagactagccaccatcttcgaaggttggcctccagctttcgccaagcacaaaggtatgtaccactaattctacccaaacctccagtggctatatacttaggggtcgtcattgacgaccctaaattccaagcgagaccaacaaagccagaaagcctatgctcggaaactctgtcatgagcctaaaagcaatttcatgaccggagaagatcgaggctctaagtaaccaaaacttggaaaccccaaaatctccttctcaaaaggagatcctaccaaatgtagtttcccacgtaaccaccacctggtcgttaccgcacaaatttgggatataactataataagataattagtggacagggagcctccttcaacattcttttcataattaacatctgaaaatatgaggctctaactgttgggttttatgccctaaataaaacccatttcaatataatcagatttacttattaataaagatcagaaataacattttatgtagcatggttcacatgatttatttcatgattatgtatatataatgtatgaattctatttaagtccaaaacatatgaatttgttaaagattatagtgttttcagcagagtggaatataatcttaattatatgttcgaa

SEQ ID NO: 261221 - DNA, 579 bp, Cannabis indica
ggcacaaaacccaacagaaataatgcagccaccatggttggtgttccatgaatcttagtatactaacttctgagattgatcaatttcaagcaatttttaaacttgtttactgtcaagaccttagtcccaacgtcagcagggttatcttatattatgactttctctaaatcaaccatccttcctctatcttctctctaatccagtagagtcttatatttatatgcttgctcttttcatgataaaccgggttcttacaagatggatggacgactggctatctgaaagcacagtcactccccatttgatttgattcaactcaaaaagaactccctaaagccataaagcttccttgaatgcttccctagttgccataaattatgctttcatggtggacagagcaaccatgaactgtaaatggactttccagcttatacagttccagagttttaggaaaatgtaggaagtgattgattttctggtatctctatgcgaggcatagcccgcgtccacgaaccatttcaattctaattctcctttagatttttcataggtcagaccataatcccaagtgcccttcaa

SEQ ID NO: 261222 - DNA, 700 bp, Cannabis indica
gggggctcttaggattagtttgcattaagttagttagttacttaagggttgttttgtttgttacaaagattgtattttagctgtacaattcagttacagctcttcttgaatactgagctatataaactccttccccttttgtaaaatcagattaagaataataaaatcaaatgctctgatattttctctgcttttatctctactctttctcataaagattgtttgtgtcaaggattataagatacgtttaaactttttttttatcaaagatacatttaaactttgcatagaaaaattaattgatgagtatggagatattagtgctcatagtgtacttgctcaagataaccggttgctcaagataactagccatatttgagattgttgggacatatatataagaacttgtgatctcttgctattttattatgctggtgttatggtttggtttttagtgatgatattctttataagtgagtatgactttatattatcatatataaacacatatttttggattcaataatcattaagatcgattatattaatgtaagtatttgataagtaaggttgcatctgctcataatcactacactatctaatgttgaaacatgtataaaattaatgtatattcctctaaaggccattacttgatattagaaattcttacaacaatcatgttagctactcaagcttacac

SEQ ID NO: 261223 - DNA, 596 bp, Cannabis indica
caccccatcaactcagcgtgcccaacaagcaaaaaaaaatggtttaaaatgaaaaaacggtataaataacggtatattcaaaaatttaaaaagtaacgttattattagaattaaatggaaaaaaacacgtcaacatgtaatttttataaattgctatttatttttctacatattttgtttactttcaatttttattttatggacctccgtaaaaccacaagccacaaccttcactaatggttacaagtgttcacttattttaaacactctctctaatttaatgtctgacttaatataaaaaaatattactcatttgttctttaaaggatttattattattattattatattattttttaataaaataatatctttatgaattgaaactatcatattttattattattttttatctttattaatatttagtagataatctaataaaatatatcgtggaacatatagagcgttctatataactgagagtgcaacttcaagttctatggtgaatgcaacaaggaattaataagttagtgaatttacttggtaaattctaggtctgcttattggaagttcagatatataggcccatggtc

SEQ ID NO: 261224 - DNA, 815 bp, Cannabis indica
aaccccaaaccctaagccctaaccctaaatcctaaatgttgaaccctaaagccaaaccaaaaccctaaacccgaaaacctaaaaactaaacctctaaaccctatactctaagcccaaaacgtaaaaccaaaggctcaaagccctaaaccttaaaacctaaaccacaaactcgaaacctaaaccctaagtcctaatcgctaaaccccatatcctaaaccaaacccaaaaccccaaaccataaaccctaaaccctaaaccctaaaccattaacccttaaccgtaaacccttacccctttaccctaaagtctaaacacttaaccataaaccctaaactctaagtcataaacactaaacactaaaccctaagccctaaaccagtaaaacttaaaccctaaacccaaaaccttaaacactaaaccatataccctaaaccgtaaaccctaaatcctaaaacctaaaaaaaccctaaacactataccctatacactaaacccaaaaacgtaaagtctaaaccgtaagccctaaaccctaaacctaaagaataaaccctaaaccctaaactcaaaaccctaaaccataaaccctcaaccctaaaccctgatccctgaaacctaaaccctaaatcctaaaccctaaacccgtaaatcctaaacccaaaacactaaaccctaaaccctaaacactaagcccttaaaccctataccctaaaccttaaaccctaacccctaatccttaaaccttaaaccctaaaccataaaccctaaacccaaaccctagaccctaaacccttaaaatctaaacccaaaaccctgaa

SEQ ID NO: 261225 - DNA, 1368 bp, Cannabis indica
ggaattgattatatcagtggacattgtattaaactcagtaaatgtaattatataattactaagagttcaattccatatttatagtggagtaatcatagaattaataactaagattatttggttgatgagatttaataattaatctaatttattggagcttagtattataggtctatggtcttcggatcgccaccttgcaacactgtcaagggtaggaataaagctatataatgatttttagaaaaatctattttgaattggtaaaatagtaattatttattttgtaataaataatttattttaaatttattatttaaacaatttaggaagaagacaaagtgttggcaggacaaagacatcacccttatctggttaagataatgttagcactcgtcacagtgtaaggacacaattatagccgcctatctgataagatggagctcacgagatttcttgttgtattaattaattaattcaaatgataaatacttatttgaatttgaatttaaaatttagttacagatatttacggtggttgagattttccctcaaaatggttgaaaaactctctccagatggttgagatattctctcaagtggttgaaagattccttcaatatcttattagtatttagtttaaactaaatattttaatttaaaataaatatgtataacagaatcagttggagatatttattcaaacattttaatatttgaaacatttatcattattcagatatatcgtagatctatctatatatatatatgtataattgagaaaacttaaaaagattaaagctttttattattattcactcaaatggaaaagaaaaagttcttgcccatgtgttgatgaaaattcaaacacatatatagattttaattagcccacactaatccttacgtgtggttgtagatctagaagattgcggggtgagtttatcatcaccatcttaaagataaaacttataaaacaattcgaggatgccccaattcacaagaggtaaatatatcctattatcttttgtttcagattaatatatgtacacatagtcgagcaagtgccagatttaatatatgtacacatagtctaattagactatatctatttatgaatagcaaatgtgtttgtgttcttagagttgttcatccctaaaatcacactcatcaccccgatgggaatccgttttagtgtttttattttatattttctaaataatatttctataattttgtaaatttatgtttgtcatttttttaaatatattagtatttttctatttaatactttttaaagttgtgtttggtatataaattgtttaacttgaataaatattaaatgtgtaatatatagtttttatgtaattt

SEQ ID NO: 261226 - DNA, 842 bp, Cannabis indica
tttacccccaatgaaaaaataaactttaaaataacctagggcatttttgtaatttttctaattccattaaaccgacattctaaaatttctaaactagtccggaatattctcaaaataattcttccataaatgtcgtgacatttctaaccaaaatcgccgggcccaataaaaaatattttatttcaaaattgatatcctcagtactcacatatcccaaaataatctccgcaattaataaattacggtatttatttcattgagtaaattctcaataattaccctaagtaagatcataatcttacttcattaccaacataattacatatttaataaaatatgcctatttaaatattatttattttctgggatattacaactatcccctccttataggaatttcgtcctcgaaatttacctgaaaagctcgggatataactctcgcatctgcgactctaactcccaagtcgcttcttcaaccttgctgttccgccacaacactttaactagcggaatagtcttgttccgcagcaccttttctttcctgtccaaaatctgcaccggttgttcttcatatgacaggtcggtctgaagttcaatgtcttcataacttaagacatgagttgtatctgatacatatttccgaagcattgagacatgaaacacgttatgaaccccagataaagcaggaggtagagccaaccgataagctacctgacctactttctcaagaatctcaaatggaccaataaacctgggactcaactttcctttcttcccaaaccttcgaattcctttcattggggatacccgacgaaaacaaaatccccaatctggaattcaac

SEQ ID NO: 261227 - DNA, 999 bp, Cannabis indica
ttgttaaataaatattagttatggccatctctttttttactgtaaattttctcaaagagctagtgagttggtttttaaatggttgtgatttaaagcttggaccttatccttcactagctgaattacttgtgtaggtgttaaaagaacagatatgttggctaaaattattaatataataaccgcataactagacatgaaaattagcagaatattattgatttaattaataatttattattatttgtgcattaggaaaaaaataagccctattgtcataaaaaggcattagagttataatttctcaattataaaaattttattaaatttcagttgtgttgtgcatgtcctatatgaattttagtatttttcacgctttatgcccagtaatagtggaaatcgaggttctggccaattatgccactcaaatatgatttagtatcttagaattagcgggacaagatttatgggtagttactagttagaatatcgggattacgcgggttattacccaatttagaggctcaactgctctgttcagccactcattaagatttttctgccaattaatttggcccaaccagtttgttacctcataaatcacctttctaggaaaagcacgtttaaaaagagaaatgaatatgagactctaaagttaactcacaaataggacatgataaagactccacattaataaacctggtaaggagatcacaagttaagacatgttcgttaaccgcctgccataaaataaaacgatgcttcgggatctttaacttatgctagagtaccttgtggtaattcacattctcttcgaaaataaggaggaagtagaattttttaactttaaacttccttgagctaccagcacccaacaactcatgcttgtcatcaatatttctcaaattgatgagttttctaaagtattagcttttgtccaaaccaagagaaaacaacaaaaaatctcaattcttcatataaatgttattaatctatcggacc

SEQ ID NO: 261228 - DNA, 677 bp, Cannabis indica
gactctactttgtcgtttaggtcggccaaaggaaaaagacttgtaatagtattttataaataattttgggatcgcgacttttgtaactatcattttgtaaagtttaaattattacaagttttattttcattccgtttatgatcaaagtttaatttctgcgctatttttattagtaatcccgattaggggattaggatttcctaagtatcttgggtagcgtgcctaattatataaggcgttacaaacgaactcccacataaagtgggggaagaacgcttctgaaggacggtgagctgtcatgagtaacgtccttccatggacgcttataagagtcactcgcggccactgagaaaggatcaatttcagtaaattaaatacttcttacttatttttcactctctcattatctctaaaactacatacttatttccgcagtcaagataggtggtaatttagtttgatcatttattctcttctttttattacattgttaacaatcttgatgacttgaccgtcggagtcccttcgaccggcaccatcttggtgtcccaaggtttcccaattactctcttctttattctacaggttgtcggtgcccgcatacgatcatcttcgattgattatggattttagcatctacatgtcctttccagggtattggcaaagtttaccagtat

SEQ ID NO: 261229 - DNA, 676 bp, Cannabis indica
cacgatgaatgtttgcaacttcagttgggtccacatcatggggaacatattcaacatcatccaactgtgaaagttgaacaactaactcagtttcagctgaattgttttcctacataaagggcgtatccccatcagtgtcagggaagtcccagacatttcgcgggatgtactcgttcacaatagccagtctttaccattcttaagatcaggaatgtaatatatcaattttgcttgagatgcaaggatgaacggttcatttttgtaccactctcagttgacacaaatgctagtaagaacaccatcactgtccattttactcccattagtgtcaaactacttacacataaataagagaacaatgtagtcctttaaataagtgaacaccataattttttcaagtgtgccatataagtattgagaggcaacaatgcttacttgaccaaaattttgtaccgttcactatgcacccaagataaaaataaattgttggaatcgctgggttagcaatagcatacaaatcatctgacactgtaccatggttgctcaaccgtagttcattaatttacaattcaggaaaaatatttgttattaagaaaagttcaagagttagtgtgaacattataagtattgagaggcaacaatgcttacttgagttttaaaccattcagagaactca

SEQ ID NO: 261230 - DNA, 508 bp, Cannabis indica
gagatatttttttttcttgattccaaaagtgttctatcaccgaagaggataatgccacttatgttcttagacagaaagtcacagtacgttgtcgtagtgggagggtttcaaggaacttaccctgttatgacttggaagacacttgtgatgaaatccattgttagtttaaacaagtaagggattgtaagaataagaaattaagaagcaaatccaagagaactatggtcaaaacgattcatgtggagttacaaaagttcttttattacaaggaaaagaaaggaaattttgaaaataagtctattcaattgacttaacaaagcttcctgctcctggtattataggtttgagatcatctaaagatagtggaaccatcttatatcgaataagatgatagaacactttggaatcaagaaaatatctcctctattttactactttattttcaaacttattcatattcttagaaaagtagtatttgttgaaacaaacactttcttatctaatgact

SEQ ID NO: 261231 - DNA, 575 bp, Cannabis indica
aagtttccatcaacttgttgagcaaaatatttcaccacagatactcgtagaagaattcaaggttgttaactattcttatcacaaaaggaggaactacagtcttcttctccttactagtgagtacgcccataacaaacaaggccatcccccacttatagacatcatcaacttttgtgcaactctcgaaaactttacacagttggccaaaactgatggatggatcatcgttgaagtactccacaatcaaccggttcgaacttcttttctcttcaatctcttgttcagtaggtccaggtaacaagttcaacaccgtcaccaacgcaaacttgacccgactgaatttgcacctcttcttcgcaaaataaaagtgtacctctctggcttctcagatttgatcttgtgcatgaataactgatggatcaatgctctccaaaagtttagtggttttctcttgaagaattgtttgaaagggaattccttcaccttatcccataaatggaattccttagattttgccttaattcttggatagtaataactctgccacgccaagtgacacagcctgggtaatgctc

SEQ ID NO: 261232 - DNA, 543 bp, Cannabis indica
aacatggtatcagagcgggagtttcctcctctggttgcaaacatggcaacgattggaaacaactcagctaacaatcaagcagatccagctgtccatggagctcaacctaattccaaatcaagaaccaaccagaattctcaagatcctgtgtttttcaatcagagcattttgattcgtctaaatgatcacaactttcttctttgaaagcaacaagttcttgctgctatcaaggggaatcgattgctttgatatatcaaagaccctcatccagctgaatttctgaccaatgaagatcgagctgctaacagaatcaatcctggatatgtcgattgggaaattcaagatcaacttcttgtttcctggttgctatcatccatgactgaaagtctcttaacaagaatgcttggttgcaacacctcacatcagatctggagagcattggaaaaacacttcacattacaagtcccttccaaaattctggaatttcgaactaagttgcagaacttaaagaaaggctcattatctctcaatgattatcttctc

SEQ ID NO: 261233 - DNA, 855 bp, Cannabis indica
aatataaatatttttattattcattaattggtctctgttgctgtgcaacttacataaattgaaatctacaagcctatattacacaaaattagcttctagatgtcaagtggctacccctgcttggctagtaaagcagagaccactattgaagaacagtgggagaccatgcccaaaagggtcgtgggtgctagcactttttctactctaatgttgagtagatagaaccgctaatttcgagtagagttttgtaagctggttactgatagtatttgcaaaggtgctctccattccagtatcttggtaggagaatgagatccatgttctcgttgtaccaacccagcttgtaggctcccttactatttatctaggttggcctgcagctttaggttggcctgttttcttctttctacttcgtctagggactctgccagtagggtgctatttgtttgtttattggtcataggttgttcttttgtgagacggtggcactagctttacaggcaacattgccttgtattcataagctagagcgaatggagtttccctagtggttgtcttctcagtagtcttctgcgaccataggacctctaggagtagttcaggtcaattgccttttacttcctcaaggcgcttctttagggtatacttgagggttttgttgacagcatctacctgcccattttcttgaggatgggccatggcagagaagctcttgatgatgccatgtttgttgcaaaaaatcagtgaacatgtcactgtcaaattgcttgccgtggtttgacacaatcttctggggaaggtcgaacttgcatatgatgttcttgactacaaagtcaaggaccttcttggaggtga

SEQ ID NO: 261234 - DNA, 799 bp, Cannabis indica
ggttcgggtccgagtccaagtccgggtctgggtccgtgtcggagattggtgttgacctcaaattctttgtaaatattataatacaagctaatacgaactatttattatgtattaaataatacaacatacattgtattaataaatttggtcgtaataattaatacagtacattacttaatccaaacatagtgttatttattattaatacaatacgacccttatacgacgtaccaaacgagcccttagaggcttgaataggcactctgaaaggtttgatttaatttggggtcgaattgagttgtttaaaaggtttttggggattcctatactgaaccagtcgaccggttcagtatggacctgtaggaatcagaatttcgattcatcccttggcagaccccacataaccagttttccggttgggaaccggtctaccggttggggcattttagggcaccctaaatttttctatttttatgatatttagggtattgccatattatccattgatagggaaacttttagttttgattttaagtccccgaaaagtcatttagtgtgtcactcatcaattttacgaatattgtggcttagggtcttgtaaatcgttgagcaactattcccctcaggttgaccgacacacttgaatttggaaatgaagtaagattagtatgatgatatgcctatgtgattacatgtttaccgtgcatgtttataaagcctattagattacattgatagcggtttcaatatacttagagttgtattggataccgataaatgtatgtttggctcaagtact

SEQ ID NO: 261235 - DNA, 531 bp, Cannabis indica
aagtatgtagaaactcctctctctgaatcatctgatgatacacgcccgccgagctctgaagaaggttcaccgattaatgataaatttgaccgtatgtttcttgcagatgcttgttttaattgtatcacaatgaacgctacaattaaatatgtatttgtgtactttgaatcttatacattttatcaaaataaattagcttgtcatgttctttaattcacctccctggtgctaacatgcgaagaagagaacgtatgagaactttgatgttttgttaaaacataaaaaagttgggtttatcataggagttatcccaaacactgcagtcttttgcaatgccttttcatcttgtaaacctctgttatagtatctgcatctcgtcattgttgtttacatgtgaagcttgagactcaagggtcttcaaagatcgactctgaagtttgtgtgtgatcaggttcacttatgaaagagttgaacggagttcagttcaatttgagctcaagccttgtataactgcccaatgagtacttaata

SEQ ID NO: 261236 - DNA, 1694 bp, Cannabis indica
ctttcataaatctttcttgaatagagattttaaaatttatcaatcaaataagaaaataaatgatcatatgaaccaaataacacattaaacaagtaatgaaattaaatctatttgtttattgataattgaatagaaacgattacattgaaatacagttttatttagggcacaaagtccaacagtggattcatcaaaaataacatctttagagatgtataacctgccagatgaatcaaggcacttgtaacatttatggtttagactatatccaatgaaggtggaggggaagatctaaactcaagcttgtgcttgatgtatggtctaacgtttggaaaacatgtacaactaaataatttaagactggactaatttggtgtaatgttaaataagattttagtaggacatttgacggaaagaataggtgtggggagtctattgtgaaaatagatagttttcctaaattcctcatcccaatattttaagggtaaattggcttgagcaagaagggttagacaattttccactatgtggctatgtttactttcagcaaggctattttgttcatgagtttttggaaaaggttttctattgataatatcagcttcttctagtgagtttttaaaggacctatattcccctccctaatctgattgaaacactttgattttggtacctagttgtaactcaacctcagccttaaaaaatgtgaaatgtcttaatgccattaaatttatttttaagtcagtatagccatgtgaatctagagtaagcaccaataaagtggatgtaatatttgtaatctttgtgagatgtagtaaaggatggaccccataaatcagaatgaaaaaattgaagaggagcagtgtaacaagattcagatgccgttggaaatggaaatttatgaaactagatgttatacccgaaattcgaatggaggatacgtgtcaagataaagggaatgtgaatcggtgccatatctttttatggaataactcattgattgtgtaagtactagagtatatttgcaacccgctgactgtaaagtcttaggcgaggaatcaatgtacgaactggtacttagagcattaacgagaaaccatatgtggctaaaagagaatagcgaggcaccagagaagagtaacacatacctcagcttgcaattagcagactaaatataaaagtcaaatcggctcggaatacaagaatgcgatacgaccatctcgctacgaggaaacttcctatagtttcatccaactaacggaagcgagactcacaaccctggcaagttagcagatttctttatatctgcgatcaacgcaagacacatcttgtcgatctcagaaagaagagtggttccagcttgcaattgggatcactacaatcaagtttctgtcgagacatctccagaatcaataatcaaagacgtatttaatacatgatatttttgaccaagtaaaagtgggaaaatcacagctgtatgcctgtcaaaatcatgcactgggtttacattttgtaatatgtaatttgatcccatgatttaagggataataaatgtaattacattttggttagccttgtaattaactgccagtacgcaattataaatagtggtacacaatctcagaaaagggaggacaaaactcttatgcgagaggccctaaaaaaatatactcagaaatctgaataagattgac

SEQ ID NO: 261237 - DNA, 941 bp, Cannabis indica
ttgtataccttatcgttgcgggttgctaaagtagtcgaggcatagaggaacacctcatcagtattaatgccttggctttttacatcccagatgaattttacccattcccacatgtgaatatcaatgtcgacaatgggaaagattttccacagagaagaccgctacaaatgaaaagccaaattacaggagaaaaaaagatgttctatggtttcctcctcaaccccacagataggacacatcttattctcaatatggaatttcttattgagaatcgctcgaaccagaagagcgttagacaggatcactaccaaaggaccttatgacgttctagaattttactattacaagcttattacagggagagggggcaacctcacaattagggactctctgtaaagcttgaatcagataagcagacttgcaagaaagcgcccactttttttttagtccaaaccaacttatctttgtcctgacttgaaggttccccactttttaaaatgacaaacacagtctctttgagatattactagacaccacatgtcctttttaaaatatctataataggaattgtctattagaattagaatggtcaatgattcaattttaaagataaaagtatactgtatatatgttgggtgtggctgaaaagagacaaggacccatgtcatcttttcttttactttttatttaaggaaaaaaaaagtaatttagactaagaaacttgattaatttaatactttaaaagtaaaatatgaggttatagtaggtaatcttttgagttgttaattatttcattatttttttataagaaaatatgttaaattttatgtggatgaccaaaaaataatattttaaagaaaaattttattatatatacttttttaatgaaaaatttagctttactaaccattaaatttcgttaccaacaatagtaacaaatc

SEQ ID NO: 261238 - DNA, 542 bp, Cannabis indica
ggacttgggaaacagaactatgaccgagacctagtacccgacccaaacccaaacttgaacctaggacccagctcgtgacccggcaccagaaatggaacagactgggacccgagatcgggatctagatctggacccagggctcggacaaaacccgtagtcggtgtttggatttaggacccagccctggacccgaacccacacccggacccaaacccagtcccaaacacaaaagtggacacgaacccgtaccctgtgacccaaaattggaaccaaaacagaaagttgaccgggacttgaacaaggactttgacttggaatcataactgaaattggagctagatccagaaccgtaaccggaccaggacccagactccaaatcagacctagaccagaattgggagccggacccggatcccaacccaaacccggactcgggttcgaacccgaaactgaactcaaacccaaacatggaaccagactaggaacacaaaacaagggtcgggacctagaaccgcaccccagtctcgatcccgaacccaaac

SEQ ID NO: 261239 - DNA, 581 bp, Cannabis indica
gatcgtaggtcaatctttaaaaataccgtctttccttaaagctgatcaaacaaatcgtcgattctgggtaacatatacttgttcttgatcatcaacttttttaattcccaatagttaatacacattctgagggaaccatctttctttttcacaaacagaaccggagttccccagggcaatacactgggtcgggtaaacccaatatcaagcatcccctgaagctgtaacttaagctccttgagttcttccggagccattctatctggagctttggaaacaggttcggctccaggtgccaaatcaatcactaagtcaatttctcgttgtagcgataatctcggtaactcctcaagaaaaatgtcgagaaaatctttaacagccctgactacctcaggcctaaatgtttcgggtctactggagtcaatcaccactactaaaaatcctacacatccactgtgtagtagatccctagcccttagcacagaaataacttggatccgagacccctgatgctatccaacataaaaaaatggatcttcaccttctggctgaaaaatcaccattttccgcttacaatctat

SEQ ID NO: 261240 - DNA, 1347 bp, Cannabis indica
ggccatttcggttttggtcgtacgcggtggaggggggctggagctttggtcgtacgcggtggagagggggttggggcttcggtcgtacgaggtggagagggcttcgggtccttcgtcggaggtatttgatgaagccgtggtctgcttctttgggcgtttgggcgagagattgggttcggtttgagagaagtagggggacgaagagagacagagagtgtacttttgaaatggagggggggtaaaattggggttttaggaaaatgtatcccactttacaaattatggtcggggtccaattttattgtttattaagtatataatttcaaatttcccttagagaaaataagactcttaagcatacaacatcagctcactaatatcttatagttaagttagaaacctttaaattttgtttttattattatataggatgtaattataattttataattattattaaagcttttttttgtctttcaaataagattacgacgaatattaaaaaataagaacaataaattaagacaataaatgaaacataaatattaagacaataaattaagataaaagaaaatcaaataaaaaaatagaaacataaatattaagaacaataaattgaaagaatttggaaaagaaataagaacaataaaggtgacacagaattttgtaagcattctttttcttatatatatatatttttatttttattgatttcccatattgatattattattattattaataatttaattgaaataattaattttatttttactttataattcctaatggtttttagttctattattcaaaatttgataataataaagcttgtatttaaaacataatatattttaattaagacattaataaaataaaaatactgttagacaatcataaaataatttcaacataaaacacttagaaattcaaatgatctagaggtttaacatccacattaacaatagacagaaacaaataaccaaaaagcccaatattcaactataaaacacatagccaaaaaacccaatattcaacgaaaatggcatagacgcccaaccaccacgcaaacacttgtttgtactaaaaacttggaccaaaaccaacttagaagaaataaatctttcaaaccacacaaaatgaaagatagccaaaaggcaaaaatcaatactaaatacatgtgaactaatttttttcatcatcaacaatttgaaattttctctttctactttcaccagacattcccatcttaaacttccaaatctttcaaatcctttaatatgttaataataaaaaagaaaattatgtgttgaactaacttccctataatttttttaataataaata

SEQ ID NO: 261241 - DNA, 814 bp, Cannabis indica
ttgtatcactttttaataacgtagaaaaaaactaacataaaatttagtatacgtgcctcgcacgtaatttttttactagtatagtaggaaatatatgtatatatatgttatatatatatatgaatcgattatccattaccataaaataaataattaattaaatggtcaaatataataatatataatctgaagttatgagcttgcaaaaccttatatatataccccatgcaattaaaaaccctagcttgcatatatttttccttccctatattaaatatccaaaacatatactaaatgaagtcttccaagccaatatttttgagtctaatcctcttcttcatcatcatattcatcaatgattttaacaatgccctaccccaatcatcatcaatgatgaaaaataataagcttattaagccatgtaaaagtctagtgttttatttccatgacattatatacaatggagaaaatgccaagaatgcaacctcagccattgttggagctccagcttggggtaacaaaaccctattagctgggaaaaaccattttggggacttggtagtattcgatgaccccattacactcgacaacaatcttcactcggccccagttggccgagctcaagggttttacttgtacgacaagaaagatgtgttcacagcttggttagggttttcctttgtgttcaactcgactgagcacaagggtagccttaacttcgctggagctgatcctcttatgaacaaaactagggatgtttcggttgttggtgggactggagattttttcatgtcaagagggattgctactttga

SEQ ID NO: 261242 - DNA, 768 bp, Cannabis indica
tttttgttttagttttattttagtagtgttttcttatgttttttttacaggattgggaatgcaagtacatccgatcaaaatactaccattctagagtttttttatgcttgtttttatgttctttattttttttttgttgttgttttagtagtgttttcttataggattgaaaatccaagtacatccgatcggaatactaccattccagagttataaactctggttattactctgttattaaagatattaaaaaaattcttactgaaacccaattaaatatgttttcaaaacctgcattggaagttgtttttgattgcgtagtagctttaaactttcttcagtgtttccttgtcttggtatgcctgaccttttccaacttttaggtggtgtttgtctgttattagcttcgcgttgttgatgtcgatttttggatctagttttttactgttgtttttaagtttttctactattttttaagcaaccagcttcgcatagtcaactatgtcgaatttgtcgttttcaaattctcttgtttttgactctcctccttctaattggtgttccaatgtgtatgattatgtttttgctgtgttgttttcaagtattgttgtgttgttttgagcattgtcacattctcttgaaataattatgttctttttcccattgtccattgctctttatgagaactggtatagattccatgtcctgtcatttttcacaatatttcatttacgtggccttttttttcatattaaaacaacagtaaaa
